United States Patent Application Publication US 2011/0183924 A1 - sequence listing, part 199

SEQ ID NO: 469577 - DNA, 5580 bp, Homo sapiens
gccaccgaggtggctgtgtgtgtggcacatggccctgaggtccctggaaagcagccacctacagatacgggtgatgctacatgcagaaagagagcaggggacctccaggaagagcctgaggaactcgacagaaaccatggggatgatgagatgtgagaaagaagtcacaagaggaacagtccaggttttggggagacaaatcctgggagaacagcccaagtacggtcggcatgtgcgcatctatttcccacagacgctgtgcgtggcgtctacacacaggataggctctgacatcaaggtggcctgtgtggactccctcctggaaagggctctgcagcatccctcggcatgctgccttccagacactggggatggccggcagcagcagctggagcagctgagagcaacagagagggagcaccaaacacgcaggggaggatggcgcagtggccatgacgtgccctctgcagagagccggtgtcaggcaactgcactttatgacagcctgatcagtgtggacgttgacccggcccatagccaacagcccacctgtggggagcttccactggcagaaggcggtagcagcttggggagacactcggggctccaccacattggtagcatgggtcatgggaaagggaagaaggagcatggacaccttgtcacaaagctcagttcctcttgattagaacccagccctctggaggcagcagaaaccaccaacaatcttctattttaaaatctattgttagaaacttcaggcatccaccaatgtgctcaaacctggctctgcacctgcaaaattgttttgcacagtcctgaataaatgaggctagagttctttccctggcacgtccatggggccctctcaacccagaaatcgtccagtgacaacagtcactgtccccactgtcatgccctgtttaatgaaggtccttccagtgtggtcttccttttgcttccttcctcctctgcaagctaaagaccataaagactcagggtctttcggagttaattcaagcaccaaacaccattgtagatgaaacagacaataatgtgaaaataaataacagtcacctgtcaccttgtcttccagagataaccactgctcatattttcagtgtctatccccccgagtctttttcctgtgcacacacacttttgtattttgacagcaagtaaagaaccagggagaggtggcctcccaggccattcagaaatgcaatttaaacaactaggcatggaattgaggaaggcgcccttccaggcaggctgcccatgggcaaggggctgggggcacaggtggcatctttgcaccaactaggaaagggcgcccttccctggggtagaagcagccctgcgccaggatgctcagctcggcaagcaggtggctgtgagggaaaacggggtagctttgaggtctggggagagagcctgctgccaatcttccccagaggacagacagtggaggccactgtgtttaaagaggcctggacacaacatccaaacatttttcttaaaagttgtgataaaatacacataatgtaaaacttacaaccttaacccttttaagcgtgcagctcggtggcattaggcacattcacatcgttgtgcagccatcaccgccatcatctccagagctctatcttgcaccactggaactctgctcccattaaacaatgacttcccatccctctcccttccaggccctggcaaacagcagtctactttcagtgtgggtaaatttgactagtctagggtccctatataaacgaaatcatacaatatttgtctttttgtggctggcttatttcacttagcataatgtcctcagatttcatccatgtagtagcatctgccaggatttccttcctttttaagaaacgacatcccaccgtgtgcatgtcccgcattctgttgattcattcatcctttgatgggcacttgggttacttctcctgctctgctattggaaataatgctgctgaaaacatgggtgtgcaaatggccaatgtcagcttttggaagcccacaaggcatgcctgagtatggactcccacactggtgcggaaggaaggcagggatgccatgctggggctaggtggtgagctggggacagaaatgtctgggtgaggatgggacacagaagaggagtgatgtgacctggcctctggaggcttatgctggccagccctgccctgacccagctcatctgcaaagaggatccagccataatctcatggcaattttgctggccttggctttggcctggggttcagtctggggtcttgttactcttaactaaggtgtccttggttccagtttacacctgctgtaacagcacctgctctccctctcaccaccatccctgccttttggtctcccccacccagcctgtcctccgagcgtcccattaggtaaggtcagagtggagtcaacagtcagagcctcagagatcaggctcagggttccatcctcgaccagccgtgctctgaaaccctggacactgcacatcttggcagccttgcccatgagatggggatgataaccacacccacttaatgtgtattttgtgatcgttgaatgtgaaagaccacaggcaagaaagttgctgtgtgtaagagatctaggctgaaaatgtaagcgtggatgagaagaagcaggaaacgccaaacttcagggtgaaaaccaggcttcacacagaatagttagtgaacatgcaaagcacatgaaaatcaccagctatttattcagagcagtaataagcaaaagtgctggtgccaccccatgacaataatgacgatggctaacaactatggaatcctctaaatgtcacacgtacatcatgaccgtcaatttacaaatgagagaactggagtgcagaattgaatgttgaaggtcgtaagtgcaagagctgggggtagaatccaggcagttgatagaggcttgtgctttggaactccatgcttcgtggcctcttgacttgtggagaatgctgggggcctgccctgggtaacaggaacctgtgtgcctgtgctacagggactgctgtccccagaacttctcatcctgtctcccttacagccctttctgagagaccagcactcccctctccttggggttgcagctcacagcactggagttctctggcccagagatagtggtggacaggaaatggcccaacagagtgggttttctgaaagactaatgcttccttgggctggattccccatgaaaatagactctagtccctggtctcagaatcacttgggtacacttcagatataaacctaaataacatggcctattaattaaacgggtcctacatcttataggttgagtccatgcctgtcccctaccttggaggcttttcgccaaaccactgttgactgatgctgatgaccagcactttgggacatcttcaacacccccagctgcttgtccttggtccccagtgacagttgagcctcatgtctgctgtttctacttgcccaggtgcatgcatcctcagccccagtgacctcaacgctgaggcccactgaatctcacctgcccatggagccctccctacctgcccacctgcccacctgcgcatggagcccatctacctgtggagcccaacccacttagccatgtagcttacctgcccatggagcccacatacccatggagcctgccccatctgtccatggagcaccccccaacctgctcatggagcccaccccctgcccatgaagcacccccccacctccccatggagcaccccccacttccccatggagcacccctcacctccccacggaatgccctccacctgcccatggagtaccccccacctccccatggagcaacccccctgcccatggatctcacctgcccatgaagcaccccccacctccctatggagcaacccccctgcccatggatctcacctgcccatggagcaccccccaccctcccatggagcaacccccctgaccatggatctcacctgcccatggagcccacccccctgcccatggagcaccctctacctgcccatggagcaccctccacctccccatggagcaccccccaccccgcccatggatctcacctgcccatggagcccaccctacctatccatagagtcccctccacccacctgcccatggagccctctgctgggtgttgttgggcaagtgcatgacctgatcatgtgggcaggagctcccccagtccccaacttttagcactattccctggaccacccttctcatcagctccaggtgcccaaagggtgctcaggcaggcaccttacagggtcaaacagtggttgcctccactcctgaacacagaaaaactgacatggaaaacacacagagaagcacagggcactccacacagatcaggggccagtgtgtaagggttcgtaaggatttcctttttttaggcaatgaggcaagtgtggaggacggagagagagaggagatgagcatctctgaaggcgctctctgaggaggatgcagggaaacatttgctagcatgggcgtgttcaggagagaggctttctatgcaggggagctgctcagcctctagggtttgctcattaggccgccttgagggtccttgtctttctttttctttaattggccaccggttggctggggcagaagagatgaaagacctggaattttttccccagtcaattctgtgatcctttgcttttgttgccttttatcatcttgaaagcaaggcactaggtaaaagtgtgcttgtatggaatgtacatttcctctgttttctctccctcagctcatgcactgtttatctttgcttgcctgcctgtagcatcatccatgctttctctggctcacctattcctcatgcaacagatgcgtatagtgcacctccttctactgtggtctgccagcagcaacattcattgccctgaagcatattagcattcccctgaagactgtcctgaagactgtccagtcaccctgctctcaaggctttccttacttccccattttctaagacctctggtttaagcagctcaactcctctgacacttgttcagaatggtcaactgagaaaattcccagagagtgggggcatgtttaggactctgtctactcctgctcaactcagagagagctcagttgattttcccagaaaacaaagcagaagtttaaatatgcccaaagttatattttacaacgtgctactaaaatgctacgccttcttctcttttccagactcaatgatagaatagtcgtttactttggggcatcaaatggctctttatttctccctgactgcattcttctcatcccagccctctatgcccttctccacgtggagaatttcgggaaggggaggggaggtggtttctgaacatgggtaagactccaaacaaattctgctaatctcagggtttggtgaaactctttgctcagaaactttatggccagtgggaattgatggtttgtgtttgctcttcaaataaagaaaccttgacggtagagaagggcattttctgtggagctgctgacttttgaaatcttgagccctcttccttatcagcctgtttattac

SEQ ID NO: 469578 - DNA, 1630 bp, Homo sapiens
tcgtcaccctccgaaggaaggctcgtgagtctgcagggtggaagcgagcctgcccgggctacagcagtgaagccagccctgggcgcgtccaggtcctcgcctacgtggcccgccgctccccaccaagcagcaggactcagagctaggactgagccgcctcttcaatgactaagttagtagaaaagggaaagtggaccctctcctactccctccactcacagacaggaatgtgcgctccagagaaagatcagcacagctagtattctgcgccacagtgacaggagcccactgcactgcacctggggccagctctccccagcagctcctgctccatcacagcgccgtcccttcctcgcctgagccctgggttgcccgcggagttcaggcacctctcccagcccggcccacggcagaggggaaggaaggctgccggacagcagggtgctcccgcctgaaaatacggtggaggggttgagaaatgacgagtgatgggagcacaagggtggggcagagccccctacacgccctctgtggctctgccagcaggcatcgactggataaaatgtaaataccttagtccttaccattgcatcctggactcatttccagggcagaaggctccaggggccccatggttccatacggaagcagaagccggtctctgccccactcaggactctacgttcattccctgtcccacaccagggaatcagtctgaccagcctgacaagctcagccacctaaccctgttccctccctgccagggcaccctctgcacccaaaagacagctcagaaaggcaggccagaactgcaaaatcacttctgtttgtttctgacaggaatggaagcccatttcttttttggggggcagagtacagagtcttgctatgtcacccaggctgaagtgcagtgctgatggtctcacctcctgcttcatggagttaacagctgggaacactcaagctttcctccccagatccaggaatataacccagccccacacccccaggctttcctcctttctcctggagaaatgatgtggattttctcccatcaagcctggttttcctacctgattcctaatcatttcactttcccagggacccagagtcctgattgcttctgttaaaagaaaagctttagacaaattaaatgtaacagagtttaattggacaaaggaccattcatgaattgggcatcctctagaaccagaagaggttgagagagactgcagggcagccacatggctggataacatttatgggtaggaaaaggagtgtatagaaataggaactgaggtacagaaacagctggattggtcacagctgggtgtttgccttatttgaacagctttaaacagttggtcacctgtgcttggaccaagctcatctgctgtgattgattgagacttggctacttgttacaagagtaggatgcaggctgtttactcatccagtgaggttaccgttcatcatgtactagaagcctttaggttgcttggcctaaagctatgtatggaggcagcttagagtgaaactgaatgctaccctcttcatcctcccatagctttccctcctgttgcatttaggcatgacccagtgttgagcatctagagtccctcaagtcctg

SEQ ID NO: 469579 - DNA, 689 bp, Homo sapiens
tcttttcagtatagatctttgtcatgcaggtgtcacagttaagctggcaacaatggcatctccttctgaagaagctggcaacaatggcatctcctcagacagcccttctggacgactgccccctctgctaccctgggtcccccttagtctctcctggtatatacctacctaacagagttgttgtcagactgagcaagcctagatgcagggaactcagggcagtgcagctacggtggatgccgccttccctggaatatcactcccacccttcaattcattccgccattgttttcagtggtgtctcctgcctcttatcctttctcacggaattcgctgtgttgggatgccctccactaacctggctgacttctttatccttcaagacctttgagatgcaccttaaatgccagtcctctgcggaagctgacctcagagctccagtctgcattcctccctgcatgctgcgtgtacctctttttgacaaaggttacctacatcctcatgttgactatcgttagttctttggatagatttttttttaagttctgaatataagttttctggatttatcttttcctttaataactaaataaaattacatgctgccctcccttccagtcagggaagtcggtgcctatcttggtgctttgaggctttcctgggcaaaagcgtttccagggcagtaagag

SEQ ID NO: 469580 - DNA, 651 bp, Homo sapiens
tgcagtggatgaggtgggattttcttgcccagacacagcgagggtgtcaagacctgagaagataacttcctagcatccctggccacagtgcattccaaccctgagctggcagtgcactaccgatctgagcgacactgcccaaatcaggatgcccagaaaccagtccatgagttcagcctctcttctcattgcacctttggaaatgctggtcaacacctccctgctggccttggccttcagggcactggtgcccatctcctggtgctctgatgcgtctgatattcaggctaagagagggtctcaggattccaccaagaggcacagtcaacagcttctccccatgctgttgcaaatgcctgtgtccagccttacccgagcatccctgaatggtccagccggctttcagctgtcatcttttgcccatgacctcgatgaatctgccatgacagctgtcagtcaaagttggtgcaaggaatcagccagggatcagtcatcctcccctttggatgtagggcccaggcctagagcagccagcaaaaggcctttgagaatatttgcaatgacatcaacaggaaagaactccagaagcagattcctgaggttttactgaggtcctattagattataaacaggtttcaaaattgaaatgat

SEQ ID NO: 469581 - DNA, 586 bp, Homo sapiens
aggaaaaccagagacctttgttcacttgtttatctgctgaccttccctccactattgtcctatgaccctgccaaatccccctcttgtcatctgggctgtgatggggggaagccaggggctagaaggggcaagactccaaatacatattaggataacgtgtggtaaatgtcttccttcatatgagggcaaaactcgggctgtctatgtcccaccagtctattcccgtgaccatttgaaaaggaatggatggactttgacagcaacactaagttctgccctggaaggcggcaggacgagagaagaaaaacgccatgaagaaaccttgtgtcctacacatcacagcactgatcccaccttaggtgtggagtttgggatagtgcctgaaaagcgcatcgccaagatcagcagcatgcctttctcaacattcagcgcagcctctcccacctcctcctggggtctgatcctgagtttcagaaataactcatgtttccgtgcaacctgccaccgtgtgtcctgagtaagctgttaccgacaatacatgctaacgcttgaattatttaaacccgtgtaaaacagattcaaggtt

SEQ ID NO: 469582 - DNA, 613 bp, Homo sapiens
tggcagttaatgcgatgggcttcccggtgggatctggtactgagcagtcgtcgcaggtcacctgatacgggacagcagctgctctggactggcgctcgctctcaccgtctctctctctctattgccctcgggtgggaggagccagctgagcggctggcagtctcaggcttcgaaattctaccactttcacttagcctggtgtcttcaaagctgaaccagtttttgatctcagtcagaattctgataccagattggtgtagacagagcttgggctttggactcatgcatctgaatcctgtctccaccttttctggttgtatgactttggacaatttacttactgtctcttggacctcagtttccccagaactaaggcaagtcttatactatttgtctcataaagttgctgggaggattaagtgggacagcagacataaagcccttgacccatttaagtataaagccatgccagggcttcccagtggtgaggatcccggggacctgagcccaagctccctcatccctcaggagggcagcgggcagggtaggggcatccctgctccagggctgtgtgtgccagagtagagaacatggggaggtcctggtgctttac

SEQ ID NO: 469583 - DNA, 572 bp, Homo sapiens
ttgaaggagggtgtttagggaggcaggaagcagggctggccccatgggtgagggcagccctgcgctgcacaggcctcctccaggagcatgcacggggcactggctctacaccaggagcatgcacggggtactggctctacaccaggagcgtgcacggggcactggttctacaccgggcagaggagtagggacagaggagtggctgttttggagagcggctgctggaagggagctggggagtctgatttttcagccttggccccctcgaaggagtggcgtcagcccccgggctcctgaagaggacagggcgcttctgagctctgagcctgcggttcctggcgggtggattttacacaaatgtcagaggcccctgcgctgtaaaaagcagggcgcccttctgcgggtctgtggggaaacaccgccctctggtggccagatgatgaattctatcagcctttccttcacatacttttatacctgtcattagggtttgtaatttcgtgtcctatttatgtagtgcctgctatgaacacgcacgccaggcattgttctaactgccttcgttacatact

SEQ ID NO: 469584 - DNA, 869 bp, Homo sapiens
ctcatcccaacccactgggtgaagttacgctaagaaggtgagcatgaaagacaagtcaacgaaagagtcccaagtacgtccatggtcagccttgcgaagagagggagttggagcctctacagaaaatctaattacgctatttcaaacagcagaagatagcgtttcagtttctgatgccccttataactgtgtaatagattgtgaagaaaaggcagggacagaatctgggaaaggaacagaaagttcacattgtaaatatgtagcagagtctgtaatggcttggtcaacacaaaatgttgactacaatcaattacaggagagatatcagaatctcaaggaagtttggaagaaaaatgtgcattcctttgtgcttgccacagcatctctaaccctcgagggggaagccatcaaggaagaaatgaaatgtgagcagtggcatgaacatttggttcgagagtttctgggatattcttggctgaaaactggtgtaactgatgacttacagataatccagctctctgactactctgacattctggcccaatggcctcctcatggtccactccagcataagccatttgatcatttagcattccacaggctttccaaaatactttccaggcctctgcactgtgcctcagttaaaaccccagttgctttgtttgacatgccaccatttgtcctgctcccaagagctgcatgtgatagctcccctctccctgttaacacagtggaggaacaattatcttcctggtgaaaattgttgggactgtcttcccttctctgtttgcaggcagcaccaagttgggacgaatgaaataagaacgtgagggagaacagcccgggctgttcgctttcacaaacccctc

SEQ ID NO: 469585 - DNA, 665 bp, Homo sapiens
cctttccgagcacctgaccacatcaagtcctaaaacggtcctttaagttcagctttattccccttttacaaacaaggaagcagaaatatgagagtttcacgtatgcaaagcaagcgcattctaggagaatgtttgaagctacatgtcccggtacctgccttgctggcctggtcccaagcctcttctatgatgatgcccctcaacacttccttgctagcttctgcgtgtgtctgtgaactcttctggctacttgtggtcaacttttggcccctgacacttccctcccccactctgaacacaagcccacagcaccacttgctcatgggagcctgtgtggaaggaaagcctgtggctgcctctgacccagttggtcatcttgggacgggtgctatggtcccagggggctttgtggagcaggtcaccgccatcatcatcatcacagaggacttttgtgacatgaagctgaagtccacagctcaatggggacctgtgatgagctctggagacccatgaagagggaaaagcaaattaaagattaaagccattatgagatactagtactcactcaccaggatgtctaaataaaaatcatggacaataagtgctggcaaggatatggagcaataggaagcctcataaattgctgatgggaatgtattaaaatg

SEQ ID NO: 469586 - DNA, 860 bp, Homo sapiens
gcggtctaggctctgctgcccactcccggagccactgggagtcgggaactgggccagtggggcaggccagccgtgccagagaggccctcagacccactctgacctgctgcagtcagcagaggtaggaggagggtacagcagctgcaaaagtttctgagtggtgctgatgctactggtcccagggccactgcgtagccgactcaggtcagtacttcccacttcacatcatcgggacccagcatcaggccaaggccaaacatcgtgtcttctgtcccccgaagctcaatcctcttggttaataccagcttggacaataaacaccaggagctcctgtgccccaccctccactggtgtttaccaagctccaggcaccaaatgtgagcaaggactcagtaaatttacaaacagcgtaatgctgttggcagaaagctggcttcccttctgccatttgctgctaccatttcatggatactggccaggtggcagctgcggggctcagcactggaccatgttctctcgtccaataccagtgataaccctgagagatgaaaatggtgccctgtggcatgggctggctagtgggtgcccgagcctctatttgttgttgctgttttaatctttttaattgacaagtaaaaaattgtatatatttagtgtgtacaacatgttgttttgaaatatgtatacatcatgaaatgactaaagagagctaatgaacatgcattttaattttttattgtgagaacacaaaatctactctcagtgattcaatacattgctattagctctagtcactgtgctgtacaataggtctcttgaacttattcctccaaagttgaactgaaacattgtaccctttg

SEQ ID NO: 469587 - DNA, 575 bp, Homo sapiens
cgtgggggcaggtcttttccatgctgttctccaaggttaccagattatcggatgcagttggtcctgagactggcatctcagatccactgtgaagatcacatttgtgcttttcattatgatgagtctaagggtcgagaaactgttcaaaatattacagagtttaaaaggctaagtttcaaagctcctcattcctcaacaccaagtcaggatcgcactccttttactgaacgagcgcaaagcagttgcagcaatagctgcaataacctacaagttgggacacaaagaggacagacagaggaggaagcatccaagagcttagatgtccctggagcacttcgtgggaatgaatgtacattcagaggtctgaaataccacagcagctgcttagaaccattgatgtccatgaaatccatccatgataaatccagggccttgggaggatttctgcatgaatttggaggccaaacaaggattttctaatatcaaaggaacacaccaagtgagtcagagactctctggtgtttgtgaaaaagcaaaaacacgtgtagggtcctgccggtccgccatctgcagga

SEQ ID NO: 469588 - DNA, 570 bp, Homo sapiens
ctctctctctgcatcatccatgggctgccaggaaacagaagaagccaatgtcaaggcttggggtgatgactcacgatattactaaaaccacccagtccatcaaccaggagaaaagctcaatcatccaaaatgaagacaggacaagagggcacattaggaatgccacagaaaagcagataccaccacagaaagagcagaattggccacagctccagggtatctgccccagtactatggtgaacaggagtgctgcagctctggagaggcctgataccctaattcctccaggaatccccaccctctttcatccacagagaagtgggtggaccctgtggccgcaaatggactttgcaggacatgtcacagacctgatgggccagggtggtcatctgtcctatggagactcaatcaagatatctgtctgccttaagacatctggtgcttccatcttgttcactggctgtacttgtcccttaaatgaatcatccaagccactcattagggaaaccagttctttatggatccaggaggagcctcaggctctctacccttgagggctggattgctgtg

SEQ ID NO: 469589 - DNA, 575 bp, Homo sapiens
actgttagaaggaaaactaacacaccgaaagcaatagtatcaatatcaataaaaaggatgaccaaacaaaaactccatctgaaggtcaccaacagaagaccaaagaatgcctcttctcctccaaaggatcacaactcctcgccagcaagagagcaaaactggatggagaatgagtttgacaaattgactgaagtaggcttcagaaggtgggtaataagaaactcctctgagctaaaggagcatgttctaacccaaggcaaggaagctaagaaccttgataaaaggttagaggaattgataactagaataaccaatttacagaagaacataaatgacccaatggagctgaaaaacacagcaagagaacttcgtgaagcatacacaagtatccgtagccgaatcaatcaagcagaagaaaggatatcagagactaaagatcaacttaatgaaataaagcgtgaagacaagattagagaaaaaagagtgaaaaggaaggaacaatgcctccaagaaatatgggactatgtgaaaagaccaaaccgatgtttgattggtgtacctgatgagtgacgggg

SEQ ID NO: 469590 - DNA, 549 bp, Homo sapiens
ctttcatctcctgctctacattggccaggccttttcttccccaatgctggaaaatgtcttcattcaatctcacttcccgatttatatgatgaaaaacccccctgtaatgcacagcagagagctaagggatgctccacagaagcacctgtccttgagaggcctcaactggtgggcagaggcaggggagcagggggccttgcagttagaacatgggaagccggacttgctagcgatctggaatctcaccatccgagggagcttcagctttggggcctctgccatgctcttacgtgctgctcttttaagtagttggggcacccaccactacctccggaccttcccacagtccagcaatgaagaggtaatgctggccatgggggcctccttaccatataacactcttactctaggtcctgttgctgtccacacaggaagctatttgtttgttccagcgggtttgtgatctcgctgacttcaagaatgaagctgcggaccttcgcggatcctgctgattggtgcattttataatcctcttgctagctacagagc

SEQ ID NO: 469591 - DNA, 575 bp, Homo sapiens
cgaagcaaagactagcatctcaggactgagtgactctacattctgaattgctgagctctcgtggcggtgatgataaaaagcaaatgccttgtgaaaatcaatgtggaataggaaatgagcaaggcagcagctatgcttaccctaaagttcgagaagtcgtgcagcgctcaacaggaggccatcacttaatctgcaactcctcttatgcatccatgaaagtatcacaagagagcgtaaaacaggaacttaaacaggactcagcaggcctgaggctgcgactcctccttaagtccgtatgtcacccaactgatcaagaaagctggtctctccatcagcaaattcaaggtggtctggagagaaaggaagcccacaggcaaaggcttggccacttcacactgcagggtgtcttaaagtgtactgcacctcttacgttggatgttaagtcctcaaatataaagaattttaagactagctattctgtttacctgaagatacctttatatggcgtctaaattctgatttcaggctctaataatgtccttgaaaaccaaaaatttttaaagggaagaagccat

SEQ ID NO: 469592 - DNA, 651 bp, Homo sapiens
tgccctcctccaacaccatcaaagtcccagagttacaggtgatggctctcctccatacagtgtctcagggacccaagtccttccagtttgtggcatcaccatctgagggtagtggttcccagccaggggtgactttgccccctggggcacatttggcaatgtctggaggatggcccctacgacaaagtatttttttggtccaaaatgtcattggtgctaaggttgagaaacgctgcccaagggatgtgtcatcttctggagcaagaacttctggtgaacatctagtcagtcatcctgtcatggtggcactggtaaaatttgaaccatatatttgcctgcttgctcacgacattgctgaagcatcaatggggctaataaaactgagaagaaataaacacagccctaacctcctccttaggctccagattcttctgtccagtgtcctattaaatacaccgttaagtgtcaaaaacaacacagccaaatagaactttttatcttcccaccaaaattctattcctctcatctttcctctctcagcaaatgacaacattagtctaatctattccctactttcctacaccctcattcagttgtttagcaagacttcctagctctacctgcaacatatgtccctgcaagtatgaccat

SEQ ID NO: 469593 - DNA, 835 bp, Homo sapiens
gagcaccgattatgtgcctgctgcttactcccgggcatacaacatggcacaaagtgtagtagggcctcatcaaggcattcactcagccttcctgtccttgtcctggaaccttttaaggcctcatcatctgcttttaacagatctttctgaccttttgcccacacaaaaccttttcttccagcctagcccattcaccatgataacccacctggtgtctttcttgtcaccccaacttctggatagactatccttattcggagcccatctctcctgtgaagctaacacaatggagagaactggcagctgctgtgcctgccctgacctcctgtggcctcactcgccgtggacaagtcctgagagagctggaacctgtggacattctttccctgtccgtgctctgctgtggatgatgacaggggcagctcaggtgtttgctggggcttccagagcatttgacaccattaagaagacggagagtatactgaatgtctaaacttaaagggggagaggctttggggatcatttaataaaacgaccttgttttgcagatatggaaactgagaaccagagaaactgatttacccaaaaccacaaggtgacgtagtagcagagtcaaatcttgtccactgttaagtttagcctaaagctccctccttatatattttaagttcatcctaaaggtttcttcatacatagtgagctgtaacctaatggatgtgtgaacagactgtaacttgctgttgtgccaatcatcaagttttggccagtcaaggccgtccaactgtttaaatggtgttcaataagggtatgggcttaatttgcaaaaggtgagttg

SEQ ID NO: 469594 - DNA, 909 bp, Homo sapiens
cccatggggacccatggagcatctcaatcacatgtagaagggaattgttggagcatttgggctgatgatggaggacttgcgaggagggttcaaggagctgaacactcacgagtatgcacaccccatttcacacatccgagctgatcgctcgccaccacttgggcctagaggtccagtcacactggcagcgatgtgcatccttgggaggatgatctctggagagaggcctccacagacctgtggtggttcacggaagttttgcaaaggagacgagagccttgaggatggggagccttgtggctggccatcagaagttgacgatgaccagttaagaacaatcatcaaagctgatcctcttacaaccacacgagaagttgctgaagaactcaaggttgactgttctatggtcattcgtcatttgaaacaaattggaaaggtgaatgagcttgataagtgggtgcttcatgagctgagaaaaaatttaaaaaattcatcatttgaagtgtcatcttctcttattctacacaacaacaatgaaccatttctggatccgattgcgaggtgtgatgaaaacgttggtcaacagaaagggcccaattcttctccaccacaacatccaaccacatgtcgcacaaccaacgcttcaaaagttgaacaaagggatgtgaagttttgcctcgtctgccatattcacctgacctcttgccaatcgactattacttcttcaaacatctcaacaacgttttgcagagaaaatgtttccacaaccagcaggatgcagaaaatgctttccaagagtttgttgaatcctgaagcatgggtttttatgctacaagaataaacaaacttatttctcattggcaaaaatgtgttgattttaatagttcctattttgattaataaaaatgc

SEQ ID NO: 469595 - DNA, 747 bp, Homo sapiens
cagacagctcctcactgccctcgggcgctgatgcggggtctgggcgcaggatgcgcttgagctgagtcggaaggacaacttggagaccccactcaaaccaggatggagggaggcttttccaggcttggggtacagggtattttcagacctccagaaagaattcgagaaggaggcagacgttggttgtgcgacatgtggttggatgttgtggtggagaagaattgggccctttctgttgaccaacgctggctgcaggtgctgcagttttctgtgcatctcatggatttgctgaggatacttctcagatgtaatggtttcccagggattcagaaagctgtagtggatcagaccagcagcagaccactaaacagtgaccatgacctttttttggtgcaagtttggctttgggaagtgccttggagcttcttctcagtccaaccactgagctgttcattgccagttttcagtcgttgtataaaatccacttttcatcacacctcgcaatcggatccagaaatggttcattgttgttgtgtagaataagagaagatgacacttcaaatgatgaattttttaaattttttctcagctcatgaagcacccacttatcaagctcattcacctttccaatttgtttcaaatgacgaatgaccatagaacagtcaaccttgagttcttcagcaacttctcgtgtggttgtaagaggatcagctttgatgattgttcttaactggtcatcgtcaactt

SEQ ID NO: 469596 - DNA, 947 bp, Homo sapiens
gtgtctgtatgaagtgttttgttttgttctggcatctctctgtgtgccatctgattgttctgaaacttttaagggatgtggaggaaatactggtacctgtgcacaatgtcaccagatgtgggctcttcaggaatcacatttcattggctatgcaattttaagaaagcaacagatgaagaaggtactcatccgacaaatggtaataacgaaacatatgctaccatcatgtctaccatcatgaggatgtttcaagaagccaagagtcataaatatttcgatctggaaactgagtggtcagctggccccacccatcaccttatggatgaggacaatgaggtgtcaaagaagagattaagaagacatccatatcacgaattggcccctgtggccacaaagcatagatgcattcccttggtgtgcatctggagcaccaaaatgaaactgagactccaggacaacgcagaattcacacagcatgtggctgtcattcaaaggcaaaactgctttagaaaactagggaaggaattccagctttaaacggaatgctttactcttttggaaagctccaaaatgaaaattccgcccctcaaaatgtaaatgcatgcacttttacaaatagtataatcatgcaaaactactcagctgcttcagatgtttttggcaagctggagtacaagttgacaggaagtacttgatgtgtatgtcaatctcataaaatttacaattaaaaaagtagtttcgagtgcccaagtttgttccaaatatactaaaaagtctgccaatcactgagtcaagtattcatttctaaattcaaacctaaatgaattaaaataagataatattaaaattccagctccttagttctctagccatatttccagtgttctgtagccacatgtggccagggggacagtactggacagcatagccacgagcctgtatgcctc

SEQ ID NO: 469597 - DNA, 686 bp, Homo sapiens
agaagagcaggtttctcagcaacatgggacccgccccatccctacccacgggacctgccaacctctgcagccccactaaccctttggttaccctgtgcccagtttctcctgcctcctatggcttgggctgtggcctgccacaaaaggctcctctcaaggaagaggatatgcgtccttctgttcttccccaccgaccccgccacgtctacaggttctggccctcactgctccagggctccttctttatcgtgccctttaagtggagcatatcaagaactatgcctggagaacttgaatcattagagctccttcggcacactgtccagacgtttcctcccttgcctgtgctggttcaggctgaggctgtggagtcagccctgagggaggaggggtgtgaggaagagaacggccgggagacttctgctgaggttgctgatgtcatgacaaggacccaactcactgctgctggctttgaagatggaggatggggccaccagccaaggaatgcaggtggcctctagaagctggaaaagaaaaggaaatggattctccccggagcctccagaaggaatgaagatctgctgacaccttgattttagtccaggaatatatggtaagcacagcagagactgtgatttattactgtaatataacaaatttatgtctttaaaaaaccaacaatgttc

SEQ ID NO: 469598 - DNA, 919 bp, Homo sapiens
cagccctgcccccttctctgtcctcatggaactgaagtcaactataagctgttattttactcagagagctctctccagccacctcccgcctctacaaacccagttctcctgtcccggactccaactgtgtaggccccaggacttcagagggacccggctgagcctcatgtttagaactttctgctctcatgctttctaccgtggtggttttcagtgggggatggggcagcaatttctcctcgcaggggatgtttgccaatgtctggagacatttttggtttcacagcagcagttgaaggtgggagtggtattggcatccagtgggcagacagagatcagggatgctactaaacatcctacaacgcacacagcaacccccacaacaaagaatcagccagccccaaatgtccacagtgccgaggttgagacaccctgttctactacagcaaactgtgtttttatcctttcagacaaatgcttaggtctatattgttagtgcaaagctaagcttcacagaagttataatcctctatttgtgacatcataattagttgccactggagaagacgatcgtgtcacaaaaggattaggacctaagtcttggagtccagccactatgctgtggggaagcaaagaaagctgtggagaggccacgtggggaggaatgccatccttagcatgggctgagctcccaggcagcacccatctccagacatgcgagtgaacaggacttccggcaattccagccccagccactgagtcacttccagtttctcagtgtttccaggggaggcctcagacactatggagcaaagaaaatctgacccagctgtgccctgtccaaattcctgacccatagagaatacaagagagaataaaacgatgttgtttaaaccattaaattttgaagaaatttgtt

SEQ ID NO: 469599 - DNA, 534 bp, Homo sapiens
agcagtctactgtttgaattagggaaatgcaaagagtcagccattggggatagccggcggagaggagctgtggctctgcagaaactgtgttaatggaagtctggggacaaattgtggaagtttcgaacagttcaactagcagaggacactttgaagcccacttaaaagctaagatcactcctcacacccccaactgccgcagggacttagaaggtcctccttctccctctcaggctaaggttcatctggctgactccttttctcagtggtactctgtgggtttctcaaaggcttccctgggcctcttggacagggcctcacagaagggggtagcagtgtttgccccgtgtgggcctcagatcactggtattaggatcgtcagtggcttttttcacctgcagattcccagccccacccacccaggacttacaaatgagaatctgaattttcacaaggacttccccctccaaatgattctgatgccagtagagtttgagcaacaatgaaccacacgacaataaatccccttcagtc

SEQ ID NO: 469600 - DNA, 666 bp, Homo sapiens
agctccactcactatctggattgtgaacctgagaactgcacgactttcctggaaggtgtccccttcctccctcacggctccatgtgcgtccctccggaagctgtgtgctcagtcaaaggggacgaccatccccaacagaggaggactggtcttcgcttaaatgtcacttcatcaaagaggccttccctgaccctctctcaatccaaatggcattctctcctgtccccatacgtctctgtcacagtgcttatcacagtttttcacggtgtgtctgaggactgcccgtgcattgcctggccccccagcccatgtgtgagtgtggaggaaacaggaaccctggctcctgctgtcagtgcccagcagagtgcttatggcaaagcaggggctcaggattttttggatgaaggagtgaattgtccatatctgtgtttcgtaaattttgacttcccctgtctcagacctctagacctagacacagatttaaagagctcatgtgatgaggtcaggcccatctagataaaatctctttatcttaaagtccactgacttgggatcttaattacatcttcaaaatctcttcacagcaatgcctagattattgtttggtttactaagtgggagaaagtgtgtgtacacttggggttaggtatattgagagctatcttc

SEQ ID NO: 469601 - DNA, 507 bp, Homo sapiens
tccctggaatagtataattacagtctagtgcatagagcggtatggatgagggggatgtgtacattcacagaggagaacacaagggccctagggccaataaatatttaccttttattccaaactggagttactgtttggtgtgtttgataaagacaaccttctttactcactatgagatttccttggtccccggcttttcatacccgttaatggctttatggccatttcctgaaattcttgaactctcctacaagctgtttgttcatggccaggaaaaccctaccaccaaacagccgtttttattaattttctggttgaaaatgttttatgagtgcaatggttttcagacctgcttgatcatcagaaataactgtggaggtgtggaaagttactcaaaattgctttctcaaacatttggtgaatcatcaaagcagaaatggcttctccttcttcggtgacactcatttcccaaatttgccataggcatacatatgcctcactccatgc

SEQ ID NO: 469602 - DNA, 1626 bp, Homo sapiens
actgactggcactccctaattctgctcctcggatttctctgaaccacctggggccgcgacgaaccacctggggccgcgacgccgtaagagttgggacgataggaccagtagaagcaggaggaacaacacaggaagcgcgcccggagaggcggccagtcgctgggttccgtccgcggtgctccagggctctcctggctcttcctccattcactcttctcgaccctgtggccggggagcgcttgcagccagctccgccgccgtccttcttggctcgcgccgtcccctagccgtcctcacgccgtccccttacttagggtcccctttccgcacccgcgccatcccctcagcgtccctcacggttccctcaccgcccgcgcccgttcgaaaatgcccagagccaccgctctcgtcacggtccgcttcaggcctccattggccagcacacgtcacgtgcggcgtgtggcggctgacattggcgggcgggcgcgctgagggcagcgccggggacgcggcctcagcaggggcgccccgccacggggagcagcccaggcgctcgccccaggacgttgtccggcgggctgggctgggacccctctgcctccagggcgcgtcgggagcagcagggatcggtgccgcgccgtgagggtgcgcagaggctgccctcgggcccgctacccacagaccctccgcggggcagcgtctccgggccggccgcgccctggtccgccgaccgcagacgacttgtgacacggacggcgcgtcctgctgaccccagccggcgccgagggcttggaatctcgagcgggaaaagagagtgggacgtccggcttcggggtaggaaccttcgttgcgccagcgacaaaaaagaattaaatatgggtgatgttgagaagggcaagaagatttttaagacaggtcaggccgttggattctcttacacagacgccaataaaaacaaaggcatcacctggggagaggatacactgatggagtatttggagaatcccaagaagtacatccctggaacaaaaatgatctttgctggcattaagaagaaggcagaaagaaaaatgatagcttatctcaaaaaaagctactactccacttctaattctacttctcttgctgtttacactacatgtacagatacttcctccactgaagtcttgaacctctccaagtcatccatgagggctggaatcagcttcttcctaactcctgttaatgttggtattttgacctcctcccatgaattgcaaatgtccttcatttgtgattcataaaggagagttcctgttactctccatccttgccactttgatattgctagtttttttaaaaaatccattctaatagatgtgtaatggtacgtattatggttttagtttgcacatcccctatactgagcatcttttcatatacttagttactatctacatgttttcagcaaggtgtctgttcagatcttgtgcctatgttttttagtagaaattttaaaatatagtatcaaagttttatttataatttaaaaataattataaagttcaaacaatacagaaatgtataaagggaataaaataggatatacccttcctctttgctccacacctaaatttctgaaaatga

SEQ ID NO: 469603 - DNA, 884 bp, Homo sapiens
gttacccatggctgcttttggactacaaggcagtgttgagttgttgcaacacacactccatgacacaggatggcccacaagcctaacgtgctccactatctggacctttatgggaaaaatttgctgacctctgactccacacagcagccagtcatcttttcaaaatgcaatggtgatggtgacagtggtgatggtggtggtgatggtaatggtggtggtagtggtggtgttgatggtggtagtagtactaccatcatggtagtagtgatgatggtattggtggtggtagtggtgatgttggtggtgatagtgatggtaaagttggtgttggtggttgtagtgatgatggtattggtggtagtaggggtgttgatggtggtgatggtgatgataatggtggtgttggtggtggtagtgatggtggttgtggtggtggtggtagtgatgacagtattggtggtggtgggaatggtgatggtggtggtgatagtgatggtaatggtggtggtggtggaaacaccccctgacagcccttgtcacccaccaggctcagcccagggccattcccgggtgctcctaggacaccctgtgcatggctctgtggttgcacttgcagctttaaattatgcttttctcttcatgtatgcatcttccccaccagactgtgaacttgtcatggtcaagaagagttgtccttgacgtttacctttctctcatccccaacatgctgtctgcccatcctgttggctttacctccaagacagctccagaatctggctgctgctcccctcctccttgccacaccctcctccagacctctgctgccatccctgaccaagacagtggcaagaaagcctggactccctgcttccaccccagcctcc

SEQ ID NO: 469604 - DNA, 1036 bp, Homo sapiens
agcccctccctgtcctcctgctcccttgtcaccctcctttgaagaaccctgaaaaatagaacccccccccgccacggggagtggggaggctcaggcatggcgggctgcaggtcccgagccctgcccggcagggaggcagctaaggccctgcgagaaatctaccgcagcgccgccgctggcccgggtgctaagcccctcattccccggggccggcagggctggccggccgctccgagtgcggggcccggcaagcccacactcacccggaactccagctggcccggcaagcgccgcgcgcagcctggttcccgctcgcgcctctcccttcacacctccctgcaagctgaaggagccggctccggccttggccagcccagaaaggggctcccacagtgcagcggtgggctgaagggctcctcaagtgccgccaaagtgggaatccaggcagaggaggcgccgagagcgaacgagggctgcaaggactgccagcacgctgtcacctctcaataccgtctgtttatatactttgaaacggtttatataacatgaaatttccatccttcaaaaactctgaaaacccttgcacactgttggtgaaactgtaaaatgttgcgactgctatggaaaacagtatggcagttcctaaaaacattaaaaatggaatcaccacatggccgagcagctccacttctggatatctgtccaaaagcactgaaagcagaatctcaagagatagttacacatcgtgtgcaaatatgcacatgttcatatcagctctattcacaatagcctagaggctgaagcaacccacatgtccatcaacagatgaatagataacaaaaatgtagtgtatacatacaagggaaactttaaaaaggaagtaaatcctgtcacgtggtaccacatggaagaactttaaggacattatgctaagtgaaataagtcagtcacaaaaggacaaatactgtgtgattccacttatacgaggtaccaagagtagggatattcatacagacagaaagtagaatggtggtta

SEQ ID NO: 469605 - DNA, 809 bp, Homo sapiens
tgccctctgccctcctctccagtgtggcactgcctgaaggcctgggggtggtggggtgtcctggttcacccttggctgcagccgaagctgcctggggcaggttgtgccaccaagaaagaggccagcagctgtgagcagcgatggggactgaggggagggaaagaagaaatgatacccagtcactcgattaatgacagagggtgtacccacacaaaccaatggaatagcctactgcacacctaagctgtgtggtgtagcctatcgctccgaggccacaaacctgtacagcatcaacagtggagagccacctcctcgctgtggacacaaccgccagcggtcaatccgcttccctcaacaccgtcatgtccacacagggacctgggctgctggattcctaatcagtgacactgagcttttatataacatcaaagagggatttgtgtcatcagggaagtgggggacggcaggagggatgtggcccagtacgcagatgaagacaggtgatcatccgctgggccacacgtggcagggatatgggcagagtgagcttggctggccccaggctccaaagctgcccagcccccgctgaagaaatgttattagaatatggaaatgtgacattcagcactaatcagtttgacatatgaatatatctatacacatatttctccctgaaattggcctaaatactctttcttggaaccaaatgagaagcaaacaacctttacaactaaacattaaaccataagatgaacatcttagttgtctacctagaaattgtacagtatgacaagtgtaaagaaactgct

SEQ ID NO: 469606 - DNA, 515 bp, Homo sapiens
gaccctggcaccctggaaggtcttccatgccggctctccccctgctccttccctggaggttatgtttctggagcgcagctctgactgtgtggatttccagctgcgaaacactccagggcttctcattatccagcaagcaaactctgtcctctctctttctgcttaggggccttccttgctccacccccagtaagaatgtggggctgtggagcaggaggataaagtctgaacttggacctgttgttctcagctattcgaagctttctcaagtggaaaatagactgactttgggtccatcagagggcagaacaaatgctggagagcagatgctagaattccgtcttaaaaccatgaatccttacagcggcctgcgtggcctgcgccatctgtcccagccacgccctccttggccccatctccccctttctcgccctgactctttggcatcctggcctttccgtctcactgggatgcttccctaagagactcgtgtggtttgctgccctgtatcctcc

SEQ ID NO: 469607 - DNA, 536 bp, Homo sapiens
cggtgatcattccacaagctgaaatggcttcaaaatcacctttatgagtaataagtttattccaggaatgtggcaaaatgcaagtctgataccagaacgagaccttctccgaaaaaaacaaaaacaaaaacaaaaacaaaaaccaaaaaagcacttgggcagcagccgaattagaaaattagatctcctcatgtggaagagggtcagtgtgattcctaaagcagaaagggctaacatcagtgatgtgaagtcgtcagcctgtggttctgagggaatgggccacggtcctggaggatccccatgcctgcgcccagcccgactgggcaagatgatccactcctcaccacccctaggtacaagaagagctcctcgcctcctggaggacagtcaaaccacaaaaacatgccttttaagaagtataagcacaaatccctctttgatgttatataaaagctcagtgtcactgattaggaatccagcagcccaggtccctgtgtggacatgacggtgttgagggaagcggattgaccgctggc

SEQ ID NO: 469608 - DNA, 528 bp, Homo sapiens
ttaagatcttcacagcagcccagaaatctggtcgctgagggctgtctctgggggaggttggagtctgtggttcttgggaagctgtcccgcatggaattctactttggggaagacagtcgcggcctgtggagggaaatgttaaacagtcccgggccgcagcctatgggtcccttgctcactgcgggccagggcggcccggaccctggggacagtgcgcgggtggcactgacgagacgagacgggccgtggaccgtttccctcgggggagcgtggcgaggaaacggcgcagacctgagtctgagcctgggttggctgggccgctgcgcagggcgctggcacacctgggaacaagtgcgctccgcaaatcgcggcgggaggccccggagggacgccggggaaccacagcgcctgctgctggcgccacaaaacccaggctggccgagcgtagaaagagacgctttctgtgggctttatcgtctgcacggtcctatccattagaagggagtctcctcaccaggaacccgtaac

SEQ ID NO: 469609 - DNA, 816 bp, Homo sapiens
cacttcctaaaactagaggctccgtggttggtcgtctgacatttttggcaagatgaccacagaaatgaagtgtgcccttctcagtgcatcacaccaaggggtgcatgataccatagtgactttgttaagcacaccttggctgtttggttacggggcatcttcccagtttctctactataaagctaacaacttggggaaatactctgagattatgcaaagcctgtctcctcacaatttccccctgggttttagcatccatcagttgctcttgcccacagcatttttcctgggggctttgcccacggctgcttttctgttgctctctttccttctgtgtctgctcaccggaccactccttctcagctgcctctgtctccatgtgggctcactatgggcttgtagacaacgaaatcccaggacttttactgataaaatatctaacatttgtaaatgcacagtttacaaactgctctcacttacactatctcatttgatttcctcacatgaacagctgcccagaaaagcctctgcattctgggacccctgcaatgggcatttttcatccagcctcagtggaacatccaacactgtcctcgctgaatcatcttgttaattgggtgccagcccaactagttgagtcatttactgtattaacttggcgtcactggaaaatgaagtacatggactttctctgtcattattcaagtcattggtaaaaatattgaacaggacagagctaaaaacctgtaaatttttattttcaataacactttactattaactggactacccaaagagataaagaaaacgagtagt

SEQ ID NO: 469610 - DNA, 676 bp, Homo sapiens
aggaaaattgatactcctcacccccgattcaatagagctattttcactggctgatttagaatacagatgtgcattccattgtcccccctcaccagccgctcaggtcttccaagaacagtgttttctccagggtgggcccaggggctgtgcagtcattaccacaatcaaatcaagaacatttctgtcaccccgaaagtttccctgtgctccttgtcaattctccttcactgtcaggcccaggcaatcactgacctgcttttgggcactatcacctttttggaacctcatgagcgggatggctgggtgaaggatatgaactctgttaagggttttgatgcatattgccaaaccactttccaaaaagcccgtgatgattcctccccgatcggcagctcacaggcgttaacatctgagctttttctgactcaattcctgttaaatgtctataactgcgggggagtcttccagttctacagatgcatggaatctgcgttgtgtggtgaggagaggcagctgatggacccaccctgcctggaagaacagcaccgtggggaagcgcaaagggctgggcgccagtgacccctccacagactattttggaagaaatatgggtccaaatgaactgccctgtgacaactgaagtgccagcttctaggacagcctcaaaagggaaatc

SEQ ID NO: 469611 - DNA, 585 bp, Homo sapiens
tcgaaatcagatgcttggaagaactcagaaatcaagagttgcagagggtggagccaagatggccgaataggaacagctccattctacagctcccagcatgagcgacgcagaagatgaatgatttctgcatttccaactgaggtaccggattcatctcactggggattgtcagacagtgggtgcaggacagtggccaaggagaggggtgacagacggcacctggaaaatcgggtcactcccaccctaatactgcgcttttccgacggtcttagcaaatggcacaccaggagattatattccccacctggctcggagggtcctacgcccacggagcctcgctcattgctagcacagcagtctgagatcaaactgcaaggcagctgcgagtctcggggaggggcgcccatgaacgccgaggctcgagtagacaaaactttcagaggaacgatcaggcagcaacatttgctgtgcaccaatatccgctgttctgcagcttctgctgctgatacccaggcaaacagggtctggagtggacctccagcaaactccaacagacctgcagctgagggtcctgaatgttagaag

SEQ ID NO: 469612 - DNA, 692 bp, Homo sapiens
aggtgacacctgctccagcgtccccagccttgcacggagccaagctattcaattttgccaaatttccataacgtccacttgaattgcgggcaagaagattgaacataatgcgaagattctttgcaaataaaaggtcccagctccacccagccctgctccttcgtgttggtagcagatcctgctcagagacaggcattgtcactagtgttaaagacatagtggcccatgtgccggacagtcagctcacgctgggccacatggaggagcacagcttcaccgagcccatcctcatccctaagaaagacgggctgggcttggctgtcccggcccccacgttccatgtaagcaatgtcgagaaatacgtggaagtctcctcctcgtctggattccatctgggttctagccagtgccatcgccatcagcagtgcccattttatgtccccttgcagctccagatctactgggctcagtgcagtgtggctgggacagatgtcaccaagcagaaggactgcaagatgaagctgcaggagtttgtggactatgactacatcaccaaccacaagcgggtcctcaccatcaccaaccttgagttcttcgacacccagtgagcgccgacaccatgggggtgtgggggatggggttggggcaggggctctgtgctgtccttggcagtcgcctgagaagcacaggac

SEQ ID NO: 469613 - DNA, 3284 bp, Homo sapiens
gttttgccctctgtgatcctgtgtgctcctctgtgaaacgggagctgtgacctgtggcccgcaggtggtgagagagtgtgggacatgcctcacagagcatgtttcctgctccaggggacatcaaaaagggagtcccaggttccctcaccaccttcctgtcccaccccaagaatgtccagcttcgtggagccacctgacaccatgaagaaactgttccgggtagaaaactggccagatgatgcattgctggccaagcccaaagtgaccaagtcctgcctgatctgtgtgaaggacagctacaccgacttccacatcgactgtgggggcgcctccgcctggtaccacgtgctcaaggtgagtgcaggcagctttggggaccgtgtcctagggcttgcgggccctcgtcaaggttactcccctgtccctcgggccgtgtccccaccacgggatctgtctgcatccctgacatgcctgctcccttgtccggagcttaacgccaccccggcccagtccctgcagaggggcccgcagtggagctgtctggtcagcatgggcactcctcaccaccgaggccaccttggagctgcacagccagcactgacagagctctcgtgggccccgagccctgcagcctcccagggcggttgtcccctggtccacttcagctatgcagggcccagtggggaagcctgagctggtgtgtctggggcttggacccacccccatcgtcgcctgcttgatgtttgcagacggcctgtcgtgggacttcaccttgtgattgtgtgagttaatactcttcaataactctttttatatatacattacctattagtcctgtccctctagagaatcctgactaataaaacaagaggcaggccttagtcatagtaagaggggtggacgttatttagaagcaaagacagttcacccatatggaaaagagagataacagaatgtaggtatggatttatgaaggtgagcagatgtagtgactggagactttgaagttcttctcaaattaccacttttttttacaagtgaaatagaaaacaaagtcatcagcaaagagtgaaaatgggaaggagagaaaataaacatgaactgttactctgggaaaggatgagagtgaatggagcagggaatattatttttttctaggaaatataaagacatgagctttgtgatcatgaatttcagttgaaacaaatcaacctgattccctcttactctattttaaattttagttttatttattaaaaaatctgaacataatatccataattagagtattgtacagaagagtttcactgccctagaattcctccgtgctccacctgctcatccctctgtcccccgttactcctggcaaccactgattttttttaactgtctccatacttttgcctttcccagaatgtcatgtagctggagtcatacagtatgtagcattttctgattggcttcactcagatagaaacatgtaattgagattcctttatttctttgtatggcttgacaggtcattactttttaatgttgaataatatttcattatttggatatattagtttatccatttacctaattaaggataccttggttactcccaagtttggcaattattaagctactataaacattcttgtgcaggtttttgagtggacatgctgtcaccttctttgtgtaaatactaaggagcatgattgctagattatatgagaagagtttgcttcgttttgtaaaaagctgacgaattgtcttcctaagcggtgtagcgtttgcattcctaccagcatcaccagcatttggtgctgtctgcctttcctattcatcaggctccatcttcataatttttctgcacttaaacttttaaaataaaagtcgtcatttcatcccctgcttcatttcttaaacatcctttaatgagtaccttaaagtcagaaatctccagaaaatgaaagtgttaaccatatattgagagctaaagactgcagagccaaggggtgatactaagttggtgatgatttaaaaccccagttgaaaaattcttatagctaaagaagaggtatgatattttcatatatatttccttctctttcacatgtgtaaacttaagatagtctggagtattgtattcttgggaaaatcagagctgtttaaaaaattgttgtttataatgtttagaaatttagacctaacattttcatggtaattagactagagtagacttagctaaacagagccatttattagccttttgtacatactgctttagacagatatattagataataaaatactgaaggaaaataaaatagtgtaaaactactttgaggaagtatccaagaaaataagataattgtggcatttctactatctacactcaatttagaataataatagggtaataaacatcactggtaggtaaacccactgtgataagaagcatgaaagtataggtagcaaatttcagtgaagaatattaatattcattaatgagctcatacaatcaaatgcttaaaaccaaagtacttcagtatctcagagatttaaaggatttttttgtgtgtgttttgttttgctttgcttcttgccagcagccttctccttattaatataacagtaagaggccagtgaaaattcatatgaataattctgtaaacagatattttgtagaactaaatatcaatgttcataatttattattgtaaattattcaccaaaatgaaaatctaaaaaagggtgatttgaaaggaaggaaatattaagggaagtagaataagtatttacctaagtcataaattagatgaaaaatatttgcaaccagtaagagttcctcagacatttcccaacaggaacaaaatgggtatacagtgtggatggtaagaatggttaccgcctgcttgtgtaccttttggaaagcacaatatggggaatgtagtagctcggtttagagcatgtgaatgtctatctctttctaaaagtgcatcgaggagtttgggaactgattttccaagacaatcaagcacaaagcaaaaagtatgtatgtagaagtcatagtactggattttagttcttatttcatcatttaactgtacaagactccagcagctaactgaacttgtgcaacttcatcctctcatctgctagtatgaatattaataactatttcaccaagttgtaagaatcagtgtgttagcatacataatgggacttgggcaatgtttgaaatatagaaaatgctcaataaatgagacatactatcttattaaactccgaccatc

SEQ ID NO: 469614 - DNA, 670 bp, Homo sapiens
agacaggatcctacctgcaggcggtgcttcagagcacagctttactgttcgtagacagagcacctgggggaaggagcagctgtgggcgcagcttcagtggatttaaactttcctgcctgccagctctgaagacagcagctgatcctgacaagtgggattctcccagcacagtgcaccagctctgctatgggacagactgcctcaagtgggtccctgacccccaagcgtcctgactgggagagacctcccaacaggggtcgacagacacctcatacaggagagctctggctggcatcaggccagtgcccctctgagatgaagcatccagaggaaggagcaggcagcaatctttgctgttcttcagcctccactgttgatacccagcaaactgcagcagacctgcagaagaggggcctgttagaagaaaaactaagaaacagaaagcaacaatatcaacatcaacaacaacaacaacaacaacaacaaaaaacccacagagaaacctcatccaaagaccatcagcatcaaagatcaaagaaggtgggaaataacaaactcctctgtgctaaaggagcgtgtactaaccaaatgcaaggaagctaagaaccttgataaaaggttacaggaactgcaatctagaataaccagtttatagaggaacataaatgac

SEQ ID NO: 469615 - DNA, 616 bp, Homo sapiens
ttcaggtcttttgccttttttttttcccattgggcactctacacttttcttactgactgcaaatgagtacttaaagccaaagccagtgggagcagcggacaatgaggaccagctctctgaccttagtgtcttccgtagcttctctctcttattctgctgtagctacaaaaaccctctttctagtcttcaaacattccaagcatgttgtagctgcagaccttggcatttgttcccttcaccaggaaagctcttcctcacagcctgagcatccacttcatctagagttttccttccaacagtcaggaccctcagctgcaggtctgttggagtttgctagaggtccactccagaccctgtttgcctgggtatcagcagcagaggatgcagaacagcaaatattgctgcctgatccttcctctgaaagctttgtctcagaggggaatttggctgtacgaggtgtcagtcggtccctactgggaattatctcccagttaggctactcggggctgtcagacaaggacgtttaagtctgcagaagtttctgttgccttttgttcagctatgccctacccccagaggtggagtctacagaggcaggcaggcctctttgaactgc

SEQ ID NO: 469616 - DNA, 727 bp, Homo sapiens
gcagccttcgagtcaatgaaatgtcaccgtcctggataaaatgcactacatttcatcaaaaacgtcaaactagaccagggacaccatgtttctgccctcatggatgttacatttcagacacagaagtcagacaacaaatacatacatctataataaaacgtcaagagagtctatactgggggcttgtgagctcctggctcaactctcaattcctcaattgctgctatcatgcaaaagcaaccacagacaatcagtataaggtcctgggtgggccagtggagaaaaaagaggatgatgaccattcccaaggacatgcaatgagccctttccttcacttacaattacttcaaaaccaagaggaaagggccattttgttctcttctggctgttacccatttctggttgtctgtataaaagaacaaaaagatgaagcccccttgttatttgcctgggagtctaggatacagcaggctctgggtaaatacatactgtaaagttggcaggtagaaggggtttttggctgttgtttttcaaacatattatgaatatgttgacattattaaaaacacatgcacatgcacatcaccattgccccagaagcctctccagctcacgagtgtcaagcccactgatttataagattgcttgcacatattatattttaaagcacatattgcttttgtgaaatgtgtatttattatgcattttggaattgataatgtatgcc

SEQ ID NO: 469617 - DNA, 703 bp, Homo sapiens
gagagggagggggccaaagaccaagttgtgtctaaatgctgtatctatgggcactggcctggaaccaaaggccatggggttctgcccagtgctgtcctttactatagcagagctggcactgggctccaagggaaagtcccgtggacccttccttgtcccccctgcaagaggtggacacattctctgcactgcactgactggggttgagggaggggcagtgcagtcactgcaagatggtcttttcatcctctttaatgtgttttctcttgtttttaagctaaaacccggttctgtgatctgtcacctgctttctttagctcttgtgaaggtactatcttgcttggattgttggacggtggttcaatgtaatattcttgcagagacacagtcactgagattctatcctccatctcgctccacctcttctcatttatttagttcttcttcagtttatttcaacaatattttggaggtttcagagtattcgttttgaactgctcttgttaatttctaaatttattacttcagcagaaataaaatcttagcacttgatttagtaaattcctccatttaaaataagatgttactttagcagaaacaaaatttatcttaatgggataataattcactagtttacctctgatgagcatcagctagtatttaatccattgtgaaattacacagcatcaaaataaaatataat

SEQ ID NO: 469618 - DNA, 765 bp, Homo sapiens
ccagaagacttcaaagctgattgcaaaagcttctgatgtttgcaaaattggtagtcggttggcgagaggtcatttgaatatggtggatgaggcaaaatttcatagcccagttcattcaacttttgaaatgttggttgtgcaacgtgttgtcggttgttgtcgtggagaagaactgggccctttctgtggaccagtgccggctgcaggcctggcagtttttggtgcatctcattgatttgctgagcgtacttctcagatgtattggttttactgggattcagaaagctatagtggatcagactgggagcagaccaccagacagtgaccctgacctctttttcgtgcaagtttggttttgcgaagtgctttggagcgccttcttggtctattgtaagaggatcagcttcgatgattgctctcagttggtcatcaccaacaacttctggccggccactacactcctcgtcttcaaggctgtcgtctcctttgcagcacttcttcaaccaccaccgcacagttcctgggccaaatgtgtagttgatctttctgtggttttgaaattacggaatctgctcttctctagcaagggagaggggtcttcttctgctggcccatagcactcagagcaatctaggagctcagatatctccctctgagactcgtctctatttttgacatagaagacttgcaatggctattaattcagctgcttcttaactcctagcatccttacaaacaaatattaatcctgattttcagcatatt

SEQ ID NO: 469619 - DNA, 784 bp, Homo sapiens
ttcatcaccacagccaacattaccatcacagtcaccatttctaccccagtcaccatcttcatcacagccacctttaacaccatcctcaccatggccatcaccacaaccacagccactagccccaacatggccaccttctccaccaaagtcaccatccttgccacagctgcctccatcaccacaaccaacattagcatcagagtcaccatccccaccacagccaccttcaccatcacagccaccaacacaaccacagccaccatcctcaccatggctgccttcattaccacagccactacagccattttcactaccatagccaccattctcaccacagccagcaacacaactgaggttaccacccccctcacagatgccttcatcactacagttgacattaccattagtcaccatcctctcactacagtcaccgtcactaccacagtcaccacagctacctttaccaccatagctaataaggccaccacagccagcacccccaccacggccatcttcaccaccatagttaccttcacaagcacagttaccttctccaccacagctaccttcatcaccacccccaccatagtcaccaaaacaaccacagctaccatcctcaccacaatcaccctcacctccagagccaatatcactactgcagtcacctttaccaccatggcaaccatcacctccacagtcccttcatctccagagccaccatcaccaccacccctaacattattatgatcttgattttgacatataacatcagacttaattacat

SEQ ID NO: 469620 - DNA, 459 bp, Homo sapiens
cacatcacaattttaagtcactttcctccatcacaatgcatgcccactctcagttctgcatgagtggggaccacacgttagaagggacagaacatgccatcaaggaaattgtcaaagaagaagctgatgagtactttgtcatagtcttgagtgatgcaaatctgtcacgatatggaatacatcctgctaagtttgctcaaatcctcacaagagaccctcaaggaaatggtccaacatccactggcaaaagatatgttgcagaattagctggcttaccaggcatgccaaatatacgatactacacaggatggttgaattttattaaatgtcattccaaagccagacttcactggcacagtgaaaggaggcgttcttttgaagagaactgtgtcttacagttttgttgccttcaaaatggccttttgttccaaattataaattagtatttaaaaaagtatc

SEQ ID NO: 469621 - DNA, 614 bp, Homo sapiens
gcctcttaagctgcagccggcagtgcagaagggaaatgtggggtcagagcccccacacagagtccctatgggggcactgcctagtggagttgtgagaagagggccactgtcttccagaccccagagtggtagatccaccaacagcttgcaccatgcacctggaaaagacgcagacactcaattccagcctgtgaaggcagccaggatgggggctgtaccctgcaaagccacaggggtggagctgcccaagaccatgggaatccacctcttgcatcagcatgacctggatgtgagacatggagtcaaaggagatcattttggagctttatttgactgccctgctggatttcagacttgcatggggcctgtggccttttcgttttggccaatttcccccatttggaatggctgtatttatccaatgcctgtactcctattgtacccatggaggaaactaacttacattcgatttgacatgcttataggtagaagggacttgccttgtctcagatgacactttggactgtggacttttgagttaatgctgaaatgagttgagactttgggggactgttgggaaggcatgattggttttgaaatgtgaagatatgaga

SEQ ID NO: 469622 - DNA, 563 bp, Homo sapiens
tgttcatctcggcctcatgcctcttcaggaagttgcctctgcccagtttcacgggccaccaacacctgcgattttgcatattcctgctcagaccacaaaaatctttattataacgtttgagtaccctggagtggataactccaaactgacccaaacaccgtccttccatcttcaaggtcacttggtaagtaaaaattggaagacaggcttccaggtctatcagactccaaagatctgcactctgaacccccgtgtttctcagcaggtggaacacctgacttttatgagtgacacaagtataaagttggaatgcaaatcattactctggtgcatccctgggcccccagcagtatggctggtttggttcagggcctttgttgaaggttcaggtctgcttcgcagatggcttgaaaaggaggatgaagaggaaggggaggaagaggaggagaaaaggaacctaacaacatgtagttgaggcttctgcctccaggaaagattggagagatgaccctccagacctgtttccttatcactacaaatgggcttaggggtgcaggcagacc

SEQ ID NO: 469623 - DNA, 718 bp, Homo sapiens
gtcaccagcatcaaagaccaaagagaagaatataaatgacctgatggagctgaacaatacagcacgaaaacttcgtgaaggatacacaagtatccatagccaaatcgatcaagcagaagaaagggtatcagtgattgaagatcagcttaaggaaataaagagagaaaacaagattagagaaaaaagagtgaaaaggaatgaacaaatccttcaagaaatatgggactatgtgaaaagaccaaatctatgtttgattggtgtacctgaaagtgccgaggagaacggaaccaagttagaaaacactcttcaggatattatccaggagaacttcccccacctaggaagacaggccaacattcaaattcaggaaacacaaagaacatcacaaagatactcctcgagaagagcaaccccaagacacataatcatcagcttcaccaaggttgaaatgaaggaaaaaatgttaagggcagccacaaagaaaggtcgggttacccacaaagggaagcccatcagactaacagtagatctctctgcagaaaccctacaagccagaagagaatggggccaatattcaacattcttaaagaaaagaattttcaacccagaatttcatatccagccaaactaagcttcataagtgaaggagaaataaaatcctatacagttaagcaaatgctaagagattttgtcaccaccaggcctgccttacaaaagc

SEQ ID NO: 469624 - DNA, 3040 bp, Homo sapiens
tcctcctctttttttgtgttcttaagctcggagatgtttgttattaccgaccttctgaagcctactgctgtgaacttgtcaaagtccttctcagtccagctttgttccgttgctggcaaggagctgcgatcctttggaagagaagaggcgctctgtcaggaacctcagctgcaggtcttttggagtttgctggaggtccactccagacctgtttgcctgggtatcaccagtggaggctgcagaacagcaaatattgcagaacagcaaatattgctgcctgatccttcctctagaagcttcatctcagaagggcacctggctgtacgtttggaaaagcacagtattaaggcgggattgtttcaatattccgggtaccctgtatggcttcccttggctaggaaagggaaatcccgcgaccacttgagcttcctgggcattgcaattgatgatgaagatagtaacagtgaacaatatagcatgaatcttgactttgatggagtttagatttttttgataacccaatagaaataaataatctattttttcaaaaagatatatgaaatttagagtagtagaaatatatagtactatataacatagacaatacttctaaaatagctttagcaggaataatgtaatattcatggaaaaactgatattgaaactaaaccctgaaaaacatttccttattctggaaccaagaaaaatgtatacataaagattcagaagtaacaacttgtgttgatatccttgaataatattatgagcacaggagatatacctaatgtaaatgacgagttaatgggtgcagcacaccaatatagcacatgtatacatatgtaataaacctgcacgttgtgcacatgtaccctagaacttaaaatataataaataaataaataaataaataaagtagcctgagaagcagcttctgaagtaacctgttttgtgatcgccaacaagaggttctcagaataagagtgagcagagtatgacattctaatagattccaatttctttgacattttaactcaaataaggctcaatattaattttgaattttaatttattcatattttgttattattatattttcatctgcaaaataattgaatttttagactcctccttcccaggaatttgattagaagtcttatattaaaacgtgacaataacctatggatgacattttattattggaataacttaacattgcatttgatgttttgcaaatcctttgattaaatatattggacaatgtggtttgacaaaatttggatgaaagataaaaagagccatagttttgactttggatatataattacattggagaaaattgtgagttaatacgttattctgccctaatttaagagacatttgcactggccataagtagttttcggggaaaatattaaggactagtggaagagattgagagaatccccttgtaaacacatataaaggatgatctaattgattgctattctcctgtgaagaaatcaaccacattgctagctgacaaccaattcccctttgattaaataatcacaaaagttataatataattaatatataatatgtgatatgaagaacatttaggtagtacagtgagaatattcaacaaggagagttaattataagcatatcaaggaacactcccttgaaaaacgggcttggctgaaatctttaaattaagtggaaaataaaaagtgtgtaagtatcttaaaagaatatctggaaacatatgatgagaggagtgaatgtgtcatcctgggaatcttaaggaaagccaatataccttaaatacagagggaaattggaggaatgatgtgtgaaataaggcaggatctagaactacagggcttcacagacaattagaaattttgatcctattttagaaaaaacatgaactgtggcagctttcaataattgcctagtaattatccattctcatcttgtgtcttaatgaaacagattgaagatttcacccaatgttgcttgtaatattaagtgatcatatgactaagtgttggtcaatggaggtaagaaaaagtattggtgcaaaattcagaatatctgtttaaaaggagctgactcagctctgaagagcacactttcttctaccagctgcctagaatatagatgtaattgctaatggtatagcagcggttttgtattattaaatggttttagagaaggcagtcagtactgaagatggtagagtcgaaattaaaacttggtttctcgatgacaccatgaagttatcaaatcaggcctatattcttacctcaaaacttactttatgagaaaaaaactaatattgcatttcattttagacatgacaattcttatttctgtggctatatttggccaaacctaatttttattgctatataaaccaattaaagtaaaatggggaaagtgggagcactgagatgaaaaaaaatgcagtttgcaaatatcactctgatctatagaaaaatactagaatggagtaagaatagatttaggaaaactggttaatagtgctcttacaattggttaggtgagaaattagggttacttaggctatgaagatagaagtggagggagagaaccggatgtattaaagagttgatgagaaatttgacatgaacatccttctgactataagccagttctttatgagctaatttcaacacccaaactcatattaatttccatgaagaagtgaatcattttcagataattcccatgttacaaatcttataaaagttatataatgtgcatttcaatgtcattttatacttggagttgcaaagtatttttatggtcaaatcataaaataagagctagcagcattattctagtggcatatagtgaaataataagtatactttggtatccattagtaaaagatttattcttctcaggatctttgatgggcatatttaaaaagcaaataaagtctcatacattttcaaatatactaaggataaaatttaatagatagaatcaaccaaacagatcacatatttggagaataatatatttcagcttt

SEQ ID NO: 469625 - DNA, 601 bp, Homo sapiens
aagttatagcagtatatgaagactctcttctcagaattgggaaatgtcctgaggataatagttgctgcagaatgtcacgccaaatttcagcacaaatcctgtttccttggaattgtgttctttcatgtcctgattgccttaaaagctctctgttgccttcatgtatattttatttgttgggttggctgtttaatttttacattaactgaatttgctcgctattctcttcgggaaagttgtgcttgtgatatggtacaaaataattcaacttttgaaaaaggagaattaaaatgttctttcaggcatggtccaccagtgcagaggctatggtgtggcccccaggacacccaaggctgcctgaaagcagatgtgtccagggtggggcaccagaagaggcagcagaccaatgagtgctcagatgtataaatttgtcggggccaaattgaaaactttacaatgttaagtgttccaaacaatggacatgatatgttcctccattatttacatgttctaataattattttaataatattttacagattcttatgtaagatcatactcattttcatttatatttatttttagatatttgatatgtctt

SEQ ID NO: 469626 - DNA, 1079 bp, Homo sapiens
gaatatttgcaaaatggaaaagtcggatgaattcacgctataaatcaatagacctttaaagcacaaagagaagtcaaagcagggctggagccacaccctttggtccccaatccagtgcttttcccaacttcgctatgttcccccttagtcaccctgcagccgctcctcacccacaaattcacaagcagccaacccaaactgtacattttcagaagagctcattactcacagctgtacagcacgctgaaggccctctcgtctctgtcctctccgaaggcgggtatgttaaaggaaagtggccccttacctcccccaagcagctgcagtggccgagccctggtttcccaaggctcaggggacggatggccaacaacaccatggagcctgcccgtccccaggccgctcctgcagctgccctcgctggccacccagctggaaccttggacttactgggggctgtgggcatcagggtctctcggcctttgttttcctccagtgccatcagcagttcccagcgtgactgtcccgcagccgcactgggtccaggcggctcctgccgcagtcagtcgctccccctacccagcagcctttttttttcttcttaaagagacaggactgtcatcaaccttaggtgtcaataatgctgcaagtgcagcattgtcgttcattgtgggggtgacaaccaaccacacgtttttgttctcttcacttgcaaaggctaatttttagcagtaggtatggctaacagaagactggctctattaaacaccagttgtgtgaccttagacaagtcactcatgggtctcgagtacctcatgggaaatgaagacctgtgacctggtaatgttgtagctcacaatctgctttttgtatgttatttggagttgtttatgaggttccaatggttaaaaaaaaaagcattcactcaaaatgtgtggtaaactgtgaaatgctatacaattgatcctgttctaagttgaaattgctagtctcaatttaataatacaaaatattgtaactctattttcttgcttcctctgatggggtatgtgaaataccaccagcatttatttcatttc

SEQ ID NO: 469627 - DNA, 518 bp, Homo sapiens
gcacaatgtcatatgtccattccttcatcatcttccctgctgagaagtggcgatgctattcctgcccaaccattagggtctcttgtattcagggtagagctcagtcagaaagcgtcagtatggcgagggccattcaacttttttgagttccaacaaaaagttttatctggaagattaacaagtgttcaatttaagacaacatttaataagcttattctgcattcctacacaaagagtacaacagcaagatatttcacaataataaagcaaaacaagttccaagataacttggggctcctggacctgttagaaagtgacattctttacttaccacagaaacctgcatttaagaacacctgtcaaagccctgtagttgattataaaccaccttctaaaaaggaaaaaaacaagacaacacttgtttgtggatgacaaaatgtcttaggacagccgcggtcaaaaatatgattgacaaagaaatttggttacctctgtggcatacaatgattttatgtaac

SEQ ID NO: 469628 - DNA, 686 bp, Homo sapiens
gttgctgccaccaaccacagcgatgtgagccacagtggcacaggctgcagcatccagcagcaagcctgaggacaaccaattagatcatgaaaataaagtccaatcagagtaggtctagaggtttactctcatccaatccaaatttggagaccaggaaccacattcccataacctcagtatataaggctcttctgtgcctgtgggactacattctctgtgccgggcttagagaacacgaagagggagccatctgccacactctggaggctgaagcctgcaccagtgctgctcgcctcactgtggtaggtggtggtgatggaaactgcagatcggccagagtggtagaaaagttgctgcagggtttttctggctttgcctgcccagctgctccatgcctggctagaggagaaggaggagccacatgtggtacactggaggctggagcctgcagatggcatggctctgcggctcaccttgctgcagttggtggtggtgacagagactgcagcttgactgtagtggtggttaccaggagctctgccactgcatgtccactagtgacgggttcgctccaccaccccagctgggtagccgctgctctcacataaggggtccaattaaaattgccaggaataaattcccccggactttgacttctcaagagctaagaaggtttgctgagtatt

SEQ ID NO: 469629 - DNA, 857 bp, Homo sapiens
gctgaggttcagaaagagtgagctactctctcataagcactcctcttgcaggccgtgagtgacaccagctcttgccacctgacaaagggcacagacaccaaaccctgccccgcccacaggagtccatttcaactctaccccatgggcaggaggacccatctgcttgggtgacagctgcggtcgaagaagacaccagggagagggctgctcatagggaaacgtgggcagtcatcctggcatgaccacaaggacctgaattatgggaaaaatatgaaagaaaggatgaattcaaaagacaagttcgatggctgggtctgtagccttggggactggcgagaaggtggaatagaggaggcagaggcagcaaggatgagttcaagggcaggacccatagctgggaatgccacagaagacacagttcagaggaagagtggctgcacaaggaaagaaggcagactcccgagttctcttgaaaaccttttcatagtagacactgagtgggaagggccagccagcagaagcgggtgcagagcggaattccaggagggagaggggtgggagctgttgacatggccctgggtagtggcagcagctgaagccagcaatgaagcagatgcctccctccagggtcagagtggagcagcgaggtcagaggagcagcccaggagggaaccaggagaaggctgctgcttggcaaacagacccggtctctaatctgggctaagaagtgaatctggtttccctgtggcccaaagtattaggaacgttttctttttttaataaagcagaacagcaattgtggagaaacagtggcagttgctctcatggggtccctcccccagtcacagtgggcttgg

SEQ ID NO: 469630 - DNA, 1481 bp, Homo sapiens
gcccaggctggagtacaaggctagcatgaggtttgtaaagtggaccaatcagcaccctgtaaaatgggccaataagcaccctgtaaaatggaccaaacagcaggacgagggtggggaaaaaaaagggaataaaagctggccaccccagccagcagaggcaacttgctctgctgtaacactcatggtgaaggtccgtggcatcattcttcaagtcagcaagaacacgaacccactgcaaaaactccagacacgtctgaaggaacaaactccggacacaccacctttaagagctgttaacactcaccacgaaggaaatgtacagctagaaatcttaactgttctcaccaagataaatcaatggaattatatattaaaccactccaaaagctgcatattgagagccttgatcagatttagcacggaaaaatgctagttctggttgttacttgctttcattatttatctgcatttctctatacaagtgtctgaattacaaagagcaagtttaaaaagtaatcagcccaacaaaccaacacagactttgcaattcatttggatttgcattcatagttgtaggatcagattttaccaagtgaagcaaactcggccagttaaaaatacattgacattgtattagtaaatatgccttttttagaattccttttgggaaagttagtaattctcctcttttaattctaaaatttgcatataccacaggtgttggtaactgatggcatattcagctcagcagaactagatttacgttgggggtgcatcgtgttccaaacttaggccggtcaaaggataaaagacagcgaaggagtagaaataatagaaaagtttactctgaatggtaatacagattcagtctccagtcgttcttctgtggaggaggtactttcctcttcttttctattcacatctgggtgggcatttgtactcattgcacctctcagacttcagtgctcagaagcacaatagttcattagataggttattatatttggctctgggaaattaggcttgtgaattttgaactactcagtccagtagagtccacacataagtgagtagattttaagtattctaaatgcaaatagataagtatatgaggcaatgattatgttaattagcttgatttagccattccacaatgtatacatgttttaaaacatcataccccataaaatatgcatactctttatttgtcaactaaaaaataagtctgccctcagtcacacattaagatatgacacactcatatcattctaaacatatttcttggtataataaccccacattaaaaagattggccaaaattgtaaagctcttttgaggacttttaataggaggtatggactaaaaataagtaggtaaagcctacaattctgaaagaatgttcagggaacctgagtcttaagtaactttttaaaagaaggttctatggtcaaatgtttagtaaaggttatttatccctatat

SEQ ID NO: 469631 - DNA, 636 bp, Homo sapiens
aaaaccaggtaatatggttgttcatctgatttttggtacttatgaagcctcatttgtggattcttggccgtcttctgcaggtttcttagatcccagtgttgctgaaggagaggtttggggaactgataaaagaaaagatatgccaagaagcaatagcacacacaagctttactgggtgatggctggatgggtgtgcatgtgggtgaagtccctaacagtagcagtctgtcccaatgaatggcacagatgtcccaacacggaggcggtagagggcaaagaagcctctgggggcgaggcagtctggaccaggggcttaggtgacaataatgcaggaacaaggagaaatgctaaggaactaaagagatgcccagggtccattcctggaactctgaattctagatccgggctccattacaaggttggactgatttggaaattcagctaaagctgagtttgaaggtggagagcattggtgactgtatttggggtcactgagaagacgaaggcaacagagttgccaatgagttgtaaatttggtctctttacacaaacccatatttctcagaggtattgttcattcttttctaattcttttttctttatttttgtctaagttcagagaactagtctttgagc

SEQ ID NO: 469632 - DNA, 912 bp, Homo sapiens
ttttttcatgtacttgttggtcattcgaggaaggggtacaccatgccacacctggccaccctggggaagcgctggcatcaggaggcagagggagtgaggggaaaatgtggacaaaagtctttattatggtttccacaggaagtgactggcaaggaagggcaaacaggtttggtattgatgagttcgagtaatttcagcacgctatgggatctaggggctgtccctagttgtctggtatctgggtctggggatgcatgggaggctgcaagaaatccagaaaacttgaccctcaagtactggggtccctatgtgtccggaattggttccttccggtgggttcttggtctcactgacttcaagaatgaagccacagacactcgtggagtgaagctgcagaccttcgcggtgagtgttatagctcataaaggtggcgcgtctggagttgttcgttcctctgatgggttcatggtcttgctgacttcaggagtgaagccacagacctttgcagtgagtgttacagctcttaaaggtggtgcatccagagttatttgttcctcccagtgggttggtggtctcgctgacttcaggagtgaagctgcagaccctgcggtgttacagctcataaagcagtgttgcttccagttcctgctatctccagaacccaaagatgattccaataaagaaggggactcttttggaaacaaacgcagcagttacgctgtacttaaacctacccctgctccctctggttccttcttaccttggagtgaattatttcaagaggcttctcaactatcatgcaatgggacttatctgcctagcacggggtttctgagccttagcaccattgatgttttggaccagataattctttgctgaggggtatgtcctgaatattatgggatatttagc

SEQ ID NO: 469633 - DNA, 2363 bp, Homo sapiens
gcgtttcagccacaatgcctgctctctcctctgaaacactaaatagctgctttggttggtaccactcttttcagtgtgacctcccctacctgctcagacaccagctggcccgcagcaacacagacctgcaggggagcccctgtggatgtgaatttccagaaggagctgggaagcagacttccctggctggttctaatggaaaagctgaaggcacaagaacctatgccatttttacagcagatagccacagtcccctgaccgatgacagctatcctgtgatcacagttgcccacaagtgccctgctggggatgaacggaggaaagtccagtgcagcaaggctcctttgccacacagtccaaagtacattggtctccttgcctcctctgttccttgcagaacatttgactcacttgccctttcatctgaccaatctgctcccatacccaagctttggcttcagcctgatccaaacctccaagtaccacccgcttccctgacagtgttccctcctcacattgacaggactcctctgaagcccgttcctcccaggaaacccacctgggtggagaactcagatggttccccctggaaaacagatatatcagggttctctctagtactgagcatcgtttctcggctgcagcacaggagtcttaggggctcccgcaccacaccctccctcccgcaaagcaatggtcctggggtcccagagcctgtctacccacattcctcccaaacgttcaaaatgagaactaattaacatggaagaaaaactcatcattctctaactttagttatgtgctttctctatgttcagaggagtaatatttttcttcctctggaaaccaagtgaagaagtatatattacataatattatgtatattatattatataatatgtaaatataatataatataatatattacatcattatatattatatataataatataatgtataatatataatgtaatataatataatattatatattatatataatataatataatatattataatataatatatgtatatataatatataatatatgatataaatatatataaatattatatttgtagtatatattatatataatataaaatatatattgcatatataatatattatatgttatatattatatatgtaatatatgttttatattatatataatatagtatgttatattaatatatatactatattatatgtaatatattttatattaatagataatatattatatataatatatgttatattaaatataatatattagatataaatattatgtttatatatttatactatacattatatattatgtatgatatttatattatatattatatattacatttatattatatattatatttatatttatatattatatgttatgtttacattatatgttatatttacattatatattatatttataattatatatttataattagatataatatatatattatataattatacataatatatattatatataattatataatttttatatataaattatatagataattaattacattcattacatatattatatataatatattatatatataattatatattatatattacatataatatataattatatatataatatataatatatttataattatatataatatataatatatttataattatatataatatataatatatttataattatatatataatatattatgtttataattatatataatatataatatataatatatataattataaatacgtataattataactataaatatttatagttataattatatataattataattacatatttatataattataattatatataattataattacttatttatatgtaattataattatatatataattataattacatatttatataattataagtatatataattataattatatataattataattacatatttatataattataattatatatagaattataattacatatttatataattataattatatatataattataattacatatttatataattataattatatataattataaatatatataattatatatatacttataaaaatacatttataattataattataattagtatcagtaagtattacatataatatataattatttttatttttataatattaataataatttttataatatatatatataaatacctttggcatgggaccggaatctaaacacaaaatttatttatgtatatacacctattacacatagcctgaaaataatttcatatgatatttttaataatattatgcatgaaacaaaggttgtgcacat

SEQ ID NO: 469634 - DNA, 673 bp, Homo sapiens
aagttcctaaggccaaatttttgttttgttttgcttcgccaaaatgatggttttatcgaatccccgggatgacagcctacacctgatagatatcatgatgcagtcacggtacactggaccagggaacactgggacggaagaagtgaactttgcggtcccccattctctgccggactctggtccagaagtgcacagcatttgcagccacagccactgccagagccagactgtcagagccatgggagagacagtaagtgttcttcgaatggatgcattggaattcaatgggtcttcttgttcaaatcattttctgctacacaggaaaagtcctctaagggtcaaaaggatgctcaagtatagtcacccagtgtcatttccccttgcaaacccatttctcctgtggggcttcccagggcagtttctctcacctgtgatgcttgttatactgaggatgatggagaaagggctcctggaaccacccatcaaatatgtctcctttcgcatttggactttctgtctttaaatctgtgttgcctttacaactgcgaggttgcggtaactctggttttcctgaatcagacaaataatttcaaagacattatttgcatttactaactaattttctcctgagaccaattgcacataatacagtgcattgcccatctctgtaaac

SEQ ID NO: 469635 - DNA, 2047 bp, Homo sapiens
ggaaatgatgttttcttgctgcctctcatggtgaccctgacatgccaatcttcacataacccaacccacacggtgaccaataaaataagaaaatgccggtcatctgatgtcaacagtaaggaattcccagagcactgcagccgggaaccgtggagacgatgtcatctcaatctacgccattcccagcaaaagggaaatttcatcacctcagagaaaaaggcactggtacagcaagatgtcacaatatctgaactgcagatgtgcacatctaatggaaaaacacagctgaaacagataatcatggacaaagtgatccagagtgaaatttatgctgaagtctgcttcctgccaaaatactcaccactgttcaccatgtggtactatggagaacaaaccagcagtactcaaacatctctcaaaatacactgggtggcatttattcctttttttttttaatcagaactggtttacataatacaacatatagatgaatgggttacataatgatagatggaaaaagagatatttatcatgtgcacaaagtatatattacataatattatgtatattatattatataatatgtaaatataatataatataatatattacatcattatatattatatataataatataatgtataatatataatgtaatataatataatattatatattatatataatataatataatatattataatataatatatgtatatataatatataatatatgatataaatatatataaatattatatttgtagtatatattatatataatataaaatatatattgcatatataatatattatatgttatatattatatatgtaatatatgttttatattatatataatatagtatgttatattaatatatatactatattatatgtaatatattttatattaatagataatatattatatataatatatgttatattaaatataatatattagatataaatattatgtttatatatttatactatacattatatattatgtatgatatttatattatatattatatattacatttatattatatattatatttatatttatatattatatgttatgtttacattatatgttatatttacattatatattatatttataattatatatttataattagatataatatatatattatataattatacataatatatattatatataattatataatttttatatataaattatatagataattaattacattcattacatatattatatataatatattatatatataattatatattatatattacatataatatataattatatatataatatataatatatttataattatatataatatataatatatttataattatatataatatataatatatttataattatatatataatatattatgtttataattatatataatatataatatataatatatataattataaatacgtataattataactataaatatttatagttataattatatataattataattacatatttatataattataattatatataattataattacttatttatatgtaattataattatatatataattataattacatatttatataattataagtatatataattataattatatataattataattacatatttatataattataattatatatagaattataattacatatttatataattataattatatatataattataattacatatttatataattataattatatataattataaatatatataattatatatatacttataaaaatacatttataattataattataattagtatcagtaagtattacatataatatataattatttttatttttataatattaataataatttttataatatatatatataaatacctttggcatgggaccggaatctaaacacaaaatttatttatgtatatacacctattacacatagcctgaaaataatttcatatgatatttttaataatattatgcatgaaacaaaggttgtgcacat

SEQ ID NO: 469636 - DNA, 783 bp, Homo sapiens
gtctttacatttgtttacatttctcttgactgccaatgacaccatgtacatccggtctgtgtgtagaaaggaaggctttgcttgggcctgctgtggtgaggccctatgtgaacagggtcccctggaggatgatcggtggccagctgccatcggggctggagccgaccctgggccagtaaggggcgacttggggcatactctccgtactgggcatttctctcaagttaaaaagatctgcatttcttgtccaggacacaatgccctagaacttgtgtatactggatggaacaaagcgtgtacagcacatctccggatgtgttgcaaaggctgccaaccctgctgggagatagcggccagcctctctttcctatcgtggttgtggctgtggcttcccacactggccatcctgccccagcacgtcgcactccagactgtctggcacatgaactgtgatgatgtttttccttcctggatatcagcagaatcccgcctttctatactgagcctggggagcagggagggaggagtctgcattccagattttctggaagaaatggctgttgttgatgttgtttttagcagctcttttgactcgaccatcctcacaccagcgttagctgaagtcaaagtggcaagtgttccctggctggtggaccagagagctccatgggacccaaaagagggagggtgcaggcctgactgggaggaaatctggtagcaacgggtttccgtttctccttggataaatcaagaagacttttccttcaaggacatacctgaata

SEQ ID NO: 469637 - DNA, 615 bp, Homo sapiens
ttccaacaaatagtataattatatgaggtggaggtaattggatcatgggggtggtttccccatgctgttctcatgatactgaaagtgggaacattttggagggctcaaaagaaaataggaaaatgtgggaaagtttggaacttcctagagacttgaatagctttgatagtgatccagaaaatgaagatcaggctgaggtcatctcagatgaagatgaggaacttgttggtaactggagtaaaggtcactcttgctatgttttagcaaagagactggtgacattttgcccctgccttagagatctgtggaactttgaacttgacagagatgatttagggtatccggcagaagaaatttctaagtggcaaagagttcaacaggaagcagagcttcaaagtttggaaaatttgcagcttgacaatgcactgaaaaagaaaaacccattttctagggaaaaattcaagcctgctacagaagtttgtataagtaatgaggagctgaatgttaatcaccaatacaatgaggaaaatgtctccagagtatgtcagacacttccaaggcagcccctaccatcacaggcctggaggcctaggaggaaaaaatggttttgagggg

SEQ ID NO: 469638 - DNA, 526 bp, Homo sapiens
ggtagcagggccggtgaggatgccgctggagcaagccaaggatggagattgtgctggatccaccttggaactgctcttggggactctcacaggcgccctgcactgcccctgctgtgcgtgtctcctgttgcctgggaagctaaagggactgtggtccaggcctgccattggctcccaagaaccccgcctcctggtgacaccccctcctcttgagtgtgggctccccccccgtgagctgccccgtggagaagcccatgaggcatggaacccagaacctaagacctgccagcgccccctgtgtaagcctggacgccatcctcccgagtcgggcctggagagggccccagccccagccccagacccagccgacgctctgaatgacaccccacgaaaggccttgagtgagagaacgcaggaatccagccagggactgggggctggatctgtgaatggagctgtctcagggtaacggtgtgggttggcattgggggtcagctgagccgcgtttcctgttggtggttccagc

SEQ ID NO: 469639 - DNA, 2246 bp, Homo sapiens
tgttctgatttggtggaatatgtcgggccacagtgaccctggagggtttgatgattacaaagaaaaaataaaatttagaaaaaaagaagagaaaggaaaaagagtgctctgggggtatgagaagagcagaggacgagagcagaaacagttttgtaatgaggaagtcacatggccaatggctgtcgaagaagagaggacactcagcaccagggagcctgatgaggaaggagtgagggggagcagggcacctctggctctagcccagccacaccggagcccagctgcttccagaagcctgaaggtggctgcttctgctgatttcctgattctcctgtttttagatggtcctggacctaaagcccgaggagctccctcttcccttcaggcctatgcaagagcagttgccctgtggttcctgatctcctctggatctcctctggagccagtcgcctgtagaggatctggactccccggctcccggagcctgcggcaagaggcaggtcaagtcagcgcctgctcctcatcctactggcaggccccgaggatggaagggtgatggaggggcccactgtgagactagggggagacagaaaagtcaggaaaaggtttccatgacaagccgttttctaggaactcttaacaatggggaaataatatcatccaaacctagaaaagagaagacaggacttcaagaagaaagaaacaatgataaacgatactagctagagctagtatcatgccgggcttaaaaagcaaatgaaacagaaaaggggagagggcagcagctgctagccgaggacgcggcctgattctaggaggtcatgcctttaattggacacaggagtgtgtacaggggttgccccccttcctgcaccttccatgatggcaaacatttgggttttaccaccaccagaagtttctctatcaaaaatcacaagacagtccatagcaccctacaggctccccaccctgccctgggccaggataggcctgaagttgttatcatgaacaggaaccagaatgttccacgacattttgcaaacaatatcgctaaaaaagaggctagtgctacagacagtaggttatatgacaataaggcaagggcgtgggcatgtgtatctgtatgtgtgtgtctatgtgtatgtgcctgtggttatatctgtgtattgtgaatgtgtgttatgtgtatatgtgtgcatacatgtgcatgtgttgatgtgagtgtatgtatatgcatgtgtgtgtgggcgtccatatgtatgcatatgtgtactgtttgcacttgtgtatgtgtgtgcagctgtgtgcacgtgagttttgtacatatgtgtgcatgtgtgtgtgcatgtagggggttgtgcatgtgtgtatgtgtatgggggtgtgggtatatgtatacgtgtgtgctctgtatgtgcagctgtgtgtgtatgtgtttatgtgtgcatctgttgacgtgtctatatgtgtagatgtgcaagtgtgtatgtgtggggggttgtgtatatgtgcatgtgtaatgcatgcatttatgttctgtatgcatgtgtgtatctgtgtgtgcatgtgtgtatgtgggtgggtgtgtgcatatgtgtatgtgtacgtatgcatgtgtgttctgtatgcctgtgtgttctgtgtgcatgtgtgtatgtatgcatgtattctgtatgcatatctgtgtgtgttctgtgtgcatgtatgtgtatgtatgcatgtgtgttctgtatgcatttgtgttctgtatgcctgtgttctgtgtacatgtgtgtatgtatgcatgtgtgttctgtatgcatgtgtgttctgtatgcctgtgttctgtgtacatgtgtgtatgtatgcatgtgtgttctgtatgcctgtgttctgtgtacatgtgtgtatgtatgcatgtgtgttctgtatgcatgtgtgttctgtatgcatgtgtatgcatgtgtgtatgtatgcatgtgtgttctgtgttcagtgtatatgtggatgtgcatggatgtgtcttctgtatgcatgtgtatatgtgaatgtgtgcatgtttgccacgtatgcatatgtgtatatgtgtgggtgcaaatgtgtgtatgtatgagtggaaggattgtgtttaagtgtgtgtagctgtgtaggtatgtattatgcatgtgtgttctgtatgcagtgtgtatgtgtatgttggtgtgtgcatgtgtagatgtgggtgtgtatgtgtgccttctgtatacatagagtaaatgttccttcct

SEQ ID NO: 469640 - DNA, 633 bp, Homo sapiens
aaggacacttgcaagtgtgtcattctaaagtagttgggggaaagtatctctccctcccctctggggaaacatgagttctcccacacagcagcggagaagtccatctagagctgaccctctaacaggagagagaaccaatgagcgaacaggcccaggtcaagccccgtgccccagcttgtatgccccgttctgggctctctcccttgtcctctctctgccccagaagtctgacctctctcacttagacagccacattcggctctctccagccccagagtgcccaaaccgccactgctctctggcctgctctcacctgaaggctgctttggtcacagacaatcaaccatctcaccttcagaaagctggccctggatcccccgtgaccgtctctttccataccctgcctctgtccccatattcctgcattcagcgtccacctttcctaacagtcatgcctctgttttgctcagctctccaaccccagggcccaacctgccaagtcctgtgcccagcacacggcaaatgttccattcacatctcctgaatgaagtctcttacactatctcaaggcaggctgtcccaactgcaaacaagttgtccaaatcagcaaaggagatggaaaggcaagatgag

SEQ ID NO: 469641 - DNA, 711 bp, Homo sapiens
ctttcaactctctacatagcattcaatatgttatttattaacctacatatcaccacagttcttcaaggcaagcatggttatctccagtttgtaaataaaaaagggcttcagagaggctcagtaacttgcccggcatcacacagccagagcgtcaaatcttgcctgcagaggtttcttggggccaggagagtgtgttttagtgccttgggccaggctccccaacttctccacaactgcccctgtctctcctctcccttatcctgctcagcttcacacagttacttacttttctggtccccaaaggcctttgagcaggtgataccaattccaaatccttctgcaagagccactgcagatttgtccgatgttgactcctctgtgtcactggtgctagcttcccagcctgttcattttattccactgccaatgtagcccaaagcaaatgcacacgatttcctatttttctgttatttttcatggtctatcaaaaaatatatgctcccactttccaaaatcagaacatccactagtgtctgcatgaagtaagtcatgagaaagaacactcatggagttcagcttacagtaaacatgtatttgatttccagctctttgcaaaatgcaaacaaactttgtacttgtttgtcttagtcttatgtcttggcatactttcccagatggctaaatgagaacgtagaagttgcagaaataatc

SEQ ID NO: 469642 - DNA, 1087 bp, Homo sapiens
gcttcttgacacctcactgtcgtgtttcctcttctttttacatcaaagttgaaattgagtattcaattttattaccgctaacacttaaaccctgatcaaagtatatgatgcatatactaacaacatcaccaccacaaccactaccaccaccaccaccaccaccaccatcaccaccaccaccaccaccaaccatcaccatcaccatcaccaccatcaccatcaccaccatcagcaccatcagcaccatcaccatcaccaccatcaccaccaccaccaccaccatcaccaccaccaccaccaccatcaccaccatcaccactaccatcaccatcaccatcaccatcaccaccaccatcaccaccaccatcactagcaccatcactaccaccgccaccatcatcacaaccactaccactaccaatactaccactaccatcactatcaccagcagcacttattgagcacctattgtatggcatgcaaagatgttacaaacaagtgccagattgcgtgggctcaggctggaaatgctgtagacattcagagaacagggaccagtgaaggaacctcagtcatcaggcttcacaagatcccagaaaaggtccttcagacagggttcttagggaaaatgaaaacagtgttatacctggccccatggaaactggacttggggggctgtaccagatgcaaaagcattctagtaacaaggcagtcttgtggcctggcgcagcaggtcccgactcacctctcaggctctactgtgagtgttgactgctcgctggtgtttccactcctgctcctggaaggactcctgctctctgtgtcttctgcagaggtttccaagagaggggatcccatcgaatccacgtcagtttttattgtttaatttttatgtgttcttacatgtcgttgactgaacaccaccaaggtaactacctgaccctctgtagtctctcctgaacccataagtgagtttgattagcttttcttcagggaagcacttcatagtctctgcaagctttaaaatacaagatttaaaatatctgctgtttaaaacacaagatttaaaatatgattagcaaacaat

SEQ ID NO: 469643 - DNA, 539 bp, Homo sapiens
gcatacaaagctgctgactcccgtcagcccaggccccggtgagtgatgttcctcaccctgtgtccaagtgttctcattgttcaattcccacctatgagtgagaatatgtggtgtttggttttctgtccttgtgatagtttgatcagaatgatggtttccagcttcatccatatccctacaaaggacatgaactcatccattcaggacataggcatgggcaaggacttcatgactaaaacaccaaaagcagtggcaacaaaagccaaaattgacaaatgggatctaattaaactaaagagcttctgcacagcaaaagaaactaccatcagagtgaatggcagcatcgtggaaatgtttaggctttactcaaccagtgtcagtcatgaagtatctcctgaagaatggagagtttctttgtttgccaagatgccctgctttgaatactgctctgattcaattcactcttatttcctaagccaaatttaagatcataagactcttctgagaaaattctaaagaccatccatcacactctgtcc

SEQ ID NO: 469644 - DNA, 487 bp, Homo sapiens
cgtcgggccgagtgcgctgcagtcagaagaggagctgtgtcccgcatacggtgattgtaagccaggtccatgccaccaagagctggagctgtggaatgtggagaggttgtcaacgatgctaaaagtaaaatgagaaaaacttgttttccaacccttttgttaagattcactggaaaggaacattgccttctggaaatcacttacgggaatgcaatttttacagcatttcttggactcatgccctcgttcgtttcatgggttgaaggaagggcaaaaggcagtgaaggaggggaaagagaagactacgtggaaaatgggaatttttatcaccatccagcgataatgaggcctcacacctcccatggtgacattagagaccacatggggagcagtaatgaggcacccctcccccgcccagcagaagtgttgtcagtggaagccaactggggggtcccaaaataccactgctaccaacagtaatgagata

SEQ ID NO: 469645 - DNA, 778 bp, Homo sapiens
gacgtgacctccacccctagtgcctgcgatctgactgcccgacatgacctccacccctagtgcctgcgatctgactctgcccgacgtgacctccacccctagtgcctgcgatctgactctgcccgacgtgacctccacccctagtgcctgcgatctgactctgcccgacgtgacctccacccctagtgcctgtgatctgactctgcccgacgtgacctccacccctagtgcctgtgatctgactctgcccgacgtgacctccacccctagtgcctgcgatctgactctgcccgacgtgacctccacccctagtgcctgcgatctgactctgcccgacatgacctccacccctagtgcctgcgatctgactgcccgacgtgacctccacccctatgcctgtgatctgactctgcccgacgtgacctccacccctagtgcctgtgatctgactccgtcctgggtcttaggctctggctgcagccctgcccgcaggctccaggtcctctgcaaggacctaactgctgaggacaagcccacaagtgaggaaacagatgctcctctagctgacactaaagataagatgcctctagaaaaacaaactcctgttatacaggaacaggatgataaatgcgataagctccatgtttgtgacaaagcagtgtttcaaatgagaactattacctgatttgacgatgccttcttcagctccattctccagccactgagattcactgtccaacaagcggttttttgattcactaagtggtttgataggaaa

SEQ ID NO: 469646 - DNA, 534 bp, Homo sapiens
ttgaaaacaatgaattgggccagtgtggtcactcatgcctgccagctggctggtgatgggcttttgaagactctgctctctctcctgctggaagagctccccaggggccaccaggagccaggtgaccgctctcagcctcttcctccaaactcttccaacctctgcacattacccagttccaaagctacttccacatcatcaggctctgcagcgatgactgggctggggaagcaaatgcttgctggccacagagcctcattgcaagttgttcttgaacacctgaacccttcctggtgcccaccaggcactatgacttcctcaccagaatgtggctttgcctgggtgcagacagaacctgcttgggatgctcttggccaaggaagactcttctgtgtgcaggctgtcctcacaccctgtcctcacaggaaaaggcagattgaggctgctgagtcagcctagttctactgtttacgcttctaaaataaacaggacttgatcacacaaaaaaaaaaaaaagagagagagagagctcaa

SEQ ID NO: 469647 - DNA, 1545 bp, Homo sapiens
ctgttttgggttggtttggttgttggtttgagacagtctcactctgtcgcccaggctggagtgcagtggcgctctcatggcagcatctccagggcttaagtgaccctcccacctcagcttcctgagtagctggaaatacaggcactatgacttcctcaccagaatgtggctttgcctgggtgcagacagaacctgcttgggatgctcttggccaagggtattgggggctctctggccttttgcaactgatccaaagacacccagagccaacttacctcaacctcacccttatagaagactcttctgtgtgcaggctgtcctcacaccctgtcctcacaggaaaaggcagattgaggctgctgagtcagcctagttctactcccgaagctaaagaatgctgttattgcaaactacagacaacccacttggtagaaggcagcaacatcctgaatcctggtcttgcaaagacatacccaagcaacagcagcgatccacccacctcaggacccagttctcagcctctgtgtggctggcttttaaagctaagaaaagccagtaggaatgtagaaatccagtgagaagaaagccatggaggcttctgagcactctaaattcccacctgggaatctggcccaaacaaattaattcacaagataataaaagctgtatgcatgaagatgttcattgcagaattttttatacctgtgacagagacaggttaaatgacaggaagatgattatgtgaattgtgccgggccaacaaagagcaaaacttcatctcaattaaaaaaaaagaaatatatatatgtgtgtatctgtatacatatatatgtatctatatgtgtatacatatagatacatatatgtacatgtgtatacgtaaatatgtgtaaatgtacatacatgtatacgcacacatatgtatatgtgcgtatacatacgtgtatacgcacacatatgtatatgtgcgtatacatacgtgtatacgcacacatatgtatatgtgcgtatacatacgtgtatacgcacacatatgtatatgtgcatacatacgtgtatacgcacacatatgtatatgtgcatacatacgtgtatacgcacacatatgtatatgtgcatacatacgtgtatacgcacacatgtatatgtgcatacatacgtgtatacgcacacatgtatatgtgcatacatacgtgtatacgcacatatatgtatatgtgcatacatacgtgtatacgcacatatatgtatatgtgcatacatacgtgtatacgcacatatatgtatatgtgtatacgtatatgtatatgtatatgtgtatacgtatatgtgtatatgtatatgtgtatacgtatacgtatatgtatatgtgtatacgtatacgtatatgtatatgtatatgtgtatatgtgtatatgtatatgtgtatgtgtatatgtgtatacatatatgtatatgtgtatgtgtatatgtgtatacatatatgtatatgtgtgtgtatatgtgtatacatatatgtatatgtgtatgtgtatatgtgtatac

SEQ ID NO: 469648 - DNA, 989 bp, Homo sapiens
aggtcatgagggtggagcctccatgaataggatttgtgcccttataaaagaagccccaaagggccacagcttgcgagtcgcggcggcagggtcgagtgggtggcggcagctgacaggcactcctctcccgatggcagtggctggtgcccagcgaggcgggcagccaccagctcgcgttcccgcgccccagctcgcgctcccgcgtcccagcccgcgaggcgccagggctgcgccagggcatggaagaggggctaatggacgcgaattaatgagggtacctaccacacgtgcagcgctgtgtctcgctgagttttctgaagatgccagatctgatcaaaggcctgtcatcccttcatcaaggcccagggttgctttctccatgtctgtggtggaccttgacctcaagccctacgagagcattccctatcagtataaactggatggcaagatcatcaactactattcaaagactgtacgtgccaaagacaataccatgatgtcgactcggttcaaggaaagcattgctgctggaggtgtaatggacattaatactgctttacaagaggtgctgaagaccaccctcatccacgatggcctagcacgtggaattcacgaagctgccaaacccttagacaagggccaagcccatctttatgtgcttgcatccaactgtgatgagactgtgtatgtcaagttggtggaagccatttgtgctaaacaccaaatcaacttcattaaggttgatgacaacaagaaagtaggggaatggacaataccgtttgaagattccagccccagtctgtgaattacaaatgaacagagtttctcttatcccagtctaggatacaatcaaggttttcaccaccctggtgaaaggtgcctttgctgtctcatttgtcagctccctttgggtgaacccagacctgtgttcaggaagtgatgatgaagcctttcccttcaccttcacaaaaaactgtgatttggcacag

SEQ ID NO: 469649 - DNA, 595 bp, Homo sapiens
cgcgggaggcgtgaccgggcgtttacacgcagcctgtgagccagcgcctggaaattcctttcagggactgcttttgcatctagaaaccagaaatctcatgaggcttattcactgtcatgagaatagcacgggaaagaccgcctccatgattcgattatctcccactggatacctctcacaacacatgggaattatgggagctacaattcaagatgagatttgggtggggacacagccagaccatatcatcagggttgttcaggagactccttggggagttgacaagtccacattccttaataaggccctcaggatgtggggtgctgtcccctgcccactcttgcagctgcctctctccactctgtctgcctgtgccccagccactctgcccacctcttcttccttgaacaagctgcttcccactcaaagtcttcactcagctatttcttctccttggaataatgcccttcccccttgttgcctggcaaatttcaggtctctgcttaaatgttacttcctcggggaagaaacactctccttgaagttatttgtgttcttttccttcacggtacttaaataattgtttgtgtaagta

SEQ ID NO: 469650 - DNA, 674 bp, Homo sapiens
tttcaattaaagtgttgagggaagatggccatgaccaacaccaactcaaagctgtccatcaatacagtgaagaaaacagcctctcaagtcagctttcagtgtgtgaaagggccaccatttcctcccttgcaaaccgtcatgctagtcagccccggcgtccaggaccgactcacaaggccacgtcttgacctgcgaccctgtccagacccacgaccctgtccagaccttcgcgaccccgtccagacctgtgcgaccccatccagacctgtgcaaccccgtccagacccgcgaccccgtccagacccgcgacccggtccaaagctgtgcgaccccatccagacctgcgaccccgtccagacctgcgaccccgtccagacccgtgaccccatccagaccctcgacccggtccaaagctacccgcgaccccgtccagaccctcgacccggtccaaagctgtgcgaccccgtccagacctgcgaccccgtccagacctgcgaccccgtccagacccgtgaccccatccagacctgcgaccccatccagacccacgaccctgtccagacccgcgaccccgtccagacctgcgtgtgctcagggggcgcaagccaacactgacacctgaagcgagcatgggcttagagagaaagccccccagaaatgtgctcttttcccac

SEQ ID NO: 469651 - DNA, 580 bp, Homo sapiens
agtgggtgttcagtacccatatgttagatgagtaaatgaatagcacactggatgccctcgcagactcatctctggatgtctctgtggtgctgcctgcaaatgcagccataatcttacgcccagtccttgaggagtggcccacgggcaacaaggcctcagtggaacatgttggtggatttcagggcacggcagctgggtccctggggagccgcagcctccaggggctgctcctggtgctgtcagcgttcaaagcagtcgcttcacttctgccgcaattatcagccgattatctccccaatgcccgcgctcagcgcttccctgcaacggctgtgcgttattctctctgccgacagtggggactccctgctaatcaggcaggagccggcaaagcggtgaggtggctgcagctggagggcaagctgctgtgttcagctgctcagatgcaggtgagggatcggtgagtggttggattcacagagtggtgagaaaattgaggctatatgtaaaggagtaagggtaatgattgattacagaatctaagtgggctaagtagaaaagttgtagtggtttaaaaaaatgt

SEQ ID NO: 469652 - DNA, 1169 bp, Homo sapiens
tccagttttgaagcagaggtcagctgggcggtgtaggacactgctcccgggttgaccaatgggccacatcaatgggtctgctgtttggggtcaagatcccaagaccccaggggaagtcaacatccatctgaggctctctcaggtcgtgcaagccatctctggcctcactgccctcccctttagaaatgcactactgagcgcgctcgcggtcgccaggagcggattgggcccccgccgcgcgcaagccttggtgacaggggatggcgcggagctgcctctccgggaaagttggatctgtgcgcccagacatggaaaagggattaggacaccggcagatcttgccctcacagagcggaggtgggggccttggaagggcacaccgcccgtaggcgcgaaatccaagaagaaaatgacactcatcagccagcctcgcgcggggagaaagggcggggtgggggtagtggcaccctgcccgtcctctcccacccccacagtccgggcccacagtccaggagtcacaagggatgtgaatccccaggcataatgtgaacccccaacaaacccaaggcctcagaatgcgcctcacctctccctccccaccagcagaaacatcctcccactctcccaacccctgctccagccacgccaaccctttaaccttgtcccagaatgtctaaactgtatctgcctctgtgcctgtgcacatgaagttgccttggcccggcgtttgctccacagccttctgccaaactcctactgcttgatggctggaagccttcgcaccctggcgctctcctcccaggtcagcagtctctggccttcctgtgcatccagcccagctttgaacagtcctgggccccaacccttatctttttccgagtaattacatagttgcatgattggcttcaccgcctctggatcagatgagcgctactaatgaaggatacaagttgtaaaactaggttttatgtgaactccagtcatcacagtttaggtgcggctagcgattttacagatgcggggttagtaactggcccaaatccagggcttccgggatgctgttttccttttttgtttcttagcagggatggcagatgtttgtagaacagatccgtgtaaaagtcagtatcctaagagattaaattgtaaagcaggacaagatagttaac

SEQ ID NO: 469653 - DNA, 1267 bp, Homo sapiens
ttaaagccggcctagggaggtgatggtgacagttctgagcagggtgcacagaacacagatttgaggcctccttgccagaacacagataggatgcccagaggatggatggatggatgaatagatggttgaatatatggatggatgatggatgaatggatggaaagatggatggatggttggatagatggatgggtgaatggatggctggcttgatgtatggatatatgtaaggatggatggatggatggatggatggatggatggatggatggatagatggataattggatggatggatggatggatggatggatggatggatggatggatgaatgaatgaatagacactcagaaagtctttagtctcctctagatttcatctctgtggctgagacaatggcaaagcatttctcttttccatccccatccctggagctgtcgtttttcacatccatcagcatcaagatacttcccactaaacttcgtggctacgtaagtcgtgcctgcttcttcctcaccttctgccatgattataatgaaactgaggccaaagtgaagatgacaataagcccctccctacgacggtcatgggagatatcaccaagagatcatgcagttctttccttgatcacagcctcagaatccctcttaacacagtgctctgtgttggcagccattcagataaccaatcaggatgaagaattgatcgtgggctcgatcctggggtccctgggacagtcccatgccttgttctctcccatgttcctcatggttatggagaacaatggtttggcgaggactggcagtgctgtgagagatttccaaggtgattcacatcgaaactccccgtttgacagagagggatctgagtgcaacggaggcgaggcctttagtccgcagctgcagtattctcccggtctggcagcctcctgcggggcagcagcagcaactttctccaccatgaaagaggcagcatggtcctgaggctgagctcctcctgaaatctcagattagagtctgttcttcaacaattttgtgagccattttataccccatcataaatccctttctccttaagctagttagagtggattctgttttttgcaactgactgctgactgattctagactctccccttaacaagcatcttcaggacacttgtaagcccataagggagatcccggactcctggcagtagttgcagggcagtactttggggtcagagtatgcatcctagagaatgtaaaagaagatacttcttcagaa

SEQ ID NO: 469654 - DNA, 1387 bp, Homo sapiens
cactgagctgagggtccctggtgcaccgagctcctgaggcccacccaccacaactgtctcatgaccctccctggttttggctttcctcccatccctgttccctcatctatttcctggaacaacttcccagataaactactgacacctaagtctcaggacctgcttcatgggcacctcaaactgagaggcctgagctccttcccttccacctgcgtctgccccatacaaagctccgtttgtgtccctgcggctgaggagaaacggctactccgcgccacctcatccaccgacaggccacaaaagcccaagcacgaggtgaggctcaaaacaggccaggcccaggcgctgccaagccaaacacagaggaaacgggtgcgagcccagcagagaaaccagattcccctggaaatcgctgctccccgccgtgtctggaaggccagccccaataaagcggctccggaagacctgaaggacccccatggccctcatcttgatggagatgccaataaaaatctcagaacatccagcctgcaggccctgtaggcactgccccggggctgtaaacccggatacgagcagctggggagccggagggaagaggcctgctcccaagaaagcccaccagccagcccggccaggcccgcaagtgattagtcattctttgtaagaagaaaattaggtgccttgtatggtatggttgtaacctaaatgcatttaacttgcaaattcatctacaggagcttgcacagacagaggcataacacatgtaaatggtgtggtaatagctcctgctgttccactcagagttgaggttgggagacttgcctctgcgctccctccaccatctcagccccagacaccgccccaaggggagcactggctatccaggcttctctagggcttaaagtcatacatatttttctaccctgtgactctgaaaggtaagccagttccttcatttggggcatcccacagagacagaaatctgtttgaaggggatggaaagaactggtttgaaccttccggatgccagaggaactgaacattcaacacaaagactttttttttccccttcaaaaatggtctgagcttgcaaactcccaaacactaaacatctttcaaggataacttattcaatggtatcactacatgccccacttgatgtaataaacatttcccaggccattccttagccttttcctgggctcagtcaatcctcccacctcagcatccggaatagctgggactacagttgcgtgccaccacatctggctaatttttgtgtatatatatatacatatatatatatgtatatacatatatatatatatgtatatatatatatatatatatatatatatatatgtatatatatatatatattttt

SEQ ID NO: 469655 - DNA, 532 bp, Homo sapiens
gggtcacagacagaggtgctaaatcgatgcaggacgtccgccccaaagacacgcttgtgctccctttggagagtcctgcatccttcgccctctgttcatctgtctgtttgggtcctggggatgagtctaggtggcggccatctccggatgtccccaggttgctctgtgtggggaagggtggggaggctgctgggaactggactctcctggagagaggcagggccagtgggctgtgggtgctggggcttggcacggtgctccccagcctggtggccccctctgcagtggatggagtcgggatcctgggggcactcaagaaacggaactctaccaatcacctggaggatcctggatcaagtggagccccatggagcctccggtgagaactcaccgcagctgacacccgattctgggctacgcagagaacccggccgtgcgggaagtccggcctgcaggttgtattcaggagcagctttttccaggaaagtttccattgctgtcagttttattttgtgttaattatttccaccat

SEQ ID NO: 469656 - DNA, 2701 bp, Homo sapiens
aggagaaggaagagaggtggaggaggagaggagaaggaggagaggtggaggacaggaggaggaggtggaggaggaggagaggtggagtagaggaggaggaggtggaggaagaggagaggtggaggagaggaggagaggtggaggaagaggagaggtggaggaagaggagaggtggaggagaggaggaggaagtggaggaggaggaggagagatggaggaggagaggtgaaggaggaggaggtggagaagaggaggaggagaggtggaggaggaggaggaggagaggtggaggaggaggagaggcggaggagaggaggagaggtggaggaggaggaaaggtggaggaagaggagaggtggaggaggaggagaggtggaggagaggaggaggaagtggaggaggaggagagatggaggaggaggagaggtgaaggaggaggaggaggtggagaaaaggaggaggaggagaggtggaggagaaggaaaggtggaggaagaggagaggtggaggaggaggagaggtggaggagaggaggaagtggaggaggaggaggaggagaggtgaagaaggaggaggaggtggagaaaaggaggaggaggagaggtggaggaggaggaggtggagaaaaggaggaggaaggaggagaggtggaggaggaggaggagaggtggaggaggaaggaggagaggtggaggaggaaggagaggaaggagcccctagatggagggcttctcggcagaggtgggcctcggaggaagagtcgggccttctggcggccccacctcggagcttggaggccctccatggggcccctccccaggggcctcctacagtgccctctcctcgagcctgccctgcttccagcccagccccggctgaggagtccttcaggggatgtgctcctgggctctgagaatctgtgacagtgcctgtgacatgccagtcaacctcacacgacaagctaggccatgcataagccctatcctgtgcgacgtggggacgcagatgcaggcacacccacatgaggggctgacaagcgccagtcccgtgccaggctcctcgcggatggggagtcccgggtccagcaccaaacatggggcgggcctgtgggacaggctcctgcgccagccctgccgaggcctagcagacttgcttgggaacacagtaggagagcctcatctgcttattgacaagatgcgaaaaatttcgtcctcgtctcaggtttttctgaggattgaaggaagggagggccctgtgcagaagaggctggtagatctcaaggtatccatgaacatggaaaacctcaaacctgtggtttcatggaggagcaaagagggccgtgttctggcttcctgtccttaagggtgggggacgtggcatctgtgactccacctgtctgagctcttgcctctgactttcagttcactgaacaggccaccatgaactgctttcagttcttctgctgaaaagccagacccctggaggaaggctgggcaggggcctggggctggaggtggatcaaggacacctgcaggttgagagggtcttgggtgggagagcactggatggggagcagacctgcctctgaacacctctctccagcttcttcctcactgacagcgctggtgtcttgtccttcctggatccaaacaatgcagaatgttgaacacaccctcagaaataatatactagcagagccctccaagaacacactgaggacaccgtgatgcagggatgcgccatgacacaggccgtctgcctcctcgaggagcttctctatgaaaacatcaaggttgagggagtctgaagcatggcaggagttcctcaactgtccactgagtggcccatgcggtgtgaagggaatctgagtgtgccctgtatcttatgtccaccagtcagggtctggcaggaaggggattcttcccagacttggacatcaaacactgattcccccagggcctggtcctgtgcccacttcctttcttctctgacactggagcctgggagagcctggccacagcatggctcttatacccgtctcccttctctctaagccccctccccggccgaaacacaggagccctggccttgcagatccagtgacccacggaccatctctgcctgggtgacccctgaaaacctccaaggttgtccgaccaggctgagctcatcacctgccctggcttgccctgccctctgttccctcccctctgtcaatggaaccccaccagccaggttagaaacctgacttaccatctctctctccttccacacccactctatccccttagacccctgactcaaaccctcatctatcttaaagggaacatggttggtgggaatgtaaactagtacaaccactatggaaaacagcgtggagattccttaaagaactaaaagtagatcttccatttgatccagcaatcccaccacagggtatctacccagaggaagagaagtctttttcgtaaaagaacttgcacacgcatgtttatagctcacagttcacaattgcaaagatatgaaaccaactcaaatgcccatcaatcaatgagtgaataaagaaactgtggtatatatacacaatggaataccagtcagccataaaaaggaatgaattaatggcatttgcagcaacctggatgggattggagacgattattctaagtgaactaactcaggaatggaaaaccaaacatct

SEQ ID NO: 469657 - DNA, 888 bp, Homo sapiens
tctgcgcttgttcagagcccagacctggcacctgcctgctaaggtgactgtgctgtctcagcatcacacgcagacacacgctacatgccgacgtgcaagcacagacgacacacgggccagggattatccagatttgggggccaggcactgggctcggtaatgcggctgcttaagtaacggggatttgccgttttccaagaacactaatacgataaatgctctcgcagctaaaaccgttctctgcgctgtctaatcgtgctttgacgacgccaaaggccttggaggctcgcgcagcatttcaggactgctgtaaatacccattgttcccgtacacagcacctctgagaggggcatcctggtacgtgcccctcaccattagaatacttccaggaaaggattcctgcacacaggacagcgaggaactgctgagggtgaggaacaggcaatgggaagccggtgtgaacccagagggcctctttgaagccctcacctcctgccagggcagaatagaggaggtgaggacccaggagtccgaatggctgaagtttgaagaaggctacaggccctgcccaggtgacagcgagaagatggctatcaatgaggaactggccctcatcagacaccaaatctgccagcaccttgatcttggacttcccagcctccagaactctgagagagtgtggtcatcagaacgcctgcagctgaagctcctccaggccctgcctcactgcagggagctgcctctcctgatgtcggctcttcctggcagtgagtgagccagtgctcactgtaaagtcctggccagtcgggcccagcctgtgctgcagctcagcttctccccatgacccatcctgcttcctcctcttcctttcgcagctgctgagccct

SEQ ID NO: 469658 - DNA, 1727 bp, Homo sapiens
gaatctgggaagaccaacaggagggtgctggggggctgggacctgcggtacacatggagcaggagcctggtgctgtcctcactgctgtgcatatggagcaggagccgggcgctgccctcactgctgtgcacatggagtcggagcctggcactgccctcactgctgtgcacgtggagctggagcctggcgctgccctcactgctgtacacatggagcaggagcctggtgctgtcctcactgctgtgcatatggagcaggagcctggcgctgccctcactgctgtgcacatggagtcggagcctggcactgccctcactgctgtgcacgtggagctggagcctggcgctgccctcactgctgtgcacgtggagctggagcctggcgctgccctcactgctgtgcacgtggagctggagcctggcgctgccctcactgctgtgcacgtggagctggagcctggcgctgccctcactgctgtgcacgtggagctggagcctggcgctgccctcactgctgtgcacgtggagctggagcctggcgctgccctcactgctgtgcacgtggagctggagcctggcgctgccctcactgcagtgcacgtggagctggagcctggcgctgccctcactgctgtgcacgtggagctggagcctggcgctgccctcactgctgtgcacgtggagctggagcctggcgctgccctcactgctgtgcacgtggagctggagcctggcgctgccctcactgctgtgcacctggagctggagcctggcgctgccctcactgctgtgcacgtggagctggagcctggcgctgccctcactgctgtgcacgtggagctggagcctggtgttgccctcactgctgtgtttggcagccctgagctctgcccagagcatcatgattgggcccagtagttccaaaaagtggaggaggaagtccaggccagagaacacagggctgtggcccagatagagctgaaacccagcatcttccttcaggtgattaggccatcatgatgtagcagcagcccctcagcacagataccctcctccttccccctctgcttatgtgtatggcgctttcctatctctcccctgggccttcaaggtaaagggtcaactccacacagtgccttccagcgtcaccttttgtccatgccctctccctccctggtctcgtggacttcactgccattgcccacacctgccaggatgaccctcactgccaaggcaccatacatgacatttcttccattccggaggttttcccccaattcttcttcatgatacagctcctccaggaagccctccctgacctccctccttgggtttcccacctctcaggctttctgtgttgttgatttctttttctccagctatcctgtctgctctgttaggatggcagtggggacagggacatgcctgctgagcatcaggggctcagcaaggctgtagagagtgatggcgttgtgtggtatacccccatacgttctcacacacacgtgcacagacatgtacacgttagacatgacacatcctcacacaaacacacatgcagacacacatgcatcatcacatatgcacatgcacaaaagcacatacacatgtgcagacacttgcacattatacacatgaacacagataacacacacatcacacacaggcacacacctgcattacatatctgactgaatgatgtgttttgcagtttcctggcctttgcat

SEQ ID NO: 469659 - DNA, 613 bp, Homo sapiens
cgtgtttaaggaatacaaatccttctaccataaagataggcatgtgtccttgcggcactattcacaatagcaaagacatggaatcaaccttgatgcacctcagtggtggactggataaagaaaatgtggtacctatataccatggaatacgatgcagccataaaacagaacatcagacatcaggtcctttgcagcagcacggatggagctggagggatggagctggaggccgtcatcctacgcgaattaacgcaggcacagaaaatcaaatactgcatgttctcacttataaatgtgacctaaacactgagcacacatggatacaaaggaggaaacagggaacactgggacatactctagggtattattcggatgacctgggtgacaaaattatctgtacaccaaaccccatgacatgcaatttacccatgtaacaaacctgcacatgtacctttgaacctaaaataaaagctggggggaaaattgtagtaaatgtccctaagtatgaaataaataaataaaatttaaaaataaaaaaattaataaatcttcaaatgcttccacatatttttttctggtttaagcaaagttagagagatgttcttgggcccct

SEQ ID NO: 469660 - DNA, 1181 bp, Homo sapiens
gctcctccagctccattcattttagcccgatgcaatgaggcttctttctgccttcaggaattgcttgggcaatggttcccaggaccttctgactcagaggattccacagacttttcagccctttcttctgggaggtctccgtggccttcccaccactgcctcagtcttgtggtgtcctgcctctccagtgcggctagactgtcttccccagctgacgcccatctgcggttccccacggccagtctcaacagtctcctgcctgcacccactcctcagccttctccattggaggctcccctcctcagacacacaggcctgtctgctgccccatcgtctctgcgcaggctgctctctcggtgtccctggcccatgcccactccacgctccagggctcagcctcctctcccgctctccaccccacccttcgtctcctgccctccaccccacccctcctttcccgccctccaccacacccctcctctcgggctcctgggcacccccccgccacctgcgtctcctgtcgtcagcaaaatgcactatttgctcatccagtgcccacagtttgcccaccggacggccctgctaggtgggaagctccttgcaggcaggaaccccatctccttgactttactttggaatccccgcagcctcatacggggctgaggcaggtccttccgtaaaatggaactgaatgagcggcgcttaatccatccgccaaaggccagtctcccttgggttttcaacagctggagaaatatcaaaagaatctgaatatcaccatctggaagttgtgccatggactccagtgggcaggattcgagctgggattctcttcttcctctagcagtgtatttcttctgcttaaaatgagcacaaacacatctaattccctaatggaccaactcagacctaaaagtctcttattctttgcccgccttcctctacccacatggattcctgggattctctaaatgcagatggcaatggggagggctggggattcccatcaaggatatttgatcatcggtgacttcacttaaccaataaatcaaacgtgttgaaatacacacatgtcagaaatgtgccgttagttagcagttcacattgtatgtggagtctgtatttataatataacattagttctgccctaaaattccacaggacaaattccatttggaaac

SEQ ID NO: 469661 - DNA, 939 bp, Homo sapiens
ttgggtgactcaggcaccttatcggagcccctccccaaccccatgtgagggcttaagtgtgactggttgcagacgtggcacttgtggccgtgtaggatgccacacgtggctgatgtggaaggggcactgcagggtgaggacggaaaggaagcaggcctgggctccagggtcccagggctctgggagaggactcttggtgcctgctggtggctgttccctcctcctctctgtcaagccacttttcccgtttctgcactcgctcttgggctgagactcctcaagagggaactcccttggtgccgccatctgcggccgtgggagggatcagagtggcccagcggccatgcagagggtgcgcagtgctgaagaagtcatggagaacgaagtcaacaagagctacccttggactctggatgcctgggagggtctggagccgtcgggcagaaggagaaggtggagcgggtcttcccggaggccggctcccacgggggcggccaaggctctgggcctctcggcatgcctctgcggatcctgttggatccagaaccgtctggatcacctgaagagttatttgataccagctgattttctaaggggacagccgggtggggatatcataggcaggcacactggcttcagaattagaggccaaaagtgtggactctctcagccactaactcagttctgctctctggcaaaacccttcgcagctcgggctgccctgtctgtgagtggaggtgggcagctcccgtctcagagtcctggtgggggtgaggtggaaggccccaggggcggcaccctccagtgaactccgtagcttcctccccttcatctcccacgttgtttacagtgtagctaggggtcaggacactgtccctatttcatatgctttgtttggcattttcggtatttaagcctctgtcaattcaatcagacttc

SEQ ID NO: 469662 - DNA, 626 bp, Homo sapiens
ttatcccattaaaacctaatcaaccttaccctgctcaacactagtatcccatcccacaacaggctttaaagggactgaagcctgtgatgactcacctgctacagcatgggcttctaaaacctataaactctccttacaattcccccattttacctgtccaaaaaccagacaagccttacaggttagttcaggatccgcaccttatcaaccaaattgttttgcctatcccccccatggtgccaaacccatatactctcctatcctcaatacctccctccacaacccgttattctgttctggatctcaaacatgctttctttactattcctttgcacccttcatcccagtctttcttcgctttcacttggactgaccctgacacccatcaggctcagcaaattacctgggctgtactcccgcaaggcttcacagacagcccccattacttcagtcaagcccaaatttcttcctcatgtgttacctatctcgacatagttctcataaaaacacacgtgctctccctgctgatcgtgtccagctaatctcccaaaccctgaccccttctacaaaatgacaactcctttccttcctaggcatggttaggtacttccacctttggatacctc

SEQ ID NO: 469663 - DNA, 610 bp, Homo sapiens
gcaaaaattggacagtggcattccccactttcccttgctcagaccccagaccctgaaattgacagaccctccaaggaatggcagggaggtctcgggacccacagagtaggtgtggggcaggtgcaagatcctcccaacagcaagtggaggttctggctgacacagcaaacccaggcccccagagtggcgtcagcagggaggcaggacacatctctgagcagagcagtgaactgtccgtgaggaacagccatgaaaggaccacctgcccaggatatcttcttcagcagggcgagaggcaaacgtatcctgggaaacgctgcaagaacggccagcgccttcaccagaattttctactggaaactgccggagggatggtgaagatgaggagaaggccacagccaactgcgggcaaaagaacagccaaactcacaccgcagcttggcagactaatggccatcatcattatgcccacgtagctgatgcactcatgttttctaatgtattctagtctattccattaaacaaacactgggcactctccccgcaggtaccatgaatttcacccccctgaatctggcgtgggtttctccagtccactgttttcatgttt

SEQ ID NO: 469664 - DNA, 1427 bp, Homo sapiens
ggagggtgctgcttgggaggcagcgtccctgacatgccgttcaccatatggagctcccgggggtttgtggggtgggggcagtgcggggagatgaaattagggtgcggcggctctgagaaccctgtgttgtgtctgtctctgagcctagagtgggaagatgcagaagatgaaggcatgaaaactacgggaggagttctacaagtggcatcctatctaaacctcgcatcctatctaaacgacgcatcctacctaaacaacgcatcctatctaaacctcgcatcctatctaaacctcgcatcctatctaaacctcgcatcctaccaaaacctcgcattctatctaaacctcgcattctgtctaaacgacgcatcctgtctaaacctcgcatcctatctaaacctcgcatcctatctaaaccacgcatcctacctaaacctcgcattctatctaaacgacgcatcctgtctaaacctcgcatcctatctaaaccatgcatcctatctaaacctcgcatcctatctaaacctcgcatcctatctaaacctcgcatcctatctaaaccacgcatcctacctaaacctcgcatcctacctaaacaacgcatcctatctaaacctcgcatcctatctaaacctcgcatcctatctaaacctcgcatcctatctaaaccacgcatcctacctaaacaacgcatcctatctaaacctcccatcctgtctaaacctcgcatcctatctaaacctcgcatcctacctaaacctcgcattctatctaaacctcgcattctgtctaaacgacgcatcctgtctaaacctcgcatcctatctaaacctcgcattctatctaaaccacgcatcctatctaaaccacgcatcctaccaaaacctcgcatcctacctaaacctcgcattctatctaaaccacgcatcctatctaaacctcgcatcctatctaaacctcgcatcctacctaaacctcgcattctgtctaaacgacgcatcctgtctaaacctcgcatcctatctaaaccacgcatcctatctaaaccacgcatcctatctaaaccacgcatcctaccaaaacctcgcatcctacctaaacctcgcatcctatctaaaccatgcatcctatctaaacctcgcatcctatctaaacctcgcatcctatctaaacctcgcatcctacctaaacctcgcatcctatctaaacctcgcatcctatctaaacctcacattctatctaaacctcaagtcctatctaaatttcacgtcctatgcaaacctcacatcctatctaaaaattcactaagatagatcagagatttcaatgtaaaactacacaactttgtttaaaacataggagaaaagctttgcaaactgagggcttggtggagagttcttagacatgataccaaaagcacaatccat

SEQ ID NO: 469665 - DNA, 757 bp, Homo sapiens
tgggtgctgtggcctgctccagatgccctctccaccggccagccccatccatgcccatgggcacacagtgcctagtctcacaaagcagctgtcagctgtgtcaggaacagacctgatgatgggttggaagagaattggaggtcctgctgcatggctggctttgaagacggaggatggggctataagccaaggaattcagatgggtctagaaattggaaaagtcaaggaaacagatgctgcccctagaaccctagaaggaacacagccctgtgggtgccttcattttatcccctgggactcggatcagacttctgacctcgagaacagcaagaagatcagagcaaaaatgctgtcactgtcactcctggcaaccatacccaagtattctttcatttgttcattattcagcaaatatttcctgagcacctactctgtgccaggtactgttctaggcactggggatgcagctgtgaatgtcatgctaagtccccgcttcctgcagatttcaccagttttacaagctgtcctagtcagtgggggtttctgtaacaaatactacagatcatagacatttatttctcatagatacggaagctggggagtccgagatcacagggctggcagactcagtccctgccctctcgctgagtcccggcacgctggagagagaccatctcttcttaagtctcttctcactaatctcatcatgagggccccacccacaagacctcatcaccgcccaaaggccccacctcct

SEQ ID NO: 469666 - DNA, 1387 bp, Homo sapiens
agggctgagctagtctgctcaccattggaactgggtgtccacttctccacgcagtgcccctgtcccatgggctgtgggtggtggttggatgatagaaggaagatcctggatggaacatgtgggaaggaggcagtttgactgacagggctgcgttgggcttcacccctgagtgtctggctctgccccccatccccaccgccaccataaatgcagagggccagtggcctctggaggtgggtccagcagtcagagggtggcccagcgagctcacatgaggcagcagataggcaccagggcgctgggcagacaagcggtaccagaaccactcacatgcaaagatgtgagctgaggaatggctgcgaccgcactgcaggtgccatgtgtgcacagaaagcccttgagcatatgcacaggtgcccccggccctcaggcacacatgagggcacaaacttgcaaatggctcagaacctcagcagggacgtggagaaatgcaaagccccggagtttcctccagtgttcaccggcctccgggtcaagaggagccgctgctggcagtcagggtcactgacttggtactcaaaaacccttactgtccctccttgggcagagtccccgcaaggctggctggaccaggacgtgcccccggccctcaagcacacatggggacacatgcttgcaaacggctcaaccctcagcagggagtcggagagctgtggagccccaagtgccacaggggccagggaagtggcgggagccaagtgcctgtgggtgccgggagtcctccgagccgaatggctgcaggccagggtgcaaggcccagcccgggagggcacagccgccttccccaaggtccaaggtcccttgcaggggtttttcctgtgggcgatgtcctgtccatgtcgagtgctttccatgtggcctctcgggtggacgccagcatcatctccctttgacatgaagcagaggtgctgggcttccacccatgtggttccactggtgtcctgcagggcttgtgagcgggtccgagtgccgctgtctcccacaggactgcagggcagtgtgagccgggtgtgccgcctgatccagcccagcagccgagccccagcctccgccccaggccttgctttccttaccagaactcgagattaccggcctctcaccaagtacggcctagactgtgacacccctggttcccaattccctgcaagatctgggctgccccacagcaggacggagccaggtgatggcccggtgtgcacctgagggctggactcagtccctccaacccccttgaggtctggacgtcaggctgggggcagggagtccctgcccaatgccctggggggagcagctcagaagctccccttcctcccccccgccgtttctt

SEQ ID NO: 469667 - DNA, 2637 bp, Homo sapiens
gatttctccagtttgggagaattcagacttgggggttgaactacttgtgatttggggcatttatcattgaaaataggcctcgttccctcacggagagttttctgtaaacaactcggcgccacacatccaggctcgcctgtagagtgatcccagcgggcgccacaggaagcaaaagagccatccagtcaatccagagaaccgcaaacaatcctacatcattgctgtttaaagccaccctggcagggttgtttgttgcacagcagaagagaactgatacactgtggagatctccttgtctctcaggggtcaccggcataacctgcagctcctccaccctccacctttccccttcctgtccatcacttttgaagggtgggcagtttacctaatcactgccctcctggggccaggaagccccttccagttcagccctctgctcccttcacaatgggcactgaggaaagcatctcctggcagggcctccgcacccctccaggccctcagatccctgctggacatacggacatagggtggcatagtgagggctggctcctgggaatcctgatgccgccacctggacagcactggaccctcagtgggctctgctgacagtgtcctgggggttcctggatggggacagatgacaggccgagggggtggcgcagcagggataggagctgcaatggaaggctaggccgagtctctccccacactgcccgcacgctctcccctgcatccagctcctgaggcgctctggcctcagcatctgcacctgtaaagtgggcctggagtatgcggaagtcccagccaggcagacacacaggagcctggtagacgtgcggctggggaaggcaagggaagtggcagttgggacgcgcgagcaggccgggctgcgtggacggccaccaggtggagggtacaggagcgctggggtccgctctcctagggagatggggctcggaccggggaccctgtcacccgcagtccgcgggccgcgggcgggcagaagcagagcctgggaccttgagggcgtctcccgactgggcgggggtcggcgctcgtccccgctgggaaggccgggaagcggaggcgcgcacagccccctccctgcgcccagcgcggtccgcggactccggctgggggaggggaacccggaaggggcccgccggaccacctgcctcgcccgccccgccgggacctccgatcggcccagccgggggcaggcgcagtggcggcggcgcggatggcgggactgtggccatttcacccggggggaggtggagaccctggtgggcggggggcccgccgaggccgcggggcgaggggagagcggagtgggcactcagcccgcgaaccccgcccccggggccagggcgctgggcgtccccgcccccgcacccgcagcctggtgcgcccgggtcgggggtccctcgcccggcttcggcggaggctgcgggtcgcagtgacgtccgcggccgccagggggcggtgtcgggccgcgctgggcgctggggtcgggctccgggctgccgcccgctttcccctgagcggatggggatactgaggcccggacccagccgtcacgggccagggcctcgcctctccccgagggcggtcggcagggtccgaccagggaacacctccgcccctgcaaactctctccgaccatggcgcagttcagcggcgctcagtccccaacccatgtcccggccccttccccgcctcgggcccggaaagtgatcttgcggacgcagggacccggcgggtcggggcatgtgggtagagggcgcgcccgcgcactggccgctgtcacccttgggactgccctgcactgtgcgacctgggccgggccaggccctccggtctccgttgccccttctgactcactgctcttcaagctgcagcaaagtcacagcaggcttcgccatgaccatgtcagccataccccttctgatggtcacctagcagatggccttgaaaatagaagccaccagagcagatgtctccgagcacctttacctgtgccctcctctgtgtctgtgcccaacatgctgcccccccccaagaagaactgcccatgtcgccagcccagggtacccctcacgtgtggcaggccccactccagccggcctcctccaggttatcagctggcctgcatcggacccctggtgccctccgcctgctccagcacagttggcttcagtggctgcggcctctccgtctccctgcagtgcatactcaactagagttgtcgagaaaacctaagccggccataccacccctccgagggcccttcccactccccagcgtcctcacacactttccggggcctctgtgcttgcagccccagcctccccctactgcctgtggctccctgcctgggcacacacagacccctgccctggtgggacaagccctcccagaggaagaggagtgtgcctgggtcaggtcccagcaggagcatgatggggtcaaaggtcaactcctatcccaagatggcaagacccccctccgccctccacctggggcttcctaggtgtttggaagtcatgctctgcccattcccctgccccagccaccctccccgcagcccatcctccctccctgaggaacctgccccttcacagctgttcacac

SEQ ID NO: 469668 - DNA, 3747 bp, Homo sapiens
ggctttaaaaatatttggagaacgcgatggaatttcgtgttgcctctgtagacatgcctgaggaaacccagacccaagaccaaccgatggaggaggaggaggttgagacgttcgcctttcaggcagaaattgcccagttgatgtcattgatcatcaatactttctactcgaacaaagagatctttctgagagagctcatttcaaattcatcagatgcattggacaaaatccggtatgaaagcttgacagatcccagtaaattagactctgggaaagagctgcatattaaccttataccgaacaaacaagatcgaactctcactattgtggatactggaattggaatgaccaaggctgacttgatcaataaccttggtactatcgccaagtctgggaccaaagcgttcatggaagctttgcaggctggtgcagatatctctatgattggccagttcggtgttggtttttattctgcttatttggttgctgagaaagtaactgtgatcaccaaacataacgatgatgagcagtacgcttgggagtcctcagcagggggatcattcacagtgaggacagacacaggtgaacctatgggtcgtggaacaaaagttatcctacacctgaaagaagaccaaactgagtacttggaggaacgaagaataaaggagattgtgaagaaacattctcagtttattggatatcccattactctttttgtggagaaggaacgtgataaagaagtaagcgatgatgaggctgaagaaaaggaagacaaagaagaagaaaaagaaaaagaagagaaagagtcggaagacaaacctgaaattgaagatgttggttctgatgaggaagaagaaaagaaggatggtgacaagaagaagaagaagaagattaaggaaaagtacatcgatcaagaagagctcaacaaaacaaagcccatctggaccagaaatcccgacgatattactaatgaggagtacggagaattctataagagcttgaccaatgactgggaagatcacttggcagtgaagcatttttcagttgaaggacagttggaattcagagcccttctatttgtcccacgacgtgctccttttgatctgtttgaaaacagaaagaaaaagaacaacatcaaattgtatgtacgcagagttttcatcatggataactgtgaggagctaatccctgaatatctgaacttcattagaggggtggtagactcggaggatctccctctaaacatatcccgtgagatgttgcaacaaagcaaaattttgaaagttatcaggaagaatttggtcaaaaaatgcttagaactctttactgaactggcggaagataaagagaactacaagaaattctatgagcagttctctaaaaacataaagcttggaatacacgaagactctcaaaatcggaagaagctttcagagctgttaaggtactacacatctgcctctggtgatgagatggtttctctcaaggactactgcaccagaatgaaggagaaccagaaacatatctattatatcacaggtgagaccaaggaccaggtagctaactcagcctttgtggaacgtcttcggaaacatggcttagaagtgatctatatgattgagcccattgatgagtactgtgtccaacagctgaaggaatttgaggggaagactttagtgtcagtcaccaaagaaggcctggaacttccagaggatgaagaagagaaaaagaagcaggaagagaaaaaaacaaagtttgagaacctctgcaaaatcatgaaagacatattggagaaaaaagttgaaaaggtggttgtgtcaaaccgattggtgacatctccatgctgtattgtcacaagcacatatggctggacagcaaacatggagagaatcatgaaagctcaagccctaagagacaactcaacaatgggttacatggcagcaaagaaacacctggagataaaccctgaccattccattattgagaccttaaggcaaaaggcagaggctgataagaacgacaagtctgtgaaggatctggtcatcttgctttatgaaactgcgctcctgtcttctggcttcagtctggaagatccccagacacatgctaacaggatctacaggatgatcaaacttggtctgggtattgatgaagatgaccctactgctgatgataccagtgctgctgtaactgaagaaatgccaccccttgaaggagatgacgacacatcacgcatggaagaagtagactaatctctggctgagggatgacttacctgttcagtactctacaattcctctgataatatattttcaaggatgtttttctttatttttgttaatattaaaaagtctgtatggcatgacaactactttaaggggaagataagatttctgtctactaagtgatgctgtgataccttaggcactaaagcagagctagtaatgctttttgagtttcatgttggtttattttcacagattggggtaacgtgcactgtaagacgtatgtaacatgatgttaactttgtggtctaaagtgtttagctgtcaagccggatgcctaagtagaccaaatcttgttattgaagtgttctgagctgtatcttgatgtttagaaaagtattcgttacatcttgtaggatctactttttgaacttttcattccctgtagttgacaattctgcatgtactagtcctctagaaataggttaaactgaagcaacttgatggaaggatctctccacagggcttgttttccaaagaaaagtattgtttggaggagcaaagttaaaagcctacctaagcatatcgtaaagctgttcaaaaataactcagacccagtcttgtggatggaaatgtagtgctcgagtcacattctgcttaaagttgtaacaaatacagatgagttaaaagatattgtgtgacagtgtcttatttagggggaaaggggagtatctggatgacagttagtgccaaaatgtaaaacatgaggcgctagcaggagatggttaaacactagctgctccaagggttgacatggtcttcccagcatgtactcagcaggtgtggggtggagcacaccaacccccatgctggagactgtaccaccaagaagatggatccccagcccagtgagtgagaagatgagctagatgacacatgaatgtcatgctgaaaatgcccttgcactgctccaggaccacaattcttaccctattgcttcaaaattcactgttgtttcaaaccttccataatcaagttccatcctgccagggagggtgataatccttccattatctggtctcagaaaatattttcctgacataacataagccccgcatacactctccttgcgtcttctacctttctttgtagcattatgcaactataaggaaatgaccattcgtttcaggtcagtcttcctgtctctctgctgcctgtcagcccaggagggaaggcgtgagtgttcactgctaaattggtgcatgtggcaaacacctgatacgtatttgtggcctgagtgaagaagtggtatgtacaaatgatgttttcccccttcctgtggggatgacaatttgtttaaataattctgtataatttaggaagcttttgttccctttgctaagccttcaagatctgctcaagactttgaaagtgtgattatagattcttcctccataggagggaatgtcacatcacctccctgagaagaacattccaggaagtggggcttttaatgagtcac

SEQ ID NO: 469669 - DNA, 2023 bp, Homo sapiens
tggtttgtgatgttccccaccctgtgtccaagtgttctcattgttcaattcccacctatgagtgagaacatgcagtgtttggttttctgcccttgtgatagtttgctcagaatgatggtttccagctttatccatgtccctgcaaaggacacgaactcatccttttttatggctgcatagtattccatggtgtatatgcgccattttcttaatccagtctatcactgatggacatttgggttgttccaagttttcgttattgtgaatagtgccgcaataaacatacgtgtgcatgtgtctttacagtagcatgatttataatcctttgggtatatacccagtaatagtatctctgggccaaatggtatttctagttctagctccttgaggaattgccacactgtcttccacaatggttgaactagtttacactccaccaacagtgtaaaagcgttcctatttctccacatcctttccagcatctgttgtttcctgactttttaatgactgccattctaactggtgtgagatgctgtctcactgtggttttgattgcatttgtctgatgaccagtgacgatgaacattttttcatgtgtctgttggctgcataaatgtcttcttttgagaagtgtctgttcatatcctttgcccactttttgatggggttgttttttttcttgtaaatttgtttaagttctttgtagattctggatatgagccctttgtcaaatgggtagattgcaaaaattttctcccattctgtaggtggcctgttcactctgatggtagtttcttttgctgtgcagaagctgtttagtttaattagatcccatttgtctattttggttttgttgccattgcttttggtgttttagtcatgaaattgcacatgcctatgtcctgaatggtattgcctaggtttgcttctagggtttttatggttttaggtataacatttaagtctttaatccatcttgaattaatttttgtataatgtgtaaggaagggatccagtttcagctttttacatatggctagctagttttcccagcaccatttattaaatagggaatcctttccccatttcttgtttttgttggtttgtcaaagatcagatggttgtagatgtgtggtgttatttctgaggcctctgttctgttccattggtctatctctctgttttagtaccagtaccatgctgttttggttactgtagccttgtagtatagcttgaagtcaggtagcgtgatgcctccagatttgttcttttggcttaggattgtcttggcaatgcaggctcttttttggttccatatgaactttaaagtagttttttccaattctgtgaagaaagtcattggtagcttgatggggatggcattgaatctataaattactttgggcagtatggccattttcacgatattgattcttccaacccatgagcatggaatgttgttccatttgtttgtattctctttatttccttgagcagtggtttgtagttctccttgaagaggtccttcacatcctttgcttagatggcatcattggtgaattctaccaaacatttaaggaatttacacaaaccctcctcaaactcttccacaaaattgaagaggagggaacacttcgtagctcattctatgaagctagcatgatactaaattcagacaaagacattataaagaaagaaaactacagaccaatatctctgatgaatatcagtgcaacaagcctcaataaaatactagcaaacagaattcaacggcacattaaaaggattataccccatgaccaaatgggatttattcttggaatgcaagaatggttcaacatacaaaaatcaatcactgtaacacactacattaacagaatgaaggaaaacaaccccatgattatctcaattggtgcataaaaggcatttgctaaaattcaacatattttcattataaaaaaaaacacccaataaactaggattagaagaaaaccaccccaatataatgagggttgtacataaa

SEQ ID NO: 469670 - DNA, 1345 bp, Homo sapiens
gcagtgggtgaggactgagagtgagctggaccttcctggtgggtttggagcagagcagggtggtgattcagtgcaggatttcggggtgcttctggctgcatgagaaccaggatgtgggaggaggaggaggtggaggaagaggagaggtggaggagaggaggagaggtggaggaagaggagaggtggaggaagaggagaggtggaggagaggaggaggaagtggaggaggaggaggagagatggaggaggagaggtgaaggaggaggaggtggagaagaggaggaggagaggtggaggaggaggaggaggagaggtggaggaggaggagaggcggaggagaggaggagaggtggaggaggaggaaaggtggaggaagaggagaggtggaggaggaggagaggtggaggagaggaggaggaagtggaggaggaggagagatggaggaggaggagaggtgaaggaggaggaggaggtggagaaaaggaggaggaggagaggtggaggagaaggaaaggtggaggaagaggagaggtggaggaggaggagaggtggaggagaggaggaagtggaggaggaggaggaggagaggtgaagaaggaggaggaggtggagaaaaggaggaggaggagaggtggaggaggaggaggtggagaaaaggaggaggaaggaggagaggtggaggaggaggaggagaggtggaggaggaaggaggagaggtggaggaggaaggagaggaaggtcaggaggaagggggctgaatccacgcttttatcaagaatccactcctgtgatgatggcgttaatccattgatgagggcagagccctcaggacctaattaattcttaaagttcccaccagtccatcctgttgtcttggggattaagtttccaacacatgaactttgtgggaactttgaaaccatagcactattattacttttaacaaacatttatctgttaagattaattaagaataagaaaacaaaatgttttattttattttaaaaaacccttctctgatacttttttttaaattgtagatttgagtttctgacttatatatttttcctccttcctgaaaaacttttgatacttctggcaaggtaggtctgctggtgatgaatatctttaacttttatatgtctgagaaagtttttgtttctacttcactttggaaagatcattttgctagatatagaatgacaggttggtggatttttttctttcaatacttcaaacatttcactccactctcttgcttgctttctgagaagtctgatggattcttatctttttaggtaaggtatcttttcccttttgcttcttttaggattttatctttttt

SEQ ID NO: 469671 - DNA, 523 bp, Homo sapiens
aaataatatactagcagagccctccaagaacacactgaggacaccgtgatgcagggatgcgccatgacacaggccgtctgcctcctcgaggagcttctctatgaaaacatcaagacccacttcctgtctgcttccctccaccactcagacccacttcccatgtctacttggggaccagcccctccagggccccagctgacctctcttcctgggggaatcttgcaggagggcagttccctggacacaggaaagccccgcactgcaggtggcctcagggaggcatacactgtcagaggcagacacaatgcatgtgctcatcctggaggacgacccccatgcgacagagtcctgccctggaacaccccattcagaagctgcaacctgaccatgctggcattgccagtcaacctctggtgttcagtggagcctttggctggcagtgtcaacatggtcaggcctgcagcttctgaatggggtgttctgtggtagggccagtgggccccatggtcctgggttctctcct

SEQ ID NO: 469672 - DNA, 912 bp, Homo sapiens
gaaaacaagaagccacagaccagctcctccagcctgactcggtgctgtccaacatcctggccttgggcttggtgtggagcagggacccagggcacatgggaagaaccaggttggccctgagagattccagatgaagctagtgctaccaaaccgccgagagccgaccccttgagggcacggcttggagcccactgtctcgcccaggactctgctctctgcagctggccacttgatcagacgcttccgtccttgctgtgtggcacagggtgtaaggagccccagaagcccccaggctgatgtgcctgttgacaggaatgctgctgctcgcctttgccgccagccgggggctgcagggattggcctggacaatatttgaaagaatacaagacgattactggtacaaacacagacacgtagaccaatggactagaatagagaatccagaaataaagctgcacacctacaactgtctgatcttcgacaaacctggtgaaaagcaatggggagaggactccccgttcaataaatggttctgggatgaatggattaacgacttaaatgtaaaaccccaaactataaaaatcctggtggacagcctaggcaataccattcaggacacagggatgggcaaagatttcatgatgaagacaccaaaagcaattgcaacaaaagcaaaaattgacacatgggatctaattaaagagcttctgcacagcaaaggaaactctcaacacagtgaacagacaactacagaatgggagaaaatttatgcaaaccatgcatccaacagaggtctaatatccagcatctataaggaacttaaacagatttacaagaaaaacagccaacccaacccattaaaaagtgggcaaaggacatgaacagacacttttcaaaagaaaaatacacgtg

SEQ ID NO: 469673 - DNA, 898 bp, Homo sapiens
aactgcagcccagcaaaatgtggccgatttaggaaaccttgaatatgattgagatgacaaaacccttgggaatgagaaaaaaaggagctgtggagataaaagtgaaagttcgggatctcagaggagctaagaaactttggtacatgagaaattggataaatggaagacctgttgacaatgaggaaagaaggcttagtaaaccaacactactacaactactgctgctactgctactactactagctgtgaacaccagaatagctcagattacttttgaacctgtgagaggggccaaaatgcaggtcttatgtgttcccaaggggcccctcaaatgccacatgggaagtttaggaaaagaggaccaggagaactatcctatccctgaaccaggcccaaatgatactcaccctccccctctcacacctagacagtcaggtcccctttctgcccttgaggagttgggggtgtcctttcccactttgtcctacctcacaccagaaccgcagcttctgggtgaacatcagatcaaaggcagctttcctggtagatccacagctttgctactgaaaggtcagttgtgttatcgacttgtaagtgaggtcttgctgaggatgcattctgttggaatctgtggctcagatgtccactactgggagtatggtcgaattgggaattttattgtgaaaaagcccatggtgctgggacatgaagcttcgggaacagtcgaaaaagtgggatcatcggcaaagcacctaaaaccaggatacaaaatttggatttaaagtctttcatttgttaactttgacttaaaattctaatcaactaatctagaaagaagaccacaactcatcaaatatttcctaatgttcatttacagaatttaaacatataagtcagt

SEQ ID NO: 469674 - DNA, 986 bp, Homo sapiens
ttttcttggaacaaattcaaacacaaaaatgaacacagagtttcaatctgttggactgatttctgacttgtccttcttaaccactaaaaacaaagaaaaagataaagagaaaaaagagaagagagaaaagagaaaggagaaaaaagagaaaaagaaaaaagaaagagaaaagaaagaaaaagaaaagagaaaaagaaagagaaaaaaagaaaaagaaaaagagaaagaaaaagagaaagaaaaagagaaaaagagaaagaaaaagagaaaaagagaaagaaaaagagaaaaaagagaaagaaaaagagaaaaaagagaaagaaaagaaaaagaaaaagagaaagaaaaagaaaagagaaagaaaaaagaacaaagaaagaaaagaaaaaagaaaaagaaaaagagaaagaaaaaggcagcaaggagaggaaaggcagcaaggagaggaaaggcagcaaggagaggaaaggcagcaaggagaggagaggcagcaaggagagaagcaaaggaaggatttcaaaagaaaaatcttagctttgtaaaagaaacaaatatgtcaacaatagcaaaacttgtgcattcggcatatttgaagaaccactgcaagctgtgttaccaatctgtgtggctgcctacaagtgccaaggaattcacaatatcaatccccacactggagtaaccatcaaccaaataatgaaccgcaagtggcatataaagaacttgaagtatattgtttctctagtatattctgtgcacatgtttctgtcactttctgtctaaaatttaagacaatgagtcaaagaatcaatctgcattcacataacatattgtatttgataacattaatttcaaatgaagattgattttgatacttaagctgatgatatttgtcttttcaatttcattaatgccatatttttatagtattaagcaataatttgccaaggtgttggaacacattttattgaaaattatgtaaatgtttg

SEQ ID NO: 469675 - DNA, 1089 bp, Homo sapiens
tcggaggtggggcctgggctggtagtccggagggctgttattccttggaggccatgtggaccatgaggtccaccaccccgttgctgtagcaaaactaattgtcataccaggaaattaacttcacaaaatggttgctgagggcaatgctagccccagaattaaaagtggaagagggagtgtcaccgttaaagtcacaggggacaacttggtgttcagtgtagcccagtgtgccctcgaagggccttccgatgcctgcttcaccatcttcttgaagccatcatatttggcaggttactccagacagcaggtcaggtccacaactgacacattggtggtagggacgaggaaggccatgccagtgatctccccattcagctcagggatgtccttgcccacagccatggaagttccagtagatgcaggaataatcatcactgcatttgattttggtggtatcttgctcctggaagatggagataggatttccactgatgacaaacttgtgattctcagccttgacagtgctgtggagcttgccactggtggaatcatactggaacatgtagaccatgtagctggagtcagtgaaggggtcactgatgatgacaatatccactttgccagagttaaaagcagcccagttgaccagatgcccagtacagccaaatgtgtttactacaaccttcaatttcaccaactgtctcagggacatggctgctgctgcatggctgctgctgcatggctgctgctggtggcaaattcccccagcaggttcagagatgatgtctgggaaccagggcctagaattggaaatgtcagaaatctacctggtattctttctactgcagtaagtttggcaccaaaacagagtctcagtctctccctgtgtccaccactaccacaggcccatggggagtactgtggcctcccatggggaggccagggtatcgacagtgttcacttaaggcccaagggctcttcagtcatcttgtgaacactcaggcctgggactcacccttcagagcaacaggctcccttctagcatagtgtaggtccagaactaccatccaggagctaaggcctggaatt

SEQ ID NO: 469676 - DNA, 783 bp, Homo sapiens
atcaaaatcacttaaggcttctgaataggaagcattacaatgagtgaacttgattcctttggttcttaccttgggtggatagagcaacttgctgagcttcgtcaggaatttcttcgacaagaagaccagcttcaggactataggaagaacaatacttaccttgtgaagaggttagaatatgaaagttttcagtgtggacagcagatgaaggaattgagagcacagcatgaagaaaatattaaaaagttagcagaccagtttttagaggaacaaaagcaagagacccaaaagattcaatcaaatgatggaaaggaattggatataaacaatcaagtagtacctaaaaatattccaaaagtagctgagaatgttgcagataagaatgaagaaccctcaagcaatcatattccacatgggaaagaacaaatcaaaagaggtggtgatgcagggatgcctggaatagaagagaatgacctagcaaaagttgatgatcttccccctgtctcagtaattacttctgtgattatagctagttgtacatgactgaaattgctgaatgtttagatcaaataaatgaaatatttgtcctttcatttatatagttttattgtcttctcaaattcttatgggtttccaattcatagtgatttcccctaaaataaagaacagaggcttcgaatggtggttgcatattggaatctctggggagcttgaaaaaaaaaaagatactgatgcctaaattccattccagagattttgttatatttgttctggggtttgact

SEQ ID NO: 469677 - DNA, 842 bp, Homo sapiens
ccatttccgagtttccgtcgacacccctcttgtcgcgagaacgttgcttcctctcgtctctctctctctctctctctctctctctctctctctctctctctctctctctctctctctctctctctctctctctctctctctctctctctctctctctctctctcgctctctctctctctctctcgctcgctctctttctctctccccgcccagagttttctctgtcgcgtagggtgttgtgttaattttggcggtctcagatgtctcaggtacctgggttactgctttcacgaaccgaaagaatttcagaatgtggcgagctccaatttttaaacgcactgctgcttttgcctcagctgggcttccaaacagaaagtccagaagctgccctcgatgaatctcacagagtcatcgtagacattaaggaggcaaggaaatacagtgctacagcagagcagcagtgtccccagttgaaaattcagatctttagtaaaggaaaagagaagaaagaaagtattaggtggatgactgatgcttcagaaatatggattccaaagaaaaaggaaacaagattactggggtttagtcaactagctttacaacaagacacaaacaattcccttagtctagtagtagaatgtatactctggatacaagcctttggtcagttgtatatgtcgtaaatttcctctcctttttgtagcttgtcttttcattctctatatagtcttttgaagaagagaaattcttgattataacacagtcaaattcatcaactttttaatatgttccctgttttagaatgctttccctacaccaagatcataaaggtattctgtatt

SEQ ID NO: 469678 - DNA, 1514 bp, Homo sapiens
cagttgccagatgtgcatggcccctgagcaccagcaccacagtctgagggacctcccggtgcataacaaatttagtaactggtgtggggttcagaagggctcacctggggggttggacatgactgaggaggagctgggggccagcggtgatctcagctctgaaaagcaggaacagagtcccccacaacctcctaatgaccacagccaggattctgagtggtccaagagggagcagatccccctgcaagttggggcccagaacctctcactcagcgtggaactcacagaagcgaaactgcaccatggctttggggaggccgatgccctgctccaggtgctgcagagtgggacaggggaggcgcttgctgctgatgaacctgtgacatccacctggaaggagctctatgcacggcaaaaaaaggccattgagaccctcaggagagagcgggctgagcgacttgggaacttctgccggacgcgaagccttagccctcagaaacaactgagcctcctgcccaacaaagatctcttcatctgggatcttgacttgcccagcagacgccgagaatacctgcagcaactgaggaaggatgttgtggagaccaccaggagcccagagtcagtgtcaaggtcagctcacacaccctctgacatagagttgatgctgcaagactaccagcaggcccatgaggaggccaaggtggagattgcccgggcccgagaccaactgcgggagcggactgaacaagagaagctgagaatccaccagaagatcatttcccagctattgaaggaagaggataaactacataccttggccaattccagctccctgtgcaccagctctaatggaagcctctcgtctggcatgacctctggctataatagcagcccagccttgtcaggccagctccagttcccagagaatatggatttggccaagcatgtcgtggacacttctatggctgatgtaatggctgcttgttcggataatttgcacaacctcttcagctgccaggcaactgctggctggaactatcagggtgaggagcaggcggtgcagctttactacaaggtgttttctcccactcggcatggcttcctgggggcaggtgtggtgtcccagccgctgtctcgtgtgtgggcggctgtcagtgaccccactgtgtggcccctgtattacaagcccatccagacagcaaggctgcatcagcgagtgaccaacagcatcagcctgggtgagcccagggaaggaaggcttccatggggcctagtttctggtgtgcccagtggggtcttgctgggggatagaggtggagggttggaggcagccctctttggaggccagtgtacttggtgtgcaacaccaccctgtgcgcactgaagcagccacgggatttctgttgtgtctgcgtggaagccaaagaggtgcctgccttggtggtaaagatgttgtgggaagaacttgggctgaagtgtcgtgagaaacaatctatgtgggcctcaggtcctct

SEQ ID NO: 469679 - DNA, 563 bp, Homo sapiens
cacagcaggcacgggcccgcccccgccgccgcgggagttccagggccatgcgggtggcgatgctagaggagtggggaagggccaggtccaaataccaactcaagtctcctgatggctggggacaccctggagggccagatggctctgcctttctgagctccaggtattggggaaaaccaccctgctctggcagccacgggagtgcagctggtgtgagaggggaagtgcaggtagaggtgaaggcccacagttggctgacgggcactgaataccacatcacctctcacctcgaccccagagtaccctatggggcaggctgccctcctacctctcacagcaccaagatgacaaagacccaagacctgtccctgccactggaggggctgtggaggcaggagttccaaggaagtgaggcaacagtcagggaaataaattaataaatacaggccccccacgaggagcggctgggaaggctgctttgcctctgaacactgctccctgctttccactccaagcagccccgcaggttttggtgaggggcagaggggctgcagtttggaatc

SEQ ID NO: 469680 - DNA, 677 bp, Homo sapiens
tcagttccctgcaaccttcccacggtggagctcagggcctgaacacacctgtcatgggtggggaaaagggcttacgaacaggtgtgcatttcagcctgcaacagaggagctgtgaaccccaggatcccatccaaccccatgcagcaactaccaccctccaagcccgcagggcccattctggaacagctaaaacaaagaggtctgatctgctctggagatcagggaaatggatacagaagtataaggcagatgactggaaacagggatcagggaatggtagcgagatctgccttcccacccctggctatatgggcttcctgagcccagcagcccagcccccgttagaaaagagaggctcccagagaccctgcccttggctggacaccctgaagttctcatgggggactgagctgcagatgcctgcagggactgggtacctgggcatggaggaggcaaatagtcagggcccacaggcccaggtcatcctacccccatccacagccatggagactgatttaatagtaatattaaacataatgaataataataaataatgctatttattgtaaaaccacttagcaaagtcgaagtagaccctaagattagtgtcactttcattattgttatttttacatgtcagttgctttacatggattatctcatttaattctcgtaac

SEQ ID NO: 469681 - DNA, 744 bp, Homo sapiens
ctgaccacatccgtcagcccatacgcccatctgtcttaattctgcccagaaagtctgaggagcagggagtcagccctaagggagcttgtctcagacaatggacattggattttgacgatggcaatagtggtagagcatactcttgaagctactcttcctgacaaaactccaggggcagcaaagactccccatcgccaaggtgggtgtcagagacagccatgggacagcaaagaaggccacggtgtaccacaccagcatccagttcagtacagttctgcccatggccctaggaagcaggcttctagtggctttgtcttcatgtacagtcatgtgccatataacattttggtcaacaacagaccacataagactataacggagctaaaaaattcctatcaccgagtgacgccggttaactctttagtgaccctctcatggtgtgacactgtcaccataactgctggtgtcaagaattcaattgaaaaccaacagcctgagggttttaaaatcctgtacctttagcttggttagatcttcccaaagctgcagccatcgtaaagtggaaaaggaaagaataagcacagatcaataaggcaaacttattctttagtttagttgagtttacatagaaatctggaatgacatttgttgagaggctaatccctaaatggattctggaccatagagagatttttcccataagatcagagtctagcctatacttagcagcctcacaatgggaga

SEQ ID NO: 469682 - DNA, 885 bp, Homo sapiens
acacttattgcctgaaagagtgtgatgttccccttcctgcagacacagtttttaagaaggaaagtctacagatttcttcactggtttccactcattccaacccctcgtctctgcttggctgggatggtcttaatactggctacttccattcctcgacttcagtctattttgaaaccagggctggtgaattggttaaattccatcaatggaaaggacatcctaacagaacttcttaaactgaagtgtgcatttgaaccccatggcactttgttaaatatgcagattctggcaccctctgggaaccactgtgagcagcaaggtcctagaggatctgttgggagtgtctctgcagctggcagcctgcaacagcgctggcgttttttggagaggggacagattagccctgaagcctcagtgtatctcttcctgcagctcagagagcgagatggtattagccctacatacaaggaccagctcacattaaggcactgccttcagtctgatagagagccagacttggcagcactgcagaagcttctcctttctgctggtggaatgggtctggagagtttccactgcccaagccagcacagcatgaccagagttctgggtaagctgctgatcgtagactgggaaatatattcgcgaggatctgattgtgcatctttcacactctcaggtctgcgtaagccaagctctcagaagttcatgggcactctttctgaatacagatgactgctcaaagtttaaatacccgaaaagggagttgataccttctgtcatccccaattggtgcagcggaaaacatgaccatgtagtgtaaaacacatatgaacactgtcttagtcccttttgttctgctatcacagaataggtttcctatat

SEQ ID NO: 469683 - DNA, 540 bp, Homo sapiens
gcctcacttctcactgccaattctgtagccatctgggctgcggactcccacttggacagaacagttcttgggtatgtctttatcagcagcacaaaaccagactgaaacaataaattggtaccaggagaatggggcgttgctgcaaagatacctgaaaacgtggaagcgacttaggaacggagtaataggcagaggtgggaacagtttggagggctcaggagaagatacaaaaagtgtggaacttcctagagacttgttgaagggctttgcgcaaaatggtgatagtgatatggacaataaggtccaggctgaggaggactcagatggagatgagaaacttgttgggaactggagatatctggtggaagaaatttctaagcagcaaagcattcaagaggtgacttgcatactgttaaaggcatttagttttataagggaagaagagtatgtaagtttggaaaatttgcagcctgactatgcgatagaaaagaaaaacccattttctggggagaaattcaagccagctacagaaatttgaat

SEQ ID NO: 469684 - DNA, 522 bp, Homo sapiens
tgttttgctaatcctgctgctgtcatagtagattctgtctccttgggacccatgaatcttttctgcatggaacttgcatggggcaaacactggcagaggcatcccacacatccctcctggctagaggcctcaggaggatcttggggccattgcctaccaaaccaacatcaggaagaaagcccatggtggcattttctcccaggcagctttcctgggaattactccaaggctgtcaaccttcactcttctggtctgaggcacaaagaaggcattgcccttccttgtgaaatgtgtaaggaaatctgcagggactcacagaggccgtcttcagacactcatgtttttaaaaatggtgtgcctggtaatagttttagtcgctggggattcagcaaagaacaaaacaaagtctttacccttatcagagggagcaagatattaaagtttagggataaccaaatattactcattagagttgatgcatgctatggggaggcctgggtgaattgcaaatgtatgtaggag

SEQ ID NO: 469685 - DNA, 566 bp, Homo sapiens
tctgagataagtgttttcttcattggtggccatggaagtgagcgagggtagaatccggatgcacgttgaaggcagagcccaaggattgtctgaggaatctcacgtagagtatgaaagggaagagtcaagaaccactacaaggcttttggctaaggttcctgatcattacttgccgtcagccatccccttttctatttctgtggcagcttcttgtttacgagaaccgggatggaatgattctgatgttatgcttagttcacagcctctagttaagaacaacaaaaaacgactttgcctggatggctttgtgtacctttataaaactggggtccccatccccagtcttaagagaagtgagctcagagggcaaactcctgctctcccaattggagaaacatgcaggcaggtgaagagaatcacaacgtgctggagcagaaacctccttgggaaacagtactggggtaggaaaggcttaactgtaattgacgaattgtttcttggggactcaatgtggacaagtctgagttaaaaactccagggggaccccgttttggggtggggtgcac

SEQ ID NO: 469686 - DNA, 666 bp, Homo sapiens
gtttcactgcaaggaaaatggtactactcagctttatgaagcaaattctctcaagaccatcctctcagagagtgggtgcaaggcccgaatattttactactgcattccaaagacaatggaagctgacttctccctttcttacaccgctggcatttcactgaacaacctcctgtctcttccgcatttttggtgtttctcgcagcctttgaaggtgattttctcaggtgcccttaaatatgtcatgccggaattacagaagaattacctgatggagcctcttgatctctttcgttactttccccaaaacaaacggagactctctctctctcctgagctacctggagccgggggaggagtgatacaagcaccccagtggccaccaccaccaggactgtgctggaattctgaatttcttctctgcatcaccttatatttcattgagcttcctcaaaacagctattttgaattctgtctgaaagttcgcatgtctctgtctcttgaggattggtcacaggtgtcttatttagattgtttggtgaagtcatgtttttctgggtggtcataacgctcgtggatgtctaggcattgaagcgttaggtatttgttgcaagcagcaatgatacctgtcctttttaggaaggctttccaggtatttgaaaggacttc

SEQ ID NO: 469687 - DNA, 528 bp, Homo sapiens
cagctgacttagcctttcctcccgctagttcttaggaatccagcagcccagatgaggacagtcaaagtgcttcattaaatggtcctgttccccatgccactcaactggttgagaccttccaacagggattgtcaggcactctatataggagccatcctactgacatcagacaaactcgtggagatgagaaagaatcaacaaaaagaaagcactgaaaacccaactggccagagtgcctcttctcctccaaatgatcgcaacacctctccagcaagggcgcagaactggacagaggatgagatggacgaattgacagaagtaggcttcagcagatggataataacaaacaccactgagctaaaggagtatgttctaacccaatacaaagaagctaagaaccttgataaaaggttagaggagcagctaactagaataaccagtttagagaggaccataaacgacctgatgcagctgaaaaacacagcatgagaactttgtgaagcatacacaattatcaatagccaaatc

SEQ ID NO: 469688 - DNA, 562 bp, Homo sapiens
gtagcctaccgtccctgccaagaaacatccaagtgcctcgatgtcatgccaaaggcagcagcagcttatggatcaggcacacatctacatccgaacgctctgtggcagcctctgtagttttagcctcctaatgctgatcgccatgtccccactgaactgggtacagtttctggtgatcaagaatggccttgagctctacgcaggactctggaccttatgcaaccatgagctgtgctggagccacacacccaagccacccttgtgtaagtgcctaaaaggtgataccccggtcaaactttacatcttctcagttcaagcaagcaaaagaggaaatccaatttctaagcataagaataaaattgtcccaggatgggtcaggttcccatgcttagtccaggttctggagaacaaaatgaaacaaggaggcagatattagactggataagcttgatacataatttctgctctctgggttactcagaagctggacttggattcttaggcatataagtggttagagaactttctaaccactggggtgggggtgagctggtccctgcta

SEQ ID NO: 469689 - DNA, 2098 bp, Homo sapiens
ctcctgctacttgggggaagccaaagcaggaggatcacttatgctcgaaagtgagatttcaatggaaaaagtgaaggtaaagcgttatgtgtccggaaaaaggccagactatgcccctatggagtcctcagatgaggaggatgaagaatttcagttcattaagaaagccaaagaacaagaagcagagcctgaggaacaggaggaggattcatccagtgacccccggctacggcgtttacagaaccgtattagtgaagatgtggaagagagattggctcgacatcgaaaaatagtggaacctgaagtggtaggagagagtgactcagaagtagaaggagatgcttggcgcatggaacgagaagacagcagtgaagaagaggaggaggaaattgatgatgaggaaatagagcggcggcgtggcatgatgcgtcagcgagcacaggagagaaaaaatgaagagatggaagtcatggaagtggaagatgagggtcgttctggagaggagtcagaatcagagtctgagtatgaagagtacacagacagtgaagatgagatggagcctcgccttaagccagtcttcattcgaaagaaggaccgagtgacagttcaagaacgtgaagccgaagcattgaaacagaaggagctggagcaggaagcaaaacgcatggctgaggaaaggcgcaagtacacactcaagattgtcgaagaggaaaccaaaaaagagctggaagagaacaagcgatccctggctgcattggatgcactcaatactgatgatgaaaatgatgaggaggaatatgaggcatggaaagttcgagagctaaaaagaatcaagagggacagagaagatcgagaagcgcttgagaaggagaaagcagaaattgaacgcatgcgaaacctgactgaggaagagaggagagctgaacttcgggcaaacggcaaagtcattaccaacaaagctgttaagggcaaatacaagttcttacagaagtattatcaccggggtgccttcttcatggatgaggatgaagaagtatacaagagagatttcagcgctcctaccctggaggatcatttcaataaaaccattcttcctaaagtcatgcaggtcaagaactttggacgctcaggtcgcaccaaatacactcaccttgtggatcaagataccacctcctttgactcagcttggggccaagagagtgcccagaacacaaagttcttcaaacaaaaggcagctggggtacgagatgtatttgagcggccatctgccaagaagcggaaaactacctagggtccaactgcttattcttccaactgtggaacacaaggggagtctcagcatctggtccttgatttggttttttcattgtttccttggcccctgtatccagatattggacttactgctatacttgtgatactgggtagcccagactttgaaggtgctttgtgaggtttggactcatgctgagaaacccacaggaaagcactgtccagcccttagcttgggttagaaaagtggacatgtaagtgaacaatgcattacttctaccttaggtttaggagtaatatacccggaaatctaagctcatggaaacatgttttccatttttgcttggagtccgtttttctagttgtacatactttttgatccatatatgtgtgcatgtcaagaaataaaagaatcacacaacaaggagatttttagcatgatactggaaataaaatgtccaagctgacaagtattaattgcctattaaagtaaaagataacaattgtcaggcagaaggtgtttcacattttgataattccctttgatctcagaaacaagctcaggtactagcttggctttaggtagcatctggatttattccatgaccaaatacagatgtttttgagaagaccaaggtcttctcacatcctttaaatgtcccactggaagaatcaaatagtttagtgtcgtacgataaaaatgaatgcaaataattactatgaggtggtaaatacataaagatgaacacaggataggaaatggcatgtagaatgtattatggcttagaatttgaataccaatcaaaacctttcataggtttttttc

SEQ ID NO: 469690 - DNA, 626 bp, Homo sapiens
tgctgtcatagagtaggggggaagggcagcagggtgcctgtgtgccagtggggattcgttggtggcatctgtacatgagcactgatgctgacagcaatggcatggtggggtgtgcatacacatgttccagtggagcagtggtgaggtccgcctatgtgtgcatgtgtgttggtaaagtggtagaagcttgtcagctggagctccctgaaggtcaggtgtggtatgcctgtgaaggagttatggctgtggcatccagacagtaccctggttgggtgtccaaggctgcactggaagcagacatggccaggcagggaccctgggagaggctggcacacagggtgatgctcaggtcccatgagaaaaactacctgaacatggtcattatcttcaaatttggccagacaaatatccctgaagatatatgctaccctccaaacccaaagaggcagaccagacattgtgctcccttctttgtaacaggtcatgcaagatgcagcaatttatgttttggtttggagataatccaggaacatcattgaccactgtatatcacttagatactttattaaaataacaatgtgataaatcctggaagggttcctctcttgctttccagagaacatagt

SEQ ID NO: 469691 - DNA, 1600 bp, Homo sapiens
agccattgagtgagcacagtagaggcactcaagtttggaagacggtataagatgcatgccaccagcagcatctgctcctgtttacatcctggttttggcagggaaagcccttctccactcagtgtccagagattctgggaagggcatctggcagaatctgcaggtcgggttgtggctgcagcccttcagcaggctgtcctggccactggattagcagcagtcagacccctcttctgtagggctgctgtggtttgctgggggtccactccagaccctattcatcttggtccctcctgcccctggaggagctcctgtcagggatatcagagttcttcccataaacccctggctggggatgctgaaattcccacagagaggctctacttatctcactggcaccagcagcagggaaaaatggccaactggagccacagtgatgtcggccacccctccccactgggaactcagtcttctcagcgacttggtgggctcagtctggctaccctgctggcccatgagggcatcagccctggcctgcacctgggctccaagcttcctgcaatcatgttccgggctcctctctggcctcttgacactcctgctgctcttgttcctgtcactgccaccatcagcgctgctctaatgcttgtgtttctcctgttcaggggttctcccgcagacaaaggtgctgacggggacctggaggggctgctccaaaagttcttgggaaggcccaagataagatctggctacaagttcacggttctctgggcgtctttccttctgtggtttaagtaaccatactctgctccagacctgtgagcacttgttttgggtaactccagatgggagagttacaaagtaggtaacattttttttcctcctataatttaatctagtttaatttatgaagtttatgtagttattcattagttgcattaaagttaaattgtattaaatttagttcattcaaattattttctttggtttgaattcatttcacttagttaattttagttcacttcacttaagttttttcttaggttagtatataggttcagtatatgatttattattttttaacttcattttcttttctttatatgtcctgtaataccgtttgtcaccgtaagtttgtctgtagtttacaaagattttttcctaaagttatttattttaaattcttaataattgctgacactttttgtatttttgtattttagaaactatttgaggaaaaatttactttttattactgttaatcagaatgtaaaataaaaaggaaatgggcttccttactttcccttgtcattcatgagaagagtcatcttaagcagaagatatagaataatttaggttgcgttatttttggataggaaacttcaggactgatctctgtgctatgcctctggaagacattcaagagctttgtacagtgtacttacataacagtattctgttccatttgatgaaagcatcttcccacatcttttatcggtaagctgcctggaaaaaaataatgatacaaaactatctgtgttttactaactcagaagttgtaaatattatatgttcaatattattactcttcaaatgacat

SEQ ID NO: 469692 - DNA, 680 bp, Homo sapiens
tatcaagaaaaataactaatgagtacagggcttaatacatgggtgataaatatctacctggaggctattatccttagcaaactaacacaggaacagaaaaccaaatgctgcctgttctcacttataagtgggggcaaaatgattagaactaatgaacacaaagaaggaaataacagacactggggtctgcttgatgggggagggtgggaggagggagaggagcagaaaagggctgcctgtttgggttatatcaccaggttcctcctatgcccctccggcttctttgtgggtttgggtaatggggcacatcagcaggagacaggagaaaggttccaggcacccacatatggaaaactgagcctgcatcaggatacatgtaagacagaccagtcaagcaatggaaaagtgacaattttccatctattctgggtatcctaccatgatgagcttaagttccaggaaggaaactgaagaagactttcttttaccaagttttgttggaggggtttaataaacttgttaaagaagcactgtccaacattaaatatactatccaaagactttctgaaaactaatctatgtgtcataattgcatactgtgtagacattttcattgtcaatcaaataaaaatgtatttcttaggttacctttagagatctcagaataaaaagactcttgc

SEQ ID NO: 469693 - DNA, 1105 bp, Homo sapiens
ggccatcgtcttgtcttgcttttctctgttctccgtgggtcaagctgtttccttgattagtcccaatgcgagtcaatggatatgctcagagaatgcaagaaactagcagaaaaggaagaaccaagaagccatctcctaatgaaaaacatcagttacttaaacccccatgcaatgaaccaatcaccaatacaggaaaatttattcctagaaaaccaaaagtgaagacaatgattatgactgtatatacacagcagccccatagcattttgaaaacagaaaaattaggaaaagattatttgatgattatcctaaaagctaaggatacttttcaatggattcacaaactttcaaaagaaatatttgacaattgtgctaaatcaagcagtgacttacaaaagaagttgaagacaaaagcagtaaaagtggagaaatcctgtttattcatcgtccaaccatccatacctccaaccatctagctataatataacacataagaggcaataagagagatctgtgcattcccttggtgtgcagctgtatatgaaggtggtattaaataggaggggtagttagttcagtgagtaggtatgttttgtgggaatctgaatgagggactacatcctcatcctgaaatcaaatccttattctcctacatttttttttctgtagcatcgtttttggggatgttctcctgcagtcctcactccctagatgagttaaagatatgccccctatacttgtcttcagtgtaaacagtttgcaactgattctgattactgaatggttattgaggaggtctgttgcactatactgccagaatcaaaagtcaaatcagaagtcagctttaaaaaaaattactgaacatcatatcaaaagtatttcacataagattcgtgagcattacagtaacaagttgaagtacttaacaattccctcagagttatatattttttgcatttatttactatttttaagtcctgctataaacacatttttaaataatgctctttatatgtttaaagttattttcataggataaattgcttgtggaacatggccaaaagagatgcatgtttttatgtctgttgatatacttcacaaaagc

SEQ ID NO: 469694 - DNA, 1754 bp, Homo sapiens
ggtggagccaagatggccgaataggaacagctccggtctacagctcccagcgtgagtgaagcagaagacgggtgatttctgcatttccatctgaggtactgggttcatctcactagggagtgtcagacagtgggtgcaggacggtgggtgcagcacaccgtgcgtgagccgaagggggcaaggcattgcctcactcgggaagcgcaaggggtcagggagttccctttcctagtcaaagagaggggtgacagacggcatctggaaaatcgggtcactcccagcctaatattgcacttttcaaatgggcttaaaaaacggcacaccaggagactgtatcccgcacctggctcagagggtcctacacccacggagtctcgcagattgctagcacagcagtctgagatcaaactgcaagggggcatcgaggctgggggaggggcgcctgccactgcctaggcttgattaggtaaacaaagcagcccacctgaccacagctcaaggaggcctgcctgtctctgtaggctccatctctgggggcagggtacagacaaacaaaaagacagcagtaacctttgcagacttaaatgtccctgtctgacagctttgaagagagtagtggttctcccagcatgcagctggagatctgagaatggacagagtgccttctcaagtgggttcctgacccccgagcagcctaactgggaggcaccccccaggaggggcagactgacacctcacacagtcgggtactcctctgagacaaaacttccagaggaaccatcaggcagcagcatttgcggttcaccaagatccactgtcctacagccaccgctgttctgaagccaccgctgctgatacccaggcaaacagggtctggagtggatctctagcaaactccaacagacctgcagctgagggtcctgtctgttagaagaaaaactaacaaacagaaaggacatccacaccaaaaacccttctatacgtcaccatcatcaaagaccaaaagtagataaaaccacaaagatggggaaaaaacagagcagaaaaactggaaactctaaaaagcgagcacctctcctcctccaaaggaacgcagctcctcaccagcaacggaacaaagctggacggagaatgactttgacaaaaaaaagaataaaaagaaatgaacaaagcctccaagaaatatgggactatgtgaaaagaccaaatctatgtctgattggtgtacctgaaagtgacagggagaatggaaccaagttggaaaacactctgcaggatattgtccaggagaacttccccaatctagcaaggcaggccaacattcagattcagggaatacagagaacgccacaaagatactcctcgagaagagcaactccaagacacataattgtcagattcaccaaagttgaaatgaaggaaaaaatgttaagggcagccagagagaaagctcggaaactctacaagccagaagagagtggggaccaatattcaacattcttaaagaaaagaattttcaacccagaatttcatatccagccaaactaagcttcataagtgaaggagaaataaaatactttacagacaagcaaatgctgagagattttgtcaccaccaggcctgccctaaaagagctcctgaaggaagcactaaacatggaaaggaacaaccagtaccagccactgcaaaaacatgccaaaatgtaaagaccatcaaggctaggaagaaactgcatcaactaacgagcaaaataa

SEQ ID NO: 469695 - DNA, 749 bp, Homo sapiens
agttagaagatttatcatcaagtaacaactacaagatatgccttgtaattttttcttgatatttggacatgatgcattggataaaatcaactgctgacagagatggccaaggaaagtcttaaaggatatatgggaatgaagttggactttaaaagaagaaagaaccagatccaaattcagtcctccagtgagagaatcacattaaaaaaggctatgcttgatgctcatcctggaacctggatggttataatgaaatctatgaagatctcaagaaagcatcttcattggtataattcgaaaccatgccagctgggcagaatgcatgaaaagtaccctggggagacaaatgtttcatttaggtacagtaatgaaactggaggatataagtcagttctgcatcatgccctcagttcattagttgaagcagccaagtcttcacgagccgcaactgatcagcaaatgggaaatgagcaagagtataaattcccagcaaaccaaatcattaacatttgctgcctgcatcctggaaacacaggccaataatgcttagatttgcccttttgaggcttttttttttttttattttagatcctgtaggtgtgcttcattttttaaatttttttcttttgtctcttcttgcaatgtattttcaaatagcctgccttaaagtttgctaattctcttctgcttgatcacttctgctattaaaagactctgatgcattcttcagtaatgcaagtgcatttttt

SEQ ID NO: 469696 - DNA, 603 bp, Homo sapiens
ccacttcccctgaaataagacagctccacactatagcatatggggtggttagctgaatacgaaggtgagcttactcaaggatcgcaactctcaccagctagggaacaaaactggacggagaatgagtatgatgaattgacagaagtagacttcagaaggtgggtaataacaaactcctccaagctaaaggagcatgttctaacccaatgcaaggaaactaagacccttgaaaaaggcagaatcgatcaagcggaagaaaggatatcagatactgaagatcaacttaatgaaataaagcgtgaagacaaggttagagataaaagaatgaaaaggaatgaacaaagcctacaaaaaatatgggactatgtgaaaagaccaaacctacgtttgattggtgtacctgaaagtgatggggagaatgagaaccacgttggaaaacacccttcgggatattatccaggagaacttccccaacctagcaagacaggccaacattcaaattcaggaaatacagagaccaccacaaggatactcctcgagaagatcaaccccaagacacacaaccatcagattcaccaaggttgaaattaaggaaaaaatgtt

SEQ ID NO: 469697 - DNA, 757 bp, Homo sapiens
gcatgccctgtgagggggacaagggaacctttccttaaaatccagagagccatgtcaatactgagtcccgctgcatgcactactgtctcacacagtaagcgatctaagctggaacctgatgatgtgcagcatcacgtgcaggtgtccaaggatcagaccaaagtcaagaagacaacatccaggacttacagttttatcctctgtatgcaagaggtgttcaagctaagggcctactgtacacgaagccaggatatctcaaaattactctacataaaaatctatgtactaactcataaaagcaacaaggaggctgccacctttctggagccatgggtagaaataaacaaggccattgaacctggcgcctatgctacacccatatgtaggcgaggtggaagaaagagcatcactggaggaatagacatagttagaattgggaagcttaagacagggacagcaaaaaactgcaatcaggatacattctccctaatctgggaaatgcagatgggagtaccctacaagttaagcagggtgggggagagaaacggcaaactacttgaagacccatcaaagtacccaaaagagaaagatttagctgtataagcctgcccctgtctacactcctgaaggcttacctgtaaggattgcatcaaacccctagatgctggctggttttaggcagtggaagatcttggagggtagagtaaaagaacctggttaatttattcccctggcattctcacagctgggctgcaga

SEQ ID NO: 469698 - DNA, 600 bp, Homo sapiens
acatcaaaaaacttatgcatcatgaacaagttggcttcatccctgggatgcaagaatagattactacttcaaggagaaccactgcccaaggaaagaagagaggacatacacaagtggaaaaacattccatcctcatggataggagcaattaatattataaaaatgaccatactgcccaaaataatttatagattaaatactattcccatcaagttaccattgacattcttcacagaattggaaaaaaactactttaaatttcatagggaatcaaagaagactctgtatagccaagacactcctaaggaaaaagaacaaagctggaggcatcacgtttatggaaccattgtgtctcctggtggcagcgttcttccttctggagctaagacctctaggcaagcagaacataatgtcacaggaataggaagcaaaagttttgctagtgggccattaggggtgatggattaataaattattaatcctatttctgtatttctacactgttgactttgtagttataaattttttaattattttcacaatggttacccaaggtgacatcaagtacaatgcacattgatcattttcagagcatgggga

SEQ ID NO: 469699 - DNA, 720 bp, Homo sapiens
gcagcagccgctgccgtcacaaccatagcttattggatcagcaaactttttgtaaagggccgtatgggtaagtatttaggtttcatgggccatacagtctctgttgcaactagtcaattctatcattatagtgcaaaagcaactatagtcttcttttttccctctgatcagacctatctacgccattcctgtgatgaacctgatctcagagtgattatcacagacacatttaagactaggacattcaaaatcagcttcatgtacaggaggaattataaagttaccacttgtgccaagggaagaaaaacacctaaaactgtccctgaaaaaaatctaatgacagatatattaaacaaagtcattaaaagtactggcttaaagatgctcaaagaattaaaggaagtcatggagaaaaccagtagcatgatgtatgatcaaaatggaaatagaagtaaagagatagaaaacctaaaaagaaaccaaaaagaaattccggagctgaaaagtacaacaactaaaatgaaaaattcagaggattccgaaggcagatatgagcacatagtgtaaaaatcaaggaaattgaagatacttgttaatttggtgtccttcctgggggtgggtggtgagaatcagtggaattttctattccactatcctgcttgcacaaactctcccataatcaacaccaggagttctcagcagactccctgaattgaggaa

SEQ ID NO: 469700 - DNA, 615 bp, Homo sapiens
ctgcaacacacgcaatccacacaacccagttatgtgtagtgagactttgaggtctgtccagccacggggatagaagctcctcgaggaccagagctgccatctctgctctggcccggggtgtagcacagaggctcgggcacaagagggctcagcacaaatccgaagatgtgtgagcaagtgagtgaatgtcacctacgaggcgccccagatgaggaagctgatgctcacggcaagttgaataactcattcaagatgagattggaccccaagaatgtcttacctgcagacatcaacaccccagcagcggaaagtgctgctgacctgcctttgcaccgggaaaccttgatccttgattctcacactgccccactgcgggggagtttgggagctgctcaggcatttccaagcccctttccaagcccctgtccagtgattctgctgagggacttggttccagggcagccattccctgggaggttgctggagtatcctgcagaggctttcttgtgtctgcttcagagatgctactcagcagggcaggcagctggattccatgtcacagtgtcttagaaaactcagtccccgccacctttgcttgattcaattgtgtgatac

SEQ ID NO: 469701 - DNA, 689 bp, Homo sapiens
tggcccaccatgcccccgtcctgtgcctataatctgtgtgacctggaggttctcaggcttattgtgaagagccctaaaatagtcaagaggaatgtgaaagatgaggcccaggacaagaccatagcaggcaggcacacaagccgctggacgtcgagaggaacacgttgtttgaagaagacacaagcagctggactgcgagaggacgtggaggggagcatgctggtggaagagcacatgacagacggcacgtgggcaggctatggactggcagaacggggaggagtttggctggggcagtccgaggagagccggggctgccgagtggcccaaatccaggggaaaaccatctcgcttttggctctcccatttgctgagagctacttctactcaataaaaccttgcactaattctccaagcccacacatgatccaattcttccggtacaccaaagcaagaacgctgggatacagaaagccctctgttcttgccataaggcagggctggcgagtgaatggcctgcctgttacaagtcaatgtgaagaagcagggcaggtcagccagaagcaacgagaccaggattccaacagttgtcttccttaagagttctgccaactctgattaaggatggactggagaagaggctggggttttataagtaggtatagtttctgattgactttggtattgac

SEQ ID NO: 469702 - DNA, 1789 bp, Homo sapiens
ggggcaaaggccggggcccccccatgaaggagcgcgacgcggccccggccgagcggggcaagccggccacctacaccggggacaagaaggcgaagatggcggccaagaccaacaagaagtgggtccggctcgccaccgtgttcgcctacgtgctctccgtgtcgctggccgccatcgtgctcgccgtctactacagcctcatctggcagccggtgggcgccgggacctcggggggagccgctggcccgccccccggcggctccaacgccactggcccgtctgggacttcgggggcggcggcggcggggcccaacaccactgggtcgtcccgccgcgaggcgccgcgcgacgttcccccactgcaggcggcgcgaccggcgcctccggagccccctgcggacagccccccggccgggccgctcgagcggcctcgggggccggacgaggacgaagaggaaacggcggcggcgcccgggagtcgttgaagccctccgcgctgggggccgccgggaaccattctccccaagcccagaggcaggacttcgcagcaggatggggtggagagcccgcgggagtgacccccacgagagtgaacgcccctcacactcccaccatcgccggctggccccggagcgggaggcccgcagccagatcttcagccaagggaccacgattcgccggggggctgggggtttgctgcccaggaccgtgctgcaccagggccctgagccgtagggggatggggggaggggtggggagatcccggcaccaaacccttctgcgccgctcgctctggtgtatcctacatgcaggggtgactggggctttcccccaagactcaggggaaggatggagctgtaggggctctttttaagtaagctgaagctctcgaaaggaggagggcaccaaaagtagtggagctcaggtacgtcaacctagttgcagtggccagagatgcattaaatttctagatccctgtatatagttgttgacatatgcactagaagctataatcacatagaattctatgtatatcctcccacaccctgggtagctactgactgaaggggtcaagcaagggctatttgctgtcccccaaaaagtacacctggccagaagggcacaaacacggcttcttaaatcactcactttctcctgttcccctcctgtttctgaaatataagtttatgacgttctttcacaaaagagtataatcattcttagactgttgacatggctgtggaaagccttaggagaagtagaaacaatttagggagggtggggaatgtactcatcccctcttctttccatcctagtgcccccaccaaagaggcttcttgttgcagccctcagtatctggatatgggccagggaggaaggaagggaaagagcaatgctgctgtgcttcaatcctggccttcccctcacagaattcttttaggaagagcaagcttttaatcctttgaacttgtagaacatctgggagtccacttccctgtcctcttcctgatccctgctttctggactgtttaaatcctctttgggatggatcagagagtctagagaggccactcataggtccagctgctggcctcctgactctccaaagccttcactggaattgggacatttgctccagccctagctgtgaacatgaccagagacattatttataattcagccatttaagatatacctgtactcaaaaagtcctgtatatttttaaaaagttttatttttcaggtgaacaaaaatacatcctaagaactctgcctaagcctgtgtaagt

SEQ ID NO: 469703 - DNA, 1447 bp, Homo sapiens
tgactccacttaccatcactcccagtgacctttctggaggaatttgtggttcccattcctgcagttccaagctctccaggttcagagaatctggttcccagagggggagcacttccaccagggacagaacaagaaccccataaacttaagtatggctgctttctgttcgtcagactctttgtgccaagaaaccagcaggaaagaagaggagtcacttcctggaaggggcaactgacccccatcctttgggagagatagggctgctgttacataagggggtcaggaaagaatatgtttggcacccaggtgatccactggggtgtctgttggtggttctggtgtgatatcaagatggagaaccacagggctcagtacccgacttcagttcggcagcctgagtctgcccgtttttattggcagctctgtcatttgactcagatggagctggctgtcagcgaaaaccctcagttttattcacacatgcttctgctaagctgccacttccccaccctgtccttgtacactctggagaaactgctgcctcatatctgggggaatgtgggctttgcattcaccaaggaggacctcactgaaatcaaggacatgttgctggctagtaaggtgccagctgccacctgtgctggtcccattgccccatgtgaagtcactgtgccagcccagaacactggtctggggccagagaaaacctcctttttccaggctttaggaatcaccactaaaatctccaggggcaccattgaaatcctgagtgatgtgcagctgatcaagactggagacaaagtgggagccaacaaagccacgctgctgaacacgccgagcatttctccctcctcctttgcgctggtcatccagcaggcatctgacaatggcagcatctacaaccctgaagtgcttgacatcacagaggaaacttccttcttgcttcctgaaggttgtccgcgatgttgccagtgtctgtctgcagactggctacccacctgttgcatcagtaccccattctatcatcagtgggtacaaatgagccctggctctgtggagactgattataccttcccacttgctggaaaggtcaaggccttcttggctgatccatctgcatttgtggctattgcctctgtggctgttgccaccacggctgctcccgctgctgcagccccagctaaggttgaagccaaggaagaggtggaggagctgggccgcttgggaacagcttgcttcaagtccacagacaggagcaaccctaactcagtctgccctgcaaaggtgggtacagcccctgatccacacgaactgctggaagaaaaatccaaagagaaagtcagtgaagacgtttgtagaaagaactgttgaagaaggaataagaaactgccatttttcctgtcagtgtctgctaataagtaataataaaataacaatgataactcat

SEQ ID NO: 469704 - DNA, 703 bp, Homo sapiens
gcagcagccactgtatcatagagagggggaaagcagtgacgcaaaagagagtggggagattgccaaagcgatgaccttgagtaggcaagacaaggtggtctcttgtgtgcaggtagaggggacagccatcaagaggagcacagggagtccgtttagtgacatgagggatggtggggcactgggtacaggtgctggtagatgggtggtggagcttgtggaagaactgagggcctatattgtacagcttccaagagaggccatctggctgctgctgctgctgccagcttccagacggaagctgagatttgctattgatgttccagcattgattgagctcctgcctcgtctgcatcaggcatggtcctcgcagcttcacgcagtctgccccaaggggcatgaattctcttgcacttctggtttgtacaagcctagaagtggccagctgatcatcccacaccttattagcaactcacacctcatcagcaatagacaagaaatcctgggaaggagccaagaggggcttgctgtacccatgggtgacttgaggggccatggcagtggcatcagaagtgacatccaggtctacacctgtgagagcagcacaggccatgttagatctgctcagcctggcagcaggcaagtgctcagcccggcagcaggcaagtgcacaggtctggatgatgggtaatctgaatccagtcac

SEQ ID NO: 469705 - DNA, 698 bp, Homo sapiens
ccacagaaacaatgaagcctggttcttctgaaaagggttcccactttccccaacttcatcctggttcaaccagcctcaagactgaggcgactcaggcagctctcagcggcttcagcctgcagtcccagtgggctgtgagtcacgggctgcgctgcaagcaggctgctctgagagagccctggagagctggccgtgggtgttcagaccattcctgctgctggtcaggaacgtcccttcaggaagttcgttcactccaagttgtccctaagcagttcagccccatagccttctcttgggatgactccaggctttccccacacttctgtcattaccaagctgaacaaaacagctcctctcctggaattcatccagctgccgacttgcgagggtacatgagcagctgttgttacagtggagagaagagggtgtgggctttagagtcagacagccagggctcgaattccagttctgcaattacttgctggtgaccttgggaaagtaacttaacttctctgagactcaactttcctatgctagaagtcatgataataatagtagggtcgttatgaggattgcatgtgtcatctctctgagagcagagaaactgtctatttattagtgtttaacccacataaagcattgagtaaatatttattgaatacatgcaaaatgcttcacacagtgtttagcacatagac

SEQ ID NO: 469706 - DNA, 476 bp, Homo sapiens
ctctgcaggctccagcaatgccatggttacactgatttcaaaacaacatctggaattgtgtgctctgcagtcgggggtggagacaaatggccccttcaccaggtctgctcatgagccttggggagacccttttgatcaccagttatgtgcccgtgtttcttttgttaggtgttccaggatgcagggccccctctgggaaaggcttgccaaccacagatcctggctttgtattcctgagctgctgtactgtggccctggggcaccagaacatcccatggctctgtctgaatccatggttggattctggctgcactggggattctatgtgctccagatcaccaggaaacagcagcagcagcagcagcagcagcaggaggaggaagacagcaatgatgaggctgcctaccgagcattcatgaggacctcctatgagaagaacccaaagctgttagcatccctggctgctgaataggtct

SEQ ID NO: 469707 - DNA, 507 bp, Homo sapiens
gacgtttttcagctgagatgtctgaatatgtttgcagaaaaacttccaaatctcacacatttaaacttaagtggaaaaaaactgaaagatatcagcaccttggaacctttgaaaaagttggaatgtctaaaaagcctggacctctttaactgtgaggttattaacctgaatgactaccaagagagtgtcttcaagctcctgcctcagctgacctgcttggatacctatgacccagaggaccaggaagcccctgactcagatgcccaggtggatggtgagaatgaggatggtgaagaagaggagttggatgaagaggaagatgaagacgaagatgtagaaggggatgatgacaaagatgaagtcacggaaaaggtgaaaacaggaagagagaaacagatgatgaagaagatggttaagaccccagaccacctgcagaaacagaactgttcagtattgtttggactattcatggatttggtagctgtttaaaaaaaaaaaaaaaaaaaa

SEQ ID NO: 469708 - DNA, 1131 bp, Homo sapiens
ctcacagccctctggttcagatgatcaatttttcctgattgttctctcacaagaatgcaaggtcttctaagtggctttgttgtctttctgcaagtgaagtactcttggctcagaaggaatcttagcttcttccgtctaaaaggattggagctgaagaatacatgctacagatgctcagaatctttctatgagactgctggtgacatgaacagagcaggaggacatggggccttggatgaccttgaattcctggctgtcttctgtggactcccatgcagattccagtttccagcatacccatggctttctgttaccagtgtggaagatgacaggaatgagataaagctagcacagtgggaattcagccagacatttgatctgaccatctgggcaaacttcacagattccatcttagcagaccaggcctgggatctgacagagtcaatgactgctacctttgcggaatgaatgaataaaatcattaatggctgaatgtggctggcttttccacgtcttcccacagctggggtacttaatattggctgaggcaactacttttaaactgttggtatttctctttaataaaatcttgggaaaaccttgattttcatgtcattttactttgggactttttccaaaatccaggctttatttttcatcaaacacatgtcatgatcatgctcttagggagtctttacaaaccatcatcatgctcttgagggaatcttttgaaaaccttactttagatcagagttagagaagaaattcacattctaatagatttgcagggtaattgatattctcgccatctctgttcatatttgaaatatttcagtactcgatgtaggggcaaaaacattgagtttacaccttctaataactttccaaaaacctgttataaagtaaaactgttgattcagaggtttggggatctctggggatacagctcagccttggggcccagggcctaccgtagctgggctacaccttcctctccagcttcttgtccagctgcttctcccttctgttttagactctagcaacatcctaggattgttatggtcctgttgatgcaatgctgcttcttgccatcttgctgctgtaaatgctgctttctctgctcaatcatct

SEQ ID NO: 469709 - DNA, 534 bp, Homo sapiens
aaactgcaatgtacagccaacattcatgtgggcgaggagcctacactttgagagctttgacagggagcatggttgcaactgtgaggaaatataggggagccacaagaacttaccaactgaccactacacctaagtgtcacctacaggataacattcgaaagcttcaacaccaaaaatatcttactgacatacacccctgcgaaaccaaagatgagaagtcagctacaaataaaggccctgcacgaagccatggccttattctacataagaagattatccccaagacacgtagtcatcagattttccaaggtcgaaatgaaagaatgttaaaggcagctagagaggaagggaaggtcacctataaagggaaccccatcactctaacagcaaatctctcagcagaaaccctacataccagaagagattggggacctatattcgacattcttaaagaaaaaaaatctttaaccaagaatttcatatccagccaaactaagtttgctaagtgaaggagaaataagatccttttcatat

SEQ ID NO: 469710 - DNA, 1838 bp, Homo sapiens
ggggtggagctaagatggccgaataggaatagctccagtctacagctcccagtgtgagcgacgcagaagacgggtgatttctgcatttccaactgaggtaccaggttcatctcactggggagtgtcagacagggggtgcaggacagtgggtgcagtgcaccgagcgcgagctgaagcagggtgaggcatcgcctcacctgggaagcacaagtggtcagggaattccctttcctagtcaaagaaaggggtgacagacgacacctggaaaatcgggtcactcccaccctaataccgcacttttccaacagtcttagcaaacggcacaccagaagagtatatcccacacctggctcggagggtcctaggcccacggagcctcgctcattgctagaacagcagtctgagatctaactgcaagtcggcagtgaggctgggggaggggcgcctgccattgccgaggcttgagtaggtaaacaaagcagccaggaagctcgaactgggtggagcccaatgcagctcaaggaggcctgcctgcctccgcagactccacctctgggggcagggcatagccaaacaaaaggcagcagaaacctctgcagacttaaacgtccctgtctgacagcttggaagacagtagtggttctcccagcacacagctggagatctgagaatggacagactgcctcctcaaatgggtccctgaccccaaagagcctaactgggaggcacccccaagtaggggcagactgacacctcacagtaccctcagagggtactcctctgagacaaaacttccagaggaacaatcaggcagcaacatttgctgttcaccaacatctactgttctgcagcctccgctgctgatacccaggcaaacagggtctggagtggaattccagcaaactccaacagacctgcagctgagggtcctgactgttagaaggaaaactaacaaccagaaaggacatacacaccaaaaacccatctgtaaatcaccatcatcaaagaccaaaggtagataaaaccacaaagatggggaaaaaaacagagcagaaaaactggaaactctaaaaatcagagtgcctctcctcttccaaaggaacacagctcttcaccagcaatggaacaaagctggacagagaatgactttgacaagttgagaaaagaaggcttcagacgatcaaactactccaagctaaaggaggaagttcaaacccatggcaaagaagttaaaaaccttaaaaacaaattagacaaatggctaactagaattaccagtgcagagaagtccttaaaggacctgatggagctgaaaaccatggcacgagaactacgtgacgaatgcacaagcctcagcagccaattcagtcaactggaagaaagggtatcagggatggaagatcaaacgaatgaaacgaaaatggaaccaagtggaaaacactctgcaggatattatccaggagaacttccccaatctagcaaggcaggccaatattcagattcaggaaatacagagaatgccacaaagatactcctcgagaagagcaactccaagacacataattgtcagattcaccaaagttgaaatgaaggaaaaaatgttaagggcagccagagaaaaaggtcgggttacccaaaaagggaagcccatcagactaacagcggatctctcagcagaaactctacaagcaagtgggggccaatattcaacattcttaaagaaaagaattttcaacccagaatttcatatccagccaaactgagcttcataagtgaaggagaaataaaatactttacagacaagcaaatgctgagagattttgtcaccaccaggcgtg

SEQ ID NO: 469711 - DNA, 778 bp, Homo sapiens
ggaggcctcagaaaacttacaatcatggtggtaggagaagcaaacatgtccttctttacctggcagcagcaagaagaagggccaaacaaaaggggaaaagccccttataaaaccatcatatctcatgagaactcactcactatcatgagaacagcattcagagacttgttgaatggctttgaccaaaatgctgataatgatatggacaataaaatccaggctgaggtggtcccagatggagatgaggaatttgttgggaactggagcaaaggtgactattgttatgttttagcaaagagactggatgcattttgcccctgccctgaagatttggggaacattgaacttgagagagatgatttggggtatctggtggaagaaatttctaaacagcaaagcattcaagaggtgacttggctgctgttaaaggcattcaattttataagggtagctgagcataaaagtttggaaaagttgcagcctgacaatgtgattgaaaagaaaatcccattttctgagaagaaattcaagctggctgcagaaatttgcatgagtaatgaggagacaaatgttcatcaccaagacaatggggaaaatggcagcaagttcccccaggccctgggcagtgccaggggtaacatccaggatccagggactgaaatcaaaaatcttagaaatcaacctcatgttctattgtattgcagctaagttgccattcaaaccatgagacacagtctttctcactcttcccttccctttctgcaagcaaatgagcctt

SEQ ID NO: 469712 - DNA, 467 bp, Homo sapiens
tgatcaaaattgaacaaataagatgttgattcttatggattggcaaagaaagtgctttcttgagatgaagtctacttctggtgaagatgctgtgaacattgttgaaatgacagcaaaggacctaaaatattatataaacttagttgataaagccgcaccagggtttgagaggactgattccgattttgaaataagttctactttcaaaatgggttgtaaagcagcagagacaactcgcaacatcaaaaacacatctggcccaggacctgttaacaaaggtgaaaccattacatctgagaagtatgttcagcaaatggatgagatgcaccaaaaactgtcctgcagccggcattggtccacagaaagggcccaattcttccccacaacaatgctcaactacatggctttccaagaagacgattgagttgagatccttgaaaattttcctctaaaaggattgcactgaa

SEQ ID NO: 469713 - DNA, 554 bp, Homo sapiens
cttctgcctcttttcagcttccaccagctccatagagtgcacaggatgtggccaaaattcacagtcagtccctggatccaagggcggatccacgttttagccaacattgttcctggtaggcggagcccattggatgggcaagcagccacagtactgctgccccatgtgggacctgccactcttactggcagtgcagatcttccaaagaaaggcattctgagtgaacggagaaatgatgcagaccttgggctaaagacggaagaaggtgggaatgatccatggagttgccgagctcaaggactcgatcccggcccccagtggttcctgaggaaggatcaaaccttcaaggacatcaaagaacataaaagcagaaagcccaatccaaggacagcaataagaaagattaaaggaacatccgtccacacgtatgagagagaacaggtgcaagaactctgacaactctaaaaggaactgtgtcttcctatttctaaacaaccacactagctacccagaatggttcagactgaaattgttgagataacagacatagaatt

SEQ ID NO: 469714 - DNA, 1442 bp, Homo sapiens
gccgcaggccacagaggtttccgatcattctctccacccctgcctctctctctctctctctctctctctctctctctctcacactttctctctctctttctcctctgctctcccgtcatctctctctcattctctttctcacactgtctctctctcatctctattttccaaccataaacaaagaaaatcctgccatttgcagtaacatggatgaatccacagggcattatggacattattttccttgcacattctgattggcacgtaggcgacaccaataggtttcacagcattccagcatttaatatcagcagggagtgggaagcaaataagtgtgtcttacgttatgaggaagcactcaagcaccagctcaaggagttgagtgaaaatgttttgcagacgtgtaagattctggagactctacaacaactttccactagtagctgctgcacttcaggccacaagccactttgtgatagacaggtatcagggatgcttaacaaacccagatcaacagatggagttgaatacattgagaaaactcattctcaaagttggcagaagggcacaagttgcagaatttgccctcaaggattcccacctcaccgtatggggttagaaaaaatcaaaactatttcaaaagaagtataatactctagaaatgctttgaaattctagaaaatgcctgaatttttttctggtcaagatagacgatatgaatatatattagtcaagaaaacctagaagatatactgaggtttgcccaattggttagctgaaaatattttctttagtatattgacatatttttctaaaggcccatagaagaagtaaatacattaaatatcactgtaactatattaagtagtaaccaccttcattttcatgttttgttccactttctgaatttgagaggtcttcttacataaaacaaagattaatcaacatgtatgctatactataatcatttaaattcaattttccctatcggttttaatttttaaaacctggtttgaaagttgatttactttgaaaatatatacacacatatgcatatagtttatatattatgaaatctaggatatctcatcacagatatgatttgatgtcaacttagataataaagcataatactaatcaaatatcttattattgtgccttgctgactaaaaccaatctaccaatctattcagctattctaagtacatttttggaaaatgtacctttttggtacattttatttgaatggcttttttatctctttgttttgtattatactggagggaaaaatttcagtgtcagctgcattattcttattatgaactttcaacagattttttacatttgaaaattttcaataataaaataacaattatcattatatttctgttctccaaaatagtttttattttattctaatgctttttaaaagactctgctat

SEQ ID NO: 469715 - DNA, 1225 bp, Homo sapiens
ccagcacgtgtagcaagctcctgggggaggaggttctggaggaatgcctagctgctgcggttcaggcatttggaagttcttgtgtgctggagatgcggctggggtttgtctcacagtggaggcaaggaattgcaactttttttctgttattgtacaccttgaaggggtgcctataaactccacgaccattttgtcctttgctcactacattggccagccagctgattatagtattctgaattcagttccattcttagttgactgtttccgagcaaaggaacacttaaccgaagactctgcatctgcgtcccttgagctgatgctgctaaacccagtaccactttgtcctacttacaaatatattttgcagaccctgcattccaatgcagcagatgacaccactggctcaaccagttctgcaatcccacctgggaacagaagtcagcaagaagaactcacttcgatcccttatgatttcatcttcaacccgaccaatcagcactccccactttccgaacccatatctgccaaattatccttaaaaactctgatccctgaggccagaattctccccctgtcctttgttactgagaacaccaaggagaacattgtaccctcgcagcaacaaagcaatggtcatgcaggttgctacctgctctggtactggaaccttaatttacctgcaggctctccatatagtaccccagttgtcattccccactgtcaacgtggtgtaattataatggacatagcatttgacagaaccttcacattggttcttcagcctttaggtactgtagtctggaacatgttcttggatgaaatatctagagccatgatttttcatccaatccgggacatggattccaagaatggagtaaattcctttgacagtaagtattatgtcatcccaacagaggcctacattcatctgatcttgaagacttggctttgtaaaaagtgattgtttttgaaatactgaccattatttattagttactttatacatactccaagtttaagagcttattgtttgtaaatttgagcaaaacagaagttctatagcagcaaatgaattgttaacttaatcaaatcttaaatatagtaattctaatttataatctttatttagagtcatttatgttaaagaatagcaatttagtgtataatcatgattctaatacttacatgtactgaacacatgtgaaagattttattaaactta

SEQ ID NO: 469716 - DNA, 616 bp, Homo sapiens
tgactaatgatttctttacacagtatgttgctggctcttgatcacatcactgggctgtttggagttccaggccacaaggctcccttaggcaaatgctgtggatggcaaacaggctacatccttcctggaccagtcttactgagggaagaatacccagctcctgagctggcccacgaacccatgcctcacccttcccagtgctcagagagtgggggctccccactacctgagctccaggcacagatctcagctccatattccagagctgagggattggtaccagtccttacaccctgggggatggggaccggtcccacgattttgtcctctggctcctcagggtcaaacaccagctgtgccggggagctgaagtgctcccaggccactggcaaaacagaaagttttgggaaactttgttggaaaagtagttttcctagttgggaaagtagaggatgtgctgtgcgtatgcccttgggggagcagccagacaggggcatttggagggaccggttgacaaagggcacataggttggatgcaccctggttccacaggaaaaacagccctgctgtcaagaggactggcagtcaagagggactggaaccactcaaagccttc

SEQ ID NO: 469717 - DNA, 610 bp, Homo sapiens
gtccaaatcatgggaagagaaagcctcatggttcttagtactgggtacagcaagctcagttgtgggaaatattcagcagagtggaataaaaagccccagctttctggccagaagaccataaaggggaaccccagggaagcagaaagtatcagagatatcatgagagctcagagatatcatgagagctcctacttgggaaagaaaccccataaagctcctgggttcaccctcaagttaccttcaaatacaagattaatagaagtgatgaaagcagacatccttgtcttattccagatcttaaggaaaaacatgcagtctttcaccactaagtatgatgtaagctggcagtgggctcccctgtggcccagggtgggtctagaaatactatccaggaaccaaggcctggaacaggggactctagaagcctacctggtattctaccccactgtggccgagctggtacccaagctgtagaacaaagtaccctttactcttccctctcttttcctcgagcaggaggatgcagctaggagtgtgctgcatcacacctgaagtcagcatggctctgagtgtcacccgtgacctgtgacaatgtctcactcttttgctt

SEQ ID NO: 469718 - DNA, 691 bp, Homo sapiens
ttggaaagaagttgattccaacccacatgggtgactttgagaggctgaagacttcagtggagggagtcactgcaagtgtggtgaaaataaaccttagcccttccaactacagatctaccatagaacaacaaatgagacttactttacatgattgttgtgaatgtcaaaaaaagaattgtaaacatgctttgaaaacagtaactcattttgtccactgtcatgaagaggtcatgcttcttggaaacagaaaagcatttccaaccaacaggattgttgtgaggaaggctgtatctggggacggtgaaggcttccgtgatttgttccccattctttccacaggtgtctcttcctgtagcaacgtacttgtaaccactgaggcaaggccccaggggaattgccacagggggatttgccccaggggaattgctacagctggtcagtggtaaaaatagcatctaacctgtgtaaagaactgtggtttgaataccggcctttttagagaaagttgaaagcttgtgctagcccatatctgtattctgttataagcaacagaaaatggattaagacaaatagaactaacatttattttatagacaatatatactttataaaggattttattttgtctcacaaatgcttatgcctgagattataataatagcacttattaagcatttaccacctaactaac

SEQ ID NO: 469719 - DNA, 610 bp, Homo sapiens
tccagcgaggcgcccattgccgctcccgatagggctaaaggaaaaaaacattcagtgtttcgtcattaagatattagctgttagatttacaagctcctcattccactatgccaaaagtcccatgtccaacacaactggctattttcggccctttgcatcaccatatgaattttaggattagcttgtcaatttctacagagaagctttggacctccggagagcctctaaatccttgcaccataaattatactctagtaaacatctttataaataattatgtctcctatgaattcagacctaaggaactacacatatatgaaggccaagaggaaactggctgtgcagggcagactgttacccagccagtggcaggcaggagtgtggactgccttgcacagatagagcccaagaacgggagggaaggggagaccacgtatgggagacgtggggaaataacaggtaggcattgtccacttatctctggacagttctatcccttcctgaaaatttagtccatttatccttgtattatagcttctgtaactctctggtgccattaaaaatatgacctttgtaatgtatccgctttttaaactttttctcaatggac

SEQ ID NO: 469720 - DNA, 622 bp, Homo sapiens
ttaggcttttcgaggaggggctgagagctcgagtcagtctagctttgcctaaggccttaggaatgcgagctatttatggtcccatggcccccacccccttttgtgccctgcaagttctgaagattaggatgcagacatcctggggatgccattattttgtctgccagtgtcctgggccaaaccagacctcatcgccaccaccagctgcaacggagcttgcatctggatgcttggacccaggggatttcaagggatgccttgatttgggatggcaagctaggacacacagacagcacagaacaaggagcagacaggatattcacttcctggttgcgtcatctagtcggcatcagctgttccctggcaagaccaaagccaagggcaggcggtggagggggtttgctgctgtactccacttgtgtgactcccgggctttcctttgggatctcatgcggctgctcttcaccttggcgttcaccatgataccggagccagcgtcccttgaaatgatgttcagcttcatgaatggctgactcagtgtccccttggatcactttaagtaaaattgtattttctttgttgttatcaaaactccagttttgttcaggtatctgcccccctg

SEQ ID NO: 469721 - DNA, 816 bp, Homo sapiens
aaccaggaactggtcttcctatatagagaactagaaagtgtggcccttttcccttggtgttctacctccgcgttcagcaccttctccccacctgcctgacactgaaggatctgcaagcatgaataaacaaccaaccccatgaaggaggaaaggaaaaccccagagagcatgagggtcctccagtggtcacttggatcagtctgtggggcagaccacagcagccagagtcggttcctacagcccattaaattggttcttgttccacctcattgtgcagcggaagtttcaaatcagtttaattaccgtgttgacatccagggacaacgcaacatcaagagctggccaaagcctggtcagtcctgtgcatggacaagcagggcagcaggctgggaagagaaagcagcctggagtggggcggatgagctggctggaggggatggggcaggctgtatcccacagttcactgccagggtgacaacagacactcagaggatctctaaggaggctcaaatgtgcttgaaggacacagggcttcctgaagctcccaggatgcaggtttaaatgacagttatccaaatctctaaggaatggttggctctgaagggctggggaaaagggaatctatagaaaactggactgtatgcgctgcatcccagatatgtgttacaaaaatgctgcagtgagcatccttatgcttacatctttgcctgtatatatgagtgtcatataacatctctgaattttagtacatttatttgaaatgcttgaaactagaagtgttttggatttccattttcttctggattttggaatagt

SEQ ID NO: 469722 - DNA, 917 bp, Homo sapiens
ggaagcggatttggaactggataatgggcagaggctggaagagtgtggagggctcagaagaagacaagaaaatgagggaaaaattggaacttcctagaaatttgttgaatggttgtgaccaatatgctgatagtcatatggacagtgaagttcaggctgaggaggtctcagatggagatgaggaacttattgggaactggagcaaaggtcacctttgttatgcattagtaaagaggttgcctgcattatgcctctgccctatggatctgtggaactttgaactggagaatgatgatttatggatctggctgaataatttttctaagcagcaaattgttcaacaagtggtctggctgcttctaacaacctatgctcatgtgcacgagcaaagaaataacttgaagctggaatttatatttaaaagggaagcagagcataaaagtttggaaaattttcagcctggccatgtggtagaaaagaaaagcccatttccaaaggaacagttcaagccagatgcaaaaattcgcattactaaaaggaaagcaagagcgaatagccaaggcaatggggaaagggcctccaaggcatttcacagaccttcatggcagccccttccatcacaggcccgaaggcctaggaggacagaacggtttggtgtgccaggcccagggccctgccaccatgagcggcctgaagacactgttccctgcatcctggctgctttagctccagccttagctcaaagcagcccaggtggacctggccatggaggccgatctgcctgtctgggccctcatgttcctgttcagtacacatacaggtggtgatagggaggtggaaaccctggcaaggcagataaaagagctccggttttagagtgagtcagacctgaattcagagctggctccgtcacttac

SEQ ID NO: 469723 - DNA, 849 bp, Homo sapiens
gtttatctctacctccagttcagatgccatgctggctgtggctcttttcttcatcaccatcagactgacatccttgatgctgctggctgccttcctcgccctgtttcctctccatgactccaggggtttgaagcacacaggagctggacatgtcaattctgtagctcttctcccaataccactgaaggccgtgagcctctctcctgtttccagcctgcaggtgccctgtgttccagaggccactggcttcaaggttgtcccctgccctaagcagtataacgaggtgattccagaagccctgcttatggaaggtaggactggggccaacttcctggtccccctcacccctttcttcgtcccttccctccagtggagagttggtgctggaatgaagatgatagtctccctggtgagactgaacacgctaggatgcagtggagaagggtaccaagcaccacgggacacctgtagatggagggacatcctgagggccatggctagtgtggagtggcccgataacgtagcaccgattcccacctagttctatactttacccaacctgaaaagaaaagactcatccctccaatcctctgacaaatggttatcgagggatgactctggtcccagttgcagtgtgactggcaaattccagttctgtgtgggaccagacaggtcaatgaggtactgaaacatttgaaacaccaccagatggcgctgatgagaccaaagaacagattttgtgtgcgtgagaaaggaaaagatggagagagagagggaaaatatgaaagtgggatcatagtagtgagttttatgatgtgaaatttcccaatggcagtgatatttgtagtc

SEQ ID NO: 469724 - DNA, 975 bp, Homo sapiens
agattgtgcttctgatgcatgtcaagcccagtgggggcacaccgttagccccagaaagcgcccttgccccttccaccatgtgaggatgaccatctatgaactaggaaacaggccctcaccagagactgaatctgctggcatttttgatctaggacttctcagcctccagactggtactgcaaatagggtggagatgaagacaagttctcgccctctggctacactggcacgtgggaacagccttctcttggaggactgttgccagacagaggtatgtgggcacctaggcattgccattgacctcaagatgagagtggagtgggtcattatcgctgctcccaccctggagctgagccccctcctaagcccttgttgcggcgcctgtgaggcgggcccagctgcaaatggcagccgcgaggggatccgaggggaccaagggttctgctcccctccctcactgaggctttccccatgtgccatcgtggtactggagctcggtgcctgcacacaattttctgcctctcgtggatggctctgccctgctccagcaggtgacagtcatgatggtgactttggcgcggtgaatgcccaggaagcttgttagatttcttttcttcatgtgatgcgtcagctctgatacatcttataggatgggaaaactgccttgaattgactctggacaagacaattataaaacaattataaaggctaaatttaacattcataggcaaaaatgaaccttagcctaagtcttgtacattatctaaaaacaaattcaaaatggagcatagacataaatctatacaacattttttaaaataggggaaaatgtttgtgatctaaggctaggcaagagttcttagactagacaccaaaagcaagatctattttttaaaaagtttgtaaactgggctttattaagtttgaaaatgttttcttttctacgaaacactttgtgaagaaaatggaaataca

SEQ ID NO: 469725 - DNA, 507 bp, Homo sapiens
gttttccggcactggctggaaagccagctgcagtagagaaatattgcccctggtttctggactgaggaactatgaatgtagaggtctgggaaaagataggcggcacactgaaaaaggcatataaggatggtgctgaggatattcctgtaactgtctggtcagtgtgggctctggtttgctccaccttggaatctttccacacagatgatgatgaggaggaatcagaggaagaagaagagtgtaatgaagtaacagaagaggtgacagagcaggtttgcttgccagctaaagcggcaaaggagggagaagtttgtccctacccctctgcaccccccattattttgaagaagagtggcctgaccctccagatctttcttttctggaggacgggggcaaaaagtagctgccctggtgaccgttcaagcagcgcctcgagtgacctctctcagttctattcaggcaggaatccagcaagctagacaagagggtggtatggatgcttggcag

SEQ ID NO: 469726 - DNA, 752 bp, Homo sapiens
ggatgctcttgtccactagctgcactgcaattgctctctcaaatatcgccaatgatttctgagtatcccacggatgtctccttttcgagttcatggctcccccggctcccccgcgtccgccagggctgtccctgaagctgaagctgctccgtggaagcttcctcccctcggtgttcacgcgcggcccgctggctgccccctgcatctccacctgtgtgtgcccgacttccagccagagcctccctctcactatgtgccctctgtctcggggtgcccacccaccgccagcccttcagcagcctccgaagataactctcaacctagcgcctggggcttctgccttgcgtgtcaaggagacgcgatgtcttggatgccccaggaatctcaaaccccaagcagctgccaagagggtggcagccgctcccaagatggcggccagccttttattctctgacttggggttcttggcctcacggattccaaggaatgaaaccttgggccatgcggaacaatggcgaacctttagcccgaacaggagtggcaatgggcgcctcgctggatcggaaatgcagcagacaccctgccggatccggaggggtggaagtcaatggagagtctgggatgccggcgaacagcagtggtggacggccctcagcagatgggatgatacctgcctgtactacctcatcgtcttctcataacaaagtgcctctccttcctcaagccccctctccccttgaagttcccataac

SEQ ID NO: 469727 - DNA, 698 bp, Homo sapiens
gagcccctggctgtcagcccccagttttctctgagagaaagggctctgagggctgcagggtgggctgccactccagtggtcagccgtcaggatgaactggaatctcattccaacgtggagggtgggttttacaggagcagcccactccggttgagcgaggtagctcaggcaaaacctgctggactccccctatgcgctgggcaggggcggaggaggcccctgctacccactgtcatggacactccttggcagaaatttcaaacaagcgtcgaggagaggtggggcttcctgggtgtcggtcttatacaactgctgctcccgtgcagcagccaatggctttcagctacatcagctgcaaaagaggtgccgagggagacagctgtgagtgtgtagcagtgatgggcattcacctagtggatatttcccggctccagctgtgctgtgtttgggccacggagtgtgatgggagacaaggaggttgcgtgtccctggacagttaccgctgttacactgatgaaaagaacgtgatggcaagccttgtgtgggaagctcccctggacatgggctctgcagcagtggcagggtgaacacttatgaaagtcttcatgccttcgaggtaacaggtccaaacaggtgcattttcagtagagatgcgaggaaagcaggaggagggcaaagctgagtcccggccccttacc

SEQ ID NO: 469728 - DNA, 728 bp, Homo sapiens
tcctacctcggccgatccttgaccaaagcacagccatgttccttacagctcttaagcgagggttttgtttgggatgttgtgttttccttcttaattttggatgcttttatgaaaaccagtgcaaaaaggctgaaaatttcaaaaaccagaacacctcttctcctccaaaggatcacaactcctcaccagcaagggaacaaaactggatggagaatgagtttgacaaattgacagaagtaggcttcataaggtgggtaataatgaactcctctgagctaaaggagcatgttctaacccaatgtgaggaagctaagaaccttgaaaaaaggttagaggaattgctaactggaataaccagttcaaagaagaagataaatgacctgatggaactgaaaaccacagcacgagaacttcatgaagcatacagaagtattaatagccgaatcgatcaagtggaagaaaggatatcagagattgaagatcaacttaatgaaataaagtgtgaagatgagattagagaaaaaagaatgaaaaggaaagaacaaagcctccaagaaatacgggactatgtgtactccaatcagttgtaaattcaatctctttatatagtcccatagttcttggaggctttgttcattcctttcaattctttattctctaatcttgtctgcctgccttgtttcagcaaaataggcttcaagctctgatatactttcttccacttgatc

SEQ ID NO: 469729 - DNA, 866 bp, Homo sapiens
aggttatgtttgcactttgggaggcggcgagcatcttgatggatcaggcatggggcttgctccctggtgctccaggacctcagctgcagcccaaggattccttcgggaaggtgcaggaagctggaagagccctgccagcccagagaggccattgtgggagggtctttaggagagtttctcttgattttgaaggctgtcagccccctgattcccactctgcactctatttctgtgtctttgtcttaattcctctagcgctgctggaggtctgggaaaagataggcggcacactgaaaaaggcatataaggatggtgctgaggatattcctgtaactgtctggtcagtgtgggctctggtttgctccaccttggaatctttccacacagatgatgatgaggaggaatcagaggaagaagaagagtgtaatgaagtaacagaagaggtgacagagcaggtttgcttgccagctaaagcggcaaaggagggagaagtttgtccctacccctctgcaccccccattattttgaagaagagtggcctgaccctccagatctttcttttctggaggacgggggcaaaaagtagctgccctggtgaccgttcaagcagcgcctcgagtgacctctctcagttctattcaggcaggaatccagcaagctagacaagagggtggtatggatgcttggcagttccctgttagaatacatccacctgatcaacaggggaatattatagctatgtttgagacttttcctcttaaattacttaaagaatttaaacaagttattaatcaatatggaccaggttctccttttgtaatgggactgttaaaggatgttgctgtctccagtcagatgttgccagc

SEQ ID NO: 469730 - DNA, 825 bp, Homo sapiens
agaaactaaaaactttctttcaatctgaagagagtttgcacttgaagatgaacatgtttctttttttccctttctcatctcaggacaacattttcattcacattgttcctttgtattgccaactagaagcaaataaccagagacacagtaatcgtcaagtaatttcagaaggccgcattcctcaaatagccccagagagagggcagggggcagctgaccttgcccccgcaaaccacacagaaggctctgagctcagctacagtggctgcggccagcccttggtgggcgtggtctgcagcaggaggaccgcattcgagattcctacgcaacactctgtgagattatctttccaacctgctgacagctcctctgcaagttttgtgttgatgatattaaaagaaggtgtcaatggaaggtttctaggacaggttcatgtgcattcatataaggacaaccacaaaaagtctgcattttgaccaatagtgttttgacactatcaattttaagaagcattttgtcttagttcatttgtatcgctaggaaggaatacttgagtctgggtaatttataaagaaaagaaatttatttagctcacagttctatggactgtaaaagaagcatggcaccaatactttcttctgactggggtctcaagctggttctactcatgacagaaagaaaaggggagcttgtgtgtgcagagatcacatggtgagagaggatgcaagagagggggcaaatgttgggctcttttcagcaaccagctctcctcgaaattagcagagctttcttcacctgtgcacaacacattctgaataagttact

SEQ ID NO: 469731 - DNA, 546 bp, Homo sapiens
gggaggccagagaaactgttagcctgtggttgtaacatccaaggggcttggggtgggggcaggaaatgcaaacgggtgccagattgacaaggggtggatttgtggacttaattttaggtgtcaacttgactggattaaggaatacctcaaaagctggtaaagcattatttggggtgtgtctgatggatcatgctgaaatggaggagtccatgttacatctaagaagatgggagtatgggagaaagacgtgggctcaagataaaggcacgactttaaacccaaatcctttagctaaagaagcgcttctacagcccccagggaggggggggaatgccttggaaagaggccgagctgctcgagggagcgggcattgtcatattaaatgggaattcttatttattcatcagatactgatggattcatttaaccactatgctcaagactgctgactaggcactgagaaacatatgcagatggacccgctgtcctcgtagagggatcagaggttgtcagaaatgattgtggtgcaggtggggggtggcaagc

SEQ ID NO: 469732 - DNA, 2567 bp, Homo sapiens
aaggaggcccagctgtgatcccgaggctttgtaggcgccgcagccctggccctctagaggccgacggaggagtgcgggggaagttagcttgcgcctgtctcgtcagccgtgcacgagaaaaaaaaggaccttcgagaagaacaagggagggcaagagttaccgagtacagggacatctatgtggccgctctgctttcccgccgtcacctgctgttgaactccggccgcatcgcggtgtccggagccgcctggcctggagtatgcgctgagcgtcacctaggcaaccacccctgcacctgtggatcagggtctcgctctgttgccaagggtagaatgcagtgtcgggatcatagctcactacagacttgacatcctggactcaagagatcctcctgtgtcagcctcccgagtagctgggaccactggcgcgcgacaaataatttgaaagtgggaggaggggaacagaaccacatcaaatggcagatatcatagaatgagaactgaatatacgcgttttgtgggaaacgcgttcttttcccctttctctaagattcgcttttaattcactagccactaaccactgggcaactgggaagctggatttggggaagggtattaggcaagaataagacaaaccggacttgtcttcattttaatggtgaatgtagagtacttctacgtgctcacattcattacgcccgtcgatcctcacaatgactctgcggtatagtagagacttaataccattttgcatgtgaggaaacagaaacttgttcggggtttccgaggaaaacacctccacctgaagccggagagagaaagaactgggtctccaaaccttgctcagcaaatccagccacgtggcagagggacagggaagagcctggcgtcaggttaccaggcagcgcccctctgctcggcccactggcaagcgctcccagcggcaggtataaaagctcaggctggcagtccttgaacactggtgctgaaccccgccgcgcgcgctttgaatttcccagccgctaagcgcctctcctggtcggtgtcccaggcagaaaggtgcagagacccatctgacgcaggactccaggtagacaagctccagcagagagtggccagatgtggtgcctggagcgactccgcttgggtcctgagtgccttcggcggagcggagactggcttctcccgggtcgggcccgcggagccaagtctcgcaccaccgccgcgtgcgcaaatgtgctcactccggaccgcatccctgagttctgcatcccgccacggctcatgccccgcctggccttggctgcgctccggaattcttgggtcgaagaagcagggatggacgagggcgccggccgcacagactgggacccgcgctcgcaggccgcgctgtcactgccgcacctgccccgtgtgcgcaccgcctacggcttctgcgcgctgctcgagagcccgcacacgcgccgcaaggagtcgctcctgctcgggggcccgcccgcgccccggccccgggcccacacctacggcggcggcggcggcccggacgccctcctggggaccctgcgcgtcccgcgagctccgggcccggcgacccccgcggcccccggctgtccccgcccgccccaggacgcgctcgcccggcggccccgcggctgccgcctcctgcgcgtccccgacgggctgctgagtcgcgcgctgcgggctgggaggagtcgccgcctgacccgcgtccgctccgtctccagcgggaacgaggacaaggagcgccgcgcgggctcccagtccccggcccgggccccctccacgagcccgccgtcgtcccgggtcccgtttcccgagcgcctggaggccgagggcaccgtggctctgggccgcgccggcgacgccctgcgcctggccgccgagtactgtccgggaaccgggcggctccgcctccggctgctccgcgccgagagcccggccggaggcgcccccgggccccgagccgtcagctgtcgcctcagcctcgtcctgcggccgccgggcaccgcgcttcggcaatgcagcactgtggtggggcgcagccgcaaggcctcctttgaccaggacttctgcttcgacggcctctcggaggacgaagtgcgccgcctggccgttcgagtcaaggcccgggacgagggccgcggccgggagcggggccgcctgctgggccagggtgagctgtccctgggcgccctcctgctgctctgagggcccagccctccccggggcgctctgcccgggggactccggacactgacagccgcgtggtacaaaataaacgtgtatttgttgttcttatcagtcccgtttcagtacaacactggcagagatgattctagattaactatcccagtgccaagttaagtgccaggagagagaactgagaggaaaatttcactcagatgcatcaaactcagtcttaaattactgagaggagaataaactaatttcatgcaaatacatttttagacttatgctttttacattgaattttcattatgaatgtgattaatgtataattcacaatcatgaattaagctgccacc

SEQ ID NO: 469733 - DNA, 2462 bp, Homo sapiens
tctggaggcacttttgattgccacaattgtgtgtatgtgtgtcggggaggccttggtgattctgtctgctacaggatgataggcaggctccatgacattgaccgcttgaccttggtcagcagcctgtgcgactatttgcatggcttggtggaagaactgatgcaggttatgaggcaccaaagcttccaggcaccccttgctgccacctgctgcgacagcgaccactgggggccccactgcagcaaccggtgccagtgccagaacggcgccctgtgtaaccccatcacaggcgcctgcgtgtgcgccgccggcttccgtggatggcgctgcgaggagctctgcgcgcctggcacccacggcaagggatgccagctgccgtgccagtgccgacacggtgccagctgcgacccccgcgccggcgagtgcctctgcgcacctggctacaccggcgtctactgcgaggagctgtgccctcctgggagccatggagctcactgtgagctgcgctgcccctgtcagaatgggggcacctgccaccacatcactggcgagtgtgcctgccccccaggctggacgctttcagaaatccacccagcaggctgggtcctcagaggcccagctgcagcagaaaggttggatcaggatgtggtggggagaacaagcacacagcatccctttgcctgtaaaggcctctctggagacactgctgaggctcgggtggctgaacagggggaagagattcctggccaccaggccctaagcatgcccacaagatattccgctagcccaacatgaagcctgtttcaggaggggtctttgcaaagagcctggggaattgtttctcctctttttctgggctctgagacctttcaaagcagagaaaccaagtctgagtagtttcatgttttccttgctccaggcatggttcctatttcctctgtgttcctgttgcctatttgtttatttcagtgtttctctttcatgtgagggcctatttcaaatatctggtgatccttggccatctgttcatgttttacagtgagccccagaaaagccaattggacacctgggggtggagggagatgtcaggcgtgttgactgatgggaccctcaactatcaatatctttaggtcatttctcttgagctcctcagtgtccctagaaaggaaccctccaacctcctgccacagggagttcagtccggcagtcagcctttaggagcgcagcagggaagagagcagcaggagagttccacccccaccttcatctgtgcctgtgtcccttgtccacagcctgtgacaccaacctctctgaaagacttggacaattcacctggctgctattcaaggtgggggcagagattgggggtctaattccctattttataaactttcaaacagtcctgttttgatcatacctgcaccttcaccttcggagggtcccagtgtctctgattcctgagctttttgaggttacaaaggatttcatcatccagcattgtgacgctccctttgcaggcacttaacattgcccaggaagcagaaaccaaagcagttatcactcctccacctgcttttccatcttccagtgtgtgacatcctttgtctcctattcctcttttctttgtgggtttatacctgtacccctttgactctcatgtcagctgggtttgagaaagaagctgagcaaagtgcacgtctccataccagcatgtttactcagcctccttccttatgtcttctcagcactttactgtgtacccatgtgagagtacttactgccttgtacttagcggtttttttggctctttctgtggtagactaggaggacaggaatcaaatcgaatcacccctagtgtctcacacagcacctcgtatacaataggcagttcctaaattgtgctgaataactggatgagcaagttggcctcagtctcccatctcccatctctaagaggagggctttggagccctggtgtccagctgtctgaacttcttctgggaagttgggtggtccctggagccacagcaggtgtgccattcccaggaaagtttggcatttctggagcaccgccatgcatgtcttcccacctttcttttagggagcagtgtgtgcccagccctgcccaccagggacatttggccagaactgcagccaggattgtccttgccaccatggagggcagtgtgaccacgtgactggacagtgccactgtacagctggatacatgggggacaggtaaggatagtgttaactgttatctttgctgtccattttactcatattcataggagacttgcagagaacagctcatagccctctctctgccagccttccagttcctttctcagaaagcactctgagctctcctgccagggagggttggcacctgatccctcctcaccctcggcctgcagagacaccctcttctctagcctagtggcccaagccctgaatttaaa

SEQ ID NO: 469734 - DNA, 5385 bp, Homo sapiens
caggcagcccacatagagactttccccttgggcatgaaccacgacgatgaccactcatcttgcgctggcaggtcccacatcatgtcaggagagtgggtgaaaggccggaacccaagtgacctctcttggtcctcctgcagccgagatgaccttgaaaacttcctcaagtcaaaagtcagcacctgcttgctagtcacggaccccagaagccagcacacagtacgcctcccgcacaagctgccgggcatgcactacagtgccaacgagcagtgccagatcctgtttggcatgaatgccaccttctgcagaaacatggagcagacagggaaggccctggccacaggggaaggccaggagcctgtggtccacctggccctggcagtgacggggctaggggagcagaacctgcaccatcctgtggagaaggagggcagaagtaggggaaccagccaggggacggagcaggtgaccaggggaacagatgtgaactactgattaaaactggtggaaaaggttgtttatggaaactgcgaggaagttaaactttaaaatggaggacaaagaactgaacatactgacatactgattatttgaactctatccaacacactcacgctcttttggggaagaaaatgcagaagaccagatgcttccctgtgaaccctttgagaaccaaggatttggggcatgctgccctaggcctgggacatgtatcagtcaaatccaggtgaagacagtgccacacttcagggctccaggccctgctgtatcaacagtctgcgccttccctgcttttgtaggactgtgttgtggttgatgttgggtatggcaggagagcgtacatatgctgttatccctcaattcttccctgctaggcagccttcctggtgcaggcgtgtgccgcctcctttcttccttctgggcctcatcctgccctatgctcccctgcacttactctattccagctgtactggttttccttttcttctcggaccccaccagggacacagttgcttcatgctggctgtttcctcctccctgccactcttctcccagttatccacatgactaattccgtcaccttttttgagttctgtttttttttttttaatataagcttctcaatgaggcctaccctgactaccctctttaagatgacaatctggtaccctcccctgcccacctgtgcagcatccacatctcctaattcacaagaaacatgaagaaatctagaaaaatactcaatataatgaaattgtttgaaagtagtgaaaaagagaaaatcttcaaggagccagaggaaaaacagataagttatatacagataaagaaaaacagtactaatggtccagttttctcattagcagtcacaccagtggtgtcgtgacatcttaaggtgcctgcagttattgcagagggaactttgatgcaaaattctcagcagtattcttcaaaccaatgttggccttctttaatatgaaaaatactactacttgctagatgctgtaaaacgaaagaaaaatattcatagtcaggagttttaggggtgaagcaattaaaagtctaaaaatttggaggactctgttctcttaaccccattcatatgtaggaattgagaacaccattcatgttcccaagccctaggctcccccaaagaccgttgctaagaactggtgcctccagaagcacagaatgaccaggtgctgggtggaattttaaatgtggaccttctttctgactggtcctctctgtatgttcttctgccactcgcaattcatagctgttttaagaccaatcaatttaaacatcatttccctactcaaaggtgtgggtaaataaccttggaagagcatttctgcaattgctttaggagcagtctaggcttcaaatattaaccaggttgctggtttctcaaacatttgcataccggagaactgagaaaaattaaaatacagtccatattaattcttaggactctggaggctcccacactatcaccactgaatgtctgtctgcagaatgctagtattgtaaggctcaaagctgtctatggaaatatgaactagaaaaaaaattggcatcaacaactggcatttgttgcaaaagttattggcaaatacagctgtctcctcttttagccaatggtaatgtgatgtttttaattcaataaagcatttcaagaaagtccaaacataaagttataaacattggatggtaaatatttgttagaaaggggaaataaactttatgcaattagcccaatcagtcttttttatgattacaagtttctcctgtctgtcagcaaagtcactgcaaaagaaagttgctatttaacaacactttcaagctacttaagctcagatattcttccaggtgaagcagagggtgagaaagcccaatgcaggcgctgtcagctgcaaggaagagtgtgtattgctgctagagaaggagcaagaaggggtgcagttagggtcctgtcctgactgtgagatccctgcctcacaaagtcccaccgctttctcacatgagagaggtgttcatctgccccatcaccaccaccctggtcctggaggctttcagttgaaaggtgctgtttaatgaccaccacccctttccctactgcttcccaggaatgcattccaccatcgtggctccaaagcccaggcatggctgccacacagtagtgcttggaagggatgtacactcttcttgttagttgccacgagcatatatgtgcctgtatgtcatagcattcacaaggacccgaggtgtgcatgttatgccgctgtttaagaatgttattgagcacaaagctgtcagccaatcatttcaggaagacaggatctagactggttataggcattggaaggtcttagacaattgtttctacgtaatactccctcctttctcttttctcgttaattgccttttggtacagtgtggagatgctttctagatcacacagtgcctgagaaggactctctagtcaggctgcccagggccccattctgcctctgttcttgaacaggttgcctagtctcactatgtctcagtcttctcatctgcaaaatgggaatataaactctacttatccatcattgtgaagacatgagagttagtagtaactgaattaaagcacttagcatgtagcacacactcaataaatgttaggtagtgtccattctgtgcctccttgtcgcctggagccagagggacaggaggaaacactgtttagctgagatcacatgggcctgtcccttcccatatctttccctgtgctgtcctcaccatccctcccggtactctgggagcctggaacccccagggattgctttcccgtgtccagtacctctacctgggcaaaatcccagtctccaggcttttctcctttctcacgtcctgcagatttacatgggcatctgatggctagagagatgcttggggtgacaaaattctaccttgggacaacaaagtttgttcctctgatgccagttatttttaaacctggtggattgctagagtcctccagagactgttagaagtttctgtgtcttactccagattttctgtcttaaaagtcttcaggaagatgggttttaggtatctgtctttccgtacagcttccctggagattcttccatccagcttagttaggaaactgctcatctaaatgaggtctgtccctttaatgctggtggacctggccagaatgggtggctggcggggtcccggagcctggccttgcccctctcagggctgtacggtagtgcgtggacttgcatgccaggctgaaagctgtcctgcctgtctcagtctccgcttcctgcccagcatctgcagcctctcagagccgttggactttggcagcagatggtcctaattttccagaagtgtttgaaagtttacagtagactgccttttcagagagctctccacaccatgccagttgtgagttgtctttcttgtccctgctgccagctgaagtcctgggccccaccctcacccggcagcccccaaccccagccaggtgacggtctctgtagccctcaggaacatggaaggagtggccctcccaggactcaggaagccttccaggagtggggctggcatgctggcccggggaagacttcacactgcagtagtatgtgtggaaaatttggatgagtcactttttcatccagctcttagcgttgattttctctctcttttggcttgtgttatcagcagcacatttttgagagactttatataagcatctcattcagtatcattttgagttagagccgccctccaaaccctcagcagatgcccagagaggatgaggcaagagaacagcaacatgaccttcacagtccttgacagggacaccaccagttgaagaaaagtggcgaaggctcgtgtacgtgagcaatggtgccatctgagcagctcaaaccttcccgcgttttcacagcgctccagggatgcatgcttgctgctggctcatcatgcagccgctcgaggaactatgcagcaaaacatgctggggatgactcttgacaaaccgtaagcgtagccagtgaggtgacaaatgctagaaccagagagctgtttcattttccttgccatgtgcacggactgtgactttccaccgcaactcaagcactgccgccgggggcgggagtgggagaggaggtcttagtacccccacccctgatttggcctgggcagccgccctttgtgtgtttccaccctgttctagtgcatcacgtgtcgctgaagcccagggacgtgctgcccagcagtgtttccagggagaactctgcaggcggagggaacggcatgtcgctgagcacagagcgccccatctcactgcagatgagaggatggacactcacaccgagaatgcatgattgcaggggaagcgggaagaggaaattggggactgatggagaggtagtgtaaccagtgggaaggagcctgtgttctgggttagaacaggtccacccatttcctcatctgtaaaatgggaacaggaagtgtctgtctcacaaggttgatgtgggtaggaaagagacaaccctgataaagcacttctatgatgtctggacttggtgactgcttagcttgccaggcactggtttacagatgaaagtattcatcccattcatacattccacacgtctttactggatatatatatatatatatatgtatgtatgtgtgtgtgtctgtgtgtgtgtgtgtgtcttggagttagtcaggactagtgtagagttgtcccgtcatttttaaaaaattgtgttattttttaactttttgttgtaagacaattgtaactcttaaaacttacaaaaaatactatatgcctttcagccaacttcctgttatgttaacatcttacac

SEQ ID NO: 469735 - DNA, 3882 bp, Homo sapiens
gacaccctttgcaaaccacacggtgaccaccctgcaccagctacaggagctccttgaccttcatcctgctcagtgtgaagcagcaggtccctggccacaccctggagggtgatgtcttcctgctccaacttgggccttttagccatgattgggtttgtcatcctggaatcactgcgtcttcacaagatctttaagtacatctgttctcaattttcagactgtgaggccaggatttgggtgcaagtagtttatctgggaagtgatcccaggaagcactgtgagggggtgagggagagagcagtcaagaaaggtgcaatcctgactgtgacctgtgagtgtgggtgttctccacaattatggttccttcccttgtcctgcagcatctaatgtgtgctggactgtggtgcctggtagaaggagacacatcctgcaagaccaagctggaccctcccctggatggcaccgagtgtggggcagacaagaaagaaccaaggttccctcacgtggagctggctgtgccatcgccaagcagcaaacacaactctcaggttcacaacctcaaccggggcatgccgcctcccagcgagaaacgcactcactggtgccgcgcgggggagtgcgtgagcaagacgcccatcccggagcatgtggacggagactggagcccgtggggcgcctggagcatgtgcagccgaacatgtgggacgggagcccgcttcaggcagaggaaatgtgacaaccccccagctcacagagccaggggccgccagggcagggaccagaactgccaggtttgtactgagcgtcctgtgtctctggatggtgaagctggtccgaactgctgttgtgactttatcttctggtctgtcttcatttaatacagcaaacctgaaaataaaaagtggcatctttctcttccagcctctcttgattctacctgtccatccactctcaaagaaaggggcagatgttctgccatatgatcctgttggtctcagcaaacctttgctgcttctctgctctgggcttgtgtctatcaaggccctgaggactccacttcagcaggagacggtccttgttctgcaggcgcttgggaaattttggggtagagctcacctttctctccacgctttcggtttctcaccaaagcctctctaccttactcttttgcttatttttaaacaaacttatgaaggtagaatatacaaagaagcacagctccgtgcacagtattgctcatcacggtcgagcatgtgtgttggggcgcacgtgcaggtatatgtcagtacagtaggagggcagttgctggcccctggggcgcgcatgtgtgaccacataacagctgccagctttgcagaatggccgtgccatctccattgccgtggctggggtggctttctacttgccccatgtcctcactgacaccggtgttgtcagtaattctctctggttttggccgttcggatgcgtgtgtagcagtatctggctggggaattggtactttcctcatcaacagtgaggccgaacttctgtttccttatttgccatttggatatccttttcttgtgaagtagccatgcaagccgtttggttttgtatctaagcttctattttattcacccaagcggttatgtcacctgttggagcgttgatttcctcacccaaagggtgcagtcaggagcaccttctgattctgcatgtggatttaatgaagtaatggttagaagggccagcaaaatgggagccctctgggcgtgtcggctgttttatgatcactgtttatgtgaaagtgcctcttgccttgaagtttcttcccggtcctcagggatcagtcctcatttcaggatgagattgcaacttgttggctttcccctggaggcctcatgggacctcggagccttggagcccagtagggctgcgccttcctgccctcacaggagagggtgagggaaagactggacccaccttcagctcctgggaagggataactctatcacgaatctcttatattaactgttctttattttagccctgtcaagctgtctttctgtcgttttagtctccctagatgtgttttgtttttctccttactgcgtagctcagagcaacttccagagttacatctagtatcctttcatttgaacttgaaggactccctttagcatttattgtaatgcaggtctagtggtaacaaactttctccattttttgtttatctgggaatgtgttaattttcaccttgatttttgagggacagttacatggatatagagttcttgcttgacggttctgttcttaggcactttaagtatataagcacacttctttttggccttcaaggtttctgtttaattacaatgtgtcttagtatgggtccttgtatcctacttggaatttctcgagcttcttggatttatagagtcacatctttctttacatttgactcagcaatttcaattgtcctatattcaagtttgctaattctttcttctgcctgctaaaatcttctctgaactggtggatttttcatttcagttcttatacttttcaattccaaaatttatctttgttttcttaacttccatatctttattgatattctcattatgtttatagattgtcttcctgtctttatctgtgccttcatttggttcctgagcatttttaagacagtcgttttaaagtatttgtctagcaaggccaacatctgggtttcctcagggacaggctccgccaatacattttgttcttttgaatgaaccatactttctgtttctttgtatgccttgtgatgttttcattaaaaactagacattcaaatcttagaatgcagtaactctagaaatagattgtaccccttccccagggtgtttggttttgttttgttttatgatttagtggtatctctggatcaggaattaacctgaagtgaaagctgaaggtcttatcaggtcttttttgaacctgtatcttttcctagccattgctggtggctttctaagttctcctagatgaagttgcttttaaatgtctttgtgcctaaatgtctggctcctaaaagaaaaaaggagggaaatcccctggaagccacttcacctggtggaggttacagcaatgtcagccatcttctgcatctgcaccttaacaactgaaagtagcaatcaacagtcagaacacagaaaccagatatttggaagataaggttcttactgctcaccctgactccagaaagttgcaacaggagcacagacatagctgcctgccttgtgggtgaaggatgggcagtaactgttaccacactaaaggctgaaattgagcaaaattaactgaaattgacctggctttcccctggaagctgcaagccttcaagtagactgcagagtttcaaaatagtttcttcaggtagtttttgccagtgtgattattgtctggatggagaactggattcctggtgcttcctcctcagctctcttcccgacatcattccctctgttggtcattttaagatcagctctgataatatagttcacaggtgaaggtaattgttgtgtgcgggttaggcagatgtaaaactggagaaatcagctactggaaaggcgaggaaactgaagcgtaaaaggaagctcgataaccactcaggaagttaatcacatgatgttcaccaatcagagtctatactcaagtgtgtaggaaaggtagctttctttattcttctacgaacccacctaatttgtatttctttactcccttccagtccgtgttttgttcctcatgacttcatgtctgccctgctttcccttagtctgcatggtgatgtttctcctactgatccatgtggcttttgggggccagcccttctgtgctccttccatgccgtgttcc

SEQ ID NO: 469736 - DNA, 651 bp, Homo sapiens
ctctcgccctgtgcaaagtaaccacatagatggcattaggagctcagtcctgcactgtcttcccctgtggctgtgggtctttttccgcttcctggagcgcgtacctgagctcatgcacctttactgacctgtgcggacctctcttcctcagggtttccctctgcccacatgtacctgtgccctgcatggcccacgcacaccttcccgtgtcaacgtcctccaacctttccctcctcagataagccatgtgaactctactgctcgcccctcgggaaggagtccccactgctggtggccgacagggtcctggacggtacaccctgcgggccctacgagactgatctctgcgtgcacggcaagtgccaggtgacgtacttctccttcggtccttggtggggctttggagaggagactcactctccccagacagggaaacgagcacctcctgaggtggcgcagcagctgggatggggagtgggtgtcgaagctttgtattttctgtgcctcgcttatgccacaggtaccatactccctggtgactcgggtcaagctgggcatgttgtgagagagccccagcatcttagtcagcttgggcacctgtaacgatacaccatagaccaggcagcttatgaacaactgacctttattact

SEQ ID NO: 469737 - DNA, 1029 bp, Homo sapiens
ggaatgccttatccaccatcatggtattccacacagcactgcctctgaccaaggcactcactttacagctaaagaggtgtggcagtgggcttatgctcatggaattcactggtcttaccatgttctccatcatcctgaagaggctgcaaagaacggtggaatggccttttgaagtcacaattacaatgccaactagttccagagggagaaatgctgccaccaggagacacaatgattccattaaactggaagattggtacccacctggacactttgggctcctcccacctttaagtcaacaggccaagaagggagttacagtgttgactggggtgactgacctggactatcaagatgaaatcagtctactactccacaaaggaggtaaggaagagtatgcatggaatacaggagatccattagggcgtctcttagtatcaccatgccctgtgactaaggtcaatgggaaactacaacagcccaatccaggcaggactacaaatgacccagaccattcaggaatgaaggtttgggtcactccaccaagaaaaaacccacgtcttgctgaggtgcttgctgaaggcaaagggaatacagaacgggtagtagaaaaagatgcttcctgccctggaacatcagaccccaagttcttcagttttgggactgggactggctctccttgctcctcagcttgcggacagcctattgtgggatgttgtgattacagctgctgtgttatggtgctggccacaaatatttccaagtctttctctggaaatatggaagtaacacatttcaccggccacttaaacgtgtgtgaccatgtgacttgaagagtaaaatgttatcttttgaagacctgaaaacaaccacatgttcaatcatccagaaagaaagtttctcagtcagaaagtttagcagtgtccttcagccttgacagcaaatgccttggcattgttaccacagacctagccttggatgtttacaaataaatgtcctgcaggatgtttggagagacttcacaaatgt

SEQ ID NO: 469738 - DNA, 959 bp, Homo sapiens
ccgcaggactctttgttcatctggacccacagcggctgggaagggtgcagtgtgcagtgcggcggagcagtcactttaaatgaccaagtgaccatcagcagcacccaaacatgctttcatgggcatgcaagcccagcctttccacgtgggtgcagccacagtctctcagctccctgtggtttggtttccaggggagcgcagaaccatcgtctcgtgtacacggattgtcaacaagaccacaactctggtgaacgacagtgactgccctcaagcaagccgcccagagccccaggtccgaaggtgcaacttgcacccctgccagtcacgaatgaaattccaccctaatgctgaaggcctggaggaagagctcactgcaggaaatctgcttgagcacctcgtgctgctgttgattagtgtatcattcacagtgttccaggtacaatccaaaattactagtcatatagggaaacagatccatactcaaaagagaaggccattaatggagactgactggaagatgacataacaggggtcagcaaacttcatctgtataggtctagagaataaatatttttgccttcgcaggccacatgtggtctctggcatatttttttctgtattttgagtcataatcctttaaaacatgtaaaatttgttattcgcccttgggttgtccaaaaataaccccgcaggccagacatagcccacacgtaagagtttgctggcctgtgttttggattattgcttactcccgttttgcccactgagatattggcaccacgctctcagcatgagccagagctctgcaggtattagctcagggaatgtattttcttattatacaaaggaggacgtgttagaattctgaatttctttttattgtgtaacttgataaatattcgatttctgcctccccaccacttctctttcccacttccttacactcccttcctgactgt

SEQ ID NO: 469739 - DNA, 649 bp, Homo sapiens
aagttcaaaccatgactttgagacctttaaaactacttatcttgagtttgtgtctagtggagaaccagctggcgggctggggggggcctgacctacgcaacaggaagcggcctgcccaccctctccactgccatgctccccagcacaggtggaaaggaaaagggctacagagtctgcagattctttgttttttaaaagcccaagcagcttattttaagtcaataatgccatggcctcagagcaaagcagacactgcagcacagcgcttccaggagccagccagcgagggggcctgcagccctgcaacccaagcccagtgtgcaacaagcagccagagggctcactctcagaatgggggctcagctgacccgtcccaggacagacagcgggcctgtcaccgatcacgctgttgcggtggcaaagtattccactgcagctggccagcattgcaagacggtcttgtaccacacatggctagcacaggaaaacactaaaattccaaatttaagttcagtttctatcgaatgcatatcactttcacaccattgtaaagtcaaaacatccttaaattgaaccatggtaaattggggaccatctgtattgacaaaaaaaaaaaaaaaaaagggcaaatagccaaatggaaaaaaaa

SEQ ID NO: 469740 - DNA, 586 bp, Homo sapiens
tccaggtttggttcacagtgggtctggtgggcaagacagtaaatcaatagcaatgtcgcaacccagtgagaatagcattatgaatgtcattcttaaagacctaaaggatgctgctgtggttgtccccatcatattcccatgcaattcctcagtctggcatctacgaaattcacagtggatcctctctgaccacagtggactactgcaattgtatccaagaatgagccccacacaaactgctgtgccagttcacggaattttagaaccagtgctcaagggcccgtgcctggggaaccatgctggaggagccacatcggcacctgattcaggggatgcagtcccgagcctgatgctgaaaggagatgagactttagggctggggtgggggagggctcactcttgggatgtttgccaccaaaatcccaccatcccttggagaggccccttgcaggtgtcccggctgatggtcctagcggaagttctgactgacagctgtcatcaccggccacaggtgcaagactatagcccttctgacccttccagtctctacttgacctttgagccaccccagcagaggtgagctgcc

SEQ ID NO: 469741 - DNA, 864 bp, Homo sapiens
ctcctcaagtagtgttcagactgggttaggtcagcgcactctttacaaccaagtcattcgtaagcattgccaagggagaggggaaggggtgttgctttccctgccctgaattccagtggaaaccctagctttccgaccccaaagctagctgctcagtgccactgaggcattcacacatggaggagacaaaagctgcatcgactggacacatcaaatctaaacgaagcctagaaaatatccgtgttccaagtgtttcccttaacacgactacagccgaaaactcattcatcaatgtcctgccacttccctcctgtgggacaagatttggatgcacagggcccggtggcttccctctgttccggtctccaactcacctggcccagagactaggatggtgtcccctcgcccccattattaatcactacgcacctccccacaccctggccctggggaccattgagtctgacacaaataaagctgtagacagacttaaaactcacccccacaaacctgttttcagatcagagcagatatgggccccagaagagcctcgcaaactacctccagccagccaagttcgctatcatccttttaggttcgactttttccaagtctgtaggtgacaatgaatatcttgtagttttttgaatttccatttacttgactatctgtaaagttaacagttttttcctatatgtatttctttagtgaatttttgcatcatttggttatttttctataaagtgcttttttattgagatctgtatgccttttatatattaaggatatcaatgtatcaaagatggcaaacatttttaccccatttgtcataagcctgttaaactttcaataattgtttttgcc

SEQ ID NO: 469742 - DNA, 1189 bp, Homo sapiens
tgaaaggggcagattctggggatgggcaatcttaaatttggatcctggcttggccacttcctagtaagctgtatgactgtggatacattatttaatgtcttgaagcctccttctcgtcctgactccaggcagaatagcaataaagactccttgcctactgtggttcatcagaggcctagccttctacgattcaaggaccaattacttagcatccagactctgtgcaaaagtagcaagaacaagtgttctcagtgtaggcatttggcccttgatgccctgcaaatgaaggaggaggatgtccttgcagcaggaaccaacttaggtggcaccaatcttgacttccagatggaatggtacatctgtaaaaggaaaagtgatggcatccacatcataaatctgaagaggacctgggagaagcttctgctgtcagctcgtgccattgttgccattgaaaaccctgctgatgtcagtgtcatatcctccaggaatactggccagagggccatgctgaagtttgttgctgccacaggagacactccaattgctggctgcttcactcctggaactttcactaaccagatccaggcaaccttctgggagccacgggttcttgtggttactgatcccagggctgaccaccagcctctcatggaggcatcttatgttaacctacctaccattgctctgtgtaacacagattctcctttgcgctatgtggacattgccatcccatgcaacaacaagggagctcactcagtgggtttgatgtggtggatgctggcttgcaaagttctgcacatgtgtggcaccatttcctgtgaacacctgtgggaggtaatgcctgatctctacttctacagagatcctgaagagactgaaaaagaaaagcaggctgctgttgaaaaggctgtgaccaaggaggaatttcagggtgaatggactgctctagctcctgagttcactgctactcagcctaaggttgcaggctggtctgaaggagtgcaggcaccctctgtgcctattcagaggttccctacggaagactggagtgctcagcctgccacggaagactggtctgcagctcccactgctcaggccactgaatgggtaggagcaaccactgaatggtcttaagctgttcttgcacgggctcttaagcaacatggaaataaggttgatggaaaataaa

SEQ ID NO: 469743 - DNA, 1240 bp, Homo sapiens
tgaccttactgttttaggctggatgtctccgtgcagctgctgctgccaccctaatattttagaggccctcaaaatcacaaactatgatcaactcactctctacagctctcataatttccaaaatctattttcttcctcacacctgacacatatactttctgctccccggctccttcagctattctcactctttgttgagtctcccacaattaccattgttcctggcccggacttcaatccggcctcccacagtattccggataccacacctgactctcatgactgcatctctctgatccacctgacattcaccccatttccccacatttccttcttccctgtgtctcaacctgatcacatttggtttattgatggcagttccaccaggcttaatcgccactcaccagcaaaggcaggctatgctatagtatcttccacatctatcattgaggctaccgctctgcccccctccactacttctcagcaagccgaactagttgccttaactcaagccctcactcttgcaaaaggactaagcgtcaatatctatactgattctaaatatgcctttcatattctgcaccaccatgcggtcatatgggctgaaagaggttttctcactacacaagcgtcctccatcattaatgcctctttaataaaaactctacccaaggccgctttacttccaaaggaagctggggtcattcactgcaaggggcatcaaaaggcatcagatcccgttgctttaggcaatgcttatgctgataaggtggctagacaagcagctagctctcaaacttctgtccctcacggccagtttttctccttcataattcaggcctgtcctcagaatgctacgaggtacagcccatttgagctcctgcatagatgctcgtttttattaggccccagtctcattccagacaccagaccaacttagactgtgccccaaaaaaacttgtcatccctactatcttctgtctagtcatactcctattcaccgttctcaactactcatacatgctctgctcttgtttacactgccggtttacactgtttctccaagccatcacagctgatatctcctcatgctatccccacactgccactcttaactcttgaagtaaataaataatctttgctggcaggactatgctgaatctccttaggcattctctaatcagatgtcctgagtcatcccaattcttagaccttttatacctgtttttctccttctctt

SEQ ID NO: 469744 - DNA, 1038 bp, Homo sapiens
tggtattctttttgtggttccatatacattttaggattgttttatctatgtctataaagaatgtcattgcatgcactgagctgctctggagctcaggactgccagggccgtcctggtactggggtcaatggctgccaatctagtgctggagcaggcctacaagatgggtctgcatgtgctagcctgaaatctggggttgtgaaggcccagcctggcactggggcagactgggtccctagtctgcaaggactggctggaggctgggtccatgaatgctggcctgaggctgaggaggacctggaaactaggtctacaaaggccggtctggagtctggggttacagggccagcctggagcctgaggctgctggtgccagccagccaggtgttgaggcagtctggagcctcaggtcactggggccatcctggcagtgggacaggcctggagcctgagaatggtctgaagcctgaggctgcaagtgctaaactgggctgcagggaccggaccaacactggagggagcatgaagcccagggctatagaggccagcccagccctgggaacaatctggagcatggagccactggggacagcccagccctgggggtctgcctgttgctggatgagtctgaggactgagtccttggggccatcctggagcctgactatggtgtctggcctggcattggaaccagtccagagcctggggctgctgcaggtaactgaaaccacagaaagcaaagccacagataaggggggcctcctgctgaattcctagctttgtgtgattagattgttacctctaatccctttcgatggctattgttctgggtgccagcaatttgctcatacacatacactgattcctttctcagcaaaatattgaggaagatcttgatgtggtttgactgtgtccccacccaatttcatcttgaattgtagctcccatagtccccaagtgttgtgtgagggacccagtgggaggtaactgaatcatgagggcaggtttttcccattctgttcttgtgatagtgaataa

SEQ ID NO: 469745 - DNA, 1139 bp, Homo sapiens
tattgagaatctaatgcctgatgatctgtcactgtctcccatcacccccagatgggactgtctagttgcatgaaaacaagctcagggctcccagtgattctacattatgggatacctggagctgcaggaaatccaggggaaaggggagaaaagggagaccatggtgaactgggcctgcagggaaatgagggcccaccagggcagaagggagaaaagggtgacaaaggagatgtgtccaacgacgtgctcctggcaggtgccaaaggtgaccaaggcccacccggtccacctgggcccccaggccctccaggtcctccagggccccctggaagcagaagagccaaaggccctcggcagccaagcatgttcaacggccagtgcccaggtgagacttgtgccataccaaatgatgataccttggttggaaaagctgatgagaaagccagtgaacaccattccccacaagcagaatccatgatcacttccattggaaacccagtgcaagtactgaaagtgacagagacatttgggacttggataagagagtctgctaacaagagtgatgaccggatttgggtgacagagcatttttcaggcatcatggttaaggaattcaaggatcagccctcacttctgaatggcagttacacgttcatccaccttccatactatttccatggctgtgggcacgttgtttacaacaactctctctactaccacaaagggggttctaataccctagtgaggtaagtcgcaccacagcaccttctcacgcctctcaggcagcacctgtgctgtggtgcttttgtgagcaattaggggtagggactgtgttttcatcatctttgtgtccctagggctgacacactgaggtcaatcagggtttgtcgactgaatgaatcacaggatatgttagtgagccccatggcccagcccctgcctggggtctgcatttgttgctggtctggacagcccgaggaaggtcagagccagggagaagtagacctggagtggtgacggccgcagcttccccatcctctgagagagaagcagcccgaactcatagctccccctggtggaacgtgctgctgctccctgataaagttttgttttggaaaactttgggtgtggggaatttc

SEQ ID NO: 469746 - DNA, 525 bp, Homo sapiens
ctcagaagacggcaacaggtcgcagctgctgcagcagggggatattatgcagcatggctgccctggcagcagtcagggagtattgagccccacactcagacagacacttaactgtgtgacactcaggagccatggagtggatggtgaggacagccagagagcatggggaaagttaccagaaggcccggctgccatcaggaggactttccaggggagtagcccactcagcatgacacggatgcaggagccagaggaaaaactctgcgagccttggagcagacctggcacgtgcaggtttattgaccacaaagtcatgagaaagagattttacataagtcgaggctatccgaggagaaaggaggttaagaccacagcaaagccatctctgtttcataccgagtgtcctcaccaggctgggccttcccgacttagctgggaggaggtgcaggagctgggcagcgaggtatgcacacagctggatgtgccaacgtcggggccgaaactcagaggctaaggaagcttctg

SEQ ID NO: 469747 - DNA, 556 bp, Homo sapiens
ctggtcaaccagagatggagctaatctcagctccaccctctaaggcctctaaggccagtcctcagggccatagaacgtccttagtgctgaactcggaaaggcaggagttcagccattgcatgcttttagaggcttacactgagagtggccctcagtgcctgaatccaaagagggatgaccaatggcaagaagttaagaaccccagaaagcaggaaggaagcactgtttggatgtcagctgaggtggacctaaaagttgtcaagtgcaaaccagagacccaaatgttgattatgaagttgacgtttgtgatgatacttgtcaacagcagatccttcaaacagggcttcccatcctgcctgtacaccccagaggatctgcagattcctgggtcatgtcccacactggctgagtcagaaccttctggaggtggggttcaggaacctgcatttgtacctcccctggtgatcctgatgaccagcaagtgtggaaaccactgcccctcaaaaccctgaagggaagggtgatttgctttccttagcctacagatctaagtgtt

SEQ ID NO: 469748 - DNA, 506 bp, Homo sapiens
acaaattcaaattatattattccctcagtctaaactttgttcagaatgtcaaaaacacaggacaggaagataagtaaatcctcatacagcagagtcactgttcaccctgggaagggaggtgggcagaaccagaatgggtcatgggatgagagatctattacgggaacgagaccttgccagttgcaggaggagctagagaagagaaggtatgagagggaagtgtgcagagcggaggagtcaccaactagctggtctgagaaatcaagctcgtcgcactgccaacgctggtccatgaaagcagaggagacatctacagcaagctatttcttcagccaagcacctgaagatggtcggagttattgttggccaggaggatgccccacagtgaagaagaccaaatggacatggagtacaaggacacgcaggaggctgtggcacctccaagtgtgtctgtcactgcacctaactgcgttgaccttcagagggtaatggctgctgcctgctga

SEQ ID NO: 469749 - DNA, 517 bp, Homo sapiens
tcctgctgattggtgcattttacagaacgctgattgcgctcctgcgcactgcctgatgttccctccctgggctggatgccgacgctgggagactcggaagccgcgtgtggaagatggcagtgtgggcactgttgggcactgccagagagaaatctcaaagtcagatgttacactgtctgggatgcagctgcgcccagcaatcctggtgtgtccccaatccaactttctctgccaccttctggagtggctatttcaagtctccggttttctgaagtccttaagtctctctttccacttcaaagagaacattgcagtcatcggttgggaacttgctccaagtgaggagcaactgtgcccaccctcccatcctctcccacacctggggagttcatggctagccctgccctttgggcactggctcccagccagagacctctgcaggggcagtgccccatctcatgccctctctttcctgcaccttcctctctgctagtgcccttcttctgcatgtagagtc

SEQ ID NO: 469750 - DNA, 605 bp, Homo sapiens
tccaagatttcataatcagatgatggagacctctctgatgccttgcactttgggttctgttttcccaaagctcttcttaatatttgactttgttttattttattctccaaagcccagacttccaggctggtggggagaatgtcaggcttgcttccccttgttgtcagccttatccagtcacattccaccttcttgtgagttcttgttgctcatgggaaatgccagtgtcctatttttagaagagcagccctcaaactggtaccctttgaaatctacttcaaggactttgaaatgcaggaactcttattctctggttcacagtttgcaatttcagatagccacacatctacagtgctatctcctaggaaagccttcccgaagtctcagttatgctccccttttctgcttctctctcctacctgtacccttagcccttgctctcttctttcttattttgtgtccttctctggactgcaatgaatttggcactccctgccatcttgggaggacagactaatctaaagagctgtaaatttcttctactctccccttagtgtttgaggctcagaaatgtctcacagcagttctttcataaaggcaccctc

SEQ ID NO: 469751 - DNA, 608 bp, Homo sapiens
tggctttggaactggataatggatagagacaagaagagttttgaggtgcatgctagaaaaagcttagattgctgtgaatggaccctaaagggcaattctggtgagagcttagaaggagggaaggagagctgtagagaaagcctccatcttcttacggaatgcttaagtggttgtgatcagaatattgtcagaaatatggactgtaaaggcaattctgatgagatactatctccatgtgttcccttgccagggaactctgcagtggtaggaacactggcttgggctcagggtggctgcatgaccctggtagctgacacgtactcattttctgaccccagggagattgccagtcccctcaaaggatatcctcctaaaaggataatgtattatcaatgggatagaggaagccatgacgcaggccctatcttgccctagaacagccctcatgttattaatgtgaccgcacctccgttactgtcatttggcttaatggtggtgacagccttaaatgggaaacctgaaaaagtacatggaatatcatctctgcctaagccctaagctgtgcaactccccgtgggtggtacatttcaggcgagaggaggaggagg

SEQ ID NO: 469752 - DNA, 604 bp, Homo sapiens
gttgctctgcattgcggaggaggggcgggaaggatgctgagcgctgccttgtgaggagagtgtccatgcgggggcggtttggcgtgtcagagctggaacaacatgaagacagctgcccagcacagggtgggaaggtgtccatgcagcaaggggagggtgagaagcacattcacaagggggagcccatccggggcgtggggatcccaagcagggtgaagaggatacccagggtgaggggcaagagctgtcacgggtgtcagagcctgagccaggtgaggaccggcattcacatgggagctggggaggccctgggtgaggtttcagagcctcagcaggggaaaggagggcctccatgtcgaaggccagcccagcattgggtgttggagcccgagcagagtgaggagggtgttcatacaggaggctggttcatatattttgccaaatttgagaactttgcagccattgtgtgacatttaatattttattttcctgctataggtccctgagtctctgttcattaaacctgttgatcgggtttaatcatttttgtccttctagctttaggttcactgagtcttttcttctgtcatctccattttattaa

SEQ ID NO: 469753 - DNA, 472 bp, Homo sapiens
cctgagaatttgcatttctaagaagttcacagatgatgcggatgctggaagtcctcatgctgaaaatccctggactgaagtattgtccttctcacgggccgcatccttcaggagaaggggtgtgcttagaagggaagaagattcagtgtggaattagacacgcgagatttctctctgcagacttgctgaacttgcctggtcacatagcactcagaataaagcctgtgtcctttgcagtcaaatgtgaccatgtgactaattttggctaccaagatgtgagtggatacaatgtttgcagcttccgggttatagccatacagggaaagagtgcgggctacattgtggctttgccctgtgcctgccagtacaaaaagtatcagaagggctgtgctgcagggtggaatccacttcagggggcaggggagatctagcaagaacatctcaaagcaaaaaaaaaattattattgcacat

SEQ ID NO: 469754 - DNA, 740 bp, Homo sapiens
tgccctgcagaagaggtggaggactcgggctggtgagggaagacctggtgtcctaaaagaccttggcatctgccaccatcgtctcgatggtgatggcactggagcatataatcactgcccagcaggactcaccgcatccccactacaatcaagactaccgtgtccctcaaaagcccaaaacatttgtgaaaaccctaaagcttaatgaagattttgagccctgtgaatgctatctcaaagaagaaatgatggtaaatataatattctccaaccttcaagtaaatcctttaacccaatatattgcaagtccagcaggtgcagatgacagtggccctaggcataaagcatcggctgagcaagagactgctgaggacatttcagaatgctgcatgctctctggcaaatgtggaggggatgtagccgtaaacattggaagaggcaagtttcagcaatggatacaaaagcttgtggaaaatttggtgatgaatgtgatatcctgggaaggacctgacattacttatgtaacattccagccagaaatgcataacctgaatctactcctgaggaaacaataggcaagcccttctgctcctcctcattctttctcttcttcctcctccttctccctcttctcctcttcttcctcctccttctccctcttctcctcttcttcaacttcttcctcatcctcttcttcctcccccccttcttattctcctccttctccttctgtttctcct

SEQ ID NO: 469755 - DNA, 1021 bp, Homo sapiens
tcccagaagtcagtctcgctgggctcctggggtcacatgctcacctaccagccacctctacagcccatggcccctgatgctttaaagggccaggattgggtcacaggcttcacctgggagccaggtctggcatcagaacctgagaatcttgtaacctgggtgaacgggtgccacacaggcaaacagaacacgtcatcagagacaaacaaggaagttgctcaattctcggcagagatctggaagggcttcaaggaagaggcaacttttgacttggactttgatagaaccatggaggtagatgaggtggagacattggaaacacaggcaaagagaggggtgggctgcctggtagcagaacagggtgtttatgatgaagcccttcagcctggaccaggcttaccaccaaccccatctctgggaactcagggcccatgggcttcagagaaaaccttttcgtttccaaatttatcctccaaaccctgcatgggcctgccctgggggccaaggatttccacagtcagactcacaactcggggtcgagggtcggtgtctccagaaggctcctcctccaagacaaatagtttgcctggaaaacgctgacaaagagccagagctcactgaagggcagctgattaaaaatcaacctggtgaggctctgccaccgttaatgaggtgtgatcctgaaagtgcaagacctgggtggattctgcaaagagcctgttggctttgatcccccttctcctataaaatgttatgtctgctcttggcccctcaaattcctagacggacgaatcagtctgggctgcctgtggaatttgcaaagaatgaattttcaaaaaaccacacttgggaacaatagttaccagaagtgtctgggtctcagaggaaaaacaaacaccttaaccccagtctgcaagtgtttcccaaacatccttctacctaatgccttcccccatgctgacacctaacatgaagcatgtcatttaatgaggagctagtttaccctgtgcttctgagccac

SEQ ID NO: 469756 - DNA, 669 bp, Homo sapiens
tggtgagctacttgccaaaacgtcatggcaagtcaatgacaaaggtcagcagaagaaaaggtcatcataagacaagaagggggcaggtagaaggcaggatcaggagcataacaaggccacattcatcattcatttattcattcactcattcattcattcatttagtaactattgagcatctggtcagaggcagacagactgcaagggaagaagaaatgactccccgcaggtccctggaaatcttggaatcccttgcggtagctaagccaggattcaatttacagacactcattccacacacatcccaaattgatgcatggtattgcaaagttgaagcagggctgtttgagggcatggatgaatcttattccaaatttatccttcactaccagctctgcaaaaatggagatgggcccattaaatagttttcttttgccagctggcacagtggctcctgcagcttgtggcttctctagagcccagctctgctgtcttgtggctagcctttatctttggttactggactgtctcctatgcctctagaagcctgtgggcattaaatagcttaatacacttcaattataatgcaaacatttgaattttgacacaaaaactgagatgtaaaagtgtgattactgttctgtggtataaaaatgtaaaaggattaac

SEQ ID NO: 469757 - DNA, 779 bp, Homo sapiens
ggtggagtgataacacagctgtgtggatttggttgaattacttagcctctctgggcctgtttcctctcctatcaaatggggataatgacggcagccacctcacaggggaactggcacagaggcacgcaggcatggggaaggggactgcttgacttcagtgtgcaaaatgcaaagatggcatttgtcagctgcctctccacagaggtggaggaaagatggggctgcgggaattcgttagcaccaattaacaccccaaggctcccttctgctctcaccctggtctgcttccctgctggctgtgggcctggaaccacatggcagaggaagcagccaggccccaggggagagggggaaactggggaaccatcagcaaaggctgaggtgctccagcaaagcccaagcagtggccctcctagagcaactgatacatggagtgagggtcatcccgtccactatacaatgaactaactttcagtcagaatctggcaataaaagaaagaaaacaaatgttggaaaagaaatgcagacagagaaaatgttttgttgagctttataaatatatatatatatatttatttttatttgaaaaaatgttattggcatgcacatgaatatatatatttgctccttaaccacagaagaggcctgtggagcagaaatgagtcagagttaggggagggggcaggcaacatacatccacatgaatatatatatatatgcacttgaatatatctatatgcacatgaatatatgcatatatatatgcatgccaataaaaa

SEQ ID NO: 469758 - DNA, 870 bp, Homo sapiens
gcatctatccaaatacttggcttcagaaaaaataatcctcatggggtatacaaatataaaggaggagaaattgctctttaatacaccaaaaaataccgagttcctttatcttccggaattccgttccctagcacagtatttccattttgatgggtttttctgctattcactcctcaagcatgtctttatttcattcacaaagggaaaactcacatggtggagcagcagtgcgttcagctctgtgtggtccagcaattggaaagggatctcttggaaggagcaaggaagctaccgcagtgatcttggtgaagtagccaggtttgctgaaatcaataggaggtttgcagccaaacgactctctggtcttggctgggcgcggtggctcacacctgtaatcccagcactttgggaggccgaggctgagagtccacgatttaaccccgatgtctccaaatctaactctgtgagcttcaactatggcagtattaatcaaaggctccagctctgagttacccttttggctgctgatgactaaacttcggggctatctggaaggagggccttggtagcttttgtaagaacttcagttgccttggctgccactgacatttttattgatgatgctgacactttgtgatcgagaaattgaaaccagcttcctgaccatagctatcgacgtcatccagacaatcccccaatacagtgcaaaaacaatttcaagtagtttcttaaggaactagaatgtatagttgtgttaccaccacgcaagtcaagatgtggaagagttctgttttaccaagaaggttcctgttccccttctcagtcagtccccttccatcacctagcctgtcatgtacaaggggggccaac

SEQ ID NO: 469759 - DNA, 1648 bp, Homo sapiens
ctgcctcctccaagggcacagcgttcctcactcatctgggcgtcccagggtgccaggcacgatggcctgcgatgggggctcactctggtcactcacctttgtatccacagggaaatggggaagctctgcaaacccgggccagggcacagcttggacaatctgtcaccagtgtgcagagtcagctgagaaacacaatcctgcccaggctttctgtggctgcggccaagaggtgggaacaggcctcccacgcttatcacaaagcgcgggctgcctttccaatgcggctggaggagatttacaaaaagaaaaggaagcaaaagctgatttgcctgtccccatgcggggcacagggtgcttggaagtggttgggcctttgcaggggggtgaccgcaaaaagaaagtgagatgtgttgccgccacagcggagggcttgccagagccagcatcagagttggtgggttccctgacgtatggaaaagatccagggaaaagttgtaaaatactgggcaaaggattatatggaatactttaaacacctgagccaggttgtggagggaaataagtgttatgacaagccacacatctgcaatccctgccctttatctgggagggcaggcgtgttgaaaaccttgaagtgaagtcaaggtcaacatgccgtcctgagtcattagccatacacagattagtaggttaatacagaacagtctccacagatgaattacacccagaagccccgtccttggtgttgacaccgaaagtttcagttatcacagggagagcgatgtctgcttaattttgatagggcttaattattatgataaatgcctttggaatttaaccctttcattccacctagtgttatggcctgtatgtctgtgttcctctgaaactcatacgttgaaaccttaacccccagtgggatggtattaggagcttctctgggatccttgggaaggatctttgaggagtaaaattctactgtttcaaaaagatacacatccctgtcgtttggggttgttaggacactttaggtcaaaagttgcagaagcccacttcaaacgagctcatggaatttgctggggggaaattaggcgctcttttggaaccaagatggaattgaaccattggaccacaagagaggtgagaaccaggcctagaagctgccagaaatgcaggaagctacttcctatctgtcccttgcaaaagccacatgtgttcctccctctgcttctctccaccaacccatcttctgtgttgccctatgcatgtcatgtggtgggtggaaggtggtcataacacagcttctgagtttacatctcctccctgtatagaatcgagcactgattggtccagtctgggttaggtgtccaggcttaatccagacatctgggattagggggacagggttgtaatacatagacacagacaccagaagccctcctctgtatgtaggtgggtggaggggatcagcactaagagaatagtcattgtgagcagggtggcactccaaaaggagacttgtcctgctcctgagatcaaaacggtgcacagtgaaggaaacaatcaaaacagtgaagagataatccatggaatgggagaaaaatattttcaaatcatacatctgattaggttaacatccaaaatatac

SEQ ID NO: 469760 - DNA, 780 bp, Homo sapiens
gggtggccaagggacactgccactccactcagcagggaagtcataacctttccacagacacaggtgtcagcgttccttttgcacatcctctagcttagggggaaggagcgggaagctgaggctgaggcttgtgattatgcaaccaggaaagggctgctctaacctgctgaatcagacaccctgggggtgggcccagcagactgtgtttgaacaagacctccaggggaccctgaggcaccagagtctgagaaccctacgatacagagtggagaccacagaaggcaaacttcttactcccagggccgttgcctggagacaatatgtggggctttgggtctggacgaagatcaaagccaaaggacaggtgctcaggcagagtgtgaggaggcttccttcactgggcgaggatagagacatccacgtggacctcccgaaagccctggcagacccccagaggcctgcacgcagctgcagcaaaaacaggtgtgggggccgcaggaagctggcagcctccataggccccgcgctggggagtgcagcacagcgggtggacggaggtgcgaatgggaccaagctccaagtttcctgagaatatggaggcaaaggagagacagggcaaagagagaggaggagactcacactcccagtgctccctgtgtgcgtgtccccgcctggctggtgccttggctatgcaaaccccgcgtgagcaagctggactgcccttcctctgtggaccagacgaaccctcctctgctgggaagagctctcgtccaggccatc

SEQ ID NO: 469761 - DNA, 602 bp, Homo sapiens
gccagcacatgctgactaacggtacaccacatagactagactttcggctaaatgccatctatttcaaaaacaaaccaagtttgcatggaaaaaaaaaatcctgcgaagatgagggtcctgaaggaaaatatactattgcagtgtgagaggggaaaaggggaacaagcaaggaaaactcgaggcattgggcctaggtctcagcattgtcgaggggtcgctgtgtcactctcagatgcgaacaaaatgacttcccctcaacaaatgcgcagcccctcatcgggggatggaatgtccagttctcacaacctcatggtgcaaaggcagaggagttataatcaccgtcacattataaatgaggaaactgacatccaaggccacccaagaggcaagtcttggaacccagacttcagtccagatcttctaactcctaagctatgttctctcaaccactcttcctccctggatcttagaacctttccagagatacaagacttaaatacatgaaaaagacagtacaaagatattagtaattatatgccaaattcatagaggtgttgccagattccagaaaaggatgaaatcatggtaacaaaaaacggtaa

SEQ ID NO: 469762 - DNA, 498 bp, Homo sapiens
cgcctcctctggcacttagggatggaggagatggagtcaaagggtagaaggagtcgaagccccaggaaaagagaccgttgtttccccccagggaatatgttggctcagatctgttccaagcagaagcgggaatacccacagccatgtgaggaagagtccttaggaagggatgtctggtggaggatctgtgaaggagattgggcctctgtgatccttctgaagtctctgttgatggcctctcaggatgaagccatttccattgttggctcttggattaggacagattctgagatggagacatcacagaatggcgccacagatttgacgatgaatatcatgactggccttgacattgaaaagtactacgcagactcacctgacccagatgctctgacaaaagccaacccattcagagcgataacatgatcaggttccctgaggtagaaagcagggaactgcccttttaggaatccccagaagccgtggctgtgggtgtcc

SEQ ID NO: 469763 - DNA, 1952 bp, Homo sapiens
gggttgcagccatgagaatacgaaaactcagagcaaacgtctgcaatgcctctgtgggctcacgaaaagcattgccaaccctcggcagtcacacgtggaagctcatgccaatcagatgttaatccattaaactcattcacagcaaaacataatgtaggtcagagtggggagcaatgtgatgtcgtgtgcaagctcatttaccatccagagcaatatgagtcaggggtgcaaacgtggagcacttcaagccaatattgtacaataccgaaagtgctcaaatatttcttaaatcccaggtactgtgttttcaggtgcaaagatgagacttctgaggtcactggtgagcatgtttgcaatacggaaggagaggagcaccgttcctctctctcctatagaaacagcatgggcccgcaaggacaagggcaggaaaaatcacagcagaccgagtcggggacagggcactccccggagcctgtgctgcgggtggagggcctgggcattgtcagagttctgcatgtgcatcatcacattggctctgcttcctccagtttctgcaaagctaaggatgtcaaggatttggggtatggtcagacaggatcgaaggtcaactaccctgctgtccttctctttaaggaatgcattgctgctgaaaattttgtcccttagtacctctgggatggcaaatgtcctggcaaaagggagtaataaagaggggttgttatattttagacacttttgaatagagtggtaaattgttattcaaatctcatttgatggccagtgtgcacattattcttcccatgctccagttttttcagaaaatatatagtagtaattaaatttagactaaatctaaatacttagtctaagtattcagatgactggtccctggaccagtattgcctcatcttaattatatctataaagatatgatttccaaatgaggtcacattcgcaggtatcaggagttaggacttgaatatgtctttctgggggatgcaactcaacccgttacaacctttttaaaactaaaatttaaaaaaagacaaatggaaaaagaataatttaaaagagaagaactgtgctagttgaaatcaatcaaaatataacaagataacattgcttagataatagaattcactgacagctgaccactttcagctttgcactgcctataccttttgataatcacaacagcctcatgaaaaagaaggttctaacttcactttgtgaagccaactcaaacatgatttaaaacaaacaaacaaacaaacaaacaaacaaaacaatagttttcctcaataaaagttgcggggtcggggagaagaatttgagttgggctatgtaatttcaacttccctaaataagtcctttggaaagtgttggggggagcaagtgtgtgattttggtcttggctcacaacttcggaaccaactttttaaaaaatgtctgccgtggattttcacaacagatttcttccccgtacgacatgttccctagctaagtaataggtctgatgtggctgccaaatttttcaacaacttttactttccaaaggagggttaaatagttcccttaataacttgaaagaaaaaaaaatttcaaggtttaccacagttcttagtcacaggctaaatgttttcaacagttttatgactttgagcctacttagtctcaagaacgtctcccaagaagaatgcagcataaaggattcaaaatgtagtaattctgaaatggagatagtgttgtttgcatcaaagcatacatttatgctatctttatcaggacttctgtgccaaatgttgcttagttctatttgtcacctgctacctataaatcatcctgaaatatcaagggtgctgactcatgaatcgctcgtgttttcgtagtttgtgttcatacatttcattcagttgtgtttcaactgtatgaaacatttgggggccattttt

SEQ ID NO: 469764 - DNA, 633 bp, Homo sapiens
tattgccctgaaagaccttcctgtgcgacagaatgtcaaggtggaaaacagtgatattgatgatcctgaccctgcatagacctagacttatccgcaaatctgaattcacttttagccctcctccagctccatttcttccacctgctttgatcagccctttgacagtttccacctttgagatccaccccaatattttctggagcctcttgagaaacctggcatgtggaccctgtgtgacgatactgggtggagacagagtcagcagcccagttagaagctattccagaagtcatcaaacagtcaaacaacgtgttgagggtagtgtgatgctttttctgaactgtgtggtagagatacgcagaaggagctcaaaggagggacactcaggccaaggaaggccagctgggggggtccttgcatgggagagaggccttgagcacagtccaggcaaatggactctgttggggacactgcttagctgacctttcatgggttgttgtagaaacccaagcaaacagttctaacaaatggcgatcattctccaacaatcagagctcttatctaggaattaacaaatttcctttcagagtttgcagaccagcagagacaatatgtgattcaacactctctatt

SEQ ID NO: 469765 - DNA, 609 bp, Homo sapiens
tggttgatagaggacggtctcaaagtctatccacctgcacatcatgtgcaaagacagccggggttatactttggcttcaaatgattcattgggattcaagtgtctaagcacatcccatacccatctttacagcagcaccagttgcagcgcctcttctgggaaaggcattgctacttctgtgattaggaggaaaggcaactcattgcggtccaggcttcagggaagactcgcagagacatactgcgtctttaggtgtaacggtcgtgaggcagcagggatacttggtcctgtggtctggggaagatgctgggatggaattgatgctgaatcttttggaaggagtcctgtcagtggtgaagctggtggtagtggtggaagtggtagaggacaggaaagaggcagaggaggtcgtggtggagatggaggtagaggtggcagtgatggagacagagatggaggtgaaggaggcggtggtggtgggagtgaaggtggtagtggcggtgatgtggtgaatgtggtaaaggtggtagaggtgaaggtggaggaggaggagaagacactcattctggtttaacattttctaggtacgtgggtttgcaggaattattc

SEQ ID NO: 469766 - DNA, 496 bp, Homo sapiens
ctaacgtctggaacattttctgaaccaaaatataggtagcaaatgagggaagaagagcaccgatctgactcagaagccaacgttctttccatcataccatatcgcctctctagaggacagtctcctcttcactatatcatgaggctgagcaaatcctccaggaaggtgatcatggtgtgtccggacttggtttcttcttgtgggttcgtggtctcactgacttcaggaatgaagccatggaccttcacggtgagtactacagctcttagaggtggtgtggacccaaagagtgagcagcagcaagatttattgtggagagtgaaagaacaaagcttccacagcatggaaattgcaacattttacgtgatctattgcctctgcagacctggcatgaaaggtgcactttatgggatggggtgggcaaacgtgggagagttcctcttcatccgatctgaaccgtcaggacatgtcaaacgaagctaatataaatgtcagc

SEQ ID NO: 469767 - DNA, 448 bp, Homo sapiens
tacgagtgaaaggcacattgataatggggggagccttgatgtgtagcacttcacaatttctgtgtctaaatacacccaacattgcctgtttcaatgtccaccatgacaccctgagtacaggaaagagaggcagacagcttcctatgccaggcaagccagctccagcatatggtatggatggtgagtgtgaaggtctggaaatgactcaaggccatgtcagtggagaccaagcagtttgtaaccgacagaagcaagtctcaggcctctctacagggaaactgatccagatgcagatgcagggaagcaactgtgctgagcccccagtcactgagggtgctggaaaacctttgagagattttaaacaagaaagtgacaggatctggattgtaagctacagacagaaatgtgatcacggtatgaaagaacatagatggacataaagaaataa

SEQ ID NO: 469768 - DNA, 800 bp, Homo sapiens
gttaccctactctcactccccaccctctaaaggacctctgtgagataaggccagaatgactttcctggggctcaagctgagaaccgggagggtcctgatgcttcttctacttttatattttgcttggctgcctaaatccatttcagctctagtgcatgcatgctgtcggggtggggctctggcatggcgaggcccatgcacgcatgtgaaccagtggcaccaaaatggtgaattccatgtgtgcacctgtgtagcagtgggggaaagccacaggcaagtgcacactggcaaagcagtgggaggaggtgtttggcacctctgtgtctaccgaggcctgtctgctgaagctgtccagtggttagatgggatctgctatgatgtctgctgcaggagaaatcctggttttggaatccaagcctgcactgcaagtggatgtggtcaggagggacccagcaagaagccagcaaatgaagggtgctcagatcaaactggccttgtccctgtgggcaagacagcccgtctgtgtccagaagaaatgaataaatccacgtacatgtgcaatttaccaatactaaatgaaaatctacaaatatgtttgaagaaatacaaaaacctgaacagaataaaaaatgaatgagaagattaagttaataataaaaagcatttcatcaaatgaaaatgcaggatttgatggcttcactgttgaactctaccaaagatataaagaagaaggaatactaactctcctctaagtattccataaaactggggaggagaaaaaacttctaaatttatcttac

SEQ ID NO: 469769 - DNA, 3024 bp, Homo sapiens
gagggtcaagatgaagggcagtagatgccatctctggatatcagggataatacctggcagagagcaaatgcttgataaatcacagcttttatattatccataccactgtacagggcctcccagaaaactagagttcctttattttcccaaattctttcctgtgactgagcgagtgagccaagttggagcaatcggttacaatggggggctggcgtgtgccagaggtaaacatggtacgatgtttggagatgaggtgttaaagactgcctcttctgagacaatgttaagaacaagactttgttctgagtctgctcttctggaaggcctcagcttcagtgtccccagtaatcaagccagatgtcttaacatggtcactttttcacggtctctgacagctgacaaaatgtttctttctacttcaaccatgcaacacactatctatgaaaaaagagagactatggatgttccgcagctcccagcgatgttcctgagcatttcattgactggactgccttgtgaccagtggttgccctaggctttatttcctgaactaatcactgtcagggaggatggcattaccataattggattagacaattcatgatgtctactcagcccacgcaaaccatttgtctgtagggaaaaggaggaacaaatgttggagaaccaaccaatgtgtcctctggtgaactgatgaagtcatttttccccagctagagatatatataggtatatatagtagtatatatatataggtatatatatagttatataggtatatatataggtacataggtatatatataaaggtatatatgtagtggcttaaaatggtataattaactactatattctcattatatattatatatagtatatatatagaatacatatactatatatactactatattctatatagagaatactatgtactatactactatattctatatactatatagaatatataataatatatcatacatcatatataattatatataatgtaatgagaatatagtagttacatgttatagttctatatatagtacatataatatattctcattatatatagttgtatatatgatatacaatattgataatataatatattataatatattatattattatataatatacaatatattattatattatatataccattatatatgattatataaatttatataatttcatatgattatatgaattatataatttcatatgattatatgaattatataatttcatatgattatatgaattatataatttcatataattatatgaaacttaatctaacgtaatctatgccaggcaccattctaggtacctgaatgtgttgaagaactgtttctaaggagcttatgctctagtgacatggtatttgatatataaaaatatatatgtatatatttgtatatacaaacctagaacatatataatgagaatatatgactactatatatactataacatatacctactatattctatatactatatatagaatattatatactatatatactactatattctatatatagaatattatatgctatatatactactattttctatatatagaatactatatactatatatactaatatataatatattagcatatattatattattaacaaacactctatatatgatataatgtatatatttatataatataatgtattatatattaaatatatatatgagaatatatattgtatatgtatactatatatagatctataatatatatctaatatattctcattatatattatatataattatatatcctatataatatatagaatatagttgtgtatgtatagtatatagtattctatatatagaatatagtagtatatatagtatataatgttctctatatagaatatagtagtatatatagtatataatgttctctatatagaatatagtagtatatatagtatataatattctatatgtagtatatagaatataatagttgtatgctatagtatatatagtagttatatattctcattatatatgttctagatttatatatataaatatatgcatatgtaatttttatatgaaatatcatgtcactagagcataagctcttcagaaacagttcttcaatacatctcaggtgcctagaatagtgcctgacataaagtacacacaaaataaatacacttattgttgaatgattgttgcatgtcccaggtgctgcatatttgaacagaaagcatagaccatgcagcattctccattctccttctgctgccccctccccttcacacaatgctgcatacagacccagttgttcacaaacaaacttcttgcaggcacctttaaaccccaggcgattcagcttgtaaaaaatcatgtctgcctggctccctagtaaaaagacttcaatcagattagctctatgagatgggggcatagattgatagatggatagagtttgtattcaaaagctattcccaaatagccttttggttgcctttctaaagttcttcagactgctccaaacattgttgttgatagctatcaacagcaaggctccagaaatggacatagaagctctctggggaaaaatgcagataaaagtataaacacattgagaggtgaagccagctggacctcctgggtggagtggggacttggagaacttttctgtcttacaagaggtttgtaaaatgcaccaatcagtgctctgtaaaaacgcaccaattggcgctctgtagctagcaagaggtttgtaaaatgcaccaatcagcgctctgtaaaatggaccaatcagcattctgtaagatggaccaatcagcaggattctaaaggcttatctctactccctcctgaaagcccattagatgccaacagatcggctttggatggctagcaactgcctggacaaagcggagaaagttcctcagtacatgcaaggaggaatgccaaaacattacatgcctgttcatggtacagaaccttggagaggtcctgaa

SEQ ID NO: 469770 - DNA, 811 bp, Homo sapiens
ttgtttaggtgctaaaaggttagaatttctaacccagggcataatgtgtgtggcagaaggatggcatgtttgaagtgtgtcttgtcaaggaatgtagagtctctgaaccaacaggacaagcctcctcctgctctgggcaccttgggtgtttcttgccagtcaggaggagcaatgatgttctcctctacacccacttcccctgctcccatgcaatcagctgtattcctgacttctaatcaccctccaaacctgacctgttggctattagcctcattctataaaggggaaaactggggcttgggggcgttaagagatttgtgtaaggccatgctcctgacgaagagaaagccaggatttgatcccaatctgtatcgtgccagaactcacacccttgtcaatgtatccactttgactggaaaacatgttttgatattgtataacctagaagatgcaagagtgtgcaccttaggatgtgtactgcaaaggctgttttatcctgcacacctgggccagggagagtcattagggaggcagctgcgtcatactgcacgtggattctgtgtagggtgaagccctcccaaagtgggagagactgggcttcttttcttcaagagaaacctggctgaaaggaagtggccagaaggaccaattccacgttttaccctggaaatttcatcaccaatattgacattcagatacctaggtatgattatcccaagaaagtattattagtacctcacagaaatcgaaagtggagttcctaaaatttgccaaattaagtcccaaagtactgaaatagatgctcgatgtt

SEQ ID NO: 469771 - DNA, 666 bp, Homo sapiens
agaatttcaaccacgctgctaatttcagcactgaccctgccaatgcaaatatgcccggcattccagagacacatagtccagtagggagagaaaattctgcacatgcagaacattcctactgctatgtgaccatgcttagaacggtgcactccagctctgtgtcgtttctcagcatctacatagacatcacatacaccatcaggctgctcactggcttagtgactcaatccctccagcctctttgctatgctcgagccacatgtctgctggctgtggatcccatacatgcagagctgcgtcatgttcgcgggcaccctggggacacctgctgcggggttgatgttttgttatgtttctgcagcacaaccagggctggcttcttggggactgtatacagtgcacttgcccagccccacacacagaagggattgaggtttagtgctctgcagtggcaatcttaaaactcttaatgattgtatctttgaattaatgttttgtacatattcagtttaacgtatgtttagaaatatatatctaatacctcaaaccctcaattcttaactatctcctggatgatgctcaatttaaaaaggagttcatgtaaaatgaataaatataagctaaatattaaagcctattatgttgttattaaaataaataaataat

SEQ ID NO: 469772 - DNA, 763 bp, Homo sapiens
cccagcactccccgcaccaccatcagggaccctgtgccattgctggaagatggcttatgcccatatagaatgggacatgatagtctgtgcagcttatgcacacgaacttccaaaatacggtgtaaaggttggcctgacaaatgatgctgcagcatgttgtactggcctgctgctggcatgcaggcttctcagtaggtttggcatggacaagatctataaaggccaagtggaggtaaccagagatgaatacaacgtgggaagcactgatggtcagccaggtgcctttacctgctgtttggatgcaggccttgccagaaccaccactgacaataaagtttttggggctctgagagtgctgtggatggaggtttctctatccctcacagtgcctaacgattccctggttatggttctgaaatcaaggagcttaatgctgaaatgcatcagaagcacatcatgggtcagaatgttgcagattctgcaacgtgcattacctaatggaagatgcttgcaaggcaagaacctttattgtagtttccatgggaaggaatggatgaggcaaggcaagggaatattggcctcgagtgtaagagcctgatagaagaggtgggagaggagtgggctctggattggttggtttgtgtatgaaagggcactcatagtaccatctctgggaattgactagccctaggaatccagtttctccagggtggtttcagtatgtctttatcagcagcgtcaaaatgaactaatacactgtctt

SEQ ID NO: 469773 - DNA, 822 bp, Homo sapiens
acagtgcactgggtaagtaacattcctatgctcctgctgaccttccttcacttgttgcttcttccatcacgtgggagtaaagtggctcttgcaggctgcctgagacttgtccactccatcgcacgctgtctaccatgttttctgcctgaaacgttcctttgtttccagaacttacggtttgggcgtctgttctgtttgctttcttctctacactctctcagtctgccactaactatctccatatgcccgagggcctcagagagcaagagtagaggtgggcataggtctctacttgagagagagagagaaaaaatattcttctcttcaaccaatggtcaccagggtgcaggcaagtggcggaaggatggtgcccaaaatcattttgctcctgtgaaccccccaagaaatctgcccctacttctcttgtgggagagtcagctgtttggatgttggggggaaacaaagaaactttgtattgagacagacataaagctgcagacacagccactttccctgaaattaaaagaattagttgctgtgaaatgcaaacaaaattcagagctggttggaccaaccatggacacttgccaagcttctactatacgtaaggtactctaatatggttccaaattttctgggacaattcttcgagttatataattcttccacatttttactcctctggtatctattgagctgactttttcccatatgcttattgctcttttatatttatttgtttgtgaatttgtatatcattgcttttacttttcctattgcatgaggtctgagttaccgttcgctgaatagttgttaatgctt

SEQ ID NO: 469774 - DNA, 781 bp, Homo sapiens
tggtttggttttgtctgggtgaattttttccaccacttaggttttggctcagccacagcctcagagccacagaatgccagctgttgtgggttttggagaaccacagggaaatcttttctgctgccctcactggaagtgtggtattgatgacaatcctgctccagcctcggactacagtaacagccacagcaaagccattggtgctccaactcctataagaagctcctattataaagagtatgaattttcagtcaccaactcagacataaaagcagtactgctttatttctctataattgagctgaacttcatcttgagctgccgccctcaccccctaacaagtgaagacacagtcctgctcttctcagggatcccaatgcctgcagggctcagcccaggagaggttcaatccatgatcctttctcagaacgcttctggcacacagattttcatcaagttccttccagtcgtcttcctcccaccagaagcccaaacttggcatctgagctggaaaagctgcccttgcagccccacatgttcttctgccttctggttcacagtgtgaaccctctgctctaggtttttagcctttcctggctcagaaagccttttctgtctccaaaagcccagctcttgcaacagagagccttgcccttcaagaccatttcctctgttatgagttaaaacaaaattttcagaaattcaattactaagtttatctgctgccatcctccctgaagcagtgaacagccaggactctgtaggtggagggccccaaggc

SEQ ID NO: 469775 - DNA, 1262 bp, Homo sapiens
ctataccttcgtaaacacttcctaatctcctcagcatttgagggcatcatgagcaagaggatgtgttctgcctttacccttcaagacccagttcatttggtgcctcctccaggaagccttctgcagagccctccttcttttgtcatatgtagtgttccgccagagatcacagggagggtaaccgacccattcaagttgtgtgggcttctgagtggatgtggcccagcaagggacacaaaaggtgagctttccgttgaagaggcgcaggaccctttcctggtcagcatccacataatcgcagacccaggggagtcccagcccctgcaggaggccatcgacaacgtcctggcgtggatccaccccgacctcccgctgttccgggtgtccgagaggcgggcgtcccggcggcggcggaagccccccaagggcgctcagccagcgctggctgtggtgctgttcctgcaggaggagtacggcgaagagcagatcctgcagctgcaccgcacactgcagcagccgccctggcgccaccaccacaccgagcaggtgcacggccggttcctgccctacctgccctgcagccaggacttcttcacgctggcccctgggacgccgctttgggccatccggcccgtgcactacggcaaggaaatcgtgcgcttcaccgtctactgtcgctacgacaactatgctgacagcctcaggttctaccagctgattctccggaggagccccagccagaagaaagcggacttctgcatcttccctattttttccaacctggatgtggacatccagttctccctgaaaagactgccctgtgaccagtgcccggtgcccaccgactcctccgtgctggagttccgagtgagggacataggcgagctcgtgcctctcctgcccaacccttgcagccccatcagcgaggggcgctggcagacggaggaccatgatgggaacaagatcctcctacagcaaacatgttcccagttcttcctggtgacccctggaagaattttgtagaaatttgcactgatgcctgatgatactaaactatggctttgtggagtcaaggattgctttatgaatctttccggatcccccatagaactaaactgacattctactttgaacacagtaggttctccttatacgtttttgtttactttctattaaagaatattattaattatgtatataccaaaaagttcacattgtaaatatacagctcagtgaattttcacaaatttaacatttgtata

SEQ ID NO: 469776 - DNA, 555 bp, Homo sapiens
gaatagggcactgttcaatttggcttaaaatcaagcacaactgatggaggatgaacactgtgtagttttgcagagattttcacgactgtgcttgtttaacagaaatctacctgtattctcttatttttaccacatgacgaagggagtacaagtgcagatttcttatgtgcagatactgcatagtgatgaggtctgggcttttagtgtacccatcacccaaatagtgaacagcgcacccaataggatgctggccatgggcaaagcctgtgttgtctttctggaatggtcagtacaggaagaggatttggatggaaagggcaaagttcaccctaagaatggacaaagcccgtacacgttttgtaaaatcagtgatgtttttggtagaaagtttgaaagttgtcaaagagatgctgagctagacaggatggcggtccctatcattctcagttgtacttgagcttacaaattactccaacaaataggagatattgatatatttagaggaactgggttaattgttaaatcttcacttagttctgtgaggcttttagaaat

SEQ ID NO: 469777 - DNA, 954 bp, Homo sapiens
catctccatctcctccatctcctcctcctcctccatctcctcctcctcctccatctcctcctccatctctcctccttctcctcctcctccatctcctcctcctccatctcctcctcctcctcctccatctcctcctcctcctcctcctccatctcctcctcctcctcctcctccatctcctcctcctcctcctccatctcctcctcctcctcctccatctcctcctcctcctgctcccccccccacctcgccttctctctcatcattcacattcgaaaatgaagagtgaagcaccaagatagcccaatggagagaagcagggctttggggtcacacggatcacataataacatgggcttatgtggtcctgggaaatcgaggaaggggctggctgctacctggtatcagccatcagggccactggagtggaaccctggtcctgtgtgtgacaggctctttgcccaaagaaggctcagagaaggcctcatagctgtctgtccctctgctgccaaaattctcctggtacaacacagaaatggaaaacttatcaaaggcagatccatgccttctaatggttcacactctactggtaaaaacaaatgtttaaacatacacctgctctccaataagaagcacttgtttgcacttggtctgggaaaatcagtgcaggatgccagaggagagggatatagaggagctttggcgaaattggaaaagttggaggccatgaaggggagaaatgctgtatccagctctgactttgcaaaaagactgtccagtgagagaaactgcctcccatcatcatcaatagatattgaccaaatctacttttggtgttgacctgaaggtcacagagtgattgcaaaggcctctgcttgctatggggaaatgaatgcagaaagaaataggcatcaatttaacattccttggagagtccttgtaaaatagcagcgt

SEQ ID NO: 469778 - DNA, 647 bp, Homo sapiens
tgtctgtgtgtgtgtgtgtgtgtgtgtgtgtgtgtgtgtgtgtgtgtagggggttgagggaagcagggtattcaatgaagcatctcttccttctggggagaatgtgggaactagatttcagactttctttgctttgtgttgctttttggaatgagacattttggagggtgggggaggagagtacgccccaaggaaactctttgcgtttgtgcttgagagaaatgatcatgcaggtgaggagaacgagacctcaagaggcaaagctgactaaagatgttaaaacaaaaaggagctggggaggaggtaaggttcaaggggtacatatgcaggcttgttacatgggcaaattgcgaatcactggggtttggtgtacaaatgattttgtcacccaggtagtgagcatagcacccgatgaagagtttttccgtcctcaccctcctcccagctccaccctcaaggaagtcccggtgtctgttgttccactccttgttttggctgtgtggctggttcctgtcaatggctgtaatgtgagcagcaaagcagaagcaggctcttctctcccttctccttctatacaacatggacgttgacacccaaggcaatcttgcaaatgtcagaaactttagaatcaacttgttcacttaaaa

SEQ ID NO: 469779 - DNA, 955 bp, Homo sapiens
caaattgcctgcaggacagcttcatgtacagtccacagtatgttgagagagaggcatcccaccaaagcctccagcgcagcacccgtggagaccagcagtacagatatccttcattgcccttctccccctaggctaccacccccaggacctaccctcgaccagttggatgatgcctgcccctattggggaggatggatcttctttgttcagctgctgattcaaatgctaatctcttccagaaacgccctcacagacacgtccagaaataaggttttaccagctacctgggcatcccttagcccggtcaagctgacacataacactgactatcacaatgttcaagttcaagggagttgggagaagaaagaactgggcataaagcaaagggtcttcaacagaggacagaacagacagtgtcaccaacatcaaagaccaaaggtagataaaaccacaaagatgggaagaaaccagagcagaaaagctgaaaattccaaaaaacagagcacctcttctcctccagaggatcacagctccttgccagcaagggaacgaaactggatggagaatgagtttgatgagttgacagaagtaggcttcagaagatcagtagtaacaaacttctctgagctaaaggagcatgtgctaacccatcgcaaggaagctaaaaaccttgaaaaagggttagatgaatggttaactagaataaagggtgtagagaagaccttaaatgacctgatggagccaaaaaccatggcacaagaacttcatgacacatgcacaagcttcaaaagccgatttgatcaagagggagaaagagtatcagtgattgaagatcaaattaaagaaatgaagcaagaagagaagtttagagaaaaaagagtgaaaagaaatgaacaaagagtccaagaaatatggggctactgaaaagaccaaatctacatttgattggtgtacc

SEQ ID NO: 469780 - DNA, 589 bp, Homo sapiens
tgaacagctgtgtatccacataccaggcatgggaaacagcccttcaggccactcctggagtgcgtgcttccaggccaggcaaacagctgtgtgcctgcatcctgggcttgagcaactgcatccccatgctcctggccagagtaacagcaccatggccagccccacaaagccatactccaagttttctgacccactgtatacctgcatacacctctaccctgagaaacaaaagaaaaaatgggacctcacaacagatatgacagaaataaaaaggattattagagactattatgaacaactctacaataaatttgaaaacctagaggaagtggataaaatcctcgacccatacaacctgccaagactaaaccaagaagaaatagaaaacctgaacagaccaaaaagaagtaatgagattgaatcaggaacaaaaaggccttcaacaaagtttgaagattatgaaaatgctgaatatgtcgcttcatatgagccctgattcccagcacctttggacccacccggagcctgggagaacttgccatcgtgaagggaaggacacaggcctgactgtttttaccatgtgatgatc

SEQ ID NO: 469781 - DNA, 747 bp, Homo sapiens
aggttaccctttgatagttcatccatgtccctgcaaaggacatgaactcattatggctgcaaagtattccatggccaggctcctgcgggccgcgctgtgctgtgctggactggcctcaaattttaaatggctagtatcctctatcaatttttggaggcttgacaaaggacccacaaaggacactatcccatgtggatgcagatgtcaaatttcaaaggatgctctttctaggcaatcaggaacacagttggggtcagcagcagggccagagggagaccaaaactcacctccagacaaaattggaaagccaatgactgagatgatgagtattgccaaggaagaaggctttaatcgggtgctacagccaaggagatgggagagctccaagccaccacccttccctgcttctgctcctgaggctggaaccacagtgttacataatgctggccatggagatgcagagctgcccttgaggaggtcacagtttagagaaaccattcacatgtccttccacaaaggactgcatcatacgaaaggaaaattgatactataatgttattatgcataatttgatcccttgaaatcatgtctatatttatgtatgtttatgaagccataacatattccagaagaatgcaaatactatatgtattagtcttgaagggaatggtgtaacaaattgagtggctcaaacaacagaaatttattgtcacattcccagagctagacgtacgaaatcaaggtgtc

SEQ ID NO: 469782 - DNA, 916 bp, Homo sapiens
gctgactctaggactgggtcaggaaatacacaagcctacaatatggaaagggggaaaatgagcaactttacagtggagaaacctgacagacactacctcagccaggtgatcaaggtcaacatcatcatggtaagtgatattgacagtaggctcctaccccacaatcctagtgaatgccaatgccaaaaacccgggagtgcctggggcggccaacaataccaaatgctgaaaacccacagtaaccgagtagtggccaatgagagtccccacacccaatgccaaaaatcccagagcatccagggggcggccaaagaccaagttggggccacagaacaacatgactctggcatcccagggtttccccggcttgggcaggcttggttgctgcgagggaattggcatgtgatcctgcagcctcccagccagagctttgaatccctgcactatggctactcacctatccactcagctcaaccatctgccaggaaagatgatggtcctgaaaagaacctttggaccacaaatcctcccaaaaacctattcaaaagaagttactagattaagttaaaattaaacttagttaaaaaagatagcaaatgttgctttgttgtcaaatttgtcttctgcagctcacaacatgacctgctcatgtgtttgattttcatagactcgtaagacattatctgcaatggacgaaacaatggcagagaaaggtgagggagttgagggagagagacaagaagtaaagacggctcttagcttggagaggtgtccctggaagaatggttatgccagtaatagaggggtgagtttgcagaaagaagctgacttaggaggcaaatcatgaagtccttttcccatctgttatgcttgtgttgcctacggcatactgctacctgactgactgctggcatga

SEQ ID NO: 469783 - DNA, 1021 bp, Homo sapiens
gtgacgttggctgctgcagaaggagttcaccacctacgacttccccagcatgtctgctgaaaataatcagttatcaggagcatcacctcctcaccctcccacaactccccaatattccacacagaacttgccttcagagaaagaggatactgaagtagaactagatgaggaaagtctacaggatgaatctccattttctccagagggagagtctctggaggacaaagagtatctggaggaggaagaggatctggaagaggaagagtatctggggaaagaagaatacttgaaggaggaagagtatctggggaaggaagagcatctggaggaggaagagtatctggagaaggcagggtatctggaggaggaagagtatattgaagaggaagagtatctggggaaggaagggtatctggaggaggaagagtacctggggaaggaagagcatctggaggaggaagagtatctggggaaggaagggtatctggagaaggaagattatattgaggaggtagattatctggggaagaaagcgtatctggaggaggaggagtatctggggaagaaatcatatctagaagaggaaaaggctctggagaaggaagagaatctggaggaggaagaagctctggagaaggaagagaatctggatggaaaagaaaatctgtataaaaagtatctgaaagaagagtatctggaaagggatgagtatctggaggagggcatcccaaaggatggtaactctagtttaccaggatgcccaggaaaaaagcacaaacctgacatagagccagagcgcaaattgtcaactctatccatggtgctgacagggaggaagactcatttactgaccaagttctgctcacaactataatacaatagccttgccccaaagcactgcacccacaaagcaggcaggaagacttcataaacataaagcacctgcttataataataattgttatttgtatctttcctttttcatattacacgagtaatacatgttcattgcaaatgtttt

SEQ ID NO: 469784 - DNA, 520 bp, Homo sapiens
tatcccagaagcctacttctgtattgggatgaaggacatcggtccagcagaggtgactgagacaatatgtaccctatgccatcagactatgttccctaactttcgctgggacaagacacgtgcagaaaatgattctgttcttttgggagcacattggaggcagaagaaaccagctctggggctcagctatctcttgcacctttcttctgaaatttccagaattgctaggttccctgttggaaatggtagttgggacaccaactctcaactggaaatggcaactgaattacagcatttaggccagacggcatttggagctgccgaggaggatctagcaggattagaagagtattttataccttacaattgtgtggtacaggggagtttcaaagcagtttcaggtatgttacttcatttacttattacaacccactgtgagaaaggtgtttttgcacatggggaaactgaaacctagagatggcctaaaatgctatgtgtctggcatatttcttaatgattt

SEQ ID NO: 469785 - DNA, 1083 bp, Homo sapiens
agttcagactaagagtcgtgatgggtgcaccagaatctcagagaccaccactaaagaacttattcagtgggaatagaagtcaccaattatgtcactacctgccatgcttggggatctgcttgtgtccttccatcagtggttcatttgctttcactctgagtggcttgttaaagggctgtggtctagggtgctggcgtacagggctgacgctagattctgagccaatccaaaacagacagaagaagccagatgtagatgtaatacaatatcagctttgtttaagctcttcctctgtcttggggctgctggccttcagactggaactacatgatcagccctcctggttctcaggccttcagactcagactggaactacaccatcagctctcctgggtctccagcttgccgaatgcacatcttgtcagcctccacaatcatgtgaactgatttcttatgacaaatctatctctgtttatctatagatatagatatggacagagacatatacaaatcctattggttctgtttccctggagaaccttgactattactggtttacattgatatttgtgttcattcttttgcatatgcatacatactgcttatgaaattatagtataagcataacttattaatattcttcttaattatattagtgttagtactgttactacttaatattattagtacatttaacctgtatcacagatatttccccatagtgtttttgttgatcattttcattttaattagtgcaaaaaatgcaatgccaaaatataagtagttacagtcatccctccttacccatgggtttgctttctgcagcttcagttacctgctgccaaccactgccccaaaatagataaatgaattccaaatgctaccctgtgcgtgacgaataacaattccttacactaaaccagatttaggatttatgtgacattttgtgctgataaatgaaatgtcactaactgggcaaatggcttgtgggttctctacttttttctcaaataatatcaatgttcatttttctcttctttttgataaagaaagggaaaatttgaccatcaggcctgcagtatt

SEQ ID NO: 469786 - DNA, 573 bp, Homo sapiens
ggtgtagtgcaacacgcagctctggccatgcatcgggaaggtgcacccttctcctggggagatgtcgtgacggctgactctaggaaactcgacagtggggacgagcaaagacctgttgacctcggaggaagaggagcccatgagggagccagagatggaaactcccccatggcagaggctctggtgttccgagacaagtttgtacacagtaggccatgcagtctaagtgttcctgataaggccacttcatcacatttgtcctataagaacacagacacaaaggggaaaagtccctcccctgaaaaggaaccgtggccttgcacacctctccagagtgacccaccttcaagggacttggacaaaggaccttgcaccagcacagtatatggactaaagatcaaggacccccttcttaaatgttcctcggggagggaggagactatcaacaagaccaagactaaatttcttgcctcctttgtgcgcccaggaagtctaattcctcgcaaccacatcacttagcaatttcacgtggtagtaattaagaccacattttccatacttgattttctggtc

SEQ ID NO: 469787 - DNA, 2973 bp, Homo sapiens
caaagcagcaccgaaaattcctgtgtcactactgccaatgtgatagaatttaaaccaaggtaagatatcgcgagagggcgggcccgctaggcttggcgtcgctcccgagctggagctcttgccggcgtctcccctcggccagcggctgaagtgctggcggttaagggcccgtgagcagccgccactccttcggcgttggctcttgcgccggggtcgttgtttcgtgacaaccactcaggtagccgtttctgagacggcagatgcggccgctttagccctgagcgggctccgcggctccctggacggtctctgccagtgcccgactcttctcttccggactccacgccaagcagcgaccctgagccaacagccagagcgcccagaaatggcggcctggactgcctcgcactggccagtcaaggggatcctgaagaacaagacctctacagcttcctctatggtggcctcggctgaacagcccagcgggagtgtcgaggaggagctgagcaaaaaatcccagaagtgggaagaaatgaacatcctggcgacatatcatccagcggacaaagactatggtttaatgaaaatagttgaaccaagcactccttcctgtcgtaagatgggtgatggtgaagatgcgtgtagtggtatagaaaccactgaagccgtggcaccagatatcttagctaagaaattagctgttgctgaaggcttgaacccaaagtatcgggttcaggaacaagaaagcagtggagaggaggctagtgacctctcacctgaagaacgagaaaaaaggcgacaatttcaaatgaaaaggaagcttcactacaatgagggactcaatatcaaactagctagagaattaatttgaaaagacctacatgatgacaaagatgaagaaatgttaaagactgcaggtggagaaagcatgaagacggaagaatcaaatcaaagctctacaacaagtgaccaacggcaaaacacattcagtaagttcatagaagagctttgttcaacactacaactgtttgctagatagaaaccctgttactataatacattgcttcttcttctccacaatttatgatttaagtatcaaaatcataccagttattatatattaccaagaattaaatgatatccttagaaactgattagactgaacatgcctaattggtatatatatcttgtgcctagtactttaccacaaatccagtgtaatatcatcagtccaaaactgcattacttttgtaaaaacactggttaatttgtgtaagatattatatagcatttttagaggataaaaaatatctttggggaggggaactaagttattttcatcactctaaatggggcgatacctcttagaagtttgttggtttgctttttttttaaatcaaaagacaattgaacaacaggatgtataggctgataaatattcagtccgaatagtattttaacacttgtcttcaacttgatttgtctgtttaattgaaaaggattataagagttactcttgcattttctgtcctactacctttaaagttcctgttgagtttctttgtatttacaaggaaaggactgaactttttctcatcaaaactagccttttttttctcacaaataaattatcagtttaaacttgcaaaaaaaaaaaaaaattaagccaaggtagaatgtagttgtggtctgaggaaattaatgttctaaaagttgtagaaggataacagggtgtgaaaagatactgttaagtcaacttaaacatgaactgataattgaccactggattcaggtgagcagagatgacaacagcatgtgatatttcttcagagtagaggaagcaaagtctgattgaagtttgttggagagaggatgggaagagaaagggttcagacggtaagtacagttacactttcaatgagttttgttgaatagaacagtcaagtcaggcattagaggaagaggcagagtcaatggacttttattttttttgttgctttgtttctaaggcagtagaaactgcaatgtttctatacaaatgaaaatgcccaaataataaggaaaacattgatcatacaggaacatgatagggaagttgccggagtaattcactttgcaaacaagaggtaatgggatctgttgcacaagtgtagagctgagacttatataggagcatatagcttatttgttgtgggaagaggataggagtataggaaggtcgatagactcgatgatgggtccatgcaggcattttcttcatatactttctacttcctcagtgaaataatagccatgaatatgtatctggaagaaaaatgctctagttccatagagtggggaataattggaacagttacgcagaataatgggagagcaaattgaataaggagatagagtggtatcaccctacagccttaaggaatcccttgagttcagtggtcaggatattaaaatgagatcattcaacactgttgtgaggttttctcctttaagttcacttattcgatgatgacttagaacaggtgaccagtgaaaaaccagtgaaaacagtaaacattttttcaggaaaataaaacacgggtgttgataatggtattgaggctttatgaacaatggaaagaggttataatgagtggtcataagataaagatagtcttcaagctctgagattcttttctccacttaatctattctgctattgatacatgtcattgcactgtgaatttcccatgttgtgttcttcagctccatcagatttattcacattttggtgttaatcaacactttaaaatttctgaatagtattctgctttatggatatacaatttgtttattcatttacctgttgatggatatttagaatgtttccagtttggtgctttacaaataaagctataaaaatttgtgtataaatcttcatgtgaacataaatatctaggaatgaaatgtctagaatatatgcaagtttaagtt

SEQ ID NO: 469788 - DNA, 793 bp, Homo sapiens
gtcttcctcctcctcctgtgtcaggaaacagcctttctcacattcaggggcaatcatggaggaactccctcaaaagggacaggaggcgattgtgcctatccaaaaattggattctgctcctaaggaggaaagagagaaagaaaatgccgtggttaatcggtcttctgcaccacacagtaagcaaactccagggcctcagcagctgtctttcctcctgagcctgcaggaagccaggcccttgggtggtgccatcacgagccttcactggtgctgcaccagcctggctgccttggttgaggattggtccttccccatccctaaccctaccctgtctctggcagacagtgacaccagagaccttgttctgaagtctgctacagttgggactgatctgacagggaatgcttttaattgtttttccactctgaagaactggatgagattctgccaatgtgatgacacatattcggttagagtgctgtggtatacagtggtccttacaagatcttcctttgacatctgctttgtaccagcgagtgaagtattgatccacgaacaaaggcaccaccggctctgcggttaagcttcaaaattccatgggggaaaaaactcagttcattcccatcaacagtcagtttttcaagtgatctgtaaataaaggaaaccacactttaaaaggtattatacaattcataatattaaagtaaaattctgcctcaattgttcatgaaaattggcatcaaactagtaccaataaaatacaagtatgaatttaagtatttctttagaatca

SEQ ID NO: 469789 - DNA, 1162 bp, Homo sapiens
aactttcacacttaggaaagcaccattcttgagtcaagggtgtatgagtacagtaacaaataatgatttgcatactttattattccgctcatgtttgtttctcttttctgttccccagatattatgtcttaaaaatttacaaatactgaaattgagaaataatcctatcaaagaaattccttctgaaattcaacaacttgagttccttagaattttcaccattgcttttaatttaattactgttcttccaattggaagacttcaagcaagctctgacataataaaaatgtttatttgcaaagtttgttcaatgaaaactcaccaggagggcacttatacagtgaagaatgaaggtgctgaattcttcatatctaagggttgttgtcagaaatctaccttgctgagcaaagaagacctcacggagtgtggtgagacttggagatcagatgttggaaagaaaccaatagggaatagattgaagatgtggaaggatgacagatgaagcagaatttcacaggagatgggaggggaagaagtcatcagctcaggtggagattctggtcttgaacaggaggagtaaccattatctcctaaaactggagatggaggaagggagccatgagtcaaggaatgaggcagcttgaaaacctgggaatggccttcagcatacagccaacaagaaaacaagggcctcagttctacagccggaaagaactgaattctgccaacagcctgcatgagtaagaaaacagattctccctagagcctccagatagcaatgcagtcctgctgatgccttaattttagtagagtgagacctttgcagacttctgacctatataactataattaataaatctgagttgttgtacgccactgtttgtgttgcaatttgttaatggcagtaacagcaaactaaaataaaaccagtcaaagatttcaactcttgtgggatcacattcccccaggaggagacagtcaatatatgtaataaataaattatatagtatgtgagaagattctcattagtattttcctttgcatcatgtctctttttattaaagaatgtttatttagcacttaaatcttacaagcattttagttcattctccttttatatttatctgtatgtatttcaagactcactgtttacagctgtttc

SEQ ID NO: 469790 - DNA, 670 bp, Homo sapiens
tggtcaggaagcgaaggaacgcattcatcagtgttgcagtgaacacgtgtaacatgatggtatgccgatcgtgaaacaagcaaagatctatcacaataaactaaaggttgaagggaactgtgagtatttaacaggctggttgcagaaatttgagaaaagatacagcattaagtttttaaggactcatggtgctaaagcatctactgatcacaaagcagcggagaaactcattgacaaggctgccaaggtcattgctgatgaaaacttgacgccagaacaactctccaatgctgatgaaatatcactgtttgggcattacagcccccaaaagacactgactacagctgatgagacactgaaaattctcatcaaaaataatgttgatgccatgtactttccactaaatgtgacttcattaattcagccatgtgaccagtgtaaccttagatctatgaagagtaaacataagaaccctttcttgaacagcatgctagcagcagtgaacagagaatccatcagtaagctggaggaagtgaatattgaagaagtttttaacctctatcatcggggtccagttgttcattcattcaccattggtgaaatagcctaaatggttctgaatcaaggagatcatgacaatagtgatgatgaagatgaagttgttagtact

SEQ ID NO: 469791 - DNA, 776 bp, Homo sapiens
cagactctaagcaactcatcacacaaacaatatattaatgagcatggtaataactgctgaaaaggagttattccagggatatgaggttctgtctccagacagttactactgctatcatcaccattattccagagacatagacattctcattcactctaccaactgctatccccagaggcccagtattgatggcagcggcggcctgtctgggatggccactaccatgatgccggctgcagtgggggaggtgctgctggggctgtcacttcacggagcctgtgggggccagaagcaggcaggagccccaacttctcgggcacagctgcagccgcccaagttggtgctgcagacccaggcctccctgtgctcttgggggctggaagcaggcaggagccctgctctcccgggtacagctgtaggctcagaaatgtctgctcccactgcctggcctctccctgctccctgtacccactctgatcttggagcgaggttaaggccaagcccaggtgctgttggagcccatctgggtgtgtacacactcggggcagcactgacaccccagccctctgccgccttgaccccctcacagagcagataattctaattttaataaagtctagcttatgaaataaagacaggaaagaaaatttagtgtgcagaccaagatatgctgtaatgtaaagacacactggatttcaaatacttactatgaaaaaactgtaaaatatcttaatcatttttatatggattatatgctgatgtgataatatttttaa

SEQ ID NO: 469792 - DNA, 2251 bp, Homo sapiens
cagtgggtccagtgggtccccggactcatcctgtggtcatttccccagtgccagaatgcataatacatacttagcagctggcagaacccccacattggcttcctgactggtagggggagggctattatggtgggaaaggccaaatggaagccattagagctgactctacctagaaaaatagtaaataaaaaacaatattacatccctggagggatttcagagattagtgtcaccatcaaggacttgaaagattcaggagtggtgattcccaccacatccccattcgactctcccatttggcctgtgcagaagacagatggatcttggagaatgacagtggattatcgtaaggtcaaccaagtggtgattccaattgcagctgctgtaccagatgtggtttcattgcttgagcaaattaacacatctcctggtacctgtaaaattctaggggtccagtggtgtggggcctgtcaagatattccttctaaggcaaatgataagttgctgcattcagcccctcctgcaaccaagaaagaggcacaatgcctagtgggcctaactggattttggaggcaacacattcctcatttgggtgtgttactctgccccatttatcaagtgaacttaaaggctgtcagttttgagtgggttccagaacaggagaaggctctgcaacaagtcctggctgctgtgcaagctgctctgccacttaggccatatgacccagcagatccaatggtgtttgaggtgtcagatagggatgctgtttggagcctttggcaggccctcataggtgaatcacagcagaggcctctaggattttggagcaaggccctgtcatcttctgcagataactactctcctcttgagagacagctcttggcctattactgggctttggtggaaactgaacgtttgactatgggtcatcaagtcaccatgcgacctgaactgcccatcatgaactgggtgctttctgacccatctagccataaagccggttgtgcacagcagcattccgtcatcacatggaagtggatgacccattctgtagacaccactcagcctctttccccagccacccctgtcattgctcaatgggcccatgaacaaagtggccgtggtggcagagatggaggttatgcatgggctcagcaacatggacttccacttgtcaaggctagagccactactgagtgcccaatttgccagcagcagagaccaacactgagccctcgatatggcaccattccttggagtgatcagctagctacctggtggcaggttgattatattggacctcttccatcatggaaatggcagaagtttgtcctcactggaatagatgcctactccagatatgggtttgcctatgctgcccacaatgcttctgccaagactaccatccgtggactcatggaatgctttgtccactgtcatggtattccacacagcattgcctctgaccaaggcactcacttcacagctaaagaagtgcagcagtgggctcgtgcttatggaattcactgtcaacaggctaagaagggagttacagtgttgactggggtgattgacccagactatcaagatgaaatcagtctacaactccacaacagaggtaaggaacagtacacatgcaaaacaggagatccgttagggcatctcttagtattaccatgccctgtgattaaggtcaatgggaaactacaacagcctgatccaggaaggactacagataatccagagccttcaggaatgaagatttgggtcacttcacctgggaaaaaaccacaacctgctgaggtgcttgctgaaggcaaagggaatacagaatgggtagtagaagaaggtagtcataaatagcagctacgaccacgtgaccagctgcagaaacgagaactgtaattgtcatatatttcctccttcttttgttaaaaacatgtttgtacatgtatacacttgtactaagaaaatgtcttcattttatttcctttctcctttatcctgtgacccagatttattgacttcacatcagcatttaagtattgttaacattatgtaataggatttggtttggggattggtatgtttctggttgtacgaaggatagttttattatgttaggtgtaattatgaccttattattgtctttatttgaagattatgtatgatctcaaaagatgtgtatggattcaagttgacaaggggtggacttgtgatggttaatactgagtgtcaacttgattggatt

SEQ ID NO: 469793 - DNA, 772 bp, Homo sapiens
ttctcctattaatctgccttttgtcagttcattttcagtgaaccttcagagaatgatgggcaggttttcccttggcccccacagttttggcactgtgagcaggataccaaaaccactctgttcttctggaagccacagcccagggaacctaggatctgagaagttcacaaaaggattctatgcagtgcctggactggctgaatgtcttgattctgtggtgcttaaagcagaaaatgtcactatgatttcaaagggccttaatgattatagcaggggtgagaaagaaagcagaatttctaaagcctgtgttcccaataagccatactgcctcagctttcttgttggagagtcaagaatcctacaagagagttcatcagctgagggaaagccattctcaggaaaagtttaccttcgattagataatttggcagctcttcatatgggctacataaattggcattccttcgcttagcacacccaagatatctccatgctgacaatctgacctggatgagaggtgatgactacagttcagtcattaagatgacaaattatattgatcattttctcatatgcttattagccattcatatattttctttcatgaaatgcctgctcaaatctcttggccatttttattggattatttatcatatgtcctcacaaagacttcaacatgaatgctttagctattttatttataattccaagaaacaataaacaaaccaaatgttcaataacagttgaattttgaatggacaaataacatata

SEQ ID NO: 469794 - DNA, 525 bp, Homo sapiens
aatattctttaaatgaagttgtttagaataaaacaaatttatctcaaaagtactaatgtgtatacattctctcacacgtctttagaattactggtgagtggtaacacagctgcctctgagatcaacatctgtggcatatctgagctcagactctccttgggcacggcttgctgtggctgctgtgggagatgtcgatgtggttctcaggccaatggagttatgttcccagggggattatggctgcctctactgtatcacacaggtcaccagggaagtgaggaaaagccagcacccaaaggccttactcagttccccatgcagcctacagtccgaaaagctggtctcactcccaccatgcccctcacgacagtaccaagtttatttctggcagctggtaagggttactttgtggattacagtgattatgtgtaaaatgcctgaaatgtagtaggagactgtcagatcattagtctccaaattccaggaatttaagaactttatctcatttgtcactgtgtatctcag

SEQ ID NO: 469795 - DNA, 724 bp, Homo sapiens
gagcacaaataagcatcagagaaatgccatctcataaacaggcagaagcatttgtgaacacagcagctgttttcttgagttgtttcgaaattcatattgatagagcttcggaaaggctttttgttttcactatcaattgtgtgactggcattatatttttggtgaaatcccttgcatttatatttatttccttgtatagattaatgcatagcctttgtcttcttctcggggattttcatctactttgtgtgaaaataaaattatttctggaatccttgtatatagctagttggctctaccccacagccaccatttttggtattacaagtacacgcagtcgagatccaagaactctctcttggggtctggatcaggaccccttttctgtaacaccgtctcaaagaaagcccctcttgcccttatttgccaacctccaaatccaaaaaaaaagagaagaatcaaattcaaaagatggcataataatgtgtgaatctgatataatacaactgaagataacccaggaggctgcatttcagcaatccctcgcagagtttctactctctgatatctggtaaactttaatgctatgtttatgaaattttagatgtatgacaaccagcaactttttcaatattgccagaagcctattaaaagttagacaatataaaaatatttttgttctgtcatatatgtgaacttttaagcaaagagggataggctccct

SEQ ID NO: 469796 - DNA, 734 bp, Homo sapiens
gggactgactgttagaaggaaaactaacaaacagaaagcaataacatcaacatcaacaaaaaggatgcccatgaaaaaaccccatccaaagatcaccagcatcaaagatcaaagggatgaaaactggatggagactgagtttgatgaattgacagaagtaggcttcagaaggtgggcaataacaaactgctcagagctaaaggagcatgttctaacccaatgcaaggaagctgagaaccttggtaaaaggttacaggaactgttaactagaataactagtttagagaggaacataaatgacctgatggtgctgaaaaacacagtgcaagaacttcgtgaagcatacacaagtatcaatagccaaattgatcaagcagaagaaagggtatcagagattgaagatcaacttaatgaaataaagtgggactatgtgaaaagaccaaatctacctttgattggtatacctgaaagtgacagggagaatggaaccaagttggaaaacacccttcaggatattatccaatagaacttccccaacctagcaagacaggccaacattcaaattcaggaaatacagagaacaccacaaatatactcctcaagaagagcaaccccaagacacaaaattgtcagatttaccaaggttgaaatgaaggaaaaaatgttaagggcagtcagagagaaaggtcaggttacctacaaagggaagcctgtgtaacagtggatcactctgc

SEQ ID NO: 469797 - DNA, 604 bp, Homo sapiens
aaatatgtagtatctgggccggaatgccccattactcatggcacagtccctcacagcttcccttggctaggagagggagttcattgaccccttgtgcttcctggttgaggggacacaccaccctgcttctgctcgccctctgtgggctgcactcactacctaacctttggataacatctctgctgatttttggagactcaagccttcgtgatggccatttgtcattccctcagcttccatggcttctggctatgggtactaaaaaagcaccaaggtcatattgtaaacttagactatttggcatggcccaagtgccccagaggaaatcaaactggaaagtccactaccgccaaatggttaagggaacaggcattgggaacactactaatggtccccagagtggctttaaagaaaagatgaaagtagtcaagaaagaaatttgaggcgataatttcctttttcctataattattacatacttctacaagaatttcataatttcaaagtagaaatttgtgctgaatttttaaattaaaaattagcaatttaggaagctaaccgtactcttggggagaaagatgtgaagctggcccttgctgactcc

SEQ ID NO: 469798 - DNA, 875 bp, Homo sapiens
ttattgccatttttgcaggagtcggggcaggtttagccatgtctgagctcagtctctcctcgggcaaggcttgctgcggctgctatgggtgatggaggtgtggttctcaggccaatggagttatattctcagggctattatggctgcctcttctgagtcatacaggtcaccagagaaagccagcagtcacaggcctcacctcctccccacgcagcccaaaagcctaaaggccagtctcactcccactgtgcccccacaacagcaccgagtctacttcctggcagcagaaactcaaggggagtactgtgccagccagcctctggaaaaaaggcagacaacactacctcccacttttgtgagtgatgctggggagcacgtcgctgcttccaacctgcctatctcaattgtggtgacaaagcaccagaccaagaggcagatccctggaactgaaaaccctgacttgagaaagagagagagtgagagagcactattcaattctgtcacttactagctgtgtggtcctgggcaagtgactaaacttctctgagcttcagttgcctcagctgaaaaataaagaaaataatacctatctcataagaatgatgtcatggttaaataattttttaacttggcactaaaaatgatatatattgattgaatcactcatttaacaaatattttagtgttttagtagttgagaagaatgataaatatcttaaaacagcaagcaatataactgtactatttaagttatagtttgctggccttacagactagaaggatagcagacatttaagtaaactattacaatgtaattttatattaaggaaagcaggccaaggcaatcacatacaattatgaagattttacactgt

SEQ ID NO: 469799 - DNA, 546 bp, Homo sapiens
gagggctgccagcatgctgtcacctctcaataggacttttcctcattggagatctcccactaggagggagagagcagtgtgtggagacccatatagtgaactttttctccaagaactaccacaggaacataccaggaaagctgagagaatctacagacctttgaaggaggtggattgccactgcaggctccatgggacagcagaggaactggcaagcatgtatcctccctatacaatcacagctgatgtgctctcgaaagcaccacctcttggctggaggccagttaacacaaaaccatcacacttaacaaaaatacaaccaagaaccatcacagagtccatttcattcccctgctacctccaccagataccagattgtccctctgacatcatccacccaaatgagaataaaccagaaaaacaattctgataatatgagaaaacaagctttcttaacatccacaaaagatcacactagctcaccagcaatggattcaagctaagatgaaatctctaaattgccaggaaaagaattcgtaaggttga

SEQ ID NO: 469800 - DNA, 631 bp, Homo sapiens
acaaaaatccaaccagactgactctccccctcgctcatcacactcatctttgaattttattgagattccataagtgtgtatgcttttaatgggctcattttctgatttttgtccctgtgatgaatctgccaggaacacccccaaccctggatcaattcaaccacctacatgtccattcacatatctgatcactaatcagccacctggaactgagaatgggggacacaagcaccactgtggccaccaacactggaactgcactggttcagacctgaagccagcacagcactgggtctcgcccaaggcctgccttagagagaaagcaatacttcctgggaaaagcgagctggtgtggcttcctgaaaaaagccaccttgatgtagttaccaagggtatggtcttaaatatggagattggagagtcaatagtcagtacatccagagttaatcaagcacagggaaataactcacaccaacccaattcacaagtctgacattaaggaatccagaatgccaatgtattcacttatgataaaaaatataaggctccattgatggatctgggcaggccaaggctcactggaaagttacctgatggatatagaattagaagcttattgcctgagccaaac

SEQ ID NO: 469801 - DNA, 647 bp, Homo sapiens
taggaagatcagagtcctggaaggagctatgcccacagaagcacaggccccgagcgtaggcacagggctgttgggactgccagactgcttcttaggctggaagcgcaggcaatgggagttggtaacccgattgtgcaggaccaaagacacagctgatcctgggcccaggctccacacagctgggattgtggagttcagccactcatgtgagcctggtataatgaagatggaaccccagtgctggagacgtacagtggctactggcccctggagcagggtgcactccagaaatggctctggtctcaagatgggcccatgctgtggcagcttggctcacaggggtttggtaggggatggagagtgcacaccttgtactcctaatgtggaaaaatacagctgctcaaattcttggaaactctccaaactgggctcagagctttcttcttgcttattattatataatgtccagagtttacagctgtacttagcaggtggaagatagatatgtatgtttactcttgtcctagaagtgaaaatcattgacttaatttttgaattaaattaaattaaataaacttatgtcaataagcatgttttaaggtatacaatagaaactctgaagaaagaaattatagagtgcattttat

SEQ ID NO: 469802 - DNA, 500 bp, Homo sapiens
ctgagaggttacccagcagcacctcccactatcatgacacaatgccaggaagacttgtgaaatggcaatttctggattacatctgggagcccatttcagtggcagctcctgcagccagcatttcaagtccagaggaggctttttgtaaagagctgtctgctccctctggggtagatacagaattagttcactacgcttccatgctgctttcctctgatgtgccttcctgctctgcagagtttagaaaggcagaggagtctctccccatgtccatcaacatcacaagacactgggagtattgccatgattctgctgatgttcacttaagacctaagggctttgtagtcagcttgtggtcaatgctgccatgcctggaattcacctttcagggcagtgggctcccctctggcccagggccagaaatgccatccaagagccaactctggaatcagggacccgaagagcccacttggttcacttccccactgtagttgagctgg

SEQ ID NO: 469803 - DNA, 816 bp, Homo sapiens
cgggaaccacaggtgattcctatgcacaggaaaggtggagaagacaatgaactcttccttgctgctgggtggggagaaaaactggagaaatggaaagccaggtggctgttcatgataaacagaaaaggagacattcagaaggaaaaatctagtagaggggtaggaggctacagaggcaatggccagcaggggcataggagagggaagaagaggctcctagaggctaccggcagttctctgctatgtgtccccacagacagttcacaatatgattattgctcttcttccagtaaatggaactatcaggcttccaggagctcaagagacaccccgagaaacatctttgattcatccattgttcacttcctcttattcaatctttcaggagaaacaattgccagctggtgtcatcgtggagtaactatagtagactgaatgcaagtatgttttgcctttttacctggagagcgttcaattttagaaagtttctattcatttttgcctgaattttcctcatctctgaaatgggatattatacttctcttatctccttagagtgttgttctgagaagcaaatgaaataatggctaggagagtgctttccactatacaaactaccactagcattctggttatccattttggtagctaataaggtgatgtttatccatgtgatatcaagcaattttataggaaatgagaagcttcttcaataaggtgatataaaaaggtataatgatgttttacttaactaaagcagaggtatgtgtatattaagcagacacattcagaaaataattgttgggcttttgtttt

SEQ ID NO: 469804 - DNA, 1048 bp, Homo sapiens
tttctgtgagcagagaggagggactgacaatcgggtccattagctaacgagacctgtgaaatgtggagctcagaggggaaaatgcacagaaacagggcagcacaagaacatctagccctttgtgtctgggatgttagtaaacatccaggaccttccacagccaatggatcctacaatcgtggagatgtcctgaatgccccagtctggacactgaagacagtaattaaacacgtcactctgcctcctataaatgcctgcaatgaagtactcacaagtaagtgctgcacaaaggaaatactctacaccattgctacaaggaataaagaaaaatcatttgctcctagcttggtcatagactttcttcctagtgcagctacctactccaatgtggcaaacatttataaagcaccactgtgtgcagagttgccaggacagaccatccaaaggatatcaaacaaaactaacacgatattaatggctgaacgaacaggctttccatttgcacttgcatgagggggaggttaaggattggcagttgctcacataaatcaagtctgatacaagcatgtatagaatttttatcttcttttgattataattatgatttttatttatatacctttacttacagttcttgatttattgacttcatatggaattattgactccctgctatgagagttgagaaacttaccactcatatttttgctccattttacttctgcctaccaacttaggcacatgattgtgcattgtccaaccttataacatttacgttgttctgtaaaaaaaaaaatgctttgtataaagacacagttgttagggtatagaattttaacatgaatactcaaactccatttcttgtgctctaactggagtgtgattaaacttagaatagaatgcattccttcctgccacgtaaactgcaatgcaggaggagaaacagactcttcacaccactttgcttgttcggatcccatgagcgtgcccttcatagaaagcaatatccaaactcttcagttagcatgcaaatgatgccatcgatccc

SEQ ID NO: 469805 - DNA, 543 bp, Homo sapiens
cttctaacgtggagatcaacgagggtgcccgccaacgcattgaggatctaaacttcctggacatgcagctttacgagtatgcaaaagatctcttccagcagcgctaccaccacaccaagcagctagagcaccagagggaccgccagaagcggcgggaggagcggaggctgcagcgagagcacagggaccaccagtggcccaaagaagatggggctgcagaagggactgtcaccgaggactacaacagccaggtggaggatcagagtgagtgggaagtttcacaacggattgatctgatcaatcccttcaaggagctgaaggcaaaatgtggaagtccagcagctccaccagatagagatctggagatgcttctctcactgtgcttggcttcatctggggtgcaagggaaggcattatcgggtggctcccttgctccaggaactgaacgaggcccttttcataccttaaatatattctgcacaacaaatgggtattgttagtctccatttcatagatgaaaatagtgaagcccacagaaaataa

SEQ ID NO: 469806 - DNA, 532 bp, Homo sapiens
ttctattccatgttccaggactctgctggagtctgtaagtggcttggacactcagctggactggcaaagcagaatatctgtgtgtcagtgtacttcattcatccgtcgctgggtcagggtctgggggtcagacccctgcagctggtgcccctgtgtgaggaacgctaccacacatcctggcctgggctggggagtccatccaatggatttcagagagagcttgatgacacggtttgggggcagggtatgggtcgatgggtcctaattgccatgctgcagagcatttactttatcataaggtcaactgtcaccattaagaaggttggccatggaagtgacatgaccaggtctttgaaacgatacatgcaagcattacccagaactgtggggcttgactttgaaagtgactcagtattttcagatcaggagcctcaaaatggaaaggatgtgatgaagagctaaaaaatgaaaaaaaaaaaaaaaaatagaaacacggacttaaaggaaaattttaaatttaagagcagactga

SEQ ID NO: 469807 - DNA, 613 bp, Homo sapiens
gtgaaccctgcttaactaggccatgcctgagtgcttcctaactctggcccgaatgacccatcaagacagttgcagcagagtggacggcaccggagtggaggtcaagattggcataacgtcttggtgtcagggacacaatctcattgctgaatctgacctgcagcgacttccacttcctgtgtctgctttggactttcagctgtgccaaaatctgtcccctagactgaatgtagctgagtgtctgaaggtcgtgcctggcgtctatgttgtagtcgggttcccagttgattctgactcacagcaagaactgaacattgctgtgttagctgatgagcaaacacaaataattgtcaaagaagacaatgctctaagacaagggtccccaacccctgggctgtggaccagccctgatccatggcctgttaggaactggaccacacaacaggaggctggggggttagtctatcaagatgaaaaggctttcctggtgacttgccaaacaaatgaggataattatttactactgtcctctgaggactctacaaatgagagccattgaacttgagaactagaaggaatctttgaggttttgttattcatcttctttatttta

SEQ ID NO: 469808 - DNA, 574 bp, Homo sapiens
ctgcctttgccctgtgagacagcccagacctttacaagctctgtacaatcaacccagttcttttagcagccatggcaggcaagcccacagggaatagttccccagagctgaaggaggttccagaggagcaatctaagacagctattgaatgtcataacccttccagtccccctccaattgtggacccttctcacttggcttgtcaaattccaaacggcattgtaaatgactatcttaaatatggatgtcctgatcccaaggatgcccctattacatgtaaagaagggaaacttctaagatatgagaaaaatctgctggtgtctctcacaaggcacaacttaggatcaagcaatcaaacgccaaatggggctgcaaacagaaccacctatggacataacattctgccaaggacccttagatcgaccccaggaggagccctagctgctgttcccactggacgcccgtttgcggcaggaagtagccagaaagagttgtggcccaaagccccctaacagtagtgaggatgacatctcctccgggggaaatattataggagttattaagaaattatttt

SEQ ID NO: 469809 - DNA, 698 bp, Homo sapiens
ctgactgtcaggggtattgaggggggggcagcaaaagaagaaaagccctgatttttattcaaggccatgttcttaactctgagagcagttgttaactgggacatatcaatgtttgggactgtcttcaggctaagtatggatggcccttatcagcgcctccagaatcacacctgtaggtcattgttacttccatttgcatgtgtggccagctgtgttggtccgtcaggaatgcagaagaccaatctgccccacatctccattgttgctggacttctccatttatacatcctaacgggcttcacacagaacctatccaaaacagaaccacacaagttcaagttgtattccatgctccacatctcaatgagcagttgttactcaaggttacccagaccacaggttaaggtagaagagaaggagacagaagtattgttcctgtggcagcaacagtcaggtttagggacttttgcagatggcctgcgtgagatttgaccatgacttccaagagtccttttgtaaatcacctatagggctgttgcaggcatctgagatcttgattaaagtttcctgcaattcctgaacttcctgatttcctaaattcttttttaatatttttactttttaattattaattgacaaattatagttgtaagttttcttaaattctaaaagcagctcttactgacctttgttccctt

SEQ ID NO: 469810 - DNA, 626 bp, Homo sapiens
gccgccggcacacctggctgtgcgcagtggccggagccctcgcttgctcgctcacacatccttcgctgctccacatctggctcgcctttggcgggcatgggattcacacgtctcatgaaattttctgcagcaccaaataaagccttcttgtttggcaatactcattgtgtcagtgattggctttctgtgtggagagcagcaggacccagactaaccccctggtgtttagaaaagcagttggggccaacggcaatggggccggcaagagaccgaaccccaccaatggccaaagaaaaagtcagacagttgcttaggaggacttctgaaactctccctacctatagcagccaagccatgagcaaagcgttcctggtcagggacccaaatcttaccaaagcactagggaggatggaggcagctctctccatgtctgtggttcgagtcacattgctacctgtgagcagaggtgacctcctgttgctgttaagattcatgctacctcctgggtagtatcatatgtaatagtatcactttttaaacattttggtcaaataaatttttacataaagtacaaaaaagaagagattcatgctacctcatctcatctcccctgcttgtcctcacag

SEQ ID NO: 469811 - DNA, 646 bp, Homo sapiens
ccgaccttaccctatttctttctttttgtttcttgctatgccaagtcactatgctgacgccatctgtgatggttaattttagtcgtcaacttgactgggttcaggaatacacagatagctggcaaaacattattcctggccctcggacaacagagctccaggttctcaggcctttggactcagaccgcattacgctacagacttccctggttctcctgcctgcagatggtgtatcacacgacttctcagtctccataattagaaatgcttctgtgacatcagtgtgccttccttatcaagaggccagggtcaccacagcggtatccatcttccctgctgaaaacagaacaaagaacacaacaaagaatgatggtattcagcttttggcgaaaggccaaaatgtcccaacaaaaggtgataccgttaaaaaatggacaacaatgaatacaaataattctggtccttggaacataactatgaatataactaatactcacaattatcacaaaatatcaacagcattgtcagcattgttttctgcatcttctgtgctcaacatgctagttaaagctctatttgattatgttccaagagtagatgtaatggaagtccaactcaaacatcggtagggatattaatcctttgg

SEQ ID NO: 469812 - DNA, 503 bp, Homo sapiens
catagtgtttgggtgacggatccttgaggagtcgccacactgtcttccacaatggttgaactagtttacaatcccaccaacagtgtaaaagtctcagagaagtttgatcgtctgaagccttcttctctcaacctgtcaaagtcattctccatacagctttgttacattgctggcaaggagctgcattcctttggaggagaagaggtgtcaggaccctcagctgcaggtctgttggagtttgctggaggtccactccagaccctgtttgcctgggtatcagcagcagaggtggcagaacagcgaatattgctgaagagcaaatgctgctgcctgatctttcctctgcaagcttcgtctcagaggggtacccagccgtctgtggtgggctccacccagttcgagcttcctggctgctctgtttacctactgaagcctcagcaatggcaggctcccctaccccagccttgctgacgccttgtagttccatctcagactgccttact

SEQ ID NO: 469813 - DNA, 2259 bp, Homo sapiens
gcaaagacgattcacagcacaaatggggagtttcaggttggcagaaagaaaacccttcgagatgcataatggagagagtgacaaaactgagccccacagaatgtggaaagctggacagcttaaatgtatcttttcaaactcatgctagcaaggaatggattactatattgctaaatctgaaggtgtggtatattggagctaggaggtggtgtgcattctgcaatcagtgggttgaaaatgttgggaaaatcagggaacgggaaatgagtcaaggagctgctgccttctggaaacttaagagatgtgatgagaggactcaacccattgtcgctggctttgaaaatagattaaagaggccacaaaccaagaaatgcgggtggcccctagaatatggaaaagaagtcaatcatggaacccagtcagatccatggagtaccagtacccggagggtggtcatcaaaattgaaatgagacttggggcacagggagagacatttgaaccatgtgagttcaggaagcacttcctcgtaccagtggcccagaaggagtggtttagaaggagacaagaacgaattgaagcccatgaaaaagcagcaaatgtcttggcaacttgtagaaaattacatttgctttcacctcttcccctcctgaggaaaaactgcttctgtgcattttcaggggaatccctttccatgtgagagaggaattctcatggctttcacctgctttgggatgttgcttcctaattatcctttgccatctttctccccactctctcttttacacccttctcttgattatgacgaaatcaagtttatccacaaaaatgctaccctaagccttcctgctaatttttattttaaagttatctagttgattcctttttcaatcttataaattttttaattccctgaaaataaccacatgtattgaactcaaaatgttatagtttctgtaactcttggtttgcataaaccctaaaatgaagtaatgtgtacattaattatatgctttgccatttacttgtggtttctgtgaaagcaaatgccactatttttagttcctgatcttaaaattactctttctcaaatgctgttaaaccttaatgaatatccaaattcatataaattatttaagctataatttcctatactaaacagtcattagattaacgtacatccttagggctcttcccagctgtaccaaattagctttttttgaatacttttagatttgaagcaatgcagaaagtattgctcttctaagttgtcttataaggttacaaacagcaatttgacttaaaaatgccattgagaatgtttcctccagttagtattcatgcaataaaacctcatgtttttccctaagaattattgaattttaaaaacatatcctaatcttttcatttacatacaagtgaggaaactaagatatagaaagtttggatgaagtcctcagcatttcaaagaagtctgtatattgaaatgttctcttcctcctttctttcctcttctttttttttttctattaagaaagcaagtacgacagaaccatcttagtttggatagtaattctcacttacaaaaaaatgtaaactaattgaaatgatggaaatcaaaaatgaaaacattcgtttaaatctttattttttaaaactaacacatatttaagaatgtataaattccggtgtgtatctgtcaaggtattcctgattttatttttcactacactcttttcctgagtgttttcatccctagaagacatactcacatggaggaagcatcttcatgttattccaacaaatgcatttttcttaaatttcccctttctagcctctagatatagggtgtcttcctgtttctatctcacaccttttagagattcttttcacatacttcactgtgtagttattaatgtttcttctctgacaattctttatttctcttcccttgaaagagaaccctgctgctgtcattacttttccttcagatttccttcagatctctccttttgccagctacccaattcccagtttacagggaacccgctgatggcaatatttctttcctttattttttttgattcagaatactcagactgctgtttgaataataatgatgataggtatattgtatttacaaattactggttatttggtgatttcaatgtaatttatgtgcatgaattcattagtagtctcaattttcacacgacgtgttggaacaacttgtgttttttctcagtgaggaaatgaaggac

SEQ ID NO: 469814 - DNA, 508 bp, Homo sapiens
cagccatgttgctcacacaaagccttggtggggcgccgaaaatttctgggggatggtatggagagagaatggacgatgtttctcagggctgcttcaagcgggattaggggcagcgtgggaacctagagtgggagagattaagctgaaggaagattttgtggagattcagcatagtcctgccagcaaagattatgtatttacttcaagagttaagagtggcagtttggggatagcaccaggagatatcagctgtgatggcttggagaaacagtgtaaaccggcagtgcctggtggaaatgccatcaataaatcaagcgtgatcagggtgaggaacaggaaagaaggaaatatggggaaatggggtgaatatcaggtggatcagagagatacagtcatgggtgtcaggtgtggtatcaggaataatgtgggaggctggattgaagtccaggccaggaacaatggtaattgtgggacttaacaaagagtgagtacagcagaaagtatatgc

SEQ ID NO: 469815 - DNA, 809 bp, Homo sapiens
ctctgtttgcaattgaacaggactgaaaataacagaactcagcaccatgatcggaccgggacaatcagattatttcattcctcagcaaacggagatcgatccgaaaagtggaaatatgagctcttctttggtggcactgactagtggagctgtgacatgtgggtcaccatcccccagacaccggaaaggtagatccgctgacagcatgcaccatgtgcctagaaaaaactgcaggcactcaacacagcccatgaaaacagccttaggagctataccctgcagagccacagggatggagctgcctatggctgtgggaacccaccccttgcatcaatgtgccctgaatgttagatatggagccaaaggagattttggagctttaagatttaatgactgcctggctaagttctggacttccatgggcactgaagatctatgtggaatcaaggaggctagcaagaatacagtatacttaagaatcacctaaatatatgccagtgaattccaactatatgtattgccaatttcactctctttgccaggtccctaaaatgcctgcaaccactctaataccaccctactcaagtggagaggtggtagagaggaagtcagtgtggaaaaggcagtgttcttaacagattgcaaataaaatatttcgtgaatttgtaaaaagtagatgacaggtctagcttctggaaatattaggatatcatatagaaaattaaagcttcttccaaagacaattatgctttccagacaaattattttttttaaagtaactgtttgaagacacaggagggtgacccaaa

SEQ ID NO: 469816 - DNA, 668 bp, Homo sapiens
tttgttacttatgccaatttctgcagcaggcttgaatttctcctcagagaacggggtcggcttttagggatggagccagcagtagaaatgacaaatgtgctcctagagggtaatgtaaactacatggaattgggagacatccaacaggaaatccgagagatagagcctgattatgtgactgaattgctgctatctcttgataaaacttggatgcatgaggagctgcttcttatggatgaacaaaagaagtggtttcttgagatggaatctattcctggtgaagatgctgtgagcattgttggaattacaacaaaggacttagaatattacacaaacttagttgaaaaggtgacagcaaggtttgaatggattaactccagttttaaaaaaagctctgtgggtaaaatactaccaaattgcttcacatgctacagagtactctttcatgaaagcaaaggtaaaatggatgcagtaaacctcactgttgttttatttcaagaaattgccatagccattccaaccttcggcaaccaccaccctggtcaatcaacagcctcaacattgaggcaagacctttgaccagcatatagattaaaactctctgaaagtgcagataaaggtattttattcttaaaaataatgattaatttaaggtatgtacttttttt

SEQ ID NO: 469817 - DNA, 815 bp, Homo sapiens
aggggtggttttgcccacactgttcttgtggtagtgaacaagtcttacaagatctgatgattttatcaatgggagttccccttcacaagctcccttgccttctgccatgccccctgagagttatacagaataccttccagaaatatctgactgtagggtcgtcaggtgaggttcctctctgccagatcctttctttcacggatttaggtttggttctgagggctgcaactttccaacgcttctgggctgcatttgtgtgtagatccccacatcagaaagcaaaaatatgggatttagccatctggcaatgtccagaaggggtctgcctattccattatattgataatattatgttaaccgctggttctcttgcaaatttagaagcagcagtgcccctcttgcagcaacatttggcagcatgtggttgggccatcaatgaatccaaggtccaagagtctgtattatctgccaaattcttgggagttatctggtcaggtaaaataaaggccatcccagaggctattaatgataagattaaggcatatccccagcccaccacggtgaagcagctgcaaacttttgtgggtctcctgggatattggcagacatttgtgcctcatttagctcaaatgataaaatctttgtattggttaacaaagaagggagctacctgggattgggatgatgtggctgagaccaccttcctggcagccacgcgattcaactcagcaggcacaagtcctatgggtagttgaccaggggcacctgtttgagctggatgtgcatgggaccaccaatggtttcaaatggggtcc

SEQ ID NO: 469818 - DNA, 1633 bp, Homo sapiens
agcgcccagagagagagtaaagccatgtggaagctttctgtcatctgtgaatggcagtgtgttagcagctcagttggccccttgcctcatcatgtggggcagacactctttgctggtgaggacaaagggccggtgggacagcctttctgggtacctgcacttggaaaacaggaattagggaggggtaaggaaaaggatttggttaacaggaagcaggtgattggtatggcaatcatgatgggtgagaaatctgaagtgtcattgtacagatatgacgatctgggcaccagctggggcagtctccctgtgggctccgcagccagaccaggtgtgggcaaacgagtgcaggatctggctggccactttgggtgctggcaagagcaggctctggcgggccccacagcagcactgagctccgctgttcatgtacagagctttgctgtcagctcagtgggccccttgcctcatcaggtgaagtggctgccactctacgaggacaaagggccactgtgacagccttttttaggacaagtaggatggatatacgtcttctaagccacacaattattttacctgtgctcatgtctccatactgacttgtgatttctcaaggggtcttgctctatcagctctgtctttagtggctgtcttagttaacttgggctgctgaaacaaaatgtcatagactggttgacttaagcaaccgacattcatcatttattcctcacagttctggagggtggagaaattggacattttcagtgatcaagaatactatattttgtaaatggaaatacaactactaaaaccagaatgctataaatacaataatgtcttttgtttccaaagcggatacactagagtgacacaagaataataataaagtgaatattttgaataaaattttcaactttgaataaatttcaactgaaatataggtgttgccttacgtaatgttaaataccacacatggttctttaggttgatttataaaatagtttttccaagggcagacatttctaaaatataactgataagaggcatcagagtgcaaaagaacataatatgcagaattttgttttgttttgtacaagagctacataactaaaattttgtattttaattacattctgtctgtatgtatatgtatgagtaaactcagataactacaagttctatttcaattggtaaaatatgtcagctaataataaccttacagtagcattcagagtaatgtctgatgtttaacctttgacagaatgaatttttaatgacttcactttgatttcacaaattggattttaaaaattaacctgtatcaggaatcaacagactttgtatttgaagttatctgatggcattgatatatactgggatcactttattatctatgaagttccattagcatagccacatattgatggttatttcatttttcatagtgcataagaaaacttgcagatgaatatagtgaaaaaatttttggaaagaaatctttgaatgcaaatttggttttcatagggaggtgtgtaaacacactttcagcagttactcttgctaaattattatatttgggtgcacattttttcacatgtcaactagctttatactgattgttcaacaaattcaagtc

SEQ ID NO: 469819 - DNA, 3753 bp, Homo sapiens
agcagccactccagatgggccgctgctgccatcaaaatccaactggtaactatacacaggcgaaaatacctttgtgaatatcccagaacttgagaatgaggctaagaccctcacgtggacttggacctaccctcatccttgaagcaagcccaacttcatgcatatatgtcaagcataagctctgcccctgcccttatcatgtgactaagcagcaactccagagacttctcccagactcagagctcagcacatggccctaccctacaacagtattgttcagccagggaagacaactctgcaattctgccttatcagagacaatttcagagctcagccagaagctcaacctgatgacagagtttaaccagtggtctcattggacaatggagcacagccagcagtaccatatgactgcagtgcataggaagttatctatcccagctatagaacctggtaccaagaactgcctgtttgtggctcctactagccagcccactcagaatcctgggctagactaaatagtaaaggtctatcactaccaaagatcacctgcaagggctggaaaatgtggccatctcctgaagtgttcagacacaactgtaagggtactaaaattatgaaattctaggaaaataggacaccactaaaagaaactaatgaagctccaaaaatggacttagaggaaatgcagatctatgaaatggctatcaaagaatacagaattatcctcttaaggaagttctggaaactccatgaaatttccaaaaaaaaaaaaaaaagaaaaacaatttatgagcaaaatgagaatattgacaaaaaaatcaaaacaataaaaaaagtagacattttagagataagaataaataacagaactgaaaaatgtaataggaggtttcaacagcagacttaaccaagcaaaagaaagaataattgtgcttgaagatagcatattgaaaattattcagaggaggaaaaagcaaatgaaaaagaatacagaaagcttatgggaattatgaaacaatatgaaatgaactaacttttgcataatagggattaaagaaagaagaggaggggaaagatgtagaaagcctgaagaaataatagcagaaaattttcaatgtctggaaaaaacagcaacatctagtgtgcctacagtggtggtcttctgtttatactggttggtgttttttaagctttttgattatattgactaatattttcatcaaactgacaaaactacacccatgattaattcatgttaagttaatttattgtcaatattctctacttttgtatgcatttatgtttccttcatgtcttttcatggcttgataactcatttccttttagcactgggtaatattccattacctgaaagtaccagagtttattcaatcacctactaaaggattacatcatattatgttttggtaattatgaataatactgctataaacaactatacccaagtttttgtggtgatataagctttcacctcttctgggtaaataacaaggagcataatttttgaatcgtgtgataagaatatgtttagttttgtaagaaactggcaaaccgtcatccaagtgactgccattttggattctcattgggattctcaccagcaatgaataagagttcctgttgctccacatccttgaaagtatttagtgctgtcagtgtcctggattctggccaatctaatggctgtgtactgctatctgattgtcattttaatttccatttccctgatgacatgtgaattggaagatcttttcatatgtttatttcccatccatgtgtcttttttggtgaggtataagtgcttggaccatttttaaagtgagttgttgtattagtccattttcacactgctaataaagacataccctagactgggtaatttaaaaagaaaaagaggtttaatagactcacaattccacatggctggggtggcctcacaattatggtggaaggtgaaagacatgtcttacatgatggcagaaaagagagaatttgtgcaacgaagctggcatctataaaagcatcagatttcatgagacttactaccaccagaacagcatgggaaagacctgccaccatgatgcaattacctcccacggagttcctcccacaacttgtgggaattatggaagacagaattcaagatgagatttccagttgctctggggaaagccagctgtcattttgtgaggaccgtcaggcagcctgcagagaggcctatatggcaaagaagaaacatcttctgccagcaaccagaaaggactgatgatttctaacaaccatatgagttaacctgggggagaattctctagttccagtccaggcctagaaagactgctgcctggatggcaggtggaatacaacctggtgattgagcacaggacagagcacctagaagtttcttcctgggtcactgaccctgagaaactgtattatataacacatttttttacgctgctaaattttaggataatttgttacacagaaatagttcattaatataagttatttagaagaaagctatagtattaattttgtatttagctaatgggttgtaaaataaaattattgatagtataaacataaatattaaatgtatatattccttttggcaaattcattcagaaaaacttggaacatgaggttataaaattctagcttattgatttaattattatactcttattacatgggaaaatgcagaacattttttgttctcataagatatattgtcattcaacaacaaaatatgacgcttgtatcttctgatatgtttttttatttttagttacatgaagatagatagaaatataggcagacacgtagaagtcagatagagagtgagaaagataatgagagaatgtttgctagtttgatttccattatagttgtaatccatatatggcatttcatttcagaatacataatactggaaataagttctgattttgtctttttgaagaccacttttttcttggaggaattatcatttcatgtacccagtttctaaaactctttagcaattaagacaccaatactaccatatttaaaagatctaaaatgaaatatggcataagctctgccatatttaactatatttaaatcatttcaaaatgacactactatgtataatacgttattttctatttattgctttcaatacttcactcattttaggacatatattactttattcaaaataaaccatctggatatgtcaagaaatgatattttcatgcaaagtaaaagaggtataaaatgtttatctctatactgaacttgaaatatatgaacttgcaataattgatttggtactaagttatttccagtatcattaaaatagaagagattttattcactaagttgatcttataaggcaaagccctattatattgtactaattatggtagctgagcagcggaaaataaataaatattttcataccaatggatatctggctagttaataccttccatcacttttacttggcaggtcttgccttagcacaaaattgtccctctttctaataggtccaacatatctatcattagtctacttcctctttgcttttgaagatattgttaagtccattatttcctaaaatggaaaatgtttaaatgtcagcatcatataaactcattttaatatttttaactgctagtaaatcatcaattggtctacaaagagccctagttgaatatactattaagtttggatgttgccatgaac

SEQ ID NO: 469820 - DNA, 3977 bp, Homo sapiens
tgcaaggaaaaatatttagaggctctctctcttgcccactaccatgtaacaagtcccttcgctctcttttcatcttctgtcatgattgtgaggcttccctcgccatatggaactgagtcaattaaacctctttgctttataaattacccggtcttggtttcacatcactggggatacctcacaatcatggtggaaggtgaaggaggagcaaaaacatgccttacatggcagcaggcaagagagcatttgcagcttacatctttctcctgtgctggatgcttcctgccctcaaacactggactccaggttcttcagctttgggactcggactggcttccttgctcttcagcttgcagacagcctattgtgggatttgtgattgtctgggaaggtccagaagatatacccttgactaaagctttgcaaaacagatttgtgagtgtagcacctgcatctttgaagagccctgtaatagctcttttctgtgccattaagaacattcatgatacattggagaaggtcaaaatatcaacattaacaggggtttggaagaagatgattaaaaccctcattgatgacttcgagaagttcaagatttcagtggaggaagtaactgcagatggggtggaaatagcaagagaactagagttagaaatggatcccgaagatgatttctctaatgggtctagagtagcttatattcgccagtgcattaagccctacatctaagtaaaagcttttctgacactttgagtattcaataaggttgatccactctggctgatagattttcaatttctcactaacctgaatgtgggttattaataataaagatgctgtatgcattcatgtgtagactttgtgtaaaaatgcatttatttctctcggatgtatgccaaggagtataatgctggtttgtactgtatttgcatgtttagttttttaaaaaactgccaaaatattttcagagcatttttgctatttaacattaccattagcaaggatgcagaatgctgacatctcatctatggccttaccacccttatgtgcctgatgttgtctgacctcagaagctaagcagggttgggtctggttatctcttttgtccctcatgtactggttgcttcgaagagggaatacaacataaaaataggcctagttttaatcatttgttccttgtaaaacttttctgattgacttcttgttcaggatttctctgacctcactgtgttggacctgccttccttcctgatctatcaaattcaagttttgtatttttttctttgtactatacgtatattttctctcatcttttttcccccagacaatcaatctctttacttcttgcaattacgtatgatttaccttgtagaattattaaagaaaattgaatatacatatatggacatgtttcccaaatctattctgatctttttatgtatacatctatatttaaagaaacagcccactatgttgataaatgtaaatttaaaatatatcttgcaacaaggtaggttaaaacttctaactttgtttcttgtaaccaatctctctgaaattctgtataaattttaaaatcatcttttcattctctcttataaatccaactatgattgtaattgggaatgtgtttaatgtatgcatcaacataatgagaactgacataatcatacattactttcaggactatgaacctgaaataagtttacccatgtatattttcttgaatttttctctatagtttcttagtgtttattatatagcacttttatatatgttgtcaaactgaaatatttcatatttccaatagtactataaaatatacttacaatgctactataaaatattttttaaaattatttcatttttaaaatttttctcagcaaagttttatggtttttattatatagcacgtaagcatatcttatttaatttaaacataaatctttcctattaataatcctaatataaaatatttttaaaaattcatttcagctttttattgtgcatatgtagaaatacaatcaatttggtaccctattaccttgctaaattcacatattagttccaacatcttttctataaattcctttacagtgtctgcataactttcatggattctgtaagcaaatataaacttaatttactttgcaaacatatttgccatttatgtatggatttttttgttgttgtttattgcacatgctaggacctccagtataatgttgaatacataggtgctaaattttatcaaatgttttgtgtcttttgtcatgattctacattttctctcttttagtttcttaatatgttggatgttattgcttgatttgcataacagttaaacttaccttttattactgagataaaatgcaatttacttttatatattatcctattaacatgtttctcatttcaatttgatagctttttaaaacaatttgtgaatctatgttcacaaggaatattaatatttagctataatttgtttctttgattttcatcttgaggcctttctgcttgtgacatcttactctatcgaggtaatatcaggttgacactacttttgtaaaacaatctggaaaatatttattcctcgtttattttctggaagagtttttctgagttttgctggtattaattatttcttaaatagctggtgtaattcactgttaaagtcatacaggcctgcagttttatttataggaaatattttaaatgataaatttaactttttaacttgtgtaggtatatgcaggataccttttttcttaattgagtttataaagatttcttggaaagtaaattttatactgttgtttcataaataactagcatgatgaacatgagggctttgaagggttatatattcttattcttttttctaagataaaaaaaaaactctgccatatattagtaatcaggcttcttaatcttgcaggcatacactgttctgaaatagagctgcttcttttgggatagactcagatgtacactggctattaaagtggaaaatatcattttccttaagccagattgtagctataaattgcatttatatttttgaactgaattttacagaaaatcttatacattactatgttgtttggaaagtacttcttctgatcttattttctttatttttactttatgagaactatcctccatttcaaaacatatttttgctttttataacatccaatcgacgatacatgtatccattttctctttctccgtctaatccctaatataaagattcttattccaattcaacactattgcctataacattttctaggcacttttgcatatattgcatcaaatttcagttaggtccccttgatcagttaagcaactcctcaaataagttcatttctttcacttgtgagatcataactctaatcaatggttgacaatgcctgtgctttaaacaatgttccaattcatgttatcttatctgtttacattatgtagccagttacttaatttttgcatctatttctattctaatgtctaattttgaacattgatgaagaaattgcattttcaaaattcttccattataaataaaatttattctacctgcttttcagcctcaaaggttttgacgtatcaatactcaccattcatgtccacttaccagaggaattattaatttgtactaaagtgtgaaccatatgtcgtgcatactcattatctctggaccacaaactataatccatttcaagtctcttctcaagattattttagttcttttcaacagggagtctgaaattactattgtatatatttttgttattgttagttctttaactgtgtgtttgagaacatctctgatattcaatttggtttcagttatgtttttcctcagggtttttgtgaatattatgcaatatattgattgatacttaaatgtaaaaatgtttgagttcctggtataaactcaaatgcaaataatgtatttaatcttttatata

SEQ ID NO: 469821 - DNA, 4067 bp, Homo sapiens
ggagacctttgacttcagaagatattccgtcataaacaacagaaaacaaactaagacagtgtgtctttctcaggatgtcctgcaatattctgaccacgttgcaaagttgctttctaggaaaaatcttcccctataatggaagaagtcacaaaagttggaagtgtgagaacaattccacagaccacttctggtttgaagatagaggtctcatgagaggaaatgcaggatttccaaatctgaaatctgtccgggaactcattttgaaacagggacaagccaaggtcaagaataagaccattcctctaacagacaacacagtgattgaggagcacttggggaagtttggtgtcatttgcttggaaaacctcattcatgaaattgccttcccagagaagcatttccaggagatctcatggttcttgcaccctttccacctctcagtggcctgtcatgctaccaaaaatacagtggacttcctcaaggagatggactcacttggccatcagggtaaacgcaccaatcagctcatccaccagctgaactagacccaggtgccaaactgcagtacatttttatcagtgaagtggaagcatgtgtttttgcttttttgggaatttttatcaagtatcttcagagaagattatttcctgctttagtcttcaaaaactagaaaggaaggatcaaagaaaagacagtaggtcattttcatggcaagcacctctcatcgcagtccagttccaaggaaaaattccagtgttttctacattggctgctgcctcctctgaaatcagcacattccacggaggaaggagtctggctttgttgcatcttgtctcctagtatttaatgttggtaaatgagtaactctagcatttgtacaaggctccctaagactccagcagcagttgatctagcccagggacataattcaatctggagattcctggtgccttgttttgaaaaagatttgaaatacacataggaaaaaaggcacctaaataaatgttcacttgtttctgatgtgaaaaaaaagagatttttataatctgattgacaatgagaatagtgaaaatattgaattggttgggggttgtaagcaaatttttgtggaaagaatgtataaaggaaattagaaaatgaaaagtaaattgacacagagttatatgtttgatttttgagaagaacttagaagaaaattcagatactacattttatgcaaatgatacttctcaacaaagagttgtctttttcttgttggaatgcatagaatgttgtcctctttcctgacattccaatttattaagggcaaagacataaattccatttttctgtcttttgaagcttgaagccttagtgcttattaagactaagtctagtaaataatgctttacctagaaattgtaaataggttagattatttcttggagaaaacaagtctttctaaaaataaaattattaaagaatacctttcagataaactttccttcacctcatttacttttctatttctctatttaattaatttatccaaagaaatgatcattttagtaatgattctgataaattaatttaaaatctttatttcatcttgccttctaattcaactttgattagttctaaatgaattagataaataaaactaagggagaaacatttgcttagccattgatacttcattagtacattgttgttatgttttatttatattacataatttactcagcaaaaattatgtactccagtctttttgtctggaattataacaaaactggaattgtgacagagaactattttatttcatctatactcattaaaagaccaaggcatacaagaaaaactatattttaaataatattaggtttttataatttgggactaaagatattcaataataaatttaaaaaatatactttttatctagattttaagacaaaagtattgtccactgtatatcactgcatgaccctaaaagatttctgaatccatacaactaaaaagaggccaaatatcaaagggatatcaaatacgatggcagctttttctctgccattactgacaacagcttccaaatcttttcagccttaaagctttggagatcaaagaactatcataaaggctcctgacacataagtgtgatctctttaaacattatactaatccaggcaagaaatatacagtgaaataacccatgttcctatattcagtgttttgggtagatatacctgcttatttaagttgcatcactgaggagttttcaagaattcacctcgctacttatttacatcatattattgagagaaaaaaatgagagaatagttttgagcacttcatctgcacaatcaccttcacatctttttgtcctatgcttttctcacattttaaaaacaaaaactgaggctgacaattatgcccttattgtcgattttagtattatttatgtgttagttatgttttattatttaagctaattttacttccaatttacaaatatactttgaccaaattccatgtccccttgcccagttatagtccatttctcaatcctgagttagtactcacagtttataacccgtttgcctttatcatactctccattttcttcaaataccatatgataccatatgtaaatgttagattttctaggttcttgcatttataaaaacattttcgtggcctccatttatgaaagagaatttggctggatgttaatttcgtgtgtcataaactttgttatttaaagatctgataacattcttatataaatattcccgacattcttatataaatattgttgagaaatcagcaatccagtacttgttatttgataaaaaaaaaattttacttgacatattatgatattttatccaactatgtaaaaatgtatatgtgatatatttccaggccctctaaagatctcaattgcttttttcggggaaatatagtaataattgcttctttaaaacgtggctccttaatcatcttggaaatatttggtttatagctttcattgtgattacacttactcatttttccaaagtgcctgcgttcttatgttagagttctgcttttttacgtatatatcacctcatccctccttcttttcaaaaagattttctacttgcatttagagagatctcttctgcatgttcctgattcatattttatctatcagtattaattttacaacttatatcatgttttttaaattttgctgttggactttttagggaaaaaaaagctgacaatcatttttatgctcacactacctaatactgtgcttgctgcttataaaaagaataagttaaatcattagtcaattgcttgagttcctcatacctaacttaaaatagcatactaagaacaacattatagctagtttccaatgatgccaacattttaaaaatgtatacggtatacatttatataaatgtataatttcaaagtgtttgcaatattgcaataataatttcaaagtgttttctgatttcttttgatttgttcttgtgccttttgtaccactgaatgcaatttttatttaatcctgcaaaaatattgcaggatgttgctgcaatatagcacttcattgcaaaactcttgacttcatgtttgcgccataaccatttaacatcccattcaaatttgaagattgtaacttttaaaatgtattagctgtaataaataaagcagaggttcctttttatttcattaagcaaaagcataaaaagacacgaagtgaatccaatttgtgtggttcctgttgttatattctcagaaatagtcattgcaaaagttttagtgagtatacatttacttccaaatggtttaagtagtagaaatttaagcaaaataaaatacttaatattatgttccttgctaaggtttctatttgttccaaggtataaaagcaatacttttaaacctcattggaaattctgaaattttgattcattctaaaggagcagttaaacggtgtcgtgctttttaaatatagaaaagaacaggattataataattacttttcccgatgatattcagatgtgtgcgtttaggaagacaaattatttcac

SEQ ID NO: 469822 - DNA, 785 bp, Homo sapiens
ttcatctttcatcttcatgacatgacactttatcacatagtgcgacacctgctgcaggcatggcttttcttgcaggtcatcccaccaagtgtcaagctctcagcagagaggagacctgtaacgggtagtccctctctacaggcaggtcatcccagcaagtgtgtagctcttggtggagagaaaatccgcagggagagttcgtttctgcagggaggttgtcctgacaagtgtgtgagtctgggtttttttaatgtgctcagaatggaggaagtatatgttgattggtctatgggcggccacaagtttcaggccttccctggcttgaaggtggggtttcactggggactcgccgcttcctgcctaggaacctgtctgcctttaacatgccatcagtggtgtccaggctgtccatgctatgaggatcctgcagtccaggaccaagctgccttcagcaacccctggaccccctaccaagctgtttcttaaattctaagctggggtcatgtatttggaagttttccttaggtgtttcttgctgttgttaatacagtatacatatacacacatatataaatgcatatacatagttaataccttaattatctccaaaatcgtattttatttaccattaaaggggacaccctaatattctttaaatacttttgtccttactgcattatttatctaaatggtatgttatgatcttttcagtagtaactcataataatttgctctcatttagtttgcaggaaactttaaaacctaagtaatatttttactatatt

SEQ ID NO: 469823 - DNA, 991 bp, Homo sapiens
tacaaagaattgcaaatatgctagaaaaagaacaatttcagaagagaaaatattcaggagagcctgttgttaccaggggtccttgctcccagagctctcaagatggtggcgggccacttccaaaatggcgggtggcttccaagatggtggcaagactcacgttctctgacctggggttcttggcctcacagatcccaagtattagaatctggggccatgctccctatcagaagtggcaatgggtgcgtcactggatcagaagcacagcagacaccctgccggatccagagggatggaagttagcagtgggtctacaacggcggcaaacggcagtggtggacggcgagcgaaagctcagctcgagccgtaacaaacacagaccagaagatagttcagttgcaagatttaatagagtgaaaacagagctcccatacaaagggaggggacccaaaaagggagctcccacacaaagagaggggacacaaaaagggtagccattgccggctagaatgcctgggtttatatcctgatcattttccctctgctgtgctctcaggcgatagatgattggctatttctttacctcctgtttttgcctaattagcattttagtgagctctctttactacctgattggtcaggtgtgagctaagttgcaagccccgtgtttaaaggtggatgtggtcaccttcccagctaggtttagggattcttagttggcctaggaaatccaggtagtcctatctctcactgtcatcttagaacagagagatttattacactgttcttttcaccttgatcacaagttatttctgcataagatggttatcttcccatttcctttgttaatgggaaatatactgtaatttttttatatgatggtttggttttcatattttatttatttaataaattaatgttatgctatcattcaattatttttcaaatctatttatagaaattcacattctggggttttaaaatctaaaaa

SEQ ID NO: 469824 - DNA, 1891 bp, Homo sapiens
ggtgatcagcctgacgtggatggtttacaccatcataatgtggcaatacatcaaggctttcctcaattcactatggttagatgctgctgctgacgcgacccaaactgcagagctgaagcatacatggcctttgggagaactttgcaccagccgtgcaaagtattgcaacctagttggagttgtaattgtgacttcaaaagaccattccactgttccatcaatccagctgcttcaggatgatggggaaagtgggaaagggtgcaatataatcaacctgccaccaggtagctggctgatcacccagaggaacggtaacatattgagggctcagcgttggtctctgctgctggcaaattgggcactcagcagtggttatagccaggtcagccttgtcgctgatcatccagccaaaccactggctacagcccatgaatccttatataatcgcacatctggccatttctccttccatgcaaaatgcataaccagatgcactgctcaaagttctgccaactgggaagatttcctttcactgctgttcttcagggatgtcctagaaaggggctgtagtgcagctgctgtccactttcgggtagtgcctgcatattgtgcagaatcatctgtgaaccagatgtgtccagagttccttcctttgggtgtgttcatggtcttgctgacttcaggaatgaaaccacagaccttcacagtgagtgttacagctcttaaaggtggcatgtctgaagttgtttgttccccccctgggtgggttcgtggtctgacttcaggagtgaagctgcataccttcacatgccttcaataaccctagcccctaaatattatttatttccttacattcactggtagtgttagtaaatagaaaagtcatatttttctgaatattggttataacttgtttggctataatgtatccaacacattttactgtgatatgaaaaaaataataaaattattatgtgtcaatttagaatctgctttttcccaaatttattgataatgcttttctgaaccccttcaaatttaactaaattttaaagatatacctccaggtagtacataatcctgaatatagtggaatatctgcaaacacaagtctttgcaaagaggcctgagtttcagcaattttccatggcacctctaaattttgaaaaactcattgtataaatgaatgtgtttatccactttcctactctaagagtatctgctaaactgaaactgaactagcttcctactaagcaatctagggcattctgtatataacagaatttaaacaaaccaatcttttgcaataatctgcacacatattaattttctctgattttatctgccctataacaatactcaattaacatgggcttggtactttgagataatactattaagtagcaattctttaatgagatccttcaaataattgactttccttgacgaaaataattactgtagaacactgcccaatcattctgggcagtgaaaatgttagatgaaactgccactctagcataggttatttcacatctcaataatgaaggataaaaaatggctctcagctaaaattttgtaggtattgtagaattataggagctaaagctattcaaatcagaccttttgtcttttaatcagctagtgtaagacagaagttgcctcatactgccttgcagcctctatctcctggtttcccaggatgcactaaacgtgtagttcaatttaaagtagttaccagtcactggctgaaaccaccaaatcatgaaccaaacctttaagtggaaggagctagtccctttaattctggcaacttttgatagattagtagtgttgaataatattcaatagcagtgtactgttcagaaattctctcatctccaaaaccact

SEQ ID NO: 469825 - DNA, 1695 bp, Homo sapiens
aacctactggcagagaagagctacgcacttcaatctttctgctaagagctgcagagacgatgggatgacctggctgcagagaggagccacccactccagggccttctttttgctgacagctgaacactcaaggggacaacctgcctacagagatgagctaccaactgcaggtcacctctcagctgttctaacactccatcaagctccacgtcatctagcacaccctccacttgtctgcatactttattcttcctggatgcaggacaagaactcggccaaaggcaccacgggacacagaggtttccagccagaaaagcaacaccccaaagatcctggagaggaagataaaggaggattttgcagtcatcgcacagtcagattttacttttccactcctaactctctcctgcatcatcattccagggtccatacaactgcaggagcctttcaggttccctcaactgaggggacctccgtacccatgctgacccttcgctgaggcacaactctatgaggatgctggctggattgttgctctctgtcttccaggtaatagctgccaataggcatccccagagggagatcagtaggagggaatagagtgaggtcaaggaatctggttttaattttataaaaaacaaggcatggcaagaaagaggatcaaaatgaaaaaacccagaagaaatgagtaagatagcaattcattcccacaactaatacatatattcaatttttcagaaacaaagtttataattactttgataagactgttccttaccttgtgagaaggaacgaggtgcccagtttccagtcagtgaggtcactgaaaatgcaggaagagtataggctaggggaaagcaaatttgtgcaggaaatcttagtggaacagcattatgtggagtacataaagtatatgcaaacgtttaaaagagtggattagtattgtattgcataatgtaaatctaaatctatttatgtaatttattatttctttgtatctttttaggcaataatcacatttatcagcaaaaagcccacagagtttaactaaaagaaataataaaatttaacataacatttaactactgactttaatttactttggacatttttcatgaatttgtaactagaaacaaaatctttgagaaagttattcatgttaggggttgtaccaataattctgacaagatgaaaaccaaataacaccagactaattaagaaatgccatcatttacttcaaaagtaaaaaatgtatttaaagaaaatgtgcccaaaagtgatgctttcacaaggtacaattatagaaagtacatttctatttctgtgaaccctgtcacagaaatataatggttatctattctatatgtagttagaaatacttttatctaaatctcacaattatacttccatattaatattgctcatttttgcaagtatttggcacatacatgcaaagtgaagcaataattatgtattgactttattatcagaaaccttccacaaatgactagttttacatcaatattatcagagaattcagaatgaaaatcagtaagaataaatactaataaatgttttgaatttttaatggaatttattaaatcaaagtcaaatttttgaaagttcattttgtcaaagtagaaaatcttcattattataattgtactttacattcagttactattttaataatgc

SEQ ID NO: 469826 - DNA, 801 bp, Homo sapiens
tgagatgagataccatggaaactcccattttaaaaccatcagatctcgtgagacttattcactatcatgagaacagaatgggaaagacccactctcatgattcaattatctaccactgggtcctttccacaacacatgggaattatgggagctacaagatgagatttgggtggggacacagagccaaaccatatcaggccattaagcaacccccaactttatcagatatcaaaatagcacataacattacaccataccagagggaaggtatagctctgcagacttggcaggaaataccccaagccatttcagactcttattctcagatactctctggtgcccaagataattttctggatgaattctataaaccagtcactgctcagaatagtgaccagctaatagttttcaaaagatgttcttcaaagtcttgaaccaatatgtctctcaccttttgccaagcaactttgaatgtttattggggtgttgagacatgcttttgattttctgacactttatatctctgccttagccttcacttcctactaacatagagcattaaagttagacaaatagaaaaagttttcagacattgttggtttttcatgggcaatgaaaactcttgcacatgcccatggctttctagatcccaaggaacatgttagagcttttgaacactaactagatttacattatttcccagattttgtttttacatttttgtctagtctcctctttatttcatccagtatcacagactaaggcaactgtgatattaaacaatagcaactgatttatttg

SEQ ID NO: 469827 - DNA, 1453 bp, Homo sapiens
accacatctgaaacatcatggctgggcaggcctcaggaaacttagaatcatggcggaaggagaagcaaggcaccttcttcacaaggcaacaggaaggagaagtccgaccaaaacctaatccagagcaaggcctaagtatcttcaactctatgaaagccaagagagatgataaagctgcagaagaaaagtttgaagatagtggagaaggccaaaatatcaacattaaaaggagtttggaagaagttgatcccaacgttaaggacaactttgaggagtcaaagacttcagtggaggaagtaattgcaaacgtagtggaattagcaaaattcctaggattaaaagtggagactgaagatcatccctctattcatatcaaggcatcaagtgatggcgttgagtctgattacacagccaggcctagagctacgtgacgccagtcattttattttctccttttgtctccccatttggttcagagatgagcatgtgacacaaatcaatcactctgaatctcaggatatattttgtgtaagattattttggtatttctctaaagttgcaatatgtaatatattcatgattgtgagttagttgtaattttttctaatttccattctatttgatcatgatttctatttaattttctattttctatttgatttatggttgaagaaaaggatcatccatactgtgtacactattttaatcatattttgacacataacttatttatattgtaagaaataagtgtgttctatcacataaactctaaatattgcacaagtaattttcacaagcatgtcatatgtttttctgtaactgttgctttcagacttgtacatagctaagagattaaaaatttaaaaactttaattccgtttagcaaatttgctatatgtctgtagctttttgttgttgctgttgtttaaattaggttgaactgactactaagacatatcagatgtttcattttgatgatcaattggtctatgattttatgtataaaataagactaggcttttagctataattatttttcttgtgtaaattactattcatataggaattctttaggtttgtgtatttaggtacgtattcaatctctttttttaaaaaaggctggtttaagaataatttcctccagaaattatttatatttgtttctgtcagaaatttaaggtcagccacctgggaataataaaccacatgtttaggctgtttttctggaaaacgtatattacatgaatttagtgtaacaacactttttatctctggtttatgttgaagatttcttatgtgagatgtttttccatttatttttgcattttatggtcagttccaaagataaaattctagtaatccagtgatggttagggaagtggagacaaagagcttatagacagagttaattcaaatttataagaaagtagtctttgggcaccagactgtcaac

SEQ ID NO: 469828 - DNA, 949 bp, Homo sapiens
gtaacacaaacagtgatgaaacatgcccgtcattcaccatattgtgggtgacaagaaggagaaaagagaggaggagagaaaagctgtgggacttcagggaccccagataggagctccccgaaccagggtggtgataccagccttggggctctgtggttcctggtatctccaagcttctggacactactgtgtttcttggtgcctgaagtggaagctgcctggtccggccacagccttgcagggagccagcacccatgctggtgcctggagctgcctgccccgccacagctgttgtgcctggctgtgcgcagtggcaggactctgtgcatgctcgctcactcacccctctccactctgtgcctggctcgcccttggcagttgtgggatctgggctggtagcatgagccaagtgcagcttgccaggccaagtgggtggaataagcccaataggcccaagcaaaactcaggcaaaggcaccaccagccacacaggcttctggctggtgaagagacaccccaaggaacctgtgacagtatgcttttacctaatctatattcaccttctaataacagtattccattctaggtaccttatataacataattccagtttattttgcgtattacttatgacattgctgtcactcatattacatgtttaaatgcaacaatcactcaatggagtgttattgttacaacattaatatctccttagagaggccttatcttacagttccttccactgtaatccactgttatattagagtcctgttgtaatgtaaagttataggggaaaaatggctttatatttttattgttaaacctcgttcttttggcatgtttctctgggctgtgaacttttcaaatgtttatcagctatttttttccctttttgtagccagttttgttgctgtttcactgattgtttcattttcttcccctaagcaaag

SEQ ID NO: 469829 - DNA, 595 bp, Homo sapiens
gggccacaggtcttcaggcctgaggcttgagcggagcgttgatgggggtgatttaccaggaaaccagtatttccctgtctccttgggtactgtgctgcttttgcatggtagtgcccttcctgttactagaacttccttcccctggtgacatctatcacagatgggctgtctcaggcaggatggggctacaggatggagaaaccacttcagctattttaagcagaaagaaatttactactgaaagattagattatccaggagataatcaactaagagtcaggcaccctttcagttctgatgataaacattttacaacctgctctctctctgaagtctgctatctgagagattcctctggacaatatgaaaaaagagacattacaattgaaacaatagaaatacaaaggattataagagaccattatgaacaattatataccaataaattgggtaacctagatgaaatggacaaattaccagacacatacaacctactgtgattcacttatgaagaaagagaaaatattaatggagcaataaagggtaatgaaattgaataagtaataaaaagacccaggacctgatggctttacta

SEQ ID NO: 469830 - DNA, 496 bp, Homo sapiens
gctctgaaggaaatgtacaaaaagattaatgatgtgttcatgcccactaacagaacattcattctacagcccatggctcaaggagtaattttgatcttcaagccccagagagatgccttgctttttccaccaaaagaagacgcagctaaaaggcaatattatgaaccagaatgtaggcccctgctagttactgaaatcttttcatgccttgatcttggacttctcaatctccagaactacaaaagtggaggaaggtgccatcagacaagaaatgcagctatagaagctgcaaaaggcaaggaaacagattacctcctagagcctgaagaaagagtgaagccctgcaggggacaagaacccagaactcgccaaactgtgggagcaaaagagctgtaatgcttctgattgctgagctgtgatctgtaagaaagagctcaattcaacaacttacccttcaccttagaaagcatatctcaacatatcccatactacggtg

SEQ ID NO: 469831 - DNA, 705 bp, Homo sapiens
taaaccagttccaggtaacaaagctggcgttggcttggagctgtgggaagggggccaccgtcctccagactccagaatggtagatccactaacatcttggcaccctgcacctggaaaagccacaggcactcaacgccagcccatgaaagcagcaccaggggctagttgtgaagagaggttgtcctatcagtgcgaggaaaatgatacggtgctacagacagctgtcaaggaggtggcaataagagtgattaaaagggctcaggcattggtacacaacgtgtttgtggttatgaagatgaggtctttggagtggaagcctgtgaataaagatcttcaacctgagaacttagtggaattctggaagttaaaaccttcaaagtgtgaggcttccactaagacagctgaccgaggagatttttactctcacttcagcccatatttagcttccaacaattcatcaaaattacagttaagtgacccaaccagtttatgggtacaatgaaatgcttttaatcttttattttgttttcacaattgttatttaacatataaagttataagttcaaaattgttatttggaacccttgatgtttattaaattttaagttgatcttgcaaaataatctcattgtttgccctaaaataatcttgccaatcatttctaggattatcagaataattttttgtctcacagactaaaatatc

SEQ ID NO: 469832 - DNA, 586 bp, Homo sapiens
ttatagctccatgactgatcctgcagagcagtgcagctaccccatagatggagagaaagggcatacatctgaccctgaagaagtgaaaaatagccatgtggtgaactgcttgtgggaggttcaacaggttggtgactacactagacctgtgggatctgtgggcagcctacatttaatagtctgtaataatgtggactttcaaccatatagtcaaaagaaatatatgtatgtgtgtttgactgtgtttgtgaatatgaagataaaacagggtagttctatggaccccttcatggtacttgtgaagaggttgactcatttacgcagtccacagctctcaacccctcatgggaacgggaacacgcagcctccaaaaattgctagagcacatcagccattcaatattcgattggttttgcttacttctgatgatctacagagctatcagagctttaagcttcctggagggaaaaaaaagactcatttttataagttctgaacagaactaatcaattctttattttgttatttggaaaagtagtctaactagtggcttatctatttgatagataaggtttggctgtgtccc

SEQ ID NO: 469833 - DNA, 771 bp, Homo sapiens
attagttaccatcaatgtctggtggcattcccagcaccagcatctctgggctcactcagaggatgatatgttcaaagagctgaaggacaagaaactgccaatgaagaatactgtgtccagcaaagaaatctgcataagtaatgaggagccaaatgttaatcatcaagacaatgggaaaaatatctccagggaatgtcagagaccttcatggaagctcctcccatcacttatccaaaggcttaggagcaaaacttggtttcttgggcccagttcagggcccccctgctctgtgcagcctcgggacatggtaccctgtttcccagctgcttcagctccattcttggctaaaagggaccaagatacagctcgagccattactacagagggtgaaagccccaagtcttggcaacttccgtgtgatattgagcctgtgggtccacagaagtcacaaattgaggtttgggagcctctgcctagatttcagagagtgtacgaaaatgcctggatgtccagggagaaatttgctgcaggggcagaaccctcagggagagcttctgctagagcagtgcagaaggaaaatatggggttggagccaccacacagtgtccccactggagcactgcctggtggagctctgagaagaggtccacagtcctccaaacctcagaatgaaacatccactgacagcttgcactgtgtacctggaaaagttgcaggcactaggaagtgtcccagtggggactctgtatggggactctgaccccacatttt

SEQ ID NO: 469834 - DNA, 653 bp, Homo sapiens
ttgctcactcaccatttccctatggtagggagcctccctttgttccatgccaatcccagtaataagtggctcttattgctacttttggcaaagaagatgaactcagataaagctatgtgggctactttgaagtttgtatgttccttttcttcagaaaaacaatatccagatgaggtaggattacatatgatccagagacctcaggttccaagtcaatattttgaaatgcaggacactgttataaggattatcagttgcctatccaatatcatttctcctcatcttccattgacattgaatcactctgctattaggaacgccctatgctcaggcacccatgaagatggagagaggataaatagtgaaaaaggaaatgagttaggatttttggtaaatacctttaaaagaagttgggacagctggagaggtttacttacttttccctttgctgttgcttttcgtgtctggaattcagaagtcacaattaggggtcctgtagtcatatgatgactgtcaccagcccgttggtagagtcaatattctaacacaagaagcaagctttccaaacttgcattcttaagctccaatcttttgcttattgttcttgtgcaaatattaatcttacaacttgagactagaaagaaatgtatttc

SEQ ID NO: 469835 - DNA, 598 bp, Homo sapiens
cacttgtttatctgctgaccttccctccactattattctcaatgtttggtaagagacatgcttagattgtgctgttcctacaacgcaaggccagataacactttgaccaacttcagaaaaagtggaaaatttggactctacacagatacttcatggaaacagagaatacaggtacctccagagatcctcagatcacatattaagaaccactggattagaggaaagatgggcgctaattataagactatgataacacttgggctgttagccacaaacaatagcatgagtgatttacgccttaaggacatgttcctgctgcaggatcaagaaaacattctgatgtttcaggtttcacatccagagaaacaaattccctatggatatagaagggaaacagaagttcttgcagcttctcatttatttaccagcgaaaggaagcaagtgggtgactctaccagaaaatccagagacacttcccagctaggaaggatgatcaaagaatctgagagttgaaacatcttctaataaacattcttttgctagaaaactctggaacagaggcaacaagtatgcatttcaaagaagtctaaaaattatg

SEQ ID NO: 469836 - DNA, 1143 bp, Homo sapiens
gtactcttttttatttcaatgcgtttttgggaaatgggcacacagtgcaagttatcagtggatgtaccattctggggtctggtgaatggtggccctcttctcacaactccactaggcagtgccccagtggggattctgtgtcaaagcaccacccctacatttcccttctgcattgccctagcagaagttctctatgagagccccacccctgtcctgtctggacattcaggcatttccatacatcctctaaaatctaggtggaatttcccaaacctcttcttgacttctgtggaatatgggccgtccaaatgcatgggtgtttttgctcaggagaagaatgatagtgattcttctgatggatctgggcaaagtgaactgaaagctgtgtggaaagaactcaccattccagatgtgattaagaacattcgtgattcatgggaggaggtcaaagtaaaattaacagaaatttgcaagaagtgtacttcagcactcttggatgactttgaggaattcagtccttcagtggaggaaatgactgcagatgtggtggcaataatggaaatcaaggtgactaagaatgttgatggtcaaaggggaggagaaatggtgcagtagcttgttgacacagtactttggagaaaaccttgtgagtgtgttttactaaagaacactagtgtaaaataactactgctataagtacagagccatataattgatttttctcccttttccaacttgcaagcatttggaaagatccagtgattgattaaaaaaggttgaaagcatattaaatagggtccacttctattataaatgaaagatttgcttgatctttactgctctaccagtagcattttgattgacacgtagaattgtgcattgttatggttacaatgtgaggttttaatatatgtttatattgtgtattaatcaaatgaaggtaaatagaaaattaagtacttcaaactttctttgtggtgagaacactgtgaatcctctcttctgttttgaaatatatgatacattgttgttaattatagtcatcttactgtccaataaacaccaaaacatattcctcatatttaactgtaactttattttctagtttatttgcatagaggtgtttatagtattctctgatgg

SEQ ID NO: 469837 - DNA, 789 bp, Homo sapiens
cgggacacttgacacctgaacaaccaatgctcaagagacaagtgttggagcagcagatctgcagctgtttcccaaccatcgctttcaccttcatcactattcattgtttgggacagttcccaacaccctatcccaagactctggaagccctccacgtgcagcttactctggtgcacaatgatgtccactgggagctcaagtgcaactccagagcaggtggtcacggacaggaagctcaacccagtgcacaccttgaacgatttatagatagttttaagatgggaacaagagatggaagtttcttagcttcttcaggatttttgcataattggtttaagagttgtggagatcatccaaaaattaaatgtgcatgcatgtgggtgttcagcatctactgcatcctatttcagatgctgacagacagccacaagacaaaggggaaattagcctccaaggttccggctcaccatcccaagcagaatttaaaagggtatgttcagaggagtgccctggcactgggtcaatcctcaaagattaagctcctgacattcaacaaaatacctgtcaaaacactgaataaacaaaggtagccttcaacaatcaagataatcaaaccttgagaaagagagataatctgatatataatgctatcaaattgtaatagtccaaagttcattaagaacgaccagaaaaaaaaaaaaaaacttaagctacaatgcatataaaaaatagtgtaggcaaataatttctgactaagccctgaaaaacaaaacacaagcaacaaaacca

SEQ ID NO: 469838 - DNA, 1704 bp, Homo sapiens
acagagagccaagcagcagtgcatgctgcctatatacaaaggcagatactgtgtgggtaagcggaagcgcttccgcctctgcaacctgcaggcctgccccgctggccgcccctccttccgccacgtccagtgcagccactttgacgctatgctctacgagggccagctgcacacatgggtgcccatggtcaatgacgtgaacccctgtgagctgcactgccggcccgcgaatgagtactttgccgagaagctgcgggacgccgtggttgatggcaccccctgctaccaggtccgagccagccgggacctctgcatcaacggcatctgtaaggtgtgcctggttaggaagaggctctcccagcactgcctgcccccagccccactggcgggccccagaacgtggggctgtgactttgagattgactctggcactatggaggaccgctgtggcgtgtgccacggcaacggctccacctgccacaccgtgagtgggaccttcgaggaggccgagggcctggggtatgtggacgtggggctgatcccagccagcacacgtgaggtccgcatccaggaggtggctgaggctgccaacttcctggcactgcagagcgaggacccggagaagtacttcctcaatggtggctggaccatccagggcaactgggagaacctcacgtccccgggtcccaccaaggagcctgtctggatccagctgctgttccaggagagcaaccctggggtgcactacgagtacaccatccacagggaggcaggtggccacggcgaggtcccgccgcccgagttctcctggcactgtgggccctggaccaagtgtacagtcacctgtggcagaggtgtgcagaggcagagtgtgtactgctcggagcggcaggcagggcccgtggacgaggagcactgtgaccccctgggccggcccgatgactgccagcggaagtgcagccagcagccctgccctgccaggctaagcccctcaccctggcttcccctgcagtgctcagtgacatatgaggaagggactcagcaccgaaatgtcctctgcatcagtgacaccggtgtcccctgtgacgaggcccagcagccagccagcgaagtcgcctgctctctgccaccctgtcggtggcccctggacacactgggccctgaaggctcaggcagcggctcctccagccacgagctcttcaacgaggctgacttcatcccgtgccacctggccccacgcccttcacccgcctcatcacccaagccaggcaccatgggcaacgccattgaggaggaggctccagagctggacctgccggggcccgtgtttgtggacgacttctactacgactacaatttcatcagcttccacgaggctctgtcctacgggccctctgaggagcccgatctagacctggcggggacaggggatcggacgcccccaccacacagccgtcctgctgcgccctccacgggtagccccgtgcctgccacagagcctcctgcagccaaggaggaaggggcaacgggaccttgtgctcaggcccctgtggtggtggcatccagtggtcacacactggtcaagtgtgtcaacacccagacggggctacccgaggaagacagtgaccagtgtggccacgaggcctggccttgtgagctcccggctgtgtggcaccgaggattgtgagcccgtcgagcctcccc

SEQ ID NO: 469839 - DNA, 902 bp, Homo sapiens
gcccctgccctgttctataaatagctatatatatatatgcagttacacatggccgaccgcctcgcctctagcactaagaataagtccctgtgctgtccttttggagtcttgtggtccagcaagagaaagctgtcccctgacatcgcccctccaaagtgtgccacctccagtgagactccctgtcatgcccagcctgtggacagccagcccccgccatccctcccaccctccaccaagcatgggggtgctgtgcaggcagccatgtggcctgacagtctctaccagtcctgctgtccctcggctgagaatcaaacccatttccggatgacggagaatgtgtgctatggcagtccccatgaaatccaccaggtgtcaccaggcagcatacaggtaacaggcctggaaggtccccaacagcccagctggacatgctcagacactctggggctcctcattcagtgggacaaactccaggacccagtgaaggaaacgggaacacaccaggctgagcagggtcttgctaccctaatggtaaagggctgactgggaaggggtggtagggacatggtgggggcggagagtccagacccacttctccaggcttatgctggaaggggcctgcttttatttatttttatttatatcccgtgactttttttaatcccataacttcttttccataactttttaaataacttttcatacaattttttctactttttttgacacacttttccacattttttatcccgtaactctttcatcccataactttgtttgttcttttaataaacacacttacatagttacaattttgtaacaataaaaacagattatctcatgccaagcatgcccattatttgcatgctatagtatttaatactgtagttttcaagacacac

SEQ ID NO: 469840 - DNA, 2318 bp, Homo sapiens
agcaagcagcccagtccctgcccttgccaatcaccccagggtgactttgggcaggtgactcctggggctccctgctccataatcagccctcacctcctgccaccccaagcccaacctccctgggctctttgggcttgcgtctcccaggacctgggtcccccagccccaggccctgccctcaccagtcatccctgggtggctttgggctggtgactcccggggctccctactgcagactctgccctcccctcctgctgccccaagctcgacctccctaggcttcttgggctggcgtctctgaggacctgggtcgaaaccgtgtgtttccctcccccatcgtggagcagcgactcgggcatcgcgctgatgtggtcccctcccctgggaggagtggaatgcaatgatgtcacatcagcaacaggtatctacggggagggccgtgcatcctctactaccctggaggatctggagagccagtaccaagaactagcagtggccctggattcaagctccgcaataatcagtcaactcactgaaaacatcaattcactggttcgcacatctaaggaggagaagaagcatgagatacatctggtacagaagcttgggaggagcttgttcaaactcaaaaaccagacggctgaacccctggccccagagcccccagcagggccatctaaggtagagcagctacaagatgagaccaaccacctaaggaaggagctagagagtgtgggaagacagctccaggctgaggtggaaaacaatcagatgttgagtctcctgaacaggagacaggaggagaggctacgtgaacaggaggagaggctacgtgaacaggaggagaggcaacgtgaacaggaggataggctacatgaacaggaggagaggctacgtgaacaggaggagaggctgtgtgaacaggaggagaggctgtgtgaacaggaggagaggctacgtgaacatgaggagaggctgtgtgaacaggaggagaggctatgtgaacaggaggagaggctacgtgaacaggaggagaggctacatgaacaggaggagaggctacgtgaacaggaggagaggctgtgtgaacaggaggagaggctacgtgaacatgaggagaggctgtgtgaacaggaggagaggctacgtgaacaggaggagaggctgtgtgaacaggaggagaggctacgtgaacaggaggagaggctgtgtgaacaggaggagaggctacgtgaacaggaggagaggctgtgtgaacaggagaagctgccagggcaggagaggctgctggaagaggtggagaagctgttagaacaggagaggcggcaggaggagcaggagaggctgctggagagggagaggctgctggaagaggtggagaagctgttagaacaggagaggcagcaggaggagcaggagaggctgctggagagggagaggctgctggaagaggtggagaagctgttagaacaggagaggcggcaggaggagcaggagaggctgctggagagggagaggctgctggacgaggtggaggagctcctggacgaggagctggagaggctgcgggagctggagaggctgcgggagctggagaggatgctggagctggggtgggaagccctgtacgagcagcgggccgagccacgcagcggcttcgaggagctgaacaacgagaacaagagcacactgcagttggagcagcaagtaaaggagctgaagaagtcggtcaagaatgaattcgagtgaaggaaagctgtgtgacacctggcattcctctgtgttcatggagcttatttgaggctagaagatggattttaccatctagacctctctggctaatagctagtcttcaaccatctgacataggaatttacttcttttccttgaatggagaacactttaaaaataataacaaacattattataaactaatatatgtgagagtacttagttgaaacaaaaaggagttttagtagacagtattatactacatttgaaaatcaaggagcagtttatgcaacgtaaaatgtttacaaactgcagcgcaatctactgtttgtgactgtcaaagtgtcatgaggaaagtgtctatacaatcacagagttatatttcctcacaaagttctttacgaagagtgaaatatgtttttatacctctcagtttcagttagaggcatattttgtgtaatatttatggcttaaaatggactaaaggtcctgttcttgccttttctgaacttgccgcttttgcattctttgagttcagtttaaagacacttactttaactccattttaaaccctcgggctagaaatc

SEQ ID NO: 469841 - DNA, 4921 bp, Homo sapiens
ccaggagccgccgccgcagctcacgctccactgcaacatcacgccaatcgtgtttaaggagaaactaacaatgaaaacggactcgttgatggaggaaaagttggaatgcagcctctggtgctgtttgagcgatccctctaccccgggtcgctgctgtgttctggaaaggcgcattgtaccctggatgcagcaggtcggggagccagacctgggagggagactcctctggggcccaggggaggtgagtcagagctggcagaggcctctggctccaggaacctccaaggaggagacctgagttgctgggaatttctgggtctgacctcctgccaagtcaaggtctgggctggacacaagaaccacccggaggtgactgtggccatggctctgactgacatagacctgcagctgcagttctccatgtcccaacccgaagccctccttctcctggcagcaggcccagctgaccacctcctgctgcagctctactctggacacctgcaggtcaggcttgtcctgggccaggaggagctgaggctgcagaccccagcagaaattctactgagtgactccgtcccccacaccacagttctgactgtctcagaggactggcccacattgtcagtcaatgggtttctgaatgcctcctctgtagtcctgggagcccccctagaagtcccctatgggctctttgttgggaacactgggagacttggcctgccctacctgaggggaaccagccatcccctgaggggttgcctccatgcagccgctctcaatggccgcagactcctccagcctctgacccccaataagcatgagggctgtgctgaagagttttctgccaatgacgatgtggccctgggcttctctaggtcccactctctggctgccttgcctgcctggggcactcaggatgaaggaaccctggagtttacactcaccacacagagctggcaggcacccttggccttccaggcagcaggctggcatggggacttcatccatgtggacatatttgagggccacctgtggtccatggttgagaagggccagggtactgtattgctcctcaacagtgtgcctgtgactgacgcacagccccacaaggaacaccgctcaggcctgacaccaggggctgccaatgcctccctgctgggctggctgcatggaagacctcagtgtcaatggctagaggcgggggctgtgggaagccttgctgacgcacaacatggtggctggctgcagactggaggaggtggaggagcccgcttcatccacgatggccctgaggacacctctgaccagctggtgctggaggtgtcagtgatggcttgggtgcctatgccctcatgcctgcggaggggccaaacagacctcctgcccatccaggtcaaccctgtcaatgacccaccccacatcatcttcccacatggcagccttatggtgatcctggaacacacacacaagcctctggggcctgaggttctccaggcctatgacctggactctacctgtgagggcctcaccttccagctccttggcaccccctctggcctccccgtggagcaccgagaccagcctggggagccggtgactgagttctcctgctgggagttggaggccggcagcctagtctatgtccactgcggtggccctacacaggacttgacattccgggtcagcaatggactgcaggccagccccccggccatgctgaaggtggtggctgtccagctggccatacaaatccaccgcagcacagggctgcatctggcccagggctctgccatgcccatcttgcctaccaacctgttggtggagaccagcgccgtggggcaggatgtgaccgtgctgttccatgtcaccggaggcctgccgttcagggagctgcagaagcagggggctggtggggtggaggatgctgagtggtgggtcacacaggcgttccaccagcaggatgtggagcagggccacgtgagatacctgagcactgacccacagcactacaccgaggacaccgtggagaacctggatctgcaggtgcaggtgagctgggaaatcctgagcaatctgtccttcctagtgaccatccagagagccactgtgtggatgctgcagctggagccactgcacactcagaacacccagcaggaggccctcaccacagcccacctggaggccaccctggaggaggcaggcccaagccccccaaccttccactgtgaggtggttcaggctcccaggaaaggcaaccttcaactacagggcacgatgatgtcagacggtcagggcttcacccaggatgacgtacaggctgcagaggtgacctatggggccatggcacgtgcctcagtggcagtggaggacaccttctgtttccatgtcacagctccaccatatttctccccactctgtaccttctccatccatattggcggtgacccagacatgcctgtcctcatggtgcccgagggtggtgagtgtgtcctctctgctgaccagctcttcatcaagagtctcaacagtgccaggtacctctatgaggtcatggagcagccccgccatgggaggttgacttggcgtgggacacaggacaagatcactatggtgacatccttcaccaatggagacctgatgcatggccagctgcctgtgaatgaccacgcccctatgcagaccatcagctgcgtcttccatgtggcctggggtaggtggcggctgctgactacagacaacatggccttcagcaatgctgattcgggctttgctgaggcccagctggtgctgacccaccaggacctcctctctggcagaggggcctcaggaagaggcgagtcctgttcacacactcaggctgaccacggctggatcccgctgcaggtgtccgatgggcagcaccaggccatcacggtgctggaggtgcaggccttggagccttacctctgtgtggccaatggctccggcctcatggttcctcaaggaggccagggtaccatcaacatggccgagctccacctgggcaccaacctcaacatctgcagtagggatgaggcccactaccacgtcacagacagccctcactggggacagttgctccaagccactcagccagccacagccttctctcagcaggacctgctggttggggctgttccctatggccacaatggcagcctcagctcctgcaacaccctggccttctcaatggatgtgggaccagtgcacacagatgccaccctacaagtgaccattgccctagagggcccagtagccccactgaagctggcccagcacaagaagatctacatcttccagggagaggcagctgagatcagaagggaccagctggagacccctgtgtaccccgctctcttctcagagcccagaccaggaccaggagggtctgtcaagggcttctgcttacccaggaacctcacagagcagccacgggccttccagagatctgacatgccctgtgacctcaggccagtccttgcccgctctcagccttactcttccacactgcttatttcggagacccttctggtctgcatctggagcttggggcccatggtagcccaggaggcagtgccgccagcagacatcgttttctcagtgaagagcccaccgagtgccggctacctggtgatggtgctgcgtggcatcttggcagatgagccacccagcctggaccccgtgcagagcttctcccaagaggcagtggacacaggcaggatcctctacctgcactcccgccctgaggcccggagccatgccttctcgctggatgtggcctcggcctgggtgctacccttgaggacgtcacgtggagctggaggtgctgcctgctgtcatccccactgggggcacaaaacttcagcagtagagggggcacagtcgcagctgcaccctggcccctccactgctccgcgttgccaggtcctacttccccactctcccgggccttggcctgcaggtgctggagccaccccggcatggggccctgcagaaggaggatgggcctcaagccaggaccctcagcaccttctgctggagagaggtggaagagcatctgatccagtacctgcacgatgggagcaagacactgacggttttgtcctgatggctaatgcctctgagatggaccgccagagccatcctgtggccttcactgtcaccatcctgcctgtcaatggccaacccccgacctcatacaaactcaggcctgcagggggtggcctcatggtgcggaggccacagaagagtgggacacagcaccctggaaccacaggctgggatggctctgtggcagtgcggccaccaggtggtgccatctacccgtgtttgttccgggagcccagtgatggggccctgcctcccacagtatggcccctcttgccaaggctcggcctgagggctccctgcggccaggggaggaagcccaggaatgccagagggctgttttctgggcatacgtgggagggggccaccgtgcccatccctacagaggctctgaggagcatggatggttactctgggcccaaggacctggtgtacaccattaagcagcccagcaatgggtgggtagtgcggtgggcggtgccgggcactgaggtgcgcagcttcatgcagacccagctggatggtgggctcagtccgtccagccactcagcagccagagcctcagagccagcaggcaccgacccccagctcctgctctaccatgtggtgcggggcctccagctaggccggctcttccacgcccagcatgacagcacaggggaggacctggtgaacttcactcaggcagaggagccacggcccgcagcactgccccaagtacctccagaggggacccctgtcagcccttgaaaatggcagagcccaccccagcccccttttcaagctcccttgcttc

SEQ ID NO: 469842 - DNA, 911 bp, Homo sapiens
ggcacctctcgccccagtcgctgcgccctgaggtgggagcccgcgtcgcccgcagaccttttggggcccatgatcgccctcagagaaactaacaatgaaaacggactcgttgatggaggaaaagttggaatgcagcctctggtgctgtttgagcgatccctctaccccgggtcgctgctgtgttctggaaaggcgcattgtaccctggatgcagcaggagaaactaacaatgaaaacggactcgttgatggaggaaaagttggaatgcagcctctggtgctgtttgagcgatccctctaccccgggtcgctgctgtgttctggaaaggcgcattgtaccctggatgcagcagttttggaatgtctagaagatgctaagaacaacaattcggaagttgcatctgaacatctaaagataccagttttataatagcagaaatgagttatttttcagtgtttaaaacattacatgacatacatacatgcatacatacataagtatgttcataaagttaaatgaagtaggatataaaactgggcctagtgtttaaaaaagtaaatatatttacatgaaggagaaaacaactcacctcccactcttagagcctctgccagtttatcatagcctagtttcttgagagaataagctacatgtcttcaccttttttcactgagctcattataatctggattctgccttcatcgttgcactaaaatttatctcctagttgtcaaatccagtggctcccctcttattccccaaattgacccctctgcagtattttgatactgttgattgttcctttgttgaaacattcctccattcttaatgtccaccaataaagagttggttaaataaaaattatagtgtacaattttataataaaatattctgttgttctgttgtggacc

SEQ ID NO: 469843 - DNA, 1251 bp, Homo sapiens
gggtcacggagaagagcattttgcagaggagcagagcaagtgtcaccaaccgtgcatggatggacatgtcaggacttgtagggaaatctgagaagccaggcacgtctagctggcagagtaaggccataaaggaggagctgatggagaggtctaagggaggccgtgctgcctccctgccaatatgtgggccacggccaaaagctgtggagggcctggcgccattgttggtcagcaaggccacaggcagagaaaatgacccagaagcagagcagaagaatgcaaagaccagctggaacctgccagacatctctgattctacccattaccataatgaccgcacagccttctatgagaaagtctccgtaagtagcagccaccctcatttcaacaccctgggaccccaggaccgccagagagaggtgtgggtttcactcgcccaggatggggggactggcgcgatctcggctcactgcaacctccacctcccacgctcaagtgattctagtgcctcagcctcccaagagactgggattacagatgtgtgccatcacactccactaatttttatatttttagtagagacagggtttcaccatgttagcccgactggtcttgggctcctggcctcaagtgatctgcccacttcggcctcccaaagtgcttggattacaggcgtgagccaccacacccagccttaaccatctattactaagcggaaaaaaggaagaggaaatttggacacacaaagtgacaccacggctacagatgcataaaggaaaaaccatgtgaagacatcttgagaagacgatcacctgcaagccaatgagagaggcctcagaagaaacgaaacttgtcagcaccttgattttggacttccaacctccagagcagtgagaaaataaatttctgttgtttaagccagccaatctgtggtattctgttatggcaccagctttagcgaactaatacacgtaataaaatgtaaagaaaacaaaaccaatgtaaataacattttctaagttccatctaaataaagttttccagccttccaagatgaatgcttacaccacttttttagaaacccgctgtcttgagtttagatcttttgatttcttcaactgtactgtaaaaggttttccttaatgtcttcacaggatgtgtttagctttcatacattctgagtctataagaccattcccagatgaaacactgagacggtgacaataaatgttgtatgtggttacaatgggt

SEQ ID NO: 469844 - DNA, 764 bp, Homo sapiens
gtcaaggtcttggtttttgttttttcctagccaatatttattgagcttatcttccaggtactgggctaagtgaggagcgcaaggctcagagatgttaagtgactcgcccaagtcaacagctgtcttcatggctgtctcccgactaagacgagctggagctgagctgggcaccaagaagggtgtgtcctggctccagctgcagtgctgggagcagccctgggcaagtgccgctcgtggaggccccatcctgctccgccctctcagcctgcccctcaggctccagggcacagattctgtccctgtgtctgcctgctccagctggctttatgacccggtgagcagacttgacatgtttgaagaggaggaggaacaggaggagcagctgtgtgcccaggctcagcctgcagagggacagcagctctcattcccctcatcgctgaggaccctggtgctcatgaggcctctaggtgcctgggtctggttcttttcagtctcccaggataaacaaatgtatttgggctcagtgcatgacttttcctagggcaagaaagtcatcgtattgactggtgctgttctcagatattttcacttcctttcaagttgagaaaaggccctgcagggacataaggccagtttcccaatgaccatggatgggatcccacattgctgcaacctcttccagcccatttaaagaagggccttccatagaagcacaaaccccaaggccacacagtctgacagtggacttagccttgcctgccttc

SEQ ID NO: 469845 - DNA, 731 bp, Homo sapiens
aaagaaagaaagaaagagaaagagaaagaaagaaagaaagaaagaaagaaagaaagaaagacagacagacagacagaaagaaagaaagaaagaaagaaagaaagaaagaaagaaagaaagaaagaaagacaagtaacagattctggctagaggtctgagaacctcatgtcccaaatgctgctggcccctcctggaccacacacctctctctcaagccttacaacagtcccccagaatccagcagagtacagcaatttttggtgtttattggatacctatttttcctgcctcgtttccgaaatggatttacaggcaaatataatgacctctccatcgtacaggactgatgtggaccaggaaggacagacccacatgggagtggcagcgcatgccggcccttcctcctgcagctctggggttggaactgaccccctcagccccagcccatcaccctccctggcttttagggagctgatcttctgcagacatgcctggagcctggtgagggcaggacaactgtccacccaaggatggaaatgaatgctgacagctcctgatttatgcccttgttatcctgtaaggaagacagcaaggcaatttaaaaggccagcagctttgggaagcccaacaaggagccccacagcacctggagctgcccactgtctccccagccaacgctagctagctgcttcctggaaaggccaagataccctcctcccatccccagcctg

SEQ ID NO: 469846 - DNA, 533 bp, Homo sapiens
agcagctttacattctctctctctctctctctctctctctctctctggcttcacacagacactggctttgagcagcgttctgtatgtcagtgctcctacctgcagctctcctgtcagccatctccagatcccatgctacagacaatccctttacaaagacttttaactcccagaagcagattgttcagcctgacagcattaatagatggattggaggaatatacctaaccaaggaggtaaaagacttctacgaggaaaactacaaaacactaatgaaagaaatcatagatgacacaaacaaatggaaacacatcccatgctcatggatgggtagaatcaatattgtgaaaatgactgtactaattagaaaaaacaattctaaaattcacatggaaccaaaaggagcctgcatagccaaagcaagactaagcaaaaggaacaaatctggaggcatcacattacctgatttcaagctatactctaaggccatagtcatcaaaacagcatggttctggtataaaaaataggcacat

SEQ ID NO: 469847 - DNA, 1014 bp, Homo sapiens
agtccaggaaaaccagggcacagtcaccataaactgccacatcatctcccctggctggagcgccctggcttagccctcactttgaatctaactcaacagatgaccttcatgttttgcagaggcgtgacaaatctcgaggcagaaatgggggcagggctctgctctaggcttcttgtggtgaactgggggcctcccctgctcctggattatgacagagcctctctcacatccatacccccgaagagggagttgggctcctggagacctcaaagtgttccctctaccccagcctactgatggcctgctgatggacaaggaggcagtggaaattgacaagtgggaggtgaagaaggagaagaacaggaaggcagtgactcagattttggtggtttccattggtggacatgccagctggaaggagtgttcaaaattgcttcagcagggcaagatgggggaggaaatgcatcagctgttcaccgcagtggctcagaaaggtcacagtaaagtgtcacatgtcactagagctcccatttcatttaccagacaggtcatgaaccgccctcccctagggaaccacagaggaatacatgactattcagtgagcatgacttctgtccgcctcatataatattttggaagatgaggaaaaaggaaaaagaagctgttctctaaaatgccaaaattttcatgtgatgagagtgcttcttgacataaatattttaaggccaacagaatctttagagtgaggctagagacaaggttaaagatattatattgaatgaattcaaatatgctttagcaaaggtgaccactagtatcccttccttatccttctgtcaatcgtaggttcagtctttttacagagtcccatatttctcggaggttttattaatttcttttcattcttttttctctaatcttgcctgcatactttatttcagcaaaatggtcttcaaactctgatatcctttcttttgcttggtcagttcggctactgatacttgtgtatgcttc

SEQ ID NO: 469848 - DNA, 800 bp, Homo sapiens
tctgggaggtgtacccaacagctcattgagaacgggccgggatgacaatggcggttttgtggaatagaaaggggggaaagtctccttggtgtagggcactctccggaaacaggccaaggctcttagggctttatggatcggagggtgagaggagcatcctggagctgaggaaaactttgccgagggctgccttcgcccattgcgatggagccccaagtacatccctggctcagagaaggggctctgtcaattatctgcagacaactagggggaccgtcagggtcctaggctatgatttcaaagcagaagagctacccatatttctggcaactttttaccattactccaatctgataagaatgaaattgcaaattagaagttcaaggctgaattattttaataatttttgcaatgttttccactatcttagtatcatagcctatagcagtaattttaaaaatccttttagtaaaacaaatgcttttagcaaatggtcttttcctctaggcacacaggtgttttattcttaactatatgattattgctccattatagatatatgagacataaacacctatgtcatgcatgtttacattttatacatatatgtgtgtatatataacatatatacatatatagcatatatataacttttatatatatataacatatgtctataacttttatatatacatatataacatatgtctataacttttatatatacatatataacatgtctataacttttatatatacatatataacatatatgtgtataaagttatgtgtgaaccagt

SEQ ID NO: 469849 - DNA, 771 bp, Homo sapiens
tacagagccatgtaaaagactgttaaaaagttggaaacaatcctctctgagagggaaatctccagggaaatgaatattcccagattgcagttccatccggttctcccactgccctcactgtggttctcagcagctggggacgcagaaagagtggcagcggccaggctgcccagcttcgtgaaggctctcggtgcgccgcggcccgcaggcacctggcacgcgccctccctgccgccaggatgcccaagaggaaggtcatctccaccgaaggggccgccaaggaagagcccaagaggacatcggcgagtttgtcagctaaacctcctgcaaaagtggaagcgcagccaaaaaaggcagcagcgaaggataaatcttcagacaaaaaaacgcaaacaaaagggaaaaggggagcaaagggaaaacaggcagaagtggctaaccaagaaactaaagaagatttacctgcagaaaatgatccaggactctttacacatagttctggatgattcatatgtgcttaatgcgtaatagaaaccctgtggttataggtggaacaaactcaccctcctacaataatagctacagaatctagagtctcaacaaaatgggctcctggggtccctaattccaggtttttggctcctggatggcatttctggacccatcctgggccagagagaagcctgctgccctgcagggtgagtcccaggcctgacattgttcacccacaagctgactggagagcccttgggccttgagtgaacatcagcc

SEQ ID NO: 469850 - DNA, 1939 bp, Homo sapiens
gccatttgtaaatagatgtttcagtgccttcaatcctgcatttttaaagccaagctctccagcaggactcaactcagtcctctgcctcagacccaccttcacctctccacatctagatggaagggggcttacgagtctccttgcttgaggcagctctccaaggaagttgcaatgattgttcttcttggagtatttcttggtaaggtatttcaagggccctttagagaactgcttctcagagaaaacaatgatgacttttgtgaagaagatcacatggatcccgaagctgtgcagctcctagagactaagaccctcctcttacagatggacgccacagacagacccataacacacggaactcatataagccactgctcgcccagaaaatgtcaggtggtctacagacctggctttgacccgcggctcttctctttgctaactttccacattcataggcagtggagtggagtggctgtgaacacagattctatagagccagacttcctgggttcaaatggcagcttcgccagtgatcacctggggaatcacccaggtgctgtgatggttgattttatgtatcagcttgactgggctaaggaatgctcagatagctgataaaactatttctgcgtgtatctgtgagggtgtttctggaagagatcagcatttcaatcaatcaaccaccagggcccagacacttggttttcagagagagacactgaccttcttgaaggcagagatggggtcttgttcatcttgtaccttcagtgcccagtgcagggtctggggacaccggctgggcagggaagggaaggataactgagactgtttggaggtggtgtccccaaccctcgcttacgtgggcgggtctcagcggggcgaggcttagcttgcctgctgagccctgcaaatgcagagtcagctgccctgccctcgtgggtctgtgtgtttgtgagcgtgtgtctattcgtgccatgagtgtgacacctgtgggtgtgtgcttgtgtgagctgtgtctgtgtacaccctcacatgtgtctctttgtggggctttcttccaggcctgtgattctaaaatcaacacaaccaaatccacactcgtcgctggctttccctgccctgctgtggagcacatgaacccggggacgcattcggctttcctttggtaagtgaaggcaggtctttcctctttaaaggaagcctcagagcaaccagcggccctctcccttggcctttcctggaaaggccctctgggtccgtccctgcaggagcctcctccctcctagcttgtgccacctcctgatgttgagctgcttacaagtcacactagcatcatgaatggtgcgaagtgtgtcatcacccctgcctctgcttccgtcagaaaccttagttgtaaatcagcagaatcttctgaatatccttaatccagaggctagatctaaggataagaatggcagggatcagcaggcagttgaggaagatatctgggctggagagtggctggggcagtcttcaggtcatgcctggaaataacctcttgcacaagtggatcctgcctaatttgctgagtgctttcacctgcattcccctgcttgcgcctccagctcccctgttcaggaggctgggcaggtgttgcaggcccatctaccagatgcagaaaccagggcttaccagtgcctaagatcacagagctggtaagaggaaggttcttcagccccaaccctgagcattttcagttccccaggggctttgtctaggtagcattggggcaagcactccgtccaaaaaccttcagccccaagatgttggagtgtcacttggacggtttgctccctggtgaggggtctggacttggctctttctcatgctggcatagcctgtatgcatgaaatatctgtgggggagaaagcagggtttactggttggggagcagcttcag

SEQ ID NO: 469851 - DNA, 1116 bp, Homo sapiens
ggccaacagtatctctgtagaacctacgcaggacagtcccccaaagcaggaatcccctgaatcatccgtcccaacatgtcggcagtgccaagactgagaagacctgctttagagacaccttaattcaccaaccttcccaagtgtggcagcttgcaaaaaaatgggcacaaattccccccaataccgaggaagttatgtcatggagcttctgagcccagacctcaagaggtcctgcagcttccactgttgttcccttggagcccctggcagcaatgaggagcagccatgggcgagctgccagatgacagccacatctgtgccagacctagaggggggaaatgccactctggaaaatgcagagccctgctggtctgagtgccgtggctctggggtagcgaggactcctccctggcaagcacctcctccctggggagcacctcctccctgtaacagccatgcactctgtgcatatgcatggtatcacctgcagatgtcccagttcctgacgtcaccctggctgcagagccagcctcaggccgagctgtgcaaccagggcagagggaggaaggggcgctgctgacctggacagggctgagttccagtccgcttccgtcaccacactcccactgttggccttggacaagcccccatctctctgcagcagccccttcattcctacctccttgaggggcctaaactggatcatcacttctggaaatagccattcttgtcccacctttgaaggtgtcatttctcagcaccccagactattagtcagggaatgttttctttgaattgactcacttttaaaatacaccatttatgtcaacttaccatttctgtacatgatgcaccatttgctataaagggacattgaagttaaaacccatgaaaatagtaaatgttcactcttgtaccacctaaagtcagggtacatgcctgccattgcatgagtgcacacccccaggggaaacctgcgtcctggagccaggcggcttctcaagtatgactgtgcgccggaaacacctggagaccttgcaaaaatgcaaattcaaattcagtaggtctgggtggggtctgagattctctgtttctgacaaggtcccaggagatgcc

SEQ ID NO: 469852 - DNA, 579 bp, Homo sapiens
cttagcccgtggtcatgttgcatggtcacaccaagcctgggaagtgggaattattgtctttattgtagaactgagctacctgaccctcaaaaagataaaggaggttgctcaggtcacagggcaagtaatgactggcatctggctttgcctggttgtggcttcagctctcaacctaacaccttcccagcacacagtaggtgctctatctgtgtttatccagtgagtatctccaaagcctgtgttcctcctctgtacactgaggctcgcagcagtgtggtagacagtgaggaagagcctctggacagagtcctgggtcacctctatgaaaatccaggccttgcagagcagcagcttgaggaccaattctcggaggtgggaccagacttgctctgagagggacctggacagcagagaggctcttagctgtcagtaggaaaccattttccatttctggaaaatttgtagggaatggaggatggggagttgggaagcaaagccaaggcccctccattctacacaggccccaggaagtgagcctgcacctgtctaccttccagactgcaggccagaaggaaatac

SEQ ID NO: 469853 - DNA, 2987 bp, Homo sapiens
ctcttctatgtcctcaggggaagttgtggaggtcggaggtgcctggaacaaattgggagattgctggaggggtcattcagatgaagatcaaaatatcagcacctctgacacgtgctactcagacagggatgctcgggtccctgggaggatggactcagcacatcttctgagtcagcttggcttagccttttcctccctgacgcagagccaacaggctgattgcaggcccaccctcagaggctgggcccagggcacctctcagcaggcaagcagatcccctgggggaaactcagagcggcagaactccttcacccaaactcaccattcagctgtgctgtttggagctgggctgcaaaaggcagttggtcaggctggtctcaaactcccgacctcaggtgatcagcccgcctcggcctcccaaagtgctgggattacaggcgtgagccactgcgtgcccggcagcagatgaactttcaatcggagcaatggaattctgtggggcaggggattgcacactgcacacatcacagctgctcatccagggttcagggagcacaggtgttgcggcacttgcttcatcttgagtggcacggagcacagagcagcccctgtggagtgtggaaacaccaaaccctgagtcaccactgactgttgccctgggcatagaaccccaggtgaaggcacttaacactggttatccctgtgcatccaggaagctgaatggcggccaaagaaaaaagttacaatgcagtcaggctggaccagagaattcctgcatgtgcaagtttgtgcgtgtgtatgttttggaagtcaagccagatgtcgtctttcctcatgtgacatttggtatcttttttccacagcagtgttccattatgttctagttcttgaaagaggcagtgaggcaacaagtgtacgacgaaattgatttgggaaatgatttatgtgtattatagtcttctcttagaggatcacaaagtatattagcatattaaaggctctgagaagtcctgtaataaaggagcctggttgattgaatgattgtggaactcattgtgggtggatcattcgcatactggatggaatggggtgccaggctgactgtgcagagggtgattagtccctgaaatgtagataggggccacctagagaatggtggagcgtcggacatggatgggtgaactgaccaactgggctatgcatttcagccccaaagcacttaaagcataaggtagattgtaagatcctggagttcacctgccttaaacacctcctttcataggagaaggacaccaaggtcgttagagaagaactgagttactcatgatcaccagtcagagctcttggctgcaccacatagatgccaatgttggatacctagggagaatgagatttgatggaaggatatggagaaggccactgaacccactggaagactggagaaccgggtccagaaaacaagcagaagccaagggaaagtgggctgctgagagcatagccagatcatgccacgaaatctgattagcccacttcagctagggcccatgatgcatcagaaatggacccatggctctctgtgttcttcccagtgggtacaggtgattggctgagcacagactgcgttcccctccctggctgttagggtctgggagaacaggtgggaggcttttgtggcttctgcagcagaagcccggagcccatctctcccaacgactcacacaggaaggaagcccccatctggttgggggcagaatgaggttacaaagcccatctcctgtcttgcagttcagattatgcagccaagggtactcttttacataagtgtttaaaatcttgatttaatcagcaacatagaccttgcagcgttcctgcttccatgatagaaggatatgaactatttgaaacattcgcaactactgctctccttggggattcctaccctccttccattctttactcactggcctcatggtagagtaactagagcagaaatgcagagcgagagagaaacaaatatgcagctttcgaaacccatggcagagacaatagtttgagagtctcaaaatcttgcctttcgagaatccgagtcctgacacacagaaatcaggaggactagtgtatggtttgttaagctactttttcccacctacccagtctacattaatgactccctgagcaaagaaaaaaaaaagtccttagaaggaaagagagttaaatgctggcatgaatctctgggaatggtcctgcctacacgttccacgctctcaaactctgaagttgaggggacgatagaatctccaataatttaggggatcagagagaagagagacaggtgcccccactccgtggggaggcaggaagctccatagagaagtcccagcattcagtgtcgtgaaggaccaatagataggcaggaagcaacctccggggggttcagggcgcatcacaagccctcatccccccggtgttgtgtagcgaacaacagaatgtttctgagtgtatctgatggtcctgagagccagaaaacctggagggccttgagcctgggatggtaggatgtaagagcaggtgcaggtgtggaccaagggcaggaatgaggattccccaccagtccacaaggggtggccgccaccaaggaccagctgggcaatggccagtccagtggcggccagggtggacagctgacagcagagagccaggcctgcttccccagatgcactgatgtgatgttttcgccacctcaactgaatccatcctctgggagaaggtgagaaggggaaagccttgaattgacttgaatggcggtcctgctaaaagtggaatagcggatcaaaggagaaattagatttttcttttttttaaaaaaaaaaaatctgaatgtgtggcctgtgacattcattctgatataatgtaaactgtagtttatgcatagagttaaaactagtccacaatattttctttagaaaggttgcaagcacctgtctcct

SEQ ID NO: 469854 - DNA, 705 bp, Homo sapiens
tccatagtattctactgtcagaaagggaaatagagtcaccttgaagacaagagccagctttccctgtgtagagggggtgcacagctgcctggccccagctccctagcctcaactgtcatggctccaatgtcctggggagagtctgaccatctgagcccaggcagcagatcagccacctcaaggcagacaccctcccttgctgccctcagccctgtggccaagaaagggggtggtctcctttacagcaaggctccagagcccatccccgcggctcaccaggccaagaaccaggaaatgcaggttcagctcatgaacctcttccctgatgctggctttcaggtatcttgtgtcctcgtccaagccactcctggcacggacacagggacaaacgtggaaggggagttagaagtcacccaccttacaggtttttgcatcctgagtgggtttttgcatccgtgtaccaaggatagtgactcctccctcctgggcttctgcttctgtaggaacatgagtgggacaggcttccagacaccgtctcatccagatggcagtggaggccactgaggctcagaggagtgaatgactgaccaagacctgtttacctgcctgttttgttggtttttaaaaacacctttccaagagttaatgtacactgattcttaatatgtgggacatataatataaaaatttcatactgaataaatg

SEQ ID NO: 469855 - DNA, 1496 bp, Homo sapiens
atgatcaggagccatcaaaggtgtgaagcaggagaaagaccactttggtggacctatgggggatgcaccagaggaggcaaggctggaatcaggacccccttatgaggaggttgtagtggatggggatagaagccagcacagcttggctgcaggcaggcacgacctgaaaattcagaagtgtgaatgccccaggacaaccctcaccagtggggcatgcaagctggtggaccactggcccagcctcccagctccaagagctcagtccactcagtttctcagagggagctcagagacatgtctgattccaaagcccaagctcttaaaagcctacaccacctctctcccagttgaataccagcagaaagctggacacatagtagtacttgctgccaatgtcactatcatcctcaacctcaccatcaacattaccaacatcaccatcaccattaaaatcgcaatcactatcaccaccgtcactgtcaccgtcaccattatcgtcaccatcatcaacatcaccatcagcttcactatcaatggtcctgtgattacaggcagcagggcatgtcagatcatctctctcagcttcagcttctttatctgtgaaatgaggataactatatctaccccagaggttaggagagtggtggctgacagccctccacggaagaggtgcatcctgaagggggaagccatggacgatgattttacccagtgcttctctctgttctaatatgcctaagacattgtcccaggaactttcttatgtgcttcttgacacccagagtgactgaacacagagttgttggaaagatgaaaataaacaatgaatgtagtaaaatgcatggcacagtgcatagcaaagatggaacattttgtttctcccctttgcccttcagaagaactgtaattccttagtgttgctactcactgcacaaatacagtgtaactatcttagattcttcttgatacagtggtgtactccacaataatgggttcaacctttatgtagtgccttcccgtacacaataaaatagaaaaccatattcattaccaaatatcattctttcatgatataacacacaaaaaactatttaaacaaacttcaaaacttatactgtaaaacatgtcagcaccaaaaactatgcaggcaacacagacaaatttgaaaattagaagaaaacttaaaatgtccccgttgtgatttggcattagcaaaatcaccgataagtttcgcaacttctgctgccttgtttctgcagctagtggtgttaattctgttaaacattgttgtctcagagtgttccttaaatagtttttaattggttttaatttggagaaaaaacgttttgctgaagatacaggggcaggaattgtcaaaaataaaattaacagataacattctacggaaaaacttggagacatgctgtgtcattgtatactcccttggcaaatgtatggatgctttaattttgtcagtttcacgtgttaatgatttt

SEQ ID NO: 469856 - DNA, 2846 bp, Homo sapiens
caggagcaggggctggccaggcagagggcagagggcggctgccaggagggctgacttccaggcagaaggggaaggcagctgtgtgcagggctgggactcaactgccgtggcacggtttcagcccaaatcataggctctttttatgattctttgtaattctgctcacatcaaagtcaaaattgcctgcatctggacagccactctctccaggccaattacagacaccgtttctggagtgtctcctggtagctcaccacttcctccctgcaacaccagtcctgtgggctcggccagagctagtcctggtaggaaagccagagcagtgagggaccggggtgtggggtgaaggatggacagctacagaggctgttttgggcgaggagggcccctgcggaaccgtggtctatatccccaacacatattctgcctcattggtctacgttgttctcctgcaccctggttgccagcaccctccatcacttctccctgcacaggttggaatgctgtggtcgacacccatagggtctccgcatggagtcaggtgggaacctttgccgccgtagggccggcgttgttgggcctggccttcgggagcactccccgatccctcgttcttttccccactctcactgttctggcgccgtcggtgtgaggccgcccaggacaccgttccctgcgccgctgcccgtagtgccgggcttggtgtaggtggagctgagggcgggggcgggcggcggctgctgggtctccgcctcgctgctcatggttgcagtgatggtgactggggccgggctgcggcagctgcggctcctcctgggttgtgatggtaaataggccggcggaggcggtggggctgcttagggctctctggtctgctctccactctcgctaccgatcgaactcgacatggggatttaccatgctaccgccctctatgccaaaaatcaagatggaaaattcttttcttctcccttcaaaggctttggatgcagcagcttgtcatttcttctttaccaccaatgcttggaaagaggatgctgtatcattggcagtattgtttctttcccaactgtgccaatttctctgcaaaccatcagccctttattttgtggctgagttttataatttaccaattgatgtggttagatggagacatgtggttagttcttccagtggtttgtgtccttcgttggtgcaaaatattccagcattcactttccttgcagcaaccaaggagaccgtgtgttccagtgccagtagctacaagatggcagagcctccttcagcccggatggcagagttgctgcttggaggatagtggtgctggcaagtgatcaagcatcaaactttctgtatacactgtaaagtgcttcttccaataatctttgcagcctagacttacagtttgtccttcccaggtctgtttccttataaatattccaagagtggagctggaatttgggcccaatgcagtatagtaccacatcccatgggatgcctcctgtggtactgtacagcatcccatgcttgcagctgccattgtatcccatccctgcctgtgtgcctctctctgagtttgacatgctgctcagagcatggacaactcatctgaaaacgaaaattatatcattggaaggtctcttgtcctatataattgggactagtagttggttggttaaccaaaaaatttgatcaaggtgagaaatcataaaacaggacacatacagccttattttgatgtggatcaaaggccttttctcaaagaaactggtgaagaaaattctacttttctgttttgcgtaagctacactaataatttccagtgtctgttttaatgaagaagagagaacccaaggtactcttgaagcaattcgagtgcagaatccttctagatttatacaaactttctctttttttttttaccgttatctcgtccacacctcattcaacaagtttcttagtgattcacttttatcaagtctttcctaaagcaatgtgtttgacataaaaagcaacaatttcttttgttccacactcttctttctcggtttatgttccttttggttaaattgcataatcatggtgtcaagtgtaagtggcaaggcataaatagatttgggaacatgaataattgattcttggtaaatgttctactcatttggagagcagaagtgtggaggcgtattatagataagctgctagctgggagcatcaactgctgtatttggggcagagaatggaagctggttaacctggccagttatggggaatgtggttaagaggctttgcgcaggacctgatggaagggttggggtgagagccaatggagatggcaggtgaaaggattgagtaaagtggtgtcttgtatataagccatcttcatgattttgaagccttccctgatgctgcagcacacatggtcccctcctcccatgaaccttcttccctagggaacgttagagagcccccaaccagcagccaggagacccagatctaatcccagctctgccactttctacctctgtgagtttgggcaaaaggcttaatctcatcaatcgggttttcttctctgtacactgaaggaattgggtaaaattgtctggaaaggctcttctggccctgttctaagtatcccagggccaggtttcttactaactccactcttctctttggggttctcagtcacccccagggctctagaatactccctgtctgatacggtttggctgtgtcctcacccaaatctcattttgaattctagctcccataattcccatgtgtcacgggagggacccagtgcgaggtaattgaatcatgggggcaggttcctgtgctgttcctgtgat

SEQ ID NO: 469857 - DNA, 841 bp, Homo sapiens
tggatctagaaaatattcagctcttcccacattcaccagggcaatgctgctgaaacatttaatgacggggagtatttgtagcccgaagacctactgtttcttgggcctcctctctgcacagagggcccccgagttctgccaagtgcccagagaaaggctccattcaccgggcgggctgctctccatggccactcaagcccagctggcttcacctcgtggatcctgcaccggggccgcaggtgcagctgcccgccagtcccgcccgtgtgctgcggagcaggaggtggtgctcctcagggaggctcgggccctgcggggttgggagaaggacaggaaggaaggctcgggcatggcgggctgcaggtcccaagccttgctccgccgggaggcagctgaggcccagcgagaattccagcgcagcgccggcaggccggcactgctgggggacccagcgcaccctccacagctgctggcccgggtgctaagccccttactgcccagggccagcagcaccggccggccgctcccaatgcacggcctgccaagcccacgcccgcccgccgagcccacgcccacccggaacacccgctggccagcgatcgccgcctgcagcagcccaggagactgcctttccctggagctggctgtgacggatgattccttaagagaaactgttaacaaccgcccgaccatcacctaatgttcgcctgacattcctggtggctgaaaataacctagtgtggtgggctaagaccctcctataaggacgactgcaaagacgaattatccggcagaagcctccctgtgctaaatctggcaccacaaagaagaaatacacaac

SEQ ID NO: 469858 - DNA, 596 bp, Homo sapiens
gcggtgactgtcaccatctgagggttaccagatgcccatggtgagggcggagaagatgaaaggcaagaacaagctggtgcctcgcctgctggggatcaccaaagactcggtgatgcgcgtggatgagaagaccaaggaagtgctgcaggagtggcccctcaccaccgtcaagcgctgggcagcctcacccaagagcttcacactggagagcactagcgtggccttgagtgatattgtggggacaggagaaagaccagattcttgcccattgggtttctctggcctgggagagccagcgtggagtgaggaagatggtgcaagcccatgggcagggaaggggatgggtccagaagtaaaagagaggtcagcaagcctgggtttcttcaggcactactgcttctctgcactctacataagtcagcctctagttcattatctagaaaaagccactcacccagatgattctcagttctgtgttcctgatgacatccctagcatatactgaaaggaaactttctagtgctctgagacacaaaggccccctctctgttttagatggtcctaagcattgtgattatcttgctgaggaatgtttt

SEQ ID NO: 469859 - DNA, 695 bp, Homo sapiens
tggaggatggctaaagcatggtgtattccaggactggcaagcagtttggtgcacatcatggaccctagagagaatcaggactggaaagggcaggatggagaggagagtggagccgtggtgtggcccggctctggcccagaagctgcactaccccaggaagtgggagaccaagagcggctgctccaggaccggccttctgctgagatgggacagctcctcatgggcctgggctctcaacaaaggtgctcttgcctagcctacgaggcccagctggggctcagcttctcagggagccatcctcgacacccgtgctttccctcctacacctcccagcctttgatatcccctactctggaaggtggccccagcctgagtggaggagaagcctggattgcccgtgtggctcttcctggaggaccccgacacagccgctggcagcggaagggtgcagcatccccccagaatcctcagcgccaccaggacactcaagggagtccgacaggacccaaatttctacagtcctgtcaccagaatgctgcagaattagagaatctccctctaaaggagggcgcatcccttgcttcaaggccaaggccctactcccaacagtcaggtggagagatcatgggctgtctgagctgagaaagatcttagggaccatggcccaccctcagtctcagtcaggactgaactta

SEQ ID NO: 469860 - DNA, 1248 bp, Homo sapiens
tgggtcatcatctgctgacccctgctatatgacaacatctgaagttgagaatgtaggagcccagggccccctgcggggtcacagtgctaagccacgctacctggctccaggctgcggcagggggcctggtggggctggtttgtgtccatgtccagtgtgtgtcaggggcaggggcaggggcaggggcagctgccaagctgtcttcccaactgcagcttcccccagagcccgcacctgccctgagagacctgacagttccctcgggacactgaagagcctgaagatgcagctgctaccttgatacgaagctctcccagcccacagcgtcaccatgtgttctcttcccggggccctggcttgtccccgccccggcagcaaacagctcctgtttctgactgctgaccctaccacccatcaacaaccccccggctaccaccagtcctataagaagttgctcatggacatggtgtccccggacatggggcagggccgagcccatagcccaggctgtgacattgacgttgatgctgccccttcctctgcaaatgtctgctacaggacctctggcccctgcagcatggagccagctactgatatgctccagtctgctggctatgcccagagccaccaaagacccctgtccagtcccctgacccccaccaccagcccaacaaagccctgccagcactgggaagcaggcacaggaccccatctctggaactcacaacctcctcatctcctctcccagcagagcatccagagccaccatcttcttccagggcagttcccagcggcagggccagaaagggattctggaactctggaggctgaagacacaggtatctttatgatctagacttctccctgagacttattctttcgctctttgtaattggtatgtattttcgtgggaggccctttgatactatgtaactatcctgttcaatttattcctttatttattcatgcgaatatggactcatggtttcttattttactcaatggattaaaacctgttaccgacattacatattttggtgctaccaatgggagcccctttggggtggtgcctgtgcccttttgacatgtccccatcattctgtgagcacttccttgctttctggccccacaagatgctccaaactcatcttgcactttctctgccccagttctgaatcagtcgtttctccagggagtcctggtctacaaggcatttcagagatcttcaagggaagctcagacctagac

SEQ ID NO: 469861 - DNA, 866 bp, Homo sapiens
gaggaagagtggcaagcctgaggtggcaatgagggtggtctgcatggagtcgggtggaagaaagaacaaggacctcctgcatgcaaggcctctggagcagggaggagtagtattagggtgtctttgtgcagacaacgtgtcgagggccttgaatgctggacatgtgtgtttgagtctgctgggactcgacagaggccccacacagctcatctgccacacatactttgagtaccattggatctgccaagttgcaaggcccacagggcagcagcttttactacagcttgaactggctgcaaagccttcccctgctctacaccctactcatactatacagccttacgaatgtgatgccagcatagctagactttctgcagagcacaaaacgacctatgaggggctccagcacttgaacaaagaacagcaggctgccaaacttatcttggaaacgaaaatcaaagatgcagagggacaggaacatggaacattctaatttttgcagaaaaggcagaaatttcacacaggactggtttttgttaaattgcagtaaagacaagggacatgggtaggtggtgtgagaaaggaacaggagggagatagtctacaagttatattgactggtgacctgacttgttatggaggtaaatctgagaccttgatggattttgtaaacaataaaaattctattttctatgacgagccgttaaactgatggtagaaattccaaggtaaggttgactatcatgacagctggtagaagttgcggtcttgggtaggaattgggcttgctcctcagagaattatgtgtaaaattaagtgcttagtgcaggatgaatattttggcagtgctactggtcttgattttc

SEQ ID NO: 469862 - DNA, 543 bp, Homo sapiens
gagggcagaagatctgggtttgagtccagcagtgctttaggaaaacctctgctctggcctcttctctccctggagcccatgctgagagagcctgtggctcctctcacctgcataaatagaagggtcatgagtaccatggaaaactatgtgctcgccaatcttccagccaaacacaaaatagatcagggaataaggaggcctcctgctgcagaggagatgatagccaggtgggagagctgggccaaggatcagccaattttctggtacagaaagtgtaaccatggcaacagtagtgaaggtagctctagttccatcagcaatgacacccttaagagagagattcaaagtatgaaaaggattcagtacatcattgctgactttgaagatggagggtgccaggtaccaggactgagagtggcctttggcattgagactagtccctggttgacagccagcaaggccatggagacctcagtcctacaattgcaaggagctgaattttgctcacaacctgattgggtgtggaagtgaattcttcccaag

SEQ ID NO: 469863 - DNA, 1308 bp, Homo sapiens
ggcatagacatacttagcaactggtggaacccccaattggctccctgactggtaggctgagggttatcatggtagcaaaggccaaatggaagccattagagctgcctctacctagaaaaatagtaaatcaaaaacaatattgcatccctggagggactgtggagattagtgccaccatcaaggacttgaaagacgcaggggtgatgattccccccacatccccattcaactctcccatttgccctgtgcagaagacagatggatcttggagaatgacagtggattatcgtaagcttaaccaagtggtgagtccagttgcagctgctgtaccagatgtggttgtactgcttgagcaaattaacacatctcctggtactcggtatgcagtcattgacttggcaaatgcctttttctccattcctggccataaggcccaccggaagcaatttgccttcagctggcaaagccagcaatatacctttactgtcctacctcatgggtatatcaactctctgccttggtgtcataatctttttctgagagaccttgatcgcttttcgcttccacaagatatcacactggtccatgacattgatgacattatgctgattggatccagtgagcaagaagtaacaagcacactggacttactcatgagatatttttgtgccagaggatgggaaataaatccaactaaaattcagggaacttctatgtcagtaaaatttctacgggtctggtggacattactctctactggcctagaggtctttgttccagagggaggaaccctgccacgaggaaacacaacaatgattccattaaactggaagttaagattgccacctggactctttgggctcctcctagctttaaggcaacaggctaagaatggagttacagtattggctggggtggttgacccggactatcaagatgaaatcagtctactactacacaacagaggaatgaaggtttgggtcattccaccaggaaaaaaccacgacctgctgaggtgcttgctgaaggctaagggaatacagaatgggtagtagaagaaggtagtcatcaataccaactacgaccacatgaccagctgcagaaacaaggactgtttaactgtcatgagtatttcctccttttgttaaaaacatgtttgtgcatgtatatacttgtactaagaaaatatcttcattttatttcccttctcctttatcacgtgacataagattttattgatttcccatccgcatttaagcattgttaactttaagtaatagtatttgggttggggattggtgtgtttcc

SEQ ID NO: 469864 - DNA, 552 bp, Homo sapiens
tcggtcctcacccggcccaagcatgagcaactctgctagcacatggtgttttctttttcctgaaataaaatatcatcacctgatcttagctaaaacattgcaacctcaacaggaaaacattgtctgcaagtgcaggagccagccagggcactgggtctcaaacaagaaggctccagatgctcttgttgcccaaagggctcagctgttggagagattgccagtgaggaacttagcttttcaatatcaaggaaaatggctcctgggcagagtcataaaaagccaagtcccacagccagcagagctttgcaactgggccactactttttcacggctgtttaagaatgaatccatgatgtccagctatatgggagtcccaatcacttactcagtgaagcctgtactttcaaatcaggaattgaagacgctcaacaattttcttccctcctctgttccagagttttaacctaacactcttgtggagattcttgggtcttgcaaaaggaagcaactggggagtgcagtttagcggttttatcagtcagaacaggatac

SEQ ID NO: 469865 - DNA, 681 bp, Homo sapiens
tgccaccgagtcctagttcctgctctgatggagacctgcaaaaatgaagccacagactgagccagacctttctgaaaatggaagatctcacagggtgctccggggatcagggctcaccacactggggacgactcctaccctcgctgacaatcacttcttgggaatctctgtgagaatcacagaatgcctagaaaacttttcaagtgtaacttgccaggtgcactttgacagtgcctcaggggcctctgggccaggccctgccctctgcagcttcctctgtccacatcgtcctggcttccgccactcactctgccctgggtctccttcaaaagtactgaagatggcctccaccattctgacctctcctccaccacaggacagtcttctcactgccacacctggcagtgtttctttgtttcctggctctggaatattccctcaagagatgcccctcatttctttttgttttctctaaggtttatttgtacaaacaatgaatagtgtaacactcctattctgtctccatacaggattaacagctattagcattatgtcatatttgcttcctttttccctataacgtatgctttttcaaaattacacaatacgtgcttgcattcttttttaagaagcaaaatattgggtttgctggcaagatggccgaatagtaacagctccagt

SEQ ID NO: 469866 - DNA, 890 bp, Homo sapiens
tcctccctgtgaagagctataagatggacgacactgtgatcaggaatggaagcgccaatcctctgtttcatatgagcacctgtaagagcattcttcaggacacctgtgaccaccagaatagtgacccgaatccgctcacttcgatttcctcatccataaacaggagaacaactctaaaagctgctgtgagaattcagtatgagaagggacatgaaacttctgggaccttccacaaatgctactttcctttccttagtctatctgacaccacccacaaacagcaacttcccctccggggaccaagcctccaaagccgcacatcctggtgtttccttctcttctcccctcacactcattggctggtgggcaagcgcaacattttgggtcaggcaaccctgtgctggagtcctgctcagcaaccaatctgtgccaggttccaaatgagagaaatactgtaaggataatgttactcgtcccttctggaaacattaatcacaagggtttatttattatttggtttaagtatttaaaagttaaaacatttccaagctgtcactgttgaaatatttctaatattgcaaaacagcaattatttcagagagggtattgttaagatttccacttcagaaagaaaataataaccaatgttctatgggttaggttaatgagaatgaaagtttctcagttccaaagcaacgctcatcaaatcttcctttcctccacagtaaactataacatgtagaaagtgtgaaaaaaccatctccccatcccgtatggacttaaaaagaacttatttcatacaaatcttaagagagacgtggcaaaacagcaacttataaaatttgttactacagagcaatactttcagaaaatggaattttttaatgaac

SEQ ID NO: 469867 - DNA, 633 bp, Homo sapiens
acgggcaacggaattttaaaaagctgtccagctgactgtaaatgcacgagagtctgagaaccaaccatccagacaaaccgatcactacatttagaatggaattggcttcttcatctgaaaaaatggaacacctaaaaatgatatatgtatatcaacacatgtgtgaatttgaatatgagaagtttttccagtctcatgcctttcagggacctatcaaaatttcgttctttccattccccatgattttgctaagtttccagggaaaaaattgcatgtctacaaagaacggtgcattctcgtatttccataagagtggcccttgtgaactattttccactcctgacagaggcaaagagaaatttgtctactgtaagaaaaatcacagtgtgcatggcacacagtgtgatggcaacacattctcacttcaatgttgggggggcagagtccaggggactgtgactgattatacccttcaggctctgccgccggaactgtccggggaggggtcggcttttgttcagttctagctaaggtggtgtttctgagggaatacaagccccatgtggataggtctgagtttctgagaaatgtcagaaatgtactttgtgtgaaatctctcattttaaatgtttg

SEQ ID NO: 469868 - DNA, 867 bp, Homo sapiens
ccgctgacaacccacgacatgatgcctcctttggcatcatcaattacaaaatgtgccatatttgtcacttgtcctacctcttcccttgggaacccagtgatctgttgcttgtccttgaacactgtcccaaacctgcttgcagagccgtcattcacactcagttgtgaccaagtgatagtgctccttttgctcctcttgcacctctttgcagatgacgggcaagtcgacctcttcagccatgaccctttcctgtgccccacaccgcatttccaaccgctgacaggacatctccactctcagccttggctggtcttgcctttccttcctgttcccactgccgccatgttggttcagtctcctgtcactcacaacaagatgaacagcaatgttctcttctctgtctccttgatggaacagatgccttcctcgttgtttggacttgagtcagtcccggcaaatgtttaagtggcctggcctggagagctaagagagtgctagaagggagactgctgtccccacaatggctgcagccccattcctttttccaagctgcctgggtgaacattccaggatcctgacattctgtggaaattgatgagtgcttgctcaaaggtcgatgatgtgctacagatggcatcacctgttagagacagagctttctcaagaggagctttgatttcctttacttcccgaactgctatttcacagtctctcagtagatgtcagcagcacagcaaacatctcactgcccatcatggaagcaggttggttcaaaaacttttccaattaaagaaaaaaaaaaaaaaggaattagttctttcctttgcaattttcttcagaagccccagaaccaaaatggtaagatct

SEQ ID NO: 469869 - DNA, 709 bp, Homo sapiens
ttggttctcaagactgatcccaattcatatgtcacagaagccacagcattcgcagaggaagacctggacatttccttcggatgagaatatgcccgaggtgatgacatgggcactcagctttggagtacctgtggtggtcctgcaggagatcttgcaggcaggtctagggggccactggcaaggcaagcctgacttgcgggagaaaggtggtggctgggagagcacagagcaggaagagaaaaggaccagcgacagagccctgggaggcaccatggcaggtaagcagtttgggcttcacatgcagcagcagaccacgctggactcaaatcctgtcctcgcagaccttctagagctgccacaagcacacagcatccttatccacagtagacaggaccacaggaaaaagaaagcaccaatggcatcagtcacaagcatggggccaatgacgggttgataggtgcagcaaaccaccacggcacatgtatacctgtgtaacaaacctgcacattctgcacatgtatctcagaacttaaagttaaaaaaaaagcaaatttgaatttcagataacaatgaatactttttaaagtataacattgcatgtaatatttgtgacatactgtacttttactgaaaaattatttgttgattctttgaaatgcaaattgaacggagtgttccttatttcatccggccaccctatattcagagc

SEQ ID NO: 469870 - DNA, 1646 bp, Homo sapiens
aaagttaagtttgaagaggggggaagaggggaacatggacatgaagaggaggatccacctggagctgaggaactggaccccgtcagctgttcgagaacttgtcttggacaattgcaaatcaaatgatggaaaaattgagggcttaacagctgaatttgtgaacttagagttccttagtttaataaatgtaggcttgatctcagtttcaaatcttcccaagctgcctaaattgaaaaagcttgaactcagtgaaaatagaatctttggaggtctggacatgttagctgaaaagcttccaaatctcacacgtctaaacttaagtggaaataaactgaaagatatcagcaccttggaacctttgaaaaagttagaatgtctgaaaagcctggacctctttaactgtgaggagggcgaagaagaagacgaagaagacgaggaggatgaagatggtgaagaagaggagtttgatgaagaagatgaaaatgtagaaggagatgacgaagatgaagtcagtgaggaggaagaagaatttggacttgaagaagatgaagatgaggatgaggatgaaggaggaggaagaaggcaggaaaggtaaaaagaggaagagagaaacggatgatgaaggagaagatgattaagaccccagatgacctgcagaaacagaactgtttagtatcggttggactgctcatggatttggtagctgttaaaaaaaaaaaaaaaaaggtagctgatacaaaccccaggacacccacccacccaaagagccaaagaatagttcctgtgacattccgtcttcctccatgtagtccctcttggtaatctaccaatctaccatcgagcttagggacttcaccccaacaaaattgtaagtgttgttaggtttttgtgtgagactcttgctgtagcgtagatagctgtgattgtgtcttgtggggtctattgttcctttttagctggattgatactaagcgtcttcttatcagtggagcttaggacatttgagaagatgaaagcctaataaccccaagccccccaatcttaagccaagtttcctcctcacgcctgcttcagttgctcttcttcatgtggtattttttccctcacaaaactgatggtaattaagaaacccaaaagttcttcatcatgttatcagcttagggacgcttgtcatctgaataacagggtagatatttatcatctgaaatgttaaaataactagagcaaacacttacatagcactaactgctgttcacagtgctttacatatattattttcctcaaaacaactctgtgaaatagacactattattgtcatccccacattttagatgaggaaatggaggcacagagagaccatgtaaccttgctaaggtggtagggccaggacttgaacccgtgttttctggttttagagcctgcacccttccccaccacaccatattgtgtagcatgatacttcatgtggttaaagtattttcttcacttgggagcattttgtgaataatctgaatcttagcataggcaatagccgggtagtgttgacagtgggccttgagcttactcaagctttaggtctgaccccgtgcagtcccagtggtggtagccatagggatgttgtatcagtccaccccagctccaagtga

SEQ ID NO: 469871 - DNA, 478 bp, Homo sapiens
taaataacgacgtctcaggtcagtgatgggctgcgtatccgatggcggtcccataggattataatggagctgacaaattcctatcacctaggctgctgcgggagaggcagaaacgaagatccactgcttctggggcaggatcaaagtaaacaccacttgcccctgtgggaggcgcaggacgcactctcctgtgttaaacccacaggagatagaaggcacgacaggagggacaggagcacttcgaagactccaccttctgagaccctagtacacaggctctgcggaggctgggccaggagaatggagcaacatcccaccgtccggaaaccctttaacacacgtccacaaactgcctccactactagcccaaccaagagtagcagcaacggcatttaccaccagggggcgggcaagagcacacagagacatttaccaccaggaggagggcaagaccacgcatcccctaggtagtgcaggc

SEQ ID NO: 469872 - DNA, 670 bp, Homo sapiens
tctgtaccctcagcagatgagctatggccctgaacacagaattggatggaaggagagaaggaggctttcacccaaaggagaagagagatagagagagaagagagaagacagccgtgacgcgcagggaccagggcagccctcaccgcttcctggctgacctgtcagggccctatcagtgcagcttcacggcactgcccagcagcaatttggacacaacattcacttctgtggtcctaagcgccccctctcaggaagcaaagagtaaaatgaagcaggtgtccaaagcttgcaaatatgcagaaaggctacagcttggattactgctgttgactggcaacatagttaaccacaatatcctgttagatgcctgtcgtgccctgggaaaccgaatcctgggcccaagggacatgatccagctggtagtgcccctgtgccagggagtcatgccctacaaatcctaaattctcatcagatgggttttatttatatattgtgacttacttttcaatctgactctggtataacattacgagacaaggaaaaaatatttaaccccaaaatatatttccctgccatagcttgaaattgccctgcaagtctcttgtgggaaaaatccacattctatagagaatccccttgcccctttgttttccttccttcctttccagat

SEQ ID NO: 469873 - DNA, 500 bp, Homo sapiens
caagggattaacagaaaagccagtagatggtgaaacttaagcaaaagcagggaatctatgaggaatatgaagacattcgtcgggagaactctgttggcactttccactgttccatctgtggcctaggcatggcgactctcggctttgtgactccggaggccccctttgaatcatcgaagccccccatctttgaggggcttagccccactgtttacagcaatccagagggtttcaaggaaaagttccttcgcaagacccgcgagaatccggtggtacccataggtttcctgtgcacggcggccgtcctcaccaacggcctctactgcttccaccagggcaacagccaatgttcacggcttatgatgcacacccagatcgccgcccagggcttcaccattgcagccatcttgctggccaggagcctagatctcagaatgcagtcagaaaaatccctcactgagaaatattaagactagaatgctaagaagaaatgttaacag

SEQ ID NO: 469874 - DNA, 4897 bp, Homo sapiens
caggcatctcttccctgtggttgagacggatccttccaagcagctgctctgtagaagggctgggcctgtaggttcctgcctcgcatgtaccctagagatgagaggctgcctggcagaactgccggtggctgtggcttgggctgtcggggtcttggggcctggatgcaatgtgatctgaccctgggctgcgcagaccacccagctcatagccctggctgccgccagtgcctgcaatttctcaaggtgaaagcactctccagcgggtcattcgtccgcgtctgagtggttttctgttcgtggaatcatttatttctggtgtcagggaggcccagggcgacttttcccactggctgtaaatgctccgagcatcatcgattcgtctactcccatctccggaaatctgctggagcagcaaaagcgagtgggcaggaacctgtggttacctagatgatccatctgagcttggtcctacatccggggctgtgatgcctgggaacttctgtggcaaccttgcttccagccaatacacagagtggggcaactctcagaaaaccattgagaagagagtcagagtgctgaagtaccgtgtctggaatcctgtcttcccaactccgtgtttcctgatctatcagctgaaaactgcaaatgtttatcatctctcatcttctgtgggccaggagtgtggggcgcaacttacctgggtgactctgcctcagggtctctcccaaggttgtaaccacgggatccgccagggctgtgatttcattttataggcaagacagaagtcaccacctctttgaaacctaatctcaaaagcgacatctcatcatttttgccatattctgttcattagaagtgggtcacaaggtcccgcccactctcaaggggaaggagttacacaagggttagttcattctttctattgctgaatagtatttgtacggatacaccacaatttgtttattcattcacctgttgatggacatttgagccacttattaatagttttgggctattacaaataaatctgctgtggacatccatctacaagtctttgtatggacatatgctttcatttctcttgggtaaatatttagaagtggaaaggctagaacatacggtaggtatatatttacctttttaataaactgacaaaccattttccaaagtgactgaaccattttacattcccatcagcagtgcatgagagattcagtttctctgtttccttatcaacacttgatacggtcagcctttttaattttagccattcttgtggctgtgtagctctattttgttgtggttttaatttgcatttccttaatgattactgacgttaaaaatctttctgtgcttatttgctattcacataccttctttggtaaagtgtctgtctttagaccatttttaactacgttatttgttttcctatttggttttgaaaattctctgtatatgctggatacacgtcctttggcaggcacatggtttatagacattttcttttggtctgcagcttgtcttttattctctaatggtgtctttcaaagaacattatgtttcaattttgatgaagttcaatttatcaatttttcttttacagattgtacttttggtgtcacacctaagaaatctttgcctaagtcaaggtcacaaagattttcttcatacttttttctaaaattttttgtagttttagtgtttacatttaaatctagggtcatttttagttaatttttgtaaacagtgcaagctgttggattgaagttcattttcctttgtgtggatggtccagttgttcctacatcacttgctgaaaatattatcttttctccattgaatttcctttgcaccattgccgaaaatcagtgtgtatctatttctaaattctattttttgtttcagtgatctattttttgtctttacagtagtaattatattgataattgtagctttaaaataattcttaagatcaggccgtgttagtcctccaactttgttcttttacaaagttttgcttttctaggtcttttgtgtttcaacacaaattttagaattagcttgtcaatttctaccaaaaaagcctgctggaattttcattgggattgcatggaacctacacataaatttggggagaacaaacatcttgagtctttcaacccatgaacatgatatatctctccatttatttaggttgtcattggtttttctcagcaatattttacatttttcagtgttcagatctttcatatctttctcctaagtattccatatttatttatgctattgtaaatggtgttttaaaaatttcaacttctgattgttcattgctggtatttagaagtagaattgatttttacatattgatcttgtgtccttcaactatgctaacttacttaagaattctagtagctatttttgtaaattccatcacattttctacataggggatcatgtcacctgccaataaagactggtgccttttttcttttccttggataaactccacttggtcatgatgtattatcctttcttacttattgttgaatttgatttgctaaaattttgtttagaacttctgcatttatattcatgaggaatattggtctatcttttttttttcttctgatgtctttgtctggttttgtaaccattttttaataataaaaaaaccttccattaaaaatatgattgtatcctacccctttttggataagtggtagcatactatacacacatttgccatcttactttatgtacttatatgtgttggaaactcctttgtcatgtacagaaatggttctcattcctttttacagctgcatataattccattatatagatatataggctgagtgtcccttatccaagatgcttgggaccagaagtgttttagattttggatttttttggtggtgtgcggggaggatttggaatatttgcatatatataacgagatatcttggggatggaacccaaatctaagtgtgaaattcatttgtttcatatacaccttaaacacagagactaaaagtaagtttctataatatttgtaataatcttgcatgtgaaactaagttttgactgcttttgactgcatctgtcatatgaggtcatttgtggaattttccacttgtggtgtcatgttcatgctcaaaatgttttggattttggagcattttggatttcagatgtaccatagtttattcaacaatcccctgttgttgggtgggtcagggcaggtggcttttgcatttacaaataactctgtaatgaataagcttgcacatgtgttttttttctttttgtcatatttgggagatgtttctagaagtgagattgctgagtcaaagagtgaagacagagtgaattttgccaaattctttccatggtgattgtacaacaattttgcattcctgccaccaaagtatgagagtgtctattctccagagcttcattaacagaattatgttgtcaaagctttgaatttttaccaggaatagtgattctctaacctgtgtctctcctccagaactctcccctgacccctgtcttcttcaacccaccacaaagccctttcttattctgagttggatcagtcagggtctcaccaggaaatggaaacctcttgaatatttaaaaacagagggactttaatgcagggaatttgttaaacagctttccaagagcctctactccttgtccttcagttctgttatactccagccatttgctgtctttgtgcctatattgacacagctgagcactaccccaaagcctcccatggccatgtgcattggagccattgtaacttcattgtctccaacagttccctccatgactagtaatctttctatgtctctaatggcctctgtttcctgctccacacaggccattacaattcttctctcagactccaaccccaccattcccctgcctgctgccctgcagcccctgtcaccatcagcaataaccttgcgaatgccccaacttcctgccatcaaacctaaacctctctgaacttgcacctatattttccttctctctcctgacaccacagataaatctgagcccttctctcatttttcagggaccactcttccctcccttgcttatatctgtaagctttacctctctgctggtctcttcccatcaacatttcaatatgttcaaggctttattatcttaaaaaaaaaaaaccctcaagttttctcctttactttccatctttccccctttgtcatctcctttctttctttcgcaaccacatttcctgagtgttttctgccatcattgtctcactcccttccatgcctactcttcaacacttggtcattaaatttctgtcccatcctgtccattgagattgatttcctcaaaatcattgggacatgcttctgctaaatccaatgggcatttccatttcctgtttgtgtgacccgctagctgcacttggcactgtggaccattcccttcttccgagtctcacttcctttgtcttctgtcactctccctattttcttcccatctctctggtcactaattttttgtctcctttaatgcttttgctgaatgttgcttgaatgttcctgccctttgggatccttccttaggccctctgctcttgtcagccttcatactttgaccaggctctgtcagcgtctaaccacgatgacatctatatagtcaggactttgggttgcaaatgacagcaacccaattcacactagctcaagcaaaactaaagagaaatgtttggctagcataataggctagtttagaagtagagtgaaactcggcatgtctggatctaaggactcaaatgatgttgtcaggcctctttctctctgtattagtttgttctcacgctgctaataaagacataccctagagtggg

SEQ ID NO: 469875 - DNA, 568 bp, Homo sapiens
gaagattaaggccagtgggctgaatgaatatttttctgggaaacctttgaaggacatcttggttgcttcgcagttatgagtaaaggcactataaacatttgtatgctttgtggggacataagctttcaactcactcagcggcaagttttacttgtttctgtggaaccttgctaccacctccaggggcatcactttccagatatacttaagagtttcacatcctccttctcttcgtcttctgattctgcagcttcctccacagctactaagtgctgtccactaatatgcactggccccgaaccaagcttcaaccataagaccactggtggtgttatttcaaagtccccaagggaaaccagtgacaatgcagaagccatgcccagtcggccaggagatgaggacatgggtcagagtcagagaagggctaaaaggacaagcagcatgtggctgaggccaaaagggaaaggaaaccacatggatttgaagcagcttggaaaggtttgagatgggatagctttggaggcaggtcttgaggagtggaggaggaggaatcttaacaagtagcagc

SEQ ID NO: 469876 - DNA, 594 bp, Homo sapiens
ctccgttaaatcttttgtacagccatgtgccacataacgatgtttcagtcaaggatcgaccatgtttccgacatgagcttctcaggagacactgaggagaaaacagggttgacatttaccgaagtgatcctggaccatctgcatcagtattggctggacctctgtttaaaaattcatgttcctggacgccactgcagacctcctgagttaagaatctggagtaggatattctctgccctgggagagggagctcaatgccctgtggccacaggaccaaattcctggggcctagagcaaccacagaactctttggcagtaggccagttctggtgcaaaattctttacatatttgtaatgttaaataaaagatgcacatttttttctggttgtctttttactttgcttgtggcactctttttggtcataaaaaatttgatgtaataaaatttatctttttccttatgatttctagattttgaatcataattaggacatattttccaactattgagctataaagactaatttgtattagttcatttaaaaatatttaaatctctgacccatttggaaaatatcctgagatcccttggc

SEQ ID NO: 469877 - DNA, 821 bp, Homo sapiens
gccaggactgccctcctccagaccgggctgactctcttccagggtgcagatggaggttagagctaagatgacggaaataggaaggagtggaacgtgcccttttccgctgccagctccagagggtatcgcccttacaactgcatagtgcacatcccgttacatcctgcggcacctctgagtgaacagattgaagaggaggaccaagaggtggtttgattgaaatcaaagatgacttgcaggtttctgacttgggagctgctcaaccccacatttgcaccagggtctactgctcgctgctctgcagagaacattaaaagcattcacaaaagagatatcacagattttgttggttgtaaacctgaaagacgaatttttctgttatattttatgagtatgggttttaaagccttcataatacctggctacgcctctccagtacccatgcatttaagatgcaaagaagctggattctttgtcaccagctgccatccttcattggttgagggctgctcccagcatcttcctgcctgcaaggcagaggcaggctcctcgtgttcagtagagttgctggtgtgcatgaatgggaagtgctggggacatggggtgcccacagcagccgtaactggaattggagcctctgctgtgtgcttggtgcttcacgtgcatttgctggcctgcctctagtttcagggatttttcagaggaggaaagaagagagtaagcagcttgcctaaggccacacagcttgttgggtggcccgtctactccagagcctaaaccattttgctgctgcttgctttgaggtgtcctgtctggcccct

SEQ ID NO: 469878 - DNA, 1931 bp, Homo sapiens
cttgccactctggcatatcgtgagaaaccagaatgggaaatatctactggagggtgaagatacaggaggaagcagaggtaatgcgtgaagcagagcctcagaggaggtggaggagggttgaactcagggccaacgtgtgggggctggtctcaaacaggagggtgtatccctgaggctggagaggagtgagaaaaaaatggtcaggaacgcagagcagcgcctctcgggaagtggctgccaacgttacttgtgaggtggaaatgtccaaagtgggtctaggatgcatcaacacaggggtgaaggtttgggctccacactgtggggaacaggagaaacagccatccacccggggccatccccaaactgaccttttctgtgtccctaaccctcagaggcccgagctctgcctgggaattaaaacacaaattcctgcaaacgtgaggtctaactccactgtcacggagaggctgacgatgccagctgtgggaattgcagtggggacaggtatggagaggatgtttctggacatgggagtgactgccacttggagctgcaggcagaagcaacagctggtgtgttttcctgagcaggttgggggatggctcaaaatcaatatttactttacaaacagccatccggagggtgaaccgccctgcctctcaccctcagcttttctggggaaagatgtctgtggcctgcttagctctgccctgctggtcttcgcctctcgatccaaagcaactttgatgtgtatgggaaaagtactgcactgtgaaaggaactgtggacagatggtccacctgagctcaaaggtggggtccctccacgtatgcacctcaggactttccatcctgtgggaatctcctaaaaagttgctccatgggtggcactctctgagcagcacgattggtggggagggctctgtcagcaatattatgtcgtcactgacgtctgcaggctctcctaggggacacttcagaaactttcatagaaatatttctctttggcaacagctcgctgtttccatggtttgacgatactagccagctgtaaagtaggccagcacgggagagggcggccctggggacacgggctgcatggcacgctcatttccaaccctggggcaagtcagataacctcattaggtctccatttcctaatcttcaaaatggaacaacagtgtgagcctcagtggcctggtgttgtgagaatgaggattaaagaactgcaaatttttgagtttttttggtgaataattgtgaagtcttttggaggacatatttcagaaacaaatgaaataataaagcagaccttaaatgtattgatataaattttgcataggtccagtaaccttttctttgctacgcttagtgatctactgatttaaaaagagtcctctcatatgatactgacagaacatttttaacctatttttttttaaccagcaataagtttacatagttcaacattccaaatgcatgaagggatacagttactattccctttcctgcccctgttccagccatccagagttcccctgcctaggcaaagtatggagaccttttataagctcaagtgtgcgcagaagctggttttatggaattatttgtatacactaattctgccagcctcagtttcttcatctgtgacaggaggtgataaccgtattttctccttaggcctgatgtaaagcgcctgacgctaagtaaatgctcaataaatattagctagtattcaagcttgcctggctgctcagagacacagaggggcggggtccctaaattgacaagcctctgtttccccctctgtaaaatagagatgctaatgcctatttcccatagggttgaaaggtatgtgtgattatgcctgcaaagctcaatgcatggtggacgttgttatctggaatttccttacccctcttcagtctaccc

SEQ ID NO: 469879 - DNA, 2989 bp, Homo sapiens
tccttactctgatcagctagtcatgcctgcagagggcttggggccacttcgactgggattaggggcggtgtgggaacctagagtgggagagattaagctgaaggaagattttgtggcttccgaggagatccggcagtgtcagtcttcagctgcaaagccaagaagatttgggaaggagtcagtcaaagagccttgggccagagttccaggggctctgggagtggttgccaggatgagcctggagaaggaatttcaaaagataatgtcatcaattaagccaggaacaggccattttcacttcttttgtggtggaacgtcatcagttaaggcaggaacagaccattttcacttcttttgtggtggaatgtcatcagttaaggcaggaactggccatctggatgtgtacgtgcaggtcacaggggatatgatggcttagcttgggctcagaggcctgacattaacttttatctttttggaggaaatgtcagttaattatctctcaccttgacactctctccatcaggttgcatctgggtgcagattgtctttttcttactgattacatatatatgatattactttctgtctttacttttcactttcattttgatgccttttgaatacttttaatatagtagtagtattcatctttttctatgtggtttatgctttctaggtcttgtttaagaaataaatccttatcctcaaagtcttaaatttctttctctgtattttgttcttaaattaaaattttgttcttcacacttgtgtttaatctctctggaattaatttttctgcattatataaggtaaggggccaattttgtttgtttctatataaataaccaattactctagcaccacttattgattagttcttctttgctactgaaatgttaggtctgtaataaaccaatttcttgtatgtaagaaagtttattgatggctattctatttcactggtccatttgctcattttgtgctaataccatactgacttcattggcacctgctgagataaattattcaaattcattctaatgtcttagttatttttggccctttgttcttccaaatatacatactggaatcagcaaggtctattaaaataaaaactttgaaatttatttagaattttatttattctgaaggttagtttggggataactgaccattatatgacattaatcctctcaatccattaatacggtatggctctctatttattctttaataactttcaatataggtcttgtacaatttttattacatttattcttagatactctatattgatatttgttgttaaaattatgtactgttataaattatattactctgtcagtaatgatcactcagaaaacctctttgacacacaagtagaactacaataaacatctctgtgtatattccttacagaccttcataagagtatacttgggatctatccctgggaatggaattgtaggctcatgaggaatacatattcctaatttgatgaagtaatcccaaaggtacttctgaacagttctcaccagcagtatatggggtttctgtgtctccacttctccaacacttgaccctagaggcattcctattttttgccaatctaataggtgtaaagggatatctcactgttattttaatttgattttgattcctaataagtttgagcatctcttcatatacttaatagttttttctcttgtaaaatgttttaaaatatttttgctcacttttgggtttctgtttttcttcgtgatttgcagtaattgtatagtctagatattatttccttgttgattttagtcattgcaaagatcttctaatctattgtcctacattaaacagacatctttccttttgatgtaattaatttaatgctttttgccttataatttatatttttgaaaatgtttaaaaaatccttccttgcctctaatatgatcacaaaaatattctgaattttgtgaaattaattttatatttgtattacctgtcatatttaggcctttaattcattagaagtccacctttgattgcagttataggtttaaattcagttctaatgacctattctttctcaattgattcatggtatcacctttgtcacatattcaatttcgatacacacacgtgcacatgcatgtatacataggtttggctcaaacctgtaggttttactctctatcttcttccattggtctgtttatatattctttctccacaataaaaatgtttctattaatatgttaatatggctttgtgtactgtcttactgtctgttaggaaaagaccctttattttttaaaggtttttatgttgatatgtgttttatttcttttaagtaaatatccaggagtaggacttctggattgcaagcaaatgtatgtttaactttatacaacactgccagagctttctccaaagttgccataccattttgcattcccactagcagtgcgtgagagttccagttgctccatatccttttcagcacttgataatgtcaattgtttaaagtctagccattgtaatgggtgtgtagtgtttgtgacatgtattttcaattcaattattatattttccatttctagaagttctatttatgctttttttaatctgcttaattatttttagatacacttgcttcttacttatctctcctttacttttttccctttagattttattcatttatttttaatagactttagtttttagagcagttttaggttcacagcaaaattgcacagagttcccatattccccttgccctcacacatgcacagcctctccatcatcaacatcctacaccagagtagtacagttgttacaatcaacaaacctacattggcacatcattatcagccaaagcccatagtttacaagagttcactttcagtgttgtacattgtatgggttttgaaaagcatataataacatgtttctactattacaataccacataaaatagtttcactgccct

SEQ ID NO: 469880 - DNA, 1316 bp, Homo sapiens
ttaagtgacttcctgaagtcttcatggttaatccctttccagtgtcagcctggtgccaccctgacagctgccacgtgtggtcctggaaccttgttcctggttccatcctagaggagtgggcagagatggggactcacctactctagggggcttgggtctttcagattcaccaagatggcaaagagaatgtttttctcttggcccctgcaccactgggaaaggctgcaggctgcattgcctctacaaggctgccatctgcagctgcttcaagtgggctgtgacctacgttggggcactccattctcgggcattgaggcagcccagctcctccacggccggcaacactgggcatacgccctccccactgccaaagaggaagaggaagatcagctccacagacgctgctgccaaggaagagcccaggaggaggttggcacggttcgtctgagagcaaagagagtaaatccgggctggggcactggctcctctgaggagaaaccccactggagctgtgagcttcgggcagctcctggctcctggcactcccctccagcccagccagcaggcctggacccaggagctgaaaatgcccgtcttgctgctgatgactttagagtcaagtatgagacacagctggccatgcgccagtctgtggagagtgacatccatgagatctgcgaggtcgttgatgtcacttggctgcagccagagacagagatcaaggctctcaaggaggagctgctcttcatggagaagaaccatgaagaggaagtaaaagacctacaagcccagattgccagctgtgggttaatcgtggaggtagatgcccccagatctcggtacatcagcaagatcagggcagacatccagtcccagtatgacgagctggctcagaagaaccgagaggagctggacaagtactggtcccagcagactgaggagggcaccacagtggtcaccacgcacttggagaacagcctgagggtggtggaggttcactacaccatgcagagggagcagctcaatggggtcctgctgcacttggagtcagagtcggcacagacccagacagaggggcagcaccagacccaagagtacgaggccctgatgaacatcaaggtcaagctggaagctgagttcaccacctaccactgcctgctggaagacagggaggacttcattctcggtgatgccctgtacagcagcaactccatacaaaccatccaaaagagcaccatcggcaggctggtggatggcaaagtggggtctgagaccaatgacaccaaagttctgaggcgttgagccagcagaagcag

SEQ ID NO: 469881 - DNA, 3560 bp, Homo sapiens
aaatctcagaccacatcatgcagatacaggaatatttcctgggagacctggaatgctacttgggaggggactctctgaaacaagagatagcttggggacatagaagttgcccagagaggacagagcagcaggacaggaggtgaacgtgcatcctcctatggccaccggtggaaaatcatatgtatgggatgcccaaggatcagctctctccagggaggttttgtgcaaagtggggttgtttcctttaatgtgggagaaaaccccaatgagatcttttgctttgcagacaaggtaaccaaggctcggaggatttatgtagttggaaataaaggaactaagagttacctcatcaccactgccaccaccatcaccaccatcatcatcagaatggaggtgatgcggtggggcttcctggcgctgctcttcacggcttgtgaggagctctgtgcagcagctaggccaggccctaccttcatggatgaaaacctcccagagagggagttcggaatagcccaacacctacagcctcagggttattctgcagatgccttgagcagcctcatcatgctgccaacaccgactgggggcttcaataatggaagcttattttcacacagttctggaggctggagttccaagatcaaggttttggcagcaaactccaatgtcatctcctccatgaagccctggctgccactcacagagaagcaggctgagtcctgcaccaggatgcctggctgaggagcagagtggcataaaagcatttgctctttgtttgcaggccgctgggcccaggaggctgggtctgttcagaatttttgccaaaggtgccaagaacactcattggggaaaggacagtctgttcaataaatggtgctgggaaaactgggtatccatatacagaacactggaactagatcttgatctctcactatttacaaaaatcaaatcagaatggattaaagacttaaatgtaagacctgaaactatgaaactattaggcaaaaacattggggaaatgctccaggacattggtctgggtaaagatttcttgagtaagacctcacaaacacaggaaaccaaagcaaagatggacaaatgggatcacatcaaacataaaagcttctgcacaaacgcaaagaaaacaatcaggaaagtgaagagacaacctacaaaaatgggagaatatattttcaaattgttcatctgacaacaaattaataatcagaatataaggaactcaaacgactcatatattattttatgtattatttatatattaattgctgaatacaatttctcaaatcagtggcgtttataatgtatgtagatgtaccataatgacaatagtggtagaaaggactaggcgaggttaatgaaacgataatgtcgcaagtgactcaaaagccaatagaggagttaaaatagaatactaaaaaagtttgattaacccaaaggacagtagaaaagaaggaacagaggaacaaaaaagagataggacaaatagaaaacaaataataaaatgatagaccaacatatcaacatttgcattaaatgtaaaaggacaaaacataacaattaaaagacagagattatcaggctgaataaaaaagcaattcccgtctttatgctctataaagtgtgcctataaggacacccttctaatgtaaagacacagatagtttaaaagtaaaagaatggaaaagtacataccatgaaaatagtaagtataagaaagctggtgtgattataacaatattagacaaaatagacctcaaggcaaggagtattatgagatacaatacagattattttataataataaaagaaccaaatcagcaggaacatacaccccttctatatgcatatgtgaccaatgacagaacttccaaatgtatgaaacacaaactgagaagattaaagggacaactaggcaagtcaacgatcctggttgaatatttttaacatccctttttcagtaattaatagaacaattagacaaaggcatcagtaagaatatagaatatgtaaatactatcagttacctggacctaattgccatttataggagattatacccaagaacagaatacacattcttttcaaatgcacctggaatatttaccaagttagaccatatgctgggtgataaaataagtcttaataaaattcaaaagattaggaaaaaaaaaaagcttaacagtgcaggttgctggactgatatttaaacagctccctgggtcatgatcccaaagctaatgtgggagagctctatgactggaaatggacatttacaagtcagcagatgattccggcagcattttgcataggagatgaatggacatctggattcacagaagctggatttgaaataaattctctatgtcgtccagcctgtctgtctcagtccctgagaatatttctggtaatctatttatcactgatttgagaacaaaaggggattaaactggcctgaccctcgaattttcagctccagactttctggttcttcagcacctgggaagaatattaactactcatagtagaatgaatcacgttgagatacaatattaaataatgtgttttattaaaggagcacactgggttgtaaaatgtgacactgagtatttctctacaagcagacttgaaatcttgcgattctttctaaacatgtaaagcctgtgatgggtgctccagatgataactagctctatatttcccagagtagtacctttccaacccaatccttacccatttttcttatttttctctctatttccgtctcccctgtagctagcatcagccctgtgacggtttcagccaatgcaatgtgggaggcggtgatgaaaaaccatttccaggcctggccctacagcccctgcacagctctctcccccacctttcctcctgtgtctgctatatgaacacagaggatccaggggagacttctgccctaaggggtgccacaccgatccatggaaggcatccacatccttgaactgctgtttgatgcagggagggcctcactgccagttcacgttaatttgtgatgtgaacaagaaataaacctttattacctcaggccactgatattttggggtcgtttcttaccccagttagcctgtcctgactcgtagagtttcttcagtgcccactgctggtcctgggagggagtgaagaaagtgaggtggaccagtgccattcatcaccaccatcagaaaacaatcttaagctcttttgttcacaagccaatagtactgtttttggaatgaaggatagctgctggtttggctctgttgtaagccagcaataagagaattaaaggactcattaaggtcctccaatgatgtagacaagtgctctcagtggtcattccccattaaaagtgaataagactatcaatcgagtcagatattagacttgagttcctttctctaagtgcaaaagggtgttttctggatcatgaaaacgaaatgcccatttctcttcaatcaagttaacacaagggacctgtggggagagtctttctgttctcgtgatggaggatttgctgaattatc

SEQ ID NO: 469882 - DNA, 653 bp, Homo sapiens
gtggatttttttcaatgttcagctgacattcttctggtcagcgacagtgggctcaagtgttgttgcactgtgttcacgtgatacaataaatgaagactatggtcttgaaatatgggtcagaattagaatgaaggaaaggaaatggcattccaagcaacacaagcatcttaagcaaattcacatagtgaaaaaaaagagtggtatgattattacacagagagattactggccagactggacaacatactcatattatgtgatagttgcggccaaatttgaagagttagaacaaaaatcttacatgacaaacatttcaggcccctctgctgcaggtctgctgaagtttgctggaggtccactccagaccctgtttgcctgggtatcaccagcagaggctgcagaacagcaaagatttctgcctgttccttcctctggaagcttcatcccagaggggcccccccccacccaccagatgccagccagagctctcctgtatgaggtgtctgtcatcccctactgggagatgtctctgagtcaggagacacgggggacaattcagaattagaaaaatgaaatattttatttttcctctctctgtcttcttttcttatttttccgtaaatttcagagactaaaccaggaagaagttgaat

SEQ ID NO: 469883 - DNA, 701 bp, Homo sapiens
ggtgcaggattcacatgttgttttggatcttatcgatgggagcctgcaatcaccactgctcctacaaactggttaaacttgcaagtgtccttgcatctggcatatacaacctacagctaggctatctgtgtcagccccttcttgtactacttgctgaatgccagcaacctattgtagagaaggttcagtgcaaacatgtggctggagccctgcaactatcaatgttgtgtggaaaaacaagtgtagtggccgatcatctccggcttgatctccacctggctgaaggttttgccgttgtagacgcccaccatgctgcccatcatctcaggcaagatgatcatgtcctacaggtgcgtcttcaccacttccggcttctccatgggcggtacctccttcttggccttgcgcaggcgcttcagcggcgagtgctgtttccgccccagacccggttcaaacgctgctgccgacgcgcactgtatagctgcataagctgctcgtagggcacgtccagcatctggtccaggcccacaccgcgattttaattttcagtagcaataaatgagggagatttaacttgaaatttccttgagcctctttctacttcatcaatactgatgtctagatgaggttatatttctgttcttaaattttgttatatttaagtcatttaaaatttcacacatttaattaaaaataattat

SEQ ID NO: 469884 - DNA, 674 bp, Homo sapiens
ctggattgcctggctccccagtgagagtgtgtatcatgagagactattccctcgttctttttattggaaagttgaattacaaatggagacctgcgcctggacgaccctcagctgcaggtctgttggagtttgccggaggtccactccagaccctgtttgcctgggtatcagcagcagaggctgcagaacagcagatattggtgaacagcaaatgttgctgcctgatcattcctctggaagttttgtcttaggggtacccggccgtggcagggaagtgaatctgaagaccaatcacatgagcttggaaggagacccttctccaactgagcctcagcatgggtcatcatctacatctggactgaagactcagagaaactctgctcccacagctccagccacagctgcaatcctccctgccaaagctccatctagtttgcccaagacggcttcccttcattctggggctattgccttcaggttaaacaatgatttctatgccatgaatgcacaagcataagaaacagatgaaaaaatagatatattaaaatttctcagaattaaacacttttatgactcaaagcataccattaaaagacatccaaaatattgaagaaaatcttttcaagtcatatagcaaataagcttctactgcccagaatatatgaaagcacctt

SEQ ID NO: 469885 - DNA, 605 bp, Homo sapiens
cgtggcttctccctcatctaagatgtgggtttcgaaaacagaaactgggaagactcaaggacattacagatgtaaccttaccgaagtcccgagtaatttaatgagcagagatgtgactgtgtccttgaatgggggaaatgaagagaaaaatacgaggtggaacaaaataaagttatatccccaagtatgttcgtgctacatcatttggatggtaaccatgggtgcgcctgacagcgcactgccgcaggagcgccggtcagacaggaggctacctcgcggtgtgctgtgggaaggtcatgtgggcggggaggccttcggctacgggggtcgggccaggagcttccgctcagcgctgacttcagattcttcatctcaaataaaaaagttttccaagatctttgccactggaaaatttttggaatcattaaactgggggcattactaggacaaaggtcattgtttcaaatctttcacgtgtcactgcaccgaccttcaatatttgatatacactgtcttgcaaaccattgatttacatatgtacccattttttatatgtttacatgtgttggcaaaattaaggtgaagaaggaacactgtgaatcaaa

SEQ ID NO: 469886 - DNA, 735 bp, Homo sapiens
catcaagggggcagtttctcatcaactgttcagcaccattgcccttggtattgtcattgcgatagtgaacgccccctagttaatcacacgccctcgcacagacaccttccgcagggacctcgtcccacggcagaggcccagcaggtcacagctcacatcctggaatattagagattttgttcactttatacttatgtccgtacatccccacccaaagtcctggaccaaggagctgtatctagtttccaactgtgggtctaacccaatcacatcaggcagccacggcttcccctctggctccttggcctggggtgaggagagcagctgctcccaagaacaactttggtcacaaagagcatgctcagaaagagaagagtgtgggccggaagagatggagatgaagatatctggaaatgaagctgacgtggatcactttcagcttcttattcacggttccataataacttcacctccagaactccatctggcactgtttttccttagatctttggctagtttcctttgcaaacttagaatgccaatgcgttccaaaaaagttatgaatgtgaaaaaccaaacatatatacatcttccctttcacaatattccttgtccccttccatgttgcaagggaaacattcaggaacttggggtaaccaagccactgcccacagttcatgcgtgggctctggaagaagcccattccacctccattctctaaacaccctcccagag

SEQ ID NO: 469887 - DNA, 755 bp, Homo sapiens
ggccttgcactctcttctttgatgcctggcaagttcttcattgtgtttgtgtctcttttagggtcacagcagaagcaggggcagacttcagtgcctccaaataaattgcctttatgcctatctgctccccatccaaatacaactgtgggtgtggacatttgggatggaatattggggccttcgattcaggtgtggatgaatggagaagtcctgatcatctgtggtttaagatgtggaattaaaaggcagatggaattcgacaagagaatgatagatccaccaacagttcgcactgtgcacctggaagagctacacactcaatgccagcctgtgaaagcagccaggagggaggctgtaccctgcaaagccacaggggcagagctgcccaagaccatgggaacccacctcttgcatcagtgtgacctggatgtgggaattgaacaatgagaacacatggacacaggaaggggaacatcacactctggggactgttgtggggtgggggtagggggggagggatagcattgggagatatacctaatgctagatgacgagttagtgggtgcagcgcaccagcatggcacatgtatacatatgtaactaacctgcacattgtgcacatgtaccctaaaacttaaagtataataataataaatttaaaaaaaatgtaaaaaaaaaagatttataagagaagacatccattccttgtgaaacagaaggggtggagtgtacgtttctctggttatgtttcacaa

SEQ ID NO: 469888 - DNA, 1565 bp, Homo sapiens
tgtgcagcaaggggctttcccaggaggcctgcagctgggatggaggccaggactagtgcaaggtggggattagagactccaagccagggtgcttctacttgtaagaaaaccagcaagagggtcaaggagcccacgggcgtccttctgagatgagacatcggtgcatcctgaagaaggctacagaccccagtgttctcaccaggcaaggaaacactgagacaattaccctggcagggagagcgtgccatcatctccagggacctgagtcttcctaggaaggtaaaaatggctgccacataggtgcccccttctgcttgggatccccgtctttacctcgtaatcactgacaatgccgcaagtcccagtacttcagagaattactgagtgcgagcggtagtctggggaagctaccatgaggcccggggaggggactggaattgcccagttccggagcagccagggctacagtccaggtctccagagtccgcaaaaagggtaccgctccccactccacactgccccagtccagttcacagcactgagatgttgacctgggaggcagtgaggccagacctggatggccagccctggcagatgtcctctgttccttcacgtgagctgggaaacagggctgaataatattccattgtatggctagaccacattctgtttacacattcatctgttggtagacatgtgggttgcttctaccttttggcccctgctgccaggtgcagacttgggcactgatcttagcaacagtggctccacttttgattatttcatcatttcaaatgctgtcacatcagcagctgcttataccaccatcaggaaacacgcttcccacacaaacctcaccaccgtccacccaggctcctgcagactggccagggcaccagatgctaccagttcactggaaagtacactgaccttggagtccatagccctgggttggagtctcccctctgccatcgactatctgtctgattctagtttccagttcaagttcaccttgactgagattcaggatggagtggtgatttggccccagccccgagacattgcaatgctagcactgactacgccacttgtgaaggcttgtgtcgcagctgacctgagcaacagcttctgaacttttccacccaagtccactgtcttcaatttctcttcattcagcagccggagccattttttttggagtaccatctgatttcatttgcctgcttaaagcctccaatgactttggccttaagcccttctccgctcctccctccaacttcatgctgtttcctcccatgatgtctcctgctgtgtccctctcaggaccctctgagtgcctggcactgagctgagcattggaaatgcaatgaacactcaaggagactgctcagagccaagcccagagttgggcactgcaaggccagagaggaatcagactgaagccacaccttcaaggggccccacagtcccagggaaagatgtaccctcctccatagcctccagggacaaggagaagagatgaggagcaccctgctgccaactggcagctccatggtgctaaggac

SEQ ID NO: 469889 - DNA, 643 bp, Homo sapiens
tgacgtgtccatgtacgttatattcctaggggcacagagcaagatgaaaaaagagaatgaatctagaagaagcttttctgagaaagaagaactgactcagagtgctatgatggtcttgtttcaagcagatctgttcttagagcctgttggaagaaagcatttttcagtgactttccttgtttcctttgcaacgcaagaatctttaaacccaaataatttagagtactggatggaagacatttatactccaggatacgattcattactaaaacgtaaagaagccgaattcagacgagccaaggtctgcaagatagctgctctgatcgctgctgcggcatgcaccgtcatcctcgttatttctgataataccaagtctgacgctgaggttatgaatcattaccatggcttggagctattggatgcttggggtcttgggatagatagaagataattcacctttaagactctgttcggcatcattttctctaggaagtcttctatatcagtcactttaagccatggtatgcttccctaacaagcagttccccaaatctcagttacttatgacaacggtttgcttatttcccatgtcacatgttcatcatgggtcaggtgcagctggatttcatgtcttcttaattat

SEQ ID NO: 469890 - DNA, 802 bp, Homo sapiens
agcccacccgctacctattcccagggcctcctgtggagtcgggatgagggttctcattcaactttggtgcaaggttatgaattcggctgtgaatccatctggtcctggactctttttggttgaggtggtacagggacaatggtctgggtggctggaaaccatcttgggcaagctgcctgaaaaccagattgcaagatctgaatgcattcacagctcccaaaagcctcttttcctcccaaacagaatggggcatgacccccttggaacttctttaccatcaccccttccagttgaggaaatgaaagctatgggaaaccagcagaggcagagagctgacaatattctctttatgccaaatgtgtgctgccatctccacttgggctctttatctcttcactctaaagagactgtatcgaaggtgtcattgcaacataaacgcaacaatattatgactgccctcttcttcccaccctctgctaaaggctcctacagaaattgcttttgtcttttcagaattaaatttctttataaaaatagtcagcaaatatttcagcaaaaataaatgtccctaaatagccactctatccagtataagtcatcatcaccagtgctcctccaaaatgcctaaaatagagtccatgctcgcagttccctccaaggaacgtccttgtttagctaacctagttagaagctgtgagcttgtgcttttgggtcctgtgagagccttgtgtttttaaaataatcttgtctaaaaaccctctcttctcccaaaggaggttcaggatatgcaaatttccaagaa

SEQ ID NO: 469891 - DNA, 687 bp, Homo sapiens
ttcagaagatgaagccccagtgccagtccagtcctagaggggcctgggatggtgggaagaggaacaagatagaaccaaggttgagggcgatgcagcaacccagtgagccaatttggaaggagacagaggtgagaagcagcctcaatcctgtagacttatggggccacaggaactatttctgtaatatcattgcatcctgggacctgatagcccagccaggatgctgtcatctacttggaagccatggagatgtgaccagggaacttgggtcaagtccagctcagggatggtggtgtttatctggagtgacaagatgttacacagcaaacacaatggccagcaacgttaccaacaagacaaatccttgctccatgaactcccatgtgttcattgggaatctcaacactcttgtggtcaagaaatctgatgtggaggcaatcttttcgaatccgctcttgcacaacaccctgaatgccccactcaattccaacatctgtggcacccttctgctggcaatgctgagggttaaattggagaacctggcaagagccttagaggcctccaaggcaattgaaatggacaagcaacaaatggaggataggaatgaaaatgttaagaggcttcagctcaaggagtgaggggagggttgacggttgaactggcctgactaggttagtggcttttgct

SEQ ID NO: 469892 - DNA, 688 bp, Homo sapiens
ctagtgccatcgttccagtcctagggaccccaaggactcagtggtgctgatttttcttcacaaataatgaaaataggctagatggctaagccttttcattcagtcttaattttccctacactatcaccatcttttcttctcatttgctctcttcatggaagcagagtttgcaggattgaggttcttaatctggcctttctttatctaaactcttttattcggaagtctgttacagaagccaagaaaacttcagggaaggggcactgttctaagtgctttagatcaattaagccattgaatcgtcatgcaacccaatgtaaattttcctctgaaaagctccggatacctaagatgtcagaggaatccagggtggtgtgtgccaaagacattgccttatttctagggaggcggacggccaaggagcctgtcaatgaagtccataaagataagcttcttagaacatggatcaaggtggagagtgaatcaggagaggcggatctggaagagatccagcatcatccataaacagacctattggaaacaagtcttgctgtgcagggattatataataggaaaaataaaaataaaaaatatatagttgtttgaataatagtggcaagagtacttgttcttgccttattcttgatcttagggagaaagcatttaagctttcacctttaagtatgtt

SEQ ID NO: 469893 - DNA, 827 bp, Homo sapiens
cacccaagggctgaggagtgcgggcgcatggcgggggactggcaggcagctccacctgcagccccagtgcgggatccactgggtgaagccagctgggctcctgagtctggtggggacatggagaacctttatgtctgcagcttcactcctgaagccagtgagaccacgagcccactgggaggaatgaacaactccagaaacgccgccttaagagctgtaacactcaccatgaaggtctgcagcttcactcctgagccagcgagaccacgaacccaccagaaggaagaaactccgaacacatctgaacatcagaaggaacaaactccggacacgctgcctttaagaactgtaacactcactgtgagggtccacggcttcattcttgaagtcagtgagaccaagaacctaccaattctggacacagtgagaccaagaacccaccaattccggacacaacactgaaaaagagaagtgaaagaggacacccttaccttgtttctgagctgagaaagcttcttgtttctcaccattaataggtgttagctatagggttttgttaatgttctttatcaaatagaggaagttctcttctagtcctagtttgaagtttctattgacatatctttaagctgagagagtctttcctcagccttatgcacattactaatgagcccgtcaaaggcattctttatttctgttacaatgtttttgatctctagcatttactttttattctttcttagaatttccatctctctgcattgcccatctgttcttgcatgctttctactttatccattagatcccttagcatattcatcatagtt

SEQ ID NO: 469894 - DNA, 701 bp, Homo sapiens
acagacagttactcatgaggccacagcacagaaactgcaagaaatgtcagacttggggggcatccttcttcatccaggactggggggttatccttctccattcaggactgggtttgtccttctccatgtagaactagggggcatccttctccattcaggaattggggagcatccttctccatccaggacttgggggacatctttttccatccagacttggacgaccatctttctctatcgaggacttgggggaccatccttctccatccaggactcaggggacatcattctccatctaaagtacgagttccagtgtccctctctagacctgctctatcctgttagtttctttgtatgtcctggagggacatggatgaaattggaaatcatcattctcagcaaactatcgcaagaacaaaaaatcaaacaccgcatattctcactcataggtgggaattgaacaatgagaacacatggacacaggaaggggaacatcacactctggggactgttgtggggtggggggtagggtttggagggttagcattgggagatatacctaatgctagatgacgggttagtgggtgcagcgcaccagcatggcacatgtatacatatgtaactaacctgcacattgtgcacatgtaccctaaaacttaaagtataataataataaaaaaaaaaagaaaatgtacttttct

SEQ ID NO: 469895 - DNA, 691 bp, Homo sapiens
agcatgtagatatgataggcatacaaagaagcaatgacattagaagcagaggagggagaaggattaaaaggctataccttaggtcggttaagagaaaaagaaaaactaggaggagacaaattcttgttagaaaaaaataatgatcgaggcagagcaagacagtggtgcagacctctccagctatcatacccctatagaaacatcaatatgaacaactgtccacatgtgaaattaccattacaagagccaacagaacctcaatacatgaacaaggttatgaagcacctttggcctgtgaagatgggtaaaaccatggcttacagagtgagagaaccaatactctgtgactgtgatactcctccctcagtgccattatgccaggggctccctgtggatcacccatgggcccatccagcaaatgttgcagcagtggtggagccattggaagacttatgtctaacgtgggatttggactctctctaatgctaaaatggaatacgatggaaaagttgcctctccaaatggacaaaacaaggtgtcagcaactgaacttaaagacatacagatgaatgatctggcaggcaaagaattcaaaatggctgttttaagaagagcctgaacactgagaaagcagagacataattcagaaatttaccagtagaaattcaacaaagaaatcaaaataatggtg

SEQ ID NO: 469896 - DNA, 768 bp, Homo sapiens
gtggtgataaatgtccaggtttacaagttgaaaagtagcagtcaatgtgctacaatggatggatttgatccactcgatgtccagtggtccctggtcttcaggactaagcgtaaatttgcatggcagataggcagtttcccctttggctttttcaatcatctgctcaggagtagtgatactccaacctctgatgaaatccgcgactctgcacaggagcacgaagcgcagcaggagcgccacggtggctgccgtgccgtgggcggcggctgcagatgtggcttcccaggtcagccactgagcccaccgctgtcctcctgcctgcagaagtggctctgtgagccgtttgaggagaaaatgggggactttgggcttcagcccgaggagaacacggtggagatggaggagcccctgggcgtccgcaggttaactgaaaacatgagaggacacaagcacgggaccaagtctgtcactaacctggggcgcgccttgccatgcgtctccctgcgggcggcgcggtggtgctcctggatgtcacctccaggcgcttttgagactgcgaccggcaccgggcaccaggcacctgcggattggcctccccacgccgggttcagggacctccagcgctccgcggtgcaggctgcaggcgacctcaacgtggagctgctgccagcgccacaggccccaggggaggcccaggatgctgcttccccgccccaagaagggcagtttggaggaaagtctttggcctgatggaaggcggcgcccatc

SEQ ID NO: 469897 - DNA, 2710 bp, Homo sapiens
gccaacaccggaaggtggagtgatgggcacctgtgggacagccaggtagagacatctgaggcggcagctggggaactgtctggaactccggttgatgtgctacctgggcttaagatgtactcccaagagttaccaacacctacacttgggagtgggtacattatccagggaggagccaagattgaacacagtctgagtggaggaggccacacagcacaaccggggccagactgcagctctctgctccggggcccacctggggctgtcatctgccagccctgctttcctgtagaagatcccacccgtaccagccccaggaatctaggcaaggccagagcacctcaggagcctcctggagtgagggccacgacacctgggcaggctggctggtggcccctgggcagccttcctccccagcccaaggacagccaattacagcacagggcagccctggacagacagcaccagctagaaggacaggggcgttccctgcagtccagagcagcccccggggatgagcaaagagggccccagtcatcctgccagaggctctgcccccaggagcccctgcctgcctccctgaagcccacaaggaaggtgtcaactggggcctaagacgaaggcagttgaccatacccagggaacagagagcggcctgaggaaacgagacagcgaggggagtgaactccgggagggaaaaaccccaaggtttttccttggaggagggagcagatgagcggataagaccggtaaatccgtcacataccctcaggacgcagggagagcgcggctggaattggcagttatgcagaagatgcagccgggaatactggactggaacatgccggcgcttaagtgatgaacttggtgggaaggttggagaccagaaaatgaatgagtgaggcaggtcaggctctgagctcttctagaaggagctgaaggggttgaggaggcagaggtgagggaggaaaaatattcagtgcttaaaagaggaaaaatgaatagataagaggaagtatctgaaaaatgattaggaaatttccccaattaagaaaagatgcacatcctcaaactgaaagggcctgcagagtgttaattacattttaaagttaaaatcttatgtgtactttcaaagaaaagcatctacattttgagtcaaaattgctaaaaacttccaaagagaaaaagcaggtgatatctcattgtggttttgatttgcatttatctaataattagtgatatttagtgtcttttcatatgctcattggccacatttgcctgtttttaaatcaggtaatttgttgatttgttgttgaaccatggagacatatttttaaaccacaacagctatcttgcagattgcggtgagaactaaaagatttatgtatgcaaatcatattacctgtcacgtagtaggcactcaaaaattattacttgtcttcttagggttgttatgttaaataatgttatgttaataacatatgtaaaactgcttcttaaattataaagtgctatgcaaatgtgagttaatactacaaagctgtatgcaaaatattttaatatttttctgaggttctccatacttaaatatataaatctttccatctctagactttattctttttttagctgtaatcccttttttccattttacttcaagttttatcaaaaaaaaaatagcagccaaaatagaacaagtaaagacggagaaacaataactaatttcactaaagcaaagtcagagtaagatctatttaaaaataaaacgtgaagaaaagctgcaatggattacactattgaaaaatcctaagacaaccagaactgccgttccttcagagaatgtgagtgatgttgaaagattaataacatttggataacattaattacagtgatgttataaactctggtattccagttgccataacaacccgctatatgttggttttctaatgacatttcgaacaagtgttgaggcgaactgcatcacttcagaactttgattgctgtcactcagtgattttaaaattgaattgttttgttcttaaagagtcagaatatgtcactgtcttcagaaatattctcaaaattatggggaggaagtgatacacattcctatacaattatagagcactcaaaaaaaaagaaatgtattttgtttttaatacaaaattaacaggttttttctatagggaatagaaaaaaacagaaaggagaaagattatgcttcatgcttctcagaagactttgttcccttgcagaattatttgacaataaaattctttctagaaaaactcacttttcttgcttatatttctctcgtctccattctctcctttcttttcacctccctatttctttcttccaatgaattcttttagaagccatggattctggtcaaggtagatgcaacactttggagttagtgagaggaggtcattcctccatccagctttctgctttctgatctctcttccctctgctgaccaacgcgttgcccaatggatataataaaagaaagactacttgccactggcttatattatattggattttaatattcccaagagaatgtgttaaatatatatattgtgccactgaccagaagcaaagcatgattgtaacagacatgcttctaagtatttgctcagcccacagcctactctgctcctgctgccccacccatccacaaatatgaatcgtttgattaaat

SEQ ID NO: 469898 - DNA, 664 bp, Homo sapiens
ttagtttgggatgagtaaaggtgtgtggggtaattgccatgctttttggcaatcgggcatgcaaatgggaaggtcacaaatcacccagtcataccactttggacaaagaaatcgggagtgtgcatttctttttcttcttatttttgctttgttagaagtgtgggctatgaagatgggaaaaggccgtcgatcactctggattcttcctgcagacagggggcatagtggggtaggtgttgaccccaaggtgagaggagtggaactgctttgcagctgtctgagctgtttgagtgtactcacgcaggccaggctgagcttccaaggctttcatgacaaaggcattcgtattctcatctacagttttagtacgacatttacacaaacagtgtacaataagaaaagagactcagcttctcaaactacaagacccagtgaagccgtcccctgaattggtcacttctctctcccctcccttaaaaggcaaacaaaattttttcattgcttctcaatattacacaagaatctttttcaaaagagaaaaccaaatttcatgtttgcattattgcacctttaatgctaaagctagtttttattaaaattttataaatctatccagttttaattagtttgaccataagttaatgttcttataaaccttttataa

SEQ ID NO: 469899 - DNA, 789 bp, Homo sapiens
actacgttcggagcgaactgcagtttgcctgtgagggaccaatgtatttagaacctctctctatgaatcggtttaccacagccttaataggtcagttggtggtgtgtactttatgctcctgtgtcatgaaaacaaagcagatttggctgttttcagctcacgtgcttcctctgctagcacgactctgccttgttcctttggagacaattgttatcatcaataaatttgctatgatttttactggattggaagttctctattttcttgggtctaatcttttgctaccttataaccttgctaaatctgcatacagagaattggttcaggtagtggaggtatatggccttctcaccttgggaatgtccttgtggaatcaactggtagtccctgttcttttcatggttttctggctcatcttatttgctcttcagatttactcctatttcagtactcgagatcagccggcatcacgtgagaggcttcttttcctttttctgacaagtattgcagaatgctgcagcactccttactctcttttgggtttggtcttcacggtttcttttgttgccttgggtgttctcacactctgcgagttttacttgcagggttatcgagctttcaggaatgatcctgccatgaattggggcatgacaggaggacttctatcctacagtctatgttagaaattgcagatcctatttttttggcactgggagcatccagagacaagagcttgtggaaacacttccgtgctgttctgggaacactttttatttatgtctgatttac

SEQ ID NO: 469900 - DNA, 1782 bp, Homo sapiens
aagaagcttagtggggtagacagacaagtgacaagtttgtgctttcaataaagtatgatggcagctccacaatttgccaggggtctgcaacccgtgtccacgtgcgaccgcagtcgcacccgagcccgggatctgtgcacttacgtgaggatgcactcgggccagccagtggctttgcccacctccctcagacaccgctccagggtccgtcagcgccaggcccatgggccatggctgtctgcaactcccgacacaagctgcaaggcaagagagccgctgggaaaccgcaccgcaaggatgctggcattggaacaggaattaaaagaaatgaaaaaattcaaagggatatgcaaatttacacagaaatccaaccgatataaatccttgaaagatactacatacagatatttcatcagttctcacatgccaaacccagcaaagccaaactttggagcctcccctgcgagcagacctgccacaggaggagaggcagcacaaacctccctttgcagtgaaaatgccacattgtgtgtgcttcttaccccatcacctctttggaagtaattagtgtctaaaacatttcaaagataacatatatagtggctacgatttctagtactttttaaaaattcaagcccagtctcttctaattaaatgtataaatgatttatctctgtctttcttaaaaagaaccaagagccccaattaaaaagtaaaacttaaatttcctcttaaaaaattgttacgtcaaaattatctaataaaccatagttcagaaaataatttctgaattaggaaaatatgaataataaaaccaacagtttatgtgctgaatttcacatttttattttttattatttttaaaattttgttttaagttctagggtacatgtgcaggagtgttacgtagggaaacgtgtgccatggtggtttggtccacctatcaactcatcacctcagtgttaagcccagcacgcattagctatttttcctgatgctcctcccccacccgccctgacaggtcccagtatgtgttgtttcccttcctgtgtccatgtgttctcactgaacctcacatttttaaatacagcatatgccaggtgtcatttcagtacccataattatacatagtatatgtatatgtgtaaatatatgtatatgtgtacatatatgtatgtaatatgtgtatgtaaatattatgtaaatatgtatgtaaatatatatgtaaatatgtatgtgaatgtatgtaaatatatacacatgtaaatatgtatgtaaaaatatgtacgtaaatatatgtatgtaaatatatgtatatataaatgtaaaatatgtaaatatttgtaaatgtaaaatatgtaaatgtaaaataaatgtagaatgtcaaatgtaaatgtaaaatgtaaaataaatgtaaaatgtaaaataaatgtaaaatgtaaatgtaaaatatgtaaatatatgtatatgtgtaaatatatatgtgtaaatatatatgtatatgtgtaaatatatatgtgtaaatatatatgtatatgtgtaatatatatgtatatgtgtaaatatatatgtatatataacacagcatacagcatatgccaggtgtcatttcagtacccataattatacatagtataattatacatagtataattagactactatgttagctaaaaaatgttgattagatacaaatgtataaatttatcttctctaaacgtggaaattctctagaggctatttccagcttctgtgtggattgtagagcaggctgctacctgt

SEQ ID NO: 469901 - DNA, 903 bp, Homo sapiens
tctcaggctcggtgtactcgcgatccagaggccgcccaggccatgttccactgcctggacacccaagctctcgctcgcgctcccagcatcgcagaaccagggccaaatgtcaccgtggctgcggccaagccaggcggtctgcccggcggcggctgcagaggggcgagaactgagaacctgccgctcaaccccatctctgtaggctgcggagtggggtccggactccctcggacggcctggccagcagttctgaggtccggcagaggaggagggcaggaggcacggcgaaggcagctgccaggcaacctccaagcccgccagcacccccagcctcgcagaactcgggccagtgtcgccgtggctgcagccaagcccggcggtcggcctggcggcggctgcactaaaaacaaaaactggcctcagccccatccccggtggctgcggagggcccctgccagcggccctatctttcttcaaaggaggagcagggcggccagagcggccgggagggctgcgcgcctgcgatcctacggcgtcccaggggagcccaagagaaccgcactgctctaagccttttcctgctctggaatagctactattgttacctccattgtagagaaaacagatgggggaggttgttgtggaaggaccagggaaactgactaggaaattgacttagattctggattttatttttttttttggggaagttcaagtatgtctttgcaaggattatccagcatgtctacctactcaatcatattatcagaaacagaaaaagtgtccagattcttgtcttgtcctgttcagattttttaaattccaagaacagtcaccttctaccagacactctgatgttggaagacaaagcatatttggtaagtggcatgatttctgggctcc

SEQ ID NO: 469902 - DNA, 483 bp, Homo sapiens
gggtggtgcaagatgtgctttgttaaacagatgcttgaaggcagcatgctcgttaagagtcatcaccactccctaattgcaagtacccagggacacaaacactgcggatctgagctttgcgtgaaggtggaaggtgctaggggaggcaatgatacggcggtccgaggcctgttcatggagggccttccaggccacaagcaccttgacaagctgttgccaggacacgcaagtgggatggtgtctcttgtgcaactgataagaggaagtgacccttggattgaaggaagtagaaagattaaatcagaaagaatcaaggttcagagtctgcaaagccacaagccctctgtatgggccagcaagcccctgggcctgagaggcatcagtaattgtcacccgagttggattgaactgaaataaagaagtaaagatcctatatcatctattgaaatctttaaaagggttgcaagatatgcattactaatc

SEQ ID NO: 469903 - DNA, 877 bp, Homo sapiens
aggagtgggccaacttgggaggatggcctggcttccagagagcctgggcaccactgctgttttgtttgaaacgttgaagacttggagcaagtttggaagcaattcgaggatgattggagaaaccgatcaagtccatcgcccttggtggcttgcatccaaattcattaactcacccaacaagcactcaaggattgccatctacgagggaggaggaggagggggagtgtgtgcagaatcagtgactatgataggatgtcactcctgtgattgtcacaagtcagttgacattgaattaatcaagagggagactatccaggttatcctgggtgggcctggcccaaccagaggagcctttgaaagaagccatgtaagacgacgtatctgcttccccttcaccttctgccctgattgtaactgccaaaccgcatcccagaatggctgtgccactttatattcccgcagcaatagatgagtgatccatttttctatacatcttcaccagcatttttaaaatgttgaattgtggtaaaatatatataacataaaatttaccatcttagccatttataaatgtacagctcagtcatgttaagtacattcacattattgtgcagccagtttccagaactctttccaagttgcatatctgaaattctgtatccattaaacaacaactcctcattccctcctgcccccagcccctggcaaccgtcattctacttcctgttgctatggatttgactactcgaggttatccaatttgttgagagtcgttcatagtattctcttacaatccttttttatttctgcaaaatcagttttaatgtaccctctgtcatttctgattttagttatttaagtcttctctttttttctt

SEQ ID NO: 469904 - DNA, 1073 bp, Homo sapiens
gaggcacagagattgtgcagtttgtctactgtgttctcagccttccccaagatttccataacaatgtgtccttgtggggaatggggcagtccaggctgaccccaagggtctaacaaagggacaaaaccaagagacaacttttctgagtcaaagattctcaaatgaaatggatctgaatggtaggccaactaaacaaagcggccaagtgttttataccctcctggccagagtcctccctggagttcacagggctgccttctgcccagcacccactcctgccaaggtgtgcaggaaccaggcaagtgccctttttgccatcccgctaaaagtagaggatacagaagaacaaggaatccaagagaacgagcaacactctctgggaaatggaggtgctgtagcctcaaagggagccaagcgtggtcctagtgcttcgggcccagggagaggtgagagctgctgtcccctgagccgggggcgtgcctgctactcagttgctctgaagagtgggagactgcagtgggggagcttggtgaaggaggctcctgcctgcagctccaaccacacatggttagacaaggaagctcagataaccaaggggagtttgcagaagttcttcttagctccactctatcacctgtttgtgccttaggcaggcacaaaccgttgaggctgtgctcctcagcttcaccctcactcttcctgtggctcgcttgcgaagtatcaaaacatgtttaaattgtgaaaacatttaattcaaaattaaatttcaaaatcatagacaagactgatataacagacaagtgaagacccacaattctgttttacagatgttgtgactttacatgtgtacttatatatatttttctctcttaaaaggagggaaggaagaagggagaaagggagggggagagagagagagaatgaacattactgaggactaaactctgaccttttttctctcttgcccaaattcctatctaagggactggggagtcatgccttacagaccataaaatctcatcagttgggtttcatttaactgtatataatgtgacttactttccaacctgact

SEQ ID NO: 469905 - DNA, 731 bp, Homo sapiens
aaggaaaatgaggttaagcaaccagcacaggctctcacagcctttccctagatctcagaagtgaaggatggagtcaagaacttcagggcttccaaaccgaacttctcctagtacattttactgcctttgcatgtatcctgtgctgaaaacatctgctcccctgagctcagctaggacaataagagcatattatcaacggttaaaggatatcccaggccctccagcaaatgccttctggaatcatctccacattcagacccatcgtaaacaacagaggggcaatactcatgcttcgcaaaagccgttcattccccttggcaaaggcgggagagagggctcaccaaccttggagaagcctggtttacatcgtcaaggtgatgagcattcagaacttggctctgactctgaaaacaagttgagcattccaaatccaaatccaaaagtcaaaaatccgaaatgctcccaaattgaaaactttttgagcgccaacgtgtactccaaggaaaagctcactggagtattttagatatcaaatgtgcagacttgggatgctcagctggaaccaccattccgggagcgtggtgttgtagcggacattactactcaacagctcacctctgaaaaggtagaagaggtatcccatctagccaaaggattaagatagtcacttttgtagcagttgctgtgggaatgattcgagaccactggcctgactttcagggaagaacagg

SEQ ID NO: 469906 - DNA, 754 bp, Homo sapiens
gaaacggacctagaattggtttaatgaagatgtggctcatgagggcaatgagcagcaggtgggctctgctctctgggcaagcagaggagtctctctccatggccaccactgtccaggcccatggcaagtactgcctgggtaccacggatgttgactcaaggccaagggaagggcacttcagtcagcttgaggtaaatgttgccagtgctgaatctctcccttcagggcagtgggctcccctctggccaagggaaggtccagaaatgccatccaggaaccaaggcctggaactggggaccccaggagtccacttggtgctctatcccactgtggtcaagctggtgcccaagctgttttgggcccgaccttctgcactcttgttctgtgaagccttgggcccagagtacaaacagttggtattggcgaatagcctcatggaaaatgctgcagtcgtcacagctcacgactggtgtccttatgagaaaaggaaatttgaatatacagagaagcaccaggggtgtgcatgggtagaaaaagactatctaaggggtcatgaagcagtgctggattccctctgcaagctgagtccacgtcctttggggatagctgtcacctatagtatagtcatcatggtggagtctccaaagctttgagaagcaggcataaattcattttatttatttactgggttttaaaagttatcttacttgctagacaatttattatttgcatattagactttcattagttaaac

SEQ ID NO: 469907 - DNA, 1996 bp, Homo sapiens
gtgcattcgagtctgagggctgctgggcttttttagcgacgtctgcatgcatcaatgtccctgtagcctcatccgcttctctgatcattttcttccccttctttctctaattgttttctgaggatatgtactgtttcccctgcagcccacctaaactgttttttactctcacagactttaggcctgagagtttacagcagcagcttattcatgtgatggagcacatctgtaaattaattgatactattcctgatgataaactgaaacttttggattgtgggaacgaactgcttcagcagcggaacataagaaggaaacttctaacggaagtagattttaataaaagtgatgccagtcttcttggctcattgtggagatacaggcctgattcacttgatggccctatggagggaaatgttctcacaagcactgctgtgaaagatcagaataaacatactgcttcaataaatgacttagaaagagaaacccaaccttcctatgatattgataattttgacatagatgactttgatgatgatgatgactgggaagacataatgcataatttagcagccagcaaatcttccacagctgcctatcaacccatcaaggaagggagtaagagtgcaaaaatccagtcaggtatatttggaaaaggatctgcttattcacgacacaatgccgaaagactttttaaaaagctgatacttgacaagattttggatgaagacttatatatcaatgccaatgaccaggcgatcgcttatgtgatgctcggaaataaagcccaaactgtactaaatggcaatttaaaggtagactttatggaaacagaaaattccagcagtgtgaaaaaacaaaaagcgttagtagcaaaagtgtctcagagggaagagatggttaaaaaatgtcttggagaacttacagaagtctgcaaatctctggggaaagtttttggtgtccattacttcaatatttttaataccgtcactctcaagaagcttgcaggatttaatcgaaatctctgttatcagttctgttttgaaggtggtggtttcttgatgataccagaaggtgtcaacagaaggttgtacatctctcagtaacaaaaatgtagtgcggcctcatctactttgggcatcttctttcttagaacttttctgcattcacaatcacttttttaatgctaatcacagtatagtctttttgaagacatgtcatggcagttagactcaatacatgaggtacaaacagtgcagtgactttgttgacatgctgacagtactaatagctatgactaagttctcacaagcatgagcagtaacaaccgcaaggcagctgccatttagccatcagcagttctaagacatatcttgacctcaggaatgctaaattgtgaaaaggtgtgtgtcttagaattgatgaaatttggtattttatgatatgttatttctaggcgattagtgtagtttcttaactgtcctccttacctccagctgtgaatgtgatgtacattttaatctttcaaaacctagtaaaactacaacagcttcccagataaagtatacattttatcaagggtctacatttcttcctgcctctcctactttatctttcattaaacccccttcataaaccttctgttctgtccacagtctcttgcttttcctctaaacatgggaatgatgtgaaaatcacagatgggaaaggatttgaaatccactctttgctcagctcaaatacataggaatggttactccctcactacccagagccagtgcatcagtcagtcctacagagccagcctccaaaactcacccaagcttgcttcactgtgtctccactactgcattccagttcactccatcctcactcgctcctgcaatggcttccaccaggctcccggattctactctttcctttacagtcaagttcttaaacagcagccagggtggcctttaaatgacaggcttgtctagctgcaagactgatatgc

SEQ ID NO: 469908 - DNA, 2021 bp, Homo sapiens
tcctgggtgcatgcggaacagaatagggagtccccactggggcaggcgctggcagctcttcaccgtgtcagctcactcagccctcaggtcgtcctatcctcagcattttccaaacctccccactgctcctggtggggcttcacaatcgaacattgtcagcccagagctgacacccaagccgaccacagccctaaagcatgctgagtgcctcttggacctgaattcccatagtctgtaccgaaagccacgccccaaggctgcagtttacctcaatctcagtttgcctttgaaatctgttcacaggctatctctgaaaaagtcctttgggtttggaaaacgggactttgaaaacaattccgtttttattgtagattcagggggcacgtgtgcagatctgagagaattcttctggtggtccaataatctgtgtggagctcgcgccaggagcctggaagctggcctccgtaccccgacccctgccccgccttaactctcccatttcatcagctattgtccagttgattctacttagcaaaggtccctggaattatccaaatgcctgtcacccccactgctactcctctagttcaggccaccattacctctcactagattggtcccctcaccctccactaaccttgcttgcattcaatctaatttccacaagatacatggcgtaagctttctagagcccacctcagctcctagcattacccccttgaacttcttcaggggttgcttacatgcttgcaaattcccaacatgatatgtgtggaccttcacaatttggcttcttcctgattttatatgtcttgacaacctgtttccccctcattcccctcaccctctcagacccctaatatgctccaaccattttgaactactttcagccaattcctggctgggggatcttggggaagtcaatcaaccttcctgtacctcagtttcttcatttgtaaagtgaagatggtagcagcacctgcatgggttgttgaggataaaataggttcatatatgcccagtgcttttagcagagcctggcactgattctgccacctcctcgtgcctctttgtatgcagaaactttgtacctggaacttcctcccacttccttcggcttgcttttgtagcgtggtggtcaccacttctgtagaatgagccgcaggccatgttgcatcgtaatcgtctgcatttcattctgtccacgcaccacactagaagctctttgagagtagggactgtttctccgttgccttgacacaccatagtcaatcaatatttgctgatataaagaaaaaaaaacagctcacaaggagagactacgccaaattccagaatcaaataaaaggacaaaagaaaaagaaacaaagaagaatatttgatattatcccctgctttcttggtacacctgcaactggccgccagtgagaatgtactaccaggtaattttcataaccaacccagtgtaccttgaagcacagctggtttttcaggcatttagaatttcctagttttcattctaatcttactgaattttggggggtggtggggggtgtgggggggcgggaacactgatggggtagggcgaagagatacctgggcctgctctcaggctcagaataccagggaaatttcagttttttttttttttttttttttcgcccagtagtctaggctcaaaaacaccctgtggtttctacagtgtgggtgctgttctgttcccaccgctctgaaagatgacggtaacaatgtggatttcgactgcagtgggcatttctgtgagacggctcctttctcccactgaagctgcagtttgagattggataatcttaggtgttggacccttgaccgtgcttttcatattttgagtcattttgtggaatcttctaatgttagagtgtaatgtttgcctaacattggctgattgtcactgttttaacattggctgactagacgtgaaacttttatcctcaaaatggcccagtcacgtctggttaaatgtgtagcatcatttttacctg

SEQ ID NO: 469909 - DNA, 1059 bp, Homo sapiens
tccagaaaacagagaagcaggaagaagtgagaatcccgagaaggaatgaaagagacaaagcatagagatgctcacagattggcctgtcacgcagcccctagatggtggttctgggccagggtactccaatgttcatgtcagcaaggtggaggaacttagagaaccacaaatccacactatcaaaggatttgatatgcttgaggtctgcaaattcctccgtaacagccaaatggggacccagccctacccgccctgcctgttgttccaccctaatctgaggccagttaccaggaggctgagcctcactcagatgctcagaggcggcaggccagcatcaagctgtcagccaggtggaggcgaggtgctgccgtgcaaaagccggacggacagcgagtggggaagtgtaggagagatggcctttatcctcgacggcaactatctggtaggctccaatggggacatagggaagccttaggtgaaattatttctaaggttctgcatgaactgtccattattatggaattaattcttttgtttcaggggtctggataagtttctgatgttgttgtctaggatctaggcgtagattcaacagatacctccaggtggaccttcaaaacctttgtgtattcaatgtatttcaataatttgccttgaagaaaccagatatgtgcacaaagttatctttttggtaatgtatcacagtattgatacatttataaaataatgggaaaagtctacatggagagaaataagatcagtcaaattcactgtgtcttattttattctggcaaaagaatcatttttcattcactcattctacagctgcatgttggccctgtgctgatggccagagagcaacagtgagcaaaacagacatggcctctccttaatgaaacttagagatacagtcagataactcagaaataaatgcaattcacaaatcatgccatgtaagatgtgcctccttcctcttcacctttttcaatgaatcgaagtttcccgcagtctccccagccatgcttcctgtacagcccacggaaccatgagccaattaaa

SEQ ID NO: 469910 - DNA, 891 bp, Homo sapiens
tagctactgattctacctcatgatgcccttgccattgggcctctgccctatttccccatttgccaccacactcgttcagttgttcatcaccttctacctggaccattggaacagcctcctagctgctctgctgcctccagactttgccatcatccagcgtcccctgcaccaggtgtctctcacggcagttcagctagagacacagaagaaaaaagatgggctcgatgtaagtcaggtgaatgggtgtctgggtaagagtttgtgtgtagcagatgccaatggggtgggggagggagagcgggaggatattggctatctcatggctggaagatttgctaccacactggctaggctttctcagtcactgattgggtctgcaccaggcagcaaagatttcactgtcatagacctgcaggcagatgagctctaactttagagaatgagaatatcgccttaaaattagcatggcctctactagagcactttaagctaaagacatttcttgtcaacaaatacttgttgttgttgttgttattttgctattttaagctaaaaaaggtttaacaataatttttcaaattaataatatacaagtcctcaataaaaagaatgaaagcaaagggttttataaacttttttagaaataagaggtttttattgcaggagcaatacatgtttatttttgcaaatttagaaaatgaagaaaagaacaaagtattttaaattgcttagagtccaactaatcatgaagtgtgtatatgagcatatagatatgtatatatgtatatgtacttatgtgtacgttaccattttactttttctgcccaaaattaaagtcatacataccttctattttgtaactttctatttttcagttcacataatgcaaac

SEQ ID NO: 469911 - DNA, 811 bp, Homo sapiens
gattcagaaggtggtggtttcccaggggacaatgggaacttccacggaatgaggggctctcgggccttcagtgtcccaaacctgctcctcccatgatctttccagtcatggtaaatggcaccaccatttccccaggtgctcagacccctggggaagacatctcggacacatcattcctacactcaaagcccgtgaacggcttcctctggcaactggagtcaaacatcaagtcctcccggagccggagagccctgcagtactttggctgctctgtggcctcacctgggacccctggccgcaggcctccgcggagctggcagccaggaacctccagaggctcccaacctagcccgtcctgcaagatgaagctgcttcttgggaatcttttagctcaggatgctgtgttccatattcacgacggcatttccatgctcgtgagggcaaccagtagaactgttctctgtgccggacgagcaccaatggctccgctcctccttgctgcctccctgagtcgctctgtccctgggactgctaagggcacggggcctgtagtgacggttccggccgccagggaagatgctggagaacagcatgcaggctcagagaggtgaagtgacttgcccatggtcacactgctggggaggtggagaagccaggatgtaggctggcttaactgtgctgctattctgcctcatggcatttagtttgaagagaaggggcttcaggacaatactaacctaggtgcacaggttgtccttcccgttgctaaggagccctaggcaagtcagttaatctcagagtctgtttcatc

SEQ ID NO: 469912 - DNA, 1017 bp, Homo sapiens
cagattgttatagaaaataaacttgctctttaatggggaatgggagagagggctgtctgcgcaggaatgagggtagggtgtctgtgggctgagtcagctttgggctcctggttctgattatgcagctcatgtatggtgtccttgctatcaggcaacgtggccgctccataacccacagtgcccagggcatagcacctggaggataccagcaagtaggcgggcagtcaccacaggacctcccagcaggacaagggcagctccaggcccagggctcccatggtcagggccaaccagggcctctggtggcctgtggcctgcaggtgaaagggagcccccagcctcttctttacactcccagcgaacgacatgagcagtcattttctgggactggagctctgcctgcacccctgccctggccactcacacctcagccgtgctcccctgtcctgcccctgagagcagaaaccagagagtggaggccctatggcaacccaggggcctccagtttaaggaaaatgcttcacagggctttgctctatggtccaagcagctactccctctggaaagaaggttttgatgtgcttcctccttctcgttcctctccaaagaccctcctccaaccccatatctcaggcagatctaggaggtaaggaccaggtttcaggactggcttatttcattcatccaacaaatacttgttaggtctttaatatgtgctagcactagacaatcaaaaactacttatttaacacagattttattctcagcacagtgtctgatactcatccccttccctgagaatgaataggtaccagaggcagtgggaagagagtatctgagaaagactgaaggctgcagggtcaccaaagataaagaaaagaccctcctggttagtgagcatttagtcgagggcatgaggggaaggtatgtcttcaaacagtggtgctcaaagctgcagtgtgctatgatagggtatagctgcagacacggtacctgcctttgagaagtttcaaaact

SEQ ID NO: 469913 - DNA, 925 bp, Homo sapiens
agctgcattctcaggcaagggtatggcccgagggctgctaatcagcaggaggcctcctcttgggcaagctgccctcattgtctcgccttgcctaggcctgctggccaggttcacaggccagagacagtgccactcttcctcaccttctcgggaacgggaccagcagatgctgtgggaggctgggaaggagggaatccagccccttgcaggttcatcatttgaacagcaaggagctgcaggccccttccacacttgcgagggtcggctatggattgtaacagagctgccggctttcaggaaccccaggttctttcccaccattgcagtgtttcctagccgggacagcagagggcgccagctctcctgccagcactgggtcccgggccgtcctcccgcacatctggaaatgggctctatcactctcttgcgaaataaggccagggatctgtctgtgtcggatgaattggcacccgaagcacttgtggaatgtggggaatttgccttgccaaggcggccaacacatctgagtcttgggcttggtcaggcctcggtggagcgcttggcgggaccacctctggtctgaagactttgcccttccctccgacatgcagagagggggaaaaagtaaacgggaggacaggacctcccagatcttttcccctggggaagaaaactaaaaatgtttggtcctgaccttccgggccctcctgaagaaagcaaatgtcccacattaacaggtccttgagaaagaagatataattccaagaaagcattttcttaaattacaagtgatcagaaataccaaagaagatttaaggtttgcctgcaacagaccatctacaaatgtgagacttctcttcacctaagcagactggattggggcctcattttgcagagcaagcaggcctacttcattttcagattc

SEQ ID NO: 469914 - DNA, 627 bp, Homo sapiens
cagggtagagctgctcaagaccatgagaacccccctcttacatcagcatgacctggatatgagacatggtgtcaaaggaaattattctggagctttaagatttgactgccctgctggatttcagccttgtgtggggccggaagtcctttttttggccagtttctcccatttggaatgcctgtatttatccaatgcctgtacccccattgcaagaagaacaaaacaagaagtagaagcagaagcagaagcagaagcagaagaagaagaagaagaagaagaagaagaagaagaaggcaaaaaggaggaggaggagaaggaggaggaggaagaggaggaaaacgtaaagaagcagcagccgcagccctattttactttcgcttcaggacaggcccctaggccattaactttgtttcttccccaagacctagacaccggcagttccatcaaggaggtgatcataatggacgcttagtgtattatgcacttactaggattagagtgccaggctttatgtaagttatctcatttaatctacatggaaagcattacttgcattttgcagaataatttaaggtcttacctcactcatgggggctacttggaaagccccagtagaccaataaacac

SEQ ID NO: 469915 - DNA, 1066 bp, Homo sapiens
tgggaagcttcttcttttttttttttttttgtcatttaaaagcagggcctccatgtgatttctctctccctgcttttgccaatgttcagccaatgtctagactgccctaggaagagaatgaaggcgctgaaggcgctaagccactgcagatgcacgctgcctctgtggaggtcccaccctcctgagctctctggaaatcctgccccaggccagaagtattcagggacgctgaccttggagccccaggcccggtcacatttccagctgctccctgcctatgaggacagccagaggaatgttcccccaacatgtccttggctcacagtcctttctcctaccacctcacagaggctgtcctttttgttcctgtcatatccaaactcagctgcagaactcatttcttcccatggaacccccacactgcagactggctggcttgcccagagcagcgtgaaaacccacagaatctggattaggactaaaccttgagaagatctattaaaactccctggcagctttcaagcaaacacattacagtgggttttgttactcattaaggaaaacaccgtgcttctccgtcctcacctggagaaattaggtaatcagcacagattagttaaggatttcaatgcaaattgcatcattttcatggtcattaacagtggtgtggtttatatctgttttcagtcctaaaaaaacgtttcccaggtaactaaagaaaatattcaagggcagaaatatcaggcgggtaagatacttaaaataaatgagccatttgttcctgcttctgtataaagttgctttttcaatttcagatgacatgatactgcagatcaaagtggggaaaaacctttggagtaagagcgcttttcttccctagatatgactgacttcgttgcttgatttacagcacttgattaacctggttaaatttctgcttctgtgcaagtctcagatgcagaactagggatcgtcaaagcgtatcattatgatttgtgcttgtctttcctccctcacaacacaggacctcttcctcaaagacttatttgttatatttctggtgtct

SEQ ID NO: 469916 - DNA, 3553 bp, Homo sapiens
cggttggatttgatcctcctgtcaatcattaggggcagctggaaaccatggagctggagcaaagggaggagcaagccagacagaatccaaggcatgtgagggtcaggggtcaaacaagggagatcaatcaaagagtcagttgtcaatttacccaaagcaagccttggcgccctggaagagaagttgcttctgtgcttcccaaaggagatgcaggctcaggactcagccaaagtggggaaaaaaaaaaaaaagtgatagctaacattcaagtggcacttttctacacgcctgagatagttttgagcattttccaggtggaaaaactacagcccaagaggccaaggaacctgttcaaggcccaaaacttggtagagccaaggctcaaactcaggacctggctccagagtgctctcctcctcagcaccaccacgctgctgcctggccggggaaaggaggtgggctccctcttccttcacatcacaagtgatcagagacgcgacatttcagggggaaaagtatgtctggcaactacaaatttgtagcttgctgatatggcgcgcgcggagagctctggctcagagtttgcgatccgagagcgggatccgcgctccctcggtccttcctccctcccctcttgcggcctcccgctgtcatctggagccgctcctgccgccccctggcggcgaccgcgggaagggccggcccccatccgcacccctgaccccggaggtcaacaacgggatggtccctgggtcccaggggaagagacatcacccagtaggagggagtacggtctagacagaggccacgagggcgggagggggcgagagtggagagtggcccagctggccagggtcgtctaagtgagaggaaaagggagagggcggttgagaccaggccctgaattccgcgttcatcttatcctgaggtctgtggggacctgttgaaggactggggcaggggacggacgcgggcatccttccatttggaacagccattccggcagcatcaggatggggcggaggcaaagcggggagtgggcgaggcaagtggtgctgtaaacctgtgcgagaagggggcggtgactctaagggcaggaaggagccctggtcacacacacactcccacgcaaggtattcagtgccgagtgtggccttggtgctaggattcaaagaggaaaggaagaaaactttccattctaaaagaaactccacgtgaggcgaagaagatgaaatatagtcagaaaaccataccagtaggtggtaggtaaatgcagaagtatttaagagctcatacaggagtacctgcctcaggacagggaatctgagatgctctgcagagctggatcttaaagaacggattaagttgataaatgatgcatacgacatcctatagaagactgtcaccaccccacctcactgatcagccctctgcctacagccacacccacagaacattcagccatttctcctgtggttcccagcctgcagcacagcgtctgcacgtggtgagggctcccaaatctctgaggaatgaatggctcactgctgagagcaaccttctgggagttcagggcatgtggaactggaataagagcaacgtgtgaacagattacaggaaggcaatgcaggacagctggaccctttggggggaaacttatggggaacacagttttcttacttataagcactgagattgcctgagaggggagagatgatgcagagtgtcccaaatgtatttgacgtggaatccttttaccagcgaaacatctcttgggcctagagttctgaaaattgcactttgaaaaacactgctctcagctcttacaaacctcgtgttttcatcctaactgtgcttcagagaattgtgtcccagcaggaaaggaaacccccgtataattccctacgttgctagcatttggaagtgggatgaaaatggacctacattcaaacccctaatttcaagctctgaaggaggtaccaggatccatcacgatgcttgtaaaattgttcctttcattttcctggttgtaaacttatgcagactgtaaagtcaaggcaagcctgtgcccagcaaataataagaaaataagggaggcatggtaaacaaaacaaaacactttgagagttggtcaacttgctgttattttgagctgtttctaaaaatctcagggtagattccctcccctgcttgcctccttaacccagtcctttttcttcctcctccaggaactctggaatgctgacctacagtctgagttcctgtgcccttgcctggggctgactctctacttgacctgtaacccacaactgggcaagagaaaattctgcagccacagctctgaggacatgagcaaaatggtttccagacggaatgtcaaggattcccatgaagtgtcagggagtcttcaggccacacttcaggttatctccttctctttcccttttctgcttcacacttgctctcatcctctttctcaccccacatctggtcagaggagataggaaggttcttgttacctggtacaagacaacttttggaatcccagatattcagattatttccccttttcctctttgcaaatgataatactcacagccaagaggcatcacccggatccgaggctgcttctccttaggacatgcagacagaaggagaaggcggggctggcagcctccagtccacagcctccctttcttcttccggcgatgattaactaggcctagacaatggagatctacggcatacgcccagggcctcctcttctcaagcatggctgatcagtcactttcccgtctatccttcatttattgaagccaactatgaacgactaaaggaaggatgagaaaagtcacccaaagtcaaaggggacagcgtgggagactgttctagacagaaggaaacacctttgcaaagaccctgaggaaggcaggggactctccaggagcagaagggctgtgtggcttcagagtccacaaaagagagcagatacaggacactggctagagcaggccctggagcccgctgctgtcctggaggccttggggaggcccagtgttcccagggtggaagaagtaggggacagcttgacgtagtggctgttgatcagctgatatggaagtatgtcattttattaacaattgagaaaggagtgctgtgcaattccattcaatgccagtgatgcttatggccgtttttatgagttctgtcattttcaaatgagcaagaggaagcctctaagggggtttaagcagggactgacgtaatcagatctgtgtttttccaaagggagagggagaaaaagaacatttcttatttttcaaaaaaggtaatgcaaaagcatcattccacaattctcttgtaatgaaaaaaataaatgcaaacttaagcaaatccatcattctgaaagaatatcctgcgtaattgcaaaaggaaagaaaacaggaacacattgtttctttttgattgattaagttaattgcacatgtcaaactttttacttgtcagcatctgaagtttccttgaagctaataagaactttcttctggataac

SEQ ID NO: 469917 - DNA, 824 bp, Homo sapiens
cctccaccattggaaagtcaactcctgctacgtcctgttcagcaaggatttgagcaggtttggtgaagattgcttacgcctgtatagagggggtatgatactctggccagcatatgcacacgaactgccaaaatatggtgtgaaggttggcttgtcaaattatgctgcagcatattgtactggcctgctgctggcccgcaggcttttcaatatgtttggcatggacaagatctatgaagcccaagtggaggtgactggcgatgaatacaatgtggaaagcattaatggtcagccaggtgcctttacgtgctatttggatgcaggccttgccagaactaccagtggcaataaagtttttggtgccctgaagggggctgtggatggaggcttgtctatccctcacggtaccaaacgattccctggttatgattctgaaagcaaggaatttaatgcagaagtacactggaagcacatcatgggccagaatgttgcagattatacgtgctacttaatgcaagaagatgaagatgcttacaagaaacagttctctcaatacataaagaacagcataactccagacatgatggaggagatgtgttagaaagctcatgctgctatacaagagaatccagtctatgaaaagaagcccaagaaaaaaagttaaaaagaagaggtggcactgtcccaaaatgtcccttgctcagaagaaagatcgggtaactcagaagaaggcaagcttcctcagagctcaggagtgggctgctgagagctaaaccaaacaattttctatgaggatttttcagataaagacaataaacttgtgg

SEQ ID NO: 469918 - DNA, 463 bp, Homo sapiens
tggaggcattaaatgtgcctggtgtgttggggacacctcctcttaaggagaagcagctggaggggggctggggaggcgctggatgctgcggacccaccagccctgcggaccctcctggtggtctgctgccaggctggctccttgggctattgggatgaagataatgagaacatgtttgtcaactgtgcagccctggtaactcaacaggtggtcatcacaatagtgacatcttcttcttcgtatccatttatcaaaccaactgtcatgccagcccatggacaacagaaggcacagaccccttggatgatgggcaccttcactaaacagagtcagctcagatttccaaatacaagtattaagcaggggccccattactgcactctgttccatgactgatgtgcccattcccctctcattgccgtgtaggtggttttggatttggggattggctttgaacctgcaa

SEQ ID NO: 469919 - DNA, 626 bp, Homo sapiens
gggaagccaaaatgccactggggctgtccagcaaccctgaacgtgctgtttgtgtcctcattgtggtgctgtttgccagccaggcaggcagggaggttcggggagagccggaagccacggatgccccagcgagtcatgctgtcaattctgtgcctcagtcccgtctaaccaaggataagccagtaccttggcagcccaagaaggcagtccttaggcagacgtctgctgcccgcaggaaactctcagagcagccacgctctcctctcagacttttggcagagcccccgccatttcttcatgtgggcacaggtggcctggctggtggctgccccacttcccaaagcctggatcttgagccgctatctggaacacagcacactcagctccagatcaaccacccaagccctctgctgactgcaatcctctggaccacatgataagttgtgttgttttgttttgttttgttttttgttttttaattatggtaaaaaatacataacataaaatttgccatcttaaccatcttaaatgtataatagtattaaatatattcacattattgtgaaaacatacaaatatattctgttgaaatatttaaaaataagttgctgaaattttgatacttc

SEQ ID NO: 469920 - DNA, 890 bp, Homo sapiens
ggctccattgcctgtggttccagagtcacctgggctgaagggtaggtagatgtggcctaatccataagctccgtgctggtcagaagtttgctgggcaagaggcaaggctgtgcaatggttcagagatagcccagcaaatgctctgtaatgaggcttggagtttcaacctcactgtcttgagcagaagagaaatgggcaatatgacatatggaggtgccactgaaacaaaacaccccaaaatcttgagtcaacacagtggggatagcactctggagtccacactggaacggcagtgggtttgtctgaatgacaaatacacttgtggcctagaggaagaggaagtgagaggtagagtagaagcaagcccctgtcagggtcctggcagggaacggattcactcggatggctcaaatgaggagagtgaatgcagggacttcttaccgaggggtgggcagggtggaaggggtgaaggagagacgctgcagcctccagagcccggcgacggcgggaagctgcctccagagcccggcgacggcgggaagctgcctccagagcccggcgacggcgggaagctgcctccagagcccggcgacggcgggaagctgcctccagagcccggcgacggcgggaagctgcctccagagcccggcgacggcgggaagctgcctccagagcccggcgacggcgggaagctgcctccagagcccggcgacggtgggaagctgctaccagccctggcctgttatggaaacctggtgacagtgggacccctggaggaggaggcatgggcacagaggatgcagggatgccagagacaccccctaacttctctcctacctcctcatctcctgctggcgactccctatggctgaaccccaactgaagccagc

SEQ ID NO: 469921 - DNA, 542 bp, Homo sapiens
ggagagagatgcatgaaagctttcacccatgttgctctgtgttcagaggcggcggagtggaaggagaactggctttggagccaggaggcccagctcagagcctggctttgccactagctctgccaaaggacggcgggcaattcacggtaacggcagcttctttgtctataaagcagagacacgatgcaggtcccaccagctccactgacaagttgcattttgcaaagcattgtgcacggcaggagcatgcggtggacttaggaggacacactgtggtgttggagctccttggtggcttccagctcttcagtgcctccaccgacacatatgaaggctcacagaatgccttctccacctacatggcagcgcctacgtcagtgactcctatcaagggtgggccctactgcaaaagaggaaagtaaagcggaaaaaagttcagtccttgatccagaaccagataaccaaggcacaaagacagagcttgcgtctggctctgattccaagcctggggcttgttccggggtgggagactgctgcctctg

SEQ ID NO: 469922 - DNA, 558 bp, Homo sapiens
gttcatctgtacatccatccttccacctacccatctatacattcacccaactgtccaatgcccagagctccccttcctgctagtctgccctctccaagtagatatccagaccagatgatccatggagactcagccctggtcttcctatgggctgcactccgagatggggggactcatccactccgaatcaccagcagctacctcggggccccctgcgacactgatgagccaaccagcgtgtttgtttatgtgcccacagtagtgggagggccttttgtgaaggggagaggcagcttggcattactagaaggacatgttcagacacccaaggatgtgtgtgccaggaccagaaacacttcccttcctgggagacaggaagggctggtggaggagttggaactgctggaggacattccaggcacagcatgggatatgacttgtgagcgggatggagctcatgggcatcatgagggcctctgagaacctgtttacaacaagaagcagaggaggggcgaatttgctctctgggacattcctttcctcctgccctcatacaac

SEQ ID NO: 469923 - DNA, 1008 bp, Homo sapiens
ttgtgatggggctgtgtgtgtcaagagggaattggtctaataggatggatttctggggagagaaagggagagcatgctgggagcaaagacaaactgaaacagagaagtccagtgaaataagtacccgatgtgagattcacagaacaactcaaaatatttctagccagtattatattgtcaccccagattctcctgttgaatggagcacagcttctgatcagatttgtgtctttgggagaagagcttgcgaacaaataaacaaacttgtttctgagagccaaaggagggatttcgtaagacaagagttcacaaaatttacctgtgaacacatgggtattggagaggtcctcagagatggtttcatccaactggtcaattttccagatgaggactgtgagcatccaagaggggaaataacttgcccccagtcacccatacattcaattggtagcagaccctgactacaaccttggtctacctcctcctctttcctcctccccaagcttagaaaattagaggcagcaaccagtgtcatgttaatggacatttatgtggtttttgaaattttgctattataaatctgtgacaagcattgtgtgacatatatatatctttgcccccaattctgacaatttccttggattagattcctagaaggagacttactgtgtcaaaagattttttgggggcagggttcttaaaatgtagcaccaaattgctttctaatgtaaggtgctgttagtttatacctgtgtccacatagagtaatattacttttttgaagtttttgctaacttaatagtttaaaaatgacttaaaaattatttatggcacatttttatttgtttgtgtttttgtggtcattaatttgcatttatcttgtgaattttccatgtatattttgttgatttttccattggcattctagttgttttcttatcaatttgactgactctatatattcagatcaatctttctttttattacaaatgttttcaagtttgtaat

SEQ ID NO: 469924 - DNA, 984 bp, Homo sapiens
gcacacaggacggagaggatggggagagtggccaccgcatcccctgggatgagaagatttcagtcagcggcctggctgtgttgcagcccttcccctaagaggaaggaagccacggttcttgcctagcagagagaaagcacagattttggagtccagcagacttggaggtggatctcagctattctgcttcctgctgtgtggcttcaggcaagtcccatagccttcctgagcctcagcttctcacctgtaaaatggaagcaagagttcctctttcatggagtggcttgatgtggagggacagcaggcccacgagaagcccccagaccgtagggaataaaggacaaccaccacgggtcctgctttcacagcaggaatggatgccattatcaacttacacagattcaccagaacttggtgctggggcaaactgcaggagacctgaagctaaacaagatatatacagccacagaagaccaggccaggcagttacaacagtctactcctttctcttgcctacgggtaaaatgggtacacacattctagaaagcagtttggcaacatttatcaaaatatgtttaaaaggttcacaacctttggatacgggaatatatcccaagaaaacaataccaaatacagaaagagccatatgcataaaggtgttcattatgtgaaaaattaaagcaaattaaatgtctatcaataagggattgggtaagtaaaccatcccacatcttcttaatggattgtaaaatactatacagcaatttaaaaagaaatccgtaaaacttccataatatggatatggacatatatatgaactttcagcctccagtactgtgagccaagtaaatttctgttgattacaaattatcaagtctcaggtaacacatgttaacagcttattatgtgtctttccatgtttatatgcagatttgtataatcctgtacagacctgtgtcaacatacatgtatatgcatacaaac

SEQ ID NO: 469925 - DNA, 631 bp, Homo sapiens
gcctcctagaaagacagccctggctccaattcagaaatcggatgagagaaaagccagctggaagcagggagggtcattaccaagccactgccacaatctgggcaaaaggtgatggaggcttctaccaagggatggaaagaagaggagcatttgagggagatccagaaggtggagcaaaccctagagggatgaggaagaatgaagactcaaggaaggctcctgagggttctgccctggcaccagcagataaaggacatgatgtcttggagcatgtcctctctggatcgggcctggagctgggggatgctggggctcagaattctcaaggaaaagtcagccagatcctcttctccacatcaatttcatccttggccttcttcccaggcctttcactcacctgccacaggaaacttcaggacctaccccccatggaagtgccaataaatgccctgaataggcattctcttatttgccactactttaaaactgatgtaaagtgaccaaagcattctttccagtgccttcctctctccagctgatattgcatgctttacaaatgagagagcaacaaagcaggttttgggaaataacccatgagattaaacctttcccaacaggggagatgaatacc

SEQ ID NO: 469926 - DNA, 951 bp, Homo sapiens
cccagcagcccctcagctctcctcgtaaccacgggtgggcagtctccaccgtcacagcccaaagggtcttagccatcgggtgcctgtccctagtgtggcaggcagatcgctcgagtccaggagttctagacctgcctgggcaacatggcgaaaacctgtttgtattaaaaatacaaaaaattgggcgtttccgggagcgccccgtggagttggtgtagccgccttttggcatggcggccttttccggcccggctgccaatcctgtcgctgaacccacagaaagatgtgggtttcagaaggaggtggcacaggttctgcgcataacccagcgagaaaaacaagaacaacttactcctggagtggtctacgtgtgccacctacataacctactgaacgaaacccagattctttcatattcctcccagtgtggcactgttacaagcttcagactatccagacagaaaaggactggaaatagcaaaggctatgcatgtgtggagtatgagtctgaggatgttgccaagatagttgctgaaacaatgaacaactacctgtttggcgaaagactctgggagtgtcattttatgacacctgaaaaagtacagaaagaactctttaaagactgggatattccgtttaagcaggcatcatatccatcagtgaaacgctgagcacctctaggcaataactcagcagctatttcttaaatacctaatgagtttcaggctttgctgttgggctgggaatcttgacatagatattgcttcacgattctccaagtctcccctcctcaccccagctcacagtgagctttcttatgcactgtgtaaatttctctcctaacaggcccaactctctctccaacctgcttcccagggcagttgtgaggatcaaatgagagagaatatggatgaaagcaaattgtaaatgattttaaaatgcaataaaaat

SEQ ID NO: 469927 - DNA, 997 bp, Homo sapiens
ggatctggtaacatggcaaaagatgccggtctaattgaagccaatggagacctcaaggtcttcacagaccagaaccttagtcctggaaaaggcgtggtgtccctcgtggccgttcacccctccaccgtcaacccgctcggggagcagctcttggcaaaaacctctggacagtccaatgtcaacattgcccagcaagtggtagttggtacacctcagagaccggcagcgtcaaacgccctggggaaccagccttccgactcctcaccttggtctgccgggaagcgcaacagaaaaggagaggataatggcaggggcctgcggcatttctccatgaaggtctgcgagaaggtgcagaggaaagggaccacttcctacaaccaagtggcggatgagctggtcgcgaagttcagtgctgccgacaaccacatcttaccaaacgagtcagcttgtgaccagaagaacataagacggcgcgtctgcgatgccttaaacgtgctgagggccgtgagcatcatctccaaggagaaaaaggagatcaagtggattgaaacagtctcaacttcaaaacttattctacagcaaattgccttcaagaacctggtgcagagaaacctgcacgcggagcggcaggccagccagccgccgccagccaactcggtcatccacctgcccttcatcatcatcaacaccagcaagaagacggtcatcgactgcagcatctccaacgacaaattcgactatctgtttaattttgacaacacatttcaaatccacgatgacatagaagtgctgaagcgggtggagtccgggagcttctctgctgaggaccttaaaatggccaaaagtctggtcccaaagactctggagcgacgctggccacaaagttccaatgggtctcagtacagcagctccagggtggagaccccggtgtcttacgtcggggaggacgacgaggaggataatgacttcaacgagaatgaggaggacgactgacgtg

SEQ ID NO: 469928 - DNA, 664 bp, Homo sapiens
accatggctggtccggaagcagttcctccaggggtattgggagaaggaagaaaggacctctctctccagtgtgatggccacagctgtggccacgaaaatgctttactcccccggtccaccctgtgaggttcttcagctccccctagaggctggagtatgttatgagcaggaaccacagcttcacctgtgggtaggagcccatggtccaccctgtgaggttcttgagctcctcctagaggctggagtatgttatgatcaggaaccacagcttcacctagacttctgtggccaaagatttagtatccaggaagagcatcagacactcctatgtccatcggaagaaatcgatggccctcagcctcattttaatgctaaagacatgagacatcagtggaaaatgaagatgtgggtattgtatttgcaacctgaattcatggcaagcttgcagaaggcaggaacatcttacacctttttttgttacccatttcctaccaagggttgggctcagcacgtggtacagagagggcacttcatgaatgtttgttgaattgaattgagtgccataaattataaaatagattcatgaagattcagttcctggatttaaatatatcagaaagatttcctcagaattaacacaatttagcaattttaccagcctaaa

SEQ ID NO: 469929 - DNA, 2694 bp, Homo sapiens
tagatacggcaggaactcgcatccaggaacagagccctttgctcctccctcagaatgaatggggaccagaaatcagatgtttatgcccaagaaaagcaggatttctttcagcacttctcccagatcgttggggtgctgactgaggatgagatggggcactcagagataggagatgctattgcccggctcaaggacgtcctggagtacaatgccattggaggcaagtatcaccggggtttgacggtgctagtagcgttccaggagctggatgccatcaattatgctatccttctggaagcatgtatctactacctgctgaagctctattgccaagcacagccctattacctgaacctgatcgagctcttcctgcagatttcctgtcagcctgagattgggcagaccctggacctcatcacagcccctaggacaatgtggattttggcagattcactgaaaacagaagatcctactggagatcgagagttttttcaaattcaggatggttaccttgacctctttggggaccccactgtgacccgcaaagttggcactgacatccaggacaacaaatgcagctggctggtggttcagtgtctgcaacgatccactctggaacagtaccagatcctgaaggaaaattacggacagaagaaggccaagaaggtagtccaggtgaaggcactgtatgaggagctggatctgccggccgtgttcttgcagtatgaggaagacggttacagccacattatgggtctcactgaacagtacgcagcgcccctgctcccagccatgtttctggggcttgtgtacaaaatctacaagcagaaaaagcaataaatcatagtcctaggctcagtcagctgtcttgaaaatgctgcctctagtcataaggcagatgaatctacaaaaacccaaactgtagaaaaacgatttggcgttgtcctgtcctggtgatgggatcctaatagcatcttcaagcagaaataaccacacagagctcccaattataaataaaggatttgttgtatttccatgtctgtgggatgttaccaagcaaggtttccctgtgagcaactttggacactatgcaaaacgtgtccagatccaaaatagtggcaagcagtttaagttggggacaatacaactgggaggacacatgcaaaagggtggaaggtgaaaaagagggagtatggggatggccacctggccaccaaaggtcctcaccatcagtggggaaaccagtttcacccagttggccttcatgcagagtttcagcctgtgaaagggatggggaaggaagcatagggtctgagtggccccatgggatcaggaggaagtggtgtaggaggaggacgcccagtgactgagagccagtgaggactgctgggaggtcagatgcccccaactctgtgacattgggcatgtttcttactggttttaagcctgtttcttcaacagtaaaatacggaaaatatctacttcagagggacatcatgaagattaaaaattatgtatctaaagttcttcacagatggacaacaaccattaaacagccattacactctcccatgctgcattagtcaattttctgttgtttataacgaaatacctgaaatgggtaatttgtaaaggaaagaaatgtatttttgtactgctatggaagtcaggaagtccaaggttgaggaggtgcatctgtcaacttcattgagatattatttatctacaataaaatgcaccagttttaagtgtacatctctatgagttttgacaaatttatacacccatgtaactactaccacaatcaagatgaagaatatttctatcaccctaggcaaagttcttagtcaatactcacatcccagcctcaggcaacaactgacctgctttctgacactacgtattgtccttttttgagtttcacataaaggagttaatacactatgtactcttgtgactggcttttttcactcgacatgttttagagatttatctattctgttgcatgtaccagtagttcattcctttttattgctgagtgacattctgtctcatggatattccaaagtgtgtttattcactcccctgttgatgaacatttgggttccagtttggactattatgaataaagctatgaataatataggcatatgttttatttctttggggtaaatatccaggagaggaatttctgggtcctacaataagtgtatgtttaactttataagaaatttccaagctgttttccaaagtagtagtacaattttatattatcatcagtagtgtgtaagacttccagttgctcattttcccaaaagcttggcattatctatctttttcattttagctgttctggaggatatgtagtggtctcttgctgtggttttaaatgcatttctctgatgactaatggtgctcaacatgttctccagaacatcttttccatgtctactggccatttgtgtatctgcttttgtgaagtgtctgttcaaatcttttacccatgcttagtattaggttgatgatgatcttgttattgaattataagagtatcacctatcacaagtcctttatcagatattagtgtggtacagattgtctcccattctgtggtttgcctttttgagagcttttttaaatagctttattgagacgtgacttcttaagtaaaccaaagctgcctctgccaaaaac

SEQ ID NO: 469930 - DNA, 441 bp, Homo sapiens
tgcggcaggatggatgtgagggttgaagaaaacgggatcaagctccctgggtttatcagtggggcaggtgaagtaggaccatttaatatgatggggaagactgagggaggaccagggctcctcagctgtgatgaaagccacctaactatccagcaactttctggacccctctgcattgccctgatggcacttggaagaccaggggaccaacagaagcatgatacttatgtgatggttaaatggcatgtagtacctgggcttcaatatcaaagatctggtatggagtggaagacactgtggaaaattggagggcacatcccatctgaagtaccagtcagaccagccaactgctgccaccgggccctgatgttgccagatctgctacttttccaagagaatccagaaatacggattttaaaatgtaaactctattgactttaa

SEQ ID NO: 469931 - DNA, 603 bp, Homo sapiens
tactcagagctgctcacagatattgttgacagcatctggcgccacccccatcaggtaccaagggtccctctcccctgctgagtctgttcagacatggggcactggggcttccgagtccctctcccctgctctgagtccgttcagacatggggcactggggcttccccgccaccttcatccaagtataaaaggcatcctcaaaaaaacccgcagttaatatcatacatacttaatggtaacagactggatgctttccctcctaagatcaggaaaaaggtagtgcagggtttatctcctgagacagagatggaaaggctgatggcagcatgggtcggggaggagatgttgtcactactggggatgggaaagccgttccttctggcaaaaaatggttcatcagagtttacaaactcagggtccccagcctcaccagggtcctcccacacatcctcattccaagttgcagggtcccattcttttccaatccatgccctcactttaacagtagacacctagcgaggctgtgcatgcatctttcattgcaggtcagcctctcacatgataagagcttgtgtctgtttttccacaatttcagttctttct

SEQ ID NO: 469932 - DNA, 657 bp, Homo sapiens
tatcctgtacttagagctgttcctcagacttttctgcagccagggttacctggcagaccccctttctgtagccatggcattggctgagcaaggctcagtggtagcagtttcacagcttgggttctccgggttacactctggcagctgtcaggtgtcttttacactgagccttaaaagttggacttttctggatgaaaaggagttgggtggcttgagcagaggcccaggtgtgtgggggacaggcttgaaatgtggtgtcccaagaacaccaggtgaaggcatcagtgctggaggtgtcatggaccttaatactgctttacaagaggtcctgaaggctgccctcatccatgatggcctagcacgtggaattcgagaagctgccaaagccttagacaagtgctgggcccatccttgtgctgcccccaactctggaatgtgggaggaacaatttcagcccaagagcaagttgaaagttttctcggggaggagccaagttggccgaataggaagagctctggtctgcagctcccagtgtgagcgacgcagaaaacgggtgatttctgcatttccatctgaggtatcaggttcatctcactagggagtgccagacagtgggcgcagtcaaagaaaggggtgacagatgacacctggaaaatc

SEQ ID NO: 469933 - DNA, 806 bp, Homo sapiens
tctctctttttttttttcatggaatgcttcacagatttgcacgtcatctagcaaaggggccatgctcatctctcacccctcttttggacccaacaattttgctgactctccattccagaaagaggctttagcaaggcctaatatggaacctcatggaaaagctgtcctctacccacttaaaacaggaaaggacaatgggcacttctgcagtacatacatagcagaagcacccacctgcccaaaatctgagtcatccttgattcctcctttttcattttcctctacaatcaaaccatcagcaagcactagcaatactaccttcaaaatatatcttcagtatccacccacttattttcacaaccaccacttgacccaaggtgccctcatgtcttactggcatgactggaagggcctcttgccttatctcctcacatcctctcctgccctcctaccaatcactctccaccagcaaccaaagcagccacttccctgcttaacacctttccatggctgcccaatgtacccaatgcataaaatcctaaccgtttggccctgcagccttgcataatccatcctgtgactctctctccaagtttatgcgacattttccatggctcactcttctccatcaaactggattagaaaaaaccagggcctttatcaagctgttccatgcctgggatgctcttcccactggtcctagcataaatctacttttcttatttttcaggtctcatcttgaaagtcatttcctagagaggctttctatggccccctaactaaagtaggtcccctctgttattttc

SEQ ID NO: 469934 - DNA, 921 bp, Homo sapiens
ctatgatgcaggtactgatactgctgccattttcagataggaaatggaagcccaaaagtgaagaagcaacatcttaaactagcatagagagaatgtactagttagcatgatggatgcagagtatcaaggggaccggaaagcagcccggaatttagcaacattaaggtcaaggatgaccttcacaagaacaggtacctgccatggagtgattggagggaatcagataaaggcagtgaagaaggacatgtttgcttccccttctgccatgataccatgtgggccttctttcaattcccatgagagaagccgtgctttctgccctctagatccccctgcatgtgctcaccaactccgctcatcccttaggtgtcagctgaagtgcctcttcttcaaggagacatatctgagccctgctcccatggagaaagagagaatgcccaagagtcaagccctcccagtcggacctggcatagggctacgtccttcatgaaacacagcaattagaacatagaaggtgctcaatgcatagtttttgaataaacataataaatacacaagcaaatgaataaataaataattgaataaattattgtgggtatgccagagtgtaggaaaggatttgtggttaccctggtcaaaaaagacatcttggagaagctgaaattcagctgagtcttaaagggtaagcagaattcacacaaagagaaagtgaaaagatgcttgcagaatgggagaaaatgtttgcaaattatacttcagataaggaacttgtaaccaaaatacacaaagaactcacaactctacaataaaaggacagacagcccaatttaaaaatggacaaagggtttgaataaacacttctccaaagatatatgtatgtgtacattcacacaagctagacaagatgaacaagaagcacac

SEQ ID NO: 469935 - DNA, 634 bp, Homo sapiens
tgggaaaacacctcttgcatcagcatgccccaaatgaagaagcttttgttctcagtgctgccaaaacttccatttttcagcagtgacctcagtttagcacctgcttataagatgtgtttgcacatcgttggaaatggctcacatattatggtggctaagaagtcctacgatctgctgtcttcaaactggagaaccataaatgtcaatggtgtaattcagtctgaatctgaaggcctaagaaccaagagaaatgatggtataattcctggtctgaatccaaaagcaggagaagatgtcccagttcaagcagaaggaataaattcattctttatcttccttcttgttctatttgtgtcttccatggactggatgttgactgtccacattggtgagggcacatcttttttgttcagtgtacttatagaaatgctaatctcttccagaaacaccctcacagacatatccagaagtaatattttaatagctatctggatatcccttaacccaatcaagttgacacataaaattaaccatcaaaagctctgacatgtaaaaagcttttttttttttttaatacttttactggacccattagagaactgaggttccagagtatattgctaccttgaaatat

SEQ ID NO: 469936 - DNA, 2091 bp, Homo sapiens
aggattgctggatcctacaagcccagaggcttaggaggaaaaatggctttgagggctgggccctgggccttgctgctttgtgcagtctagggatttggtgccctgcatcccagatgtggctgaaagaggccaagatgtccaggcagacagttgctgcaggggcagagctctcatggagagcctctgctagggcagtgcagaaggaaaatgtggggttgaagccctcacacagagtccccactgggatactgcctagtggagctgtgaaaagagggccaccatcctccagcccccagaattgtagatccaccaaagcttgcactgggcacctggaaaagccacagaaacccagccagcctatgaaggcacctgggatgggggctgtaccctgcaaagccacaggggtggagctgtccaaggctgtggaccatggcaagcaaagaggacagcagcttgcccagaagctggggaatcgggaagttgccagatcatgtgaagacttgggctatgaagaatgctggatttcacatcaatcagagttcaaagccactgaaggattttaagcagcatgattgtttttgttgctgtttttaagtgtatttcagttgtggactaagctctttgtctagtcttagacaaataaatgtgttaagtcttctaacggaggctgtaaactgcctcttggagagtcaaatatggagtacagacatttatttgtttttcaatacgctggcccagttttaaatgtttgtttgtaactaacatctggatttccaggatttctggaatgatcttccaggagctctgtgaaaggagaatatcaggcaatgttggttggcatttcccatgacaacaatcttcagttgtgtttagatgtcttatgaaacagaaaatgagaatattgagactataggctatagggctctggtcaaaaagaggtgacaaaaaggtagtaaagattcagaagatgacaactgctattttacttaatctgttagtatccatatgcctgtttcatttataaagacactccttacaaagcagtatacattttacgtattcaataatgcttatgaaaaaggaattgacgaaaattaatttgcgaagatgagagactaatagaaggaaaaagtatattgactaaagttagacaaataatggcaataaaaagcttaagatattatggccaaatttgaatctaatgctattcaaaagaatttagcatttataagaagttaacaggcttttacaatattcccagtagctttttcctccattgctgtggatatttatatggttttaaatctagcaactgatttaagaatctggacctaaatatagcattataaaaagccttagtattcttcctatactcaagtgccatacattaatatgcatttcataatgttcactgtaatttagtgagtacatatatcatcataagtttaatattattgtatgtttaacctgttggcaaaatcgagtctaaaaaagaatctaaatggaagaaatttaacgtgggtttacaaagagaacgaaagagttgacatttagttcaagtaaatggttcttgttctcaattagagcatccagtgaatattaacctcaaaagtatattttatttgctgaccacagcattcatgagatatgtgtggttgaatatctcaactggtcctgaaactttcttaattcgtttcgtctcttcttccatgaacttacacagctgtttagttcttttgtaaacagggaaggctaggcactcttgcacagatctttttagcatatgaaacatattgacatgaatataacatatgtgccaaagcaatattattcagttaacatttcaacgaaatgcaacataaaattttaaattacatatttctgcatgtgtttgattcttgtttactgtatctgatccagaaaaaaggaagactctcattgtgaaaaaacatctctaataccttagcattttaatatcatctgaaaagaatagttataaccagtcataccagtcatttatttttccattgcttaaaattaccaggtagcaacatggtaaattcagttgatcagggcttttgattcaatagc

SEQ ID NO: 469937 - DNA, 1036 bp, Homo sapiens
agcgccctcatgttgctgctccctgcgcagcgcccggcttcaccctctgcggggatcgccgccgcaatgtcccgagagcgcttctcctctcctcctccgccaccgcgcagccagggcggccccaactcagcagctgaagttacttctccacaccggttcaaaacccgagaaaacaacgctgccaggtccctgccacaacgacttcaagtcccgccattatgccacctctccatcttcaccccggagtccctgaggcgccgggaaaagctaattaataggacaccgcgacgagagtcccaaattcgcttcgggccgagccaacctgtgtctggcgcgtgctctcagccactctgggacagagaggctctcgagcgtactaccgactctttcgaagagacagaagagaagactcccacacgcacccagtgcctcacccgacccggagcagcccggctaaatccgaccgggaccctggtgtgacccaggccaaggagctgggggcggagggccagctctggggaaggttggctatgttagtgtgcaaatagagaagggcgatccaaagaagaactttagagagaagcaggttcttggctctggagcaaagagctttaactgaaataaggatagctaataaacctgtctttgagcgttaagaacgtcccggaagttcctgtagcaaccataagactcagaaatcatatttccacgaaatgaattaatttacactttaggacctatttcagtctcccactaccccttctccgtataattttttctcgttttctctccatgttcctttgccgtgtctacatccttttgacctggggattcaccgtgatttctgtcaacgtggaaaaaaattatgcatcctttcagctacgtctgttggtagcgagcctgctaacattttctaagaaaagatgaacacttaaggccaggaccccaaagtcaggcgttaaaactcagtccaaagcagtcagttacacatattccctaccctaccccttcccctctgaaaagcactttcacttac

SEQ ID NO: 469938 - DNA, 1733 bp, Homo sapiens
gtagtccgagcctgtactcaggagccggagggctccacccctgggtctgtgcccatggacctaggtgaggatgggcatttctgttttcatgcccaaatgttgcattttccaagaccaccctgtccccccacccctgccatcctgtgcctataaaaacccaagacccagcaggcacagacacaactgtctggatgtcaagagaaatgcatgggcagaagagcatacaggcagctggacatggagaggagcggaagaacacacctgcaggcaccagcagatgccagcaggccatcgaccagaggaacaaggcagaggcttaggggaaattggttgggatggttggaggatagttcagtggaaagttcagttggaggatagttcagaggatagttcaggactgagtggccccactccaggggaaaaccaccatcccactctatcccccttctggttccccatccacctgctgagagctatttccactcaataaaaccttgcactcattctccaagcccacgtgttatttgatttttccgaaatggcagaagacagttgctaaatgttattcagcacaccactgtaaaatggtactgactttgcaatcagatatacctgaaagccttgtcttatactgtataaatttgtttcctcatctgaaaggagcaaattatgtcattactaatatcatgggtttgttgtaaggattaaatgaagtaatcatcataaaatgtttagcatgtcttggttcatatcaaactcattacattcttatttcagttacagatttcatcctcaaaacatcccaatcacgttaattattaacagcagatgctatactaagacagactgaatcagtcaacatcagataggggtcacgaccttggttgaaatgaaaaaagtcaaagaataacagatgctgttgaggttgcagagaaaagggaatgtttatacactgttagtgggaagccctatataaagacttcactcatatctataaaaaacaggctttctaatgttgccttagggaagattaggaagtattcagacataatagcttctatagttattaacatattttataaaatattgccttaaaattcacatgaaaaggacagataatttgcactatgaaatggtctattttagtttttttccttagcaaatgagtttggattagtataaacttgcctattcctagacatgaaacttaacttattctaaaagctaagcagtattttcttctgtataaaggaatgaatggagtctgtgtctgaaaataaagtatatttatctctctgtattccatgtttgttattatcttcccacataacacaggtcataagtgcaagcagagccttatgagggaggaagcaacctattcctcgaaatttaattttttcccactcaggtcaccaatgaaatcatcgaaggataacatgggaaaagtttatatttgcctttgaatctaggagagtttgcaactcacagatgggaaacatcaagaataactgttataccctgaagatataaggaacacattaaagaccaattttcaaatatgctacaaaccacaaatagtgcaggtcctgggaaaatacataattctataaaggtttagaatgtgacactagtcattaatatgacatttaaactgtctttatttaaagaaaatcaataacattcttaaaaactttcagtataggttcattagtactgtatgtcatctaactggt

SEQ ID NO: 469939 - DNA, 567 bp, Homo sapiens
ggacgatataatcagcttctccaaaagcaagtgagcggatacattcgggacgcgaaccgaatccccggtcagcaatgcgtatctcgtctgcctcgccattcagcgctgccgcccccgggcgcactgattgctgttccatcgacaagacgcaatctctttccgcttgtacaacccgtaactgcggcgcgtacagcaagtgtttgtgcggcaagtatgccaaaccagtcggcggcattccgcagccgcttcaggagagccacccagccccagacgtagcagagttgcagcatcacgaatttcgcggcggcgggttagagccccggcattacgtgccgaagtatccagttcttcgggcttaccaatatgggccagaattgctgaccagttatcttagcgcttatggggaggttccccagctctgtgtcactcccagatgggctgttgtcctgccttgcttttctccattttccatgggttgagttgtttccttgattaatctcaatgcatatacttgaatgtttcagttgaagttactgtatttaccaatcatttctgttcctctctgtg

SEQ ID NO: 469940 - DNA, 784 bp, Homo sapiens
ctgcttccctgagctggggagggtcccctgcctctgttgcaaaaagaaaactagaccaaattcagatggcgcccgctcatggagggagcatttaaaccagcccttagagaggaattgccaatgtcagcgtccgtgacacttggagagcacttctggacccacttggggcctggggtatctcgtcgccctgaagggaaggtcacaagcctggctggcattgccacctgtttattgcagagccccagggctttgggcaaacataagcagcagccagggaatggaggaaaaaatggttttgggggccaggcccagggttcccatgctgtgtacagcctagggacttggtgctctgagtgccagccactccagccactgctaaaaggggccaagattacagctcaacccatggttttggagggtgcaagccaaaagtctcgacagcttccatgtggtgttgagcctgtgggtgcacagaagtcaagaattgatatttgggaaccttcacctggatttcagaagatgtatggaaactcctggatgcctaggcaaaagtttgctgcaggagcagggagaacctctcctagggtactgtggaaggaaaacgtgggatcagaggctccacacagagtccctactggggcaactcctgttggagctgtgagaagaggaccaccattctccagacctcagaatggtagatcgaccaacagcttgcaccatgcatctggaaaagccacagacatcaacaccagcccatgaaagcagtcaggaggggtcctatact

SEQ ID NO: 469941 - DNA, 589 bp, Homo sapiens
gagcccagatattttgtgagcattacctattggcactatggccactgggcctaatgggtcagttggcctcgacaaaataataattgctacacaggaacagtaccagaaaggaagccagaggctgccgcagtttgttgggggtccactccagaccctactcacttggttcctctcccacctggaggtgtcaccagtggaggctgcagaacagcaaggatggctgcctgctccttcctctaatgtccagacccttcagagacagcaggcaggaaagactaagtctgctgaaccacagagactgtggctgcccctccccacaggagttctgcccaggaagatcagagttctgtccataaacctatggctggacaccaccaggggaaaacagccaactggagccacagtgatagtaaccaccccttcccctgggaactcagtcatcttagacagtctccagtctgctgtcactggccacagcctgagcggtgatgatagtctgcacaactctgtgcttggcacgcaaggccctggtggtgtgggctcataaggggatctcctgatctgtgagttgcacagatccatggacaaa

SEQ ID NO: 469942 - DNA, 545 bp, Homo sapiens
agcagcaaacttccattctctgcagaattaaacaccctggaaaaagacacttggctttatcagttatgtcttcctgaaccaatgatatggtgatcatttggagttggagacatgaagagcaacaaatggagggaagagtcactctgaaaactgaccatgattgtaagctttctgaggccatcaccaaaagcagatgcctgcaccatgattcctgtacagtctgcagaactgtaagatttcagagaatgtatggaaaagcctggatgcccaggcagaaacctgccacagggctaaatcccccacagagaaacactactaaggcattgccaagggaaaatgtggcattggagcccccatacaaagtctccccagatgaactgtctggtgaatctgtagaaatgggactgttgccactgacagtagaggacactgtcaaggggacagtagagccactgacagattgcagcttcaacatagagaatctgcagacactaaacttcaacccacaagagcagccccaggagaggcacccagtatagccatgg

SEQ ID NO: 469943 - DNA, 1243 bp, Homo sapiens
tgacgtgggaattgtggtagttacaattcaagtacatctcttgatgaaaagtcaaaagtttatagatctaatctggcttattcctgaaaaattactaaaagatattaaaagatatgtggacttcagtgtcaccagtggagggtgtgcaggttcttggcatcatgaacaagaattggacaaaatgcgcaagcaaagcaaggaagggatgaagagatttattgaaaatgaaagtacactccacattgtgggaggaggcctgagcataggggctcaagggcccagttacagaattttggggagtttaaataccctcttggggattccattggttacttgcggtatgccctatgtaaatgaagaggatgaagtaaagttacaaagtcatttactcggcgtacgccttgtggagaggatatttcttgacatagctaaattatttatggaccttaagttccttgcctccagaccctattttcctgcccattccccactgagagatgtcattcccataaatctttatgggaggcagaggaaccgatagtcttttttctgtaactgcttcatgctggcttcgggcgtagtctcttcctattagggatcacgaaactctcaccctgctctgtctggtggaggcgggttagcttcttgatggccaggggtggtgtcttcatctggaactggctggaacctttgttgcatggtcatctgaatgtcgatggtctctgggcaagaggaaataaatttggttaaaagatataatgggaacttcagcgggtagatacctatgctgtcaggaatgttcattatggagatttgcaggagaaaaaacaaaagctgatccgttctaagacctatgtgtttccttaaagtcttagtgcaaacgactccattttggtttggtttggtctgttgggacctagtacatgagcttagtccaaaacaatggcctcccagaattttgttaaaaaaattccccctttttggtcaggttctcattaaggtgagagtgtgaccaaagcttagagccttagcaccactcagttatcatcattttgggtttccagttttagtacatcatttataggttatggtgtccttatggtgcacatttctttcagctcattattccagttgaagagagaccatatgacattctagagatggttgtatgcaagcatttaaaacctttgagagaatacagcacaccagggagactattattatgactattggaaggataata

SEQ ID NO: 469944 - DNA, 1414 bp, Homo sapiens
gctttcctccctggatagcatgagcttcaccacttggtccaccatgttctctactaactaccagtcccttggctctatcaagccgccaagctatggcgccctgccagtcagcagcatggccaacatctatgcaggtgctgggggcttgggctcccagatctccatgtcccactccaccagtttctggggcaacttggggtctgggggcctggctgtggggatggccaggggtctggcaggagtggagggcatccagaatgagaaggagaccatgcaaggcctgaacgactccctggcctactgcctggacagagtgaggagtctggagaccaagaaatggaagctggagagcaaaatgcaggagcacctgcagaagaagggaccccaggtcagagattgggggcattacttcaagaacatcaaggatctgagggctcagatctttgcaaatactgtgagccatgcctgcatctctgtggagagcgacatccatgggctccacaagatcactgatgacaccaatgtcactcagctgcagctggagacagagatggaggttctcaaggagaagctgctcttcatgaagaaccacaaagaggaagtaaaaggcctacaagcccagattgccagctctgggttgactggggagcagtttgaaaagagcaccacagtggtcaccacgcagttcgccgagattggagctgctgagaatacactcacggagctgagacatacagtccagtccttggagatcgacctggacccaatgagaaatctgaagctcagcttgcagaacagcctgagagaggcccagaagtatgaggccctgctgaacatcaaagctaagctggaggctgagatcaccacctaccaccgcctgctggaagacagggaggacttcaatcttgatgatgccctggacagcagcaactccatgcaaaccatccacaagaccaccacctgcaggatagtggatggcaaagtagtgtctgagaccaatgacacagaaatcagcagcagcattaaattcacgtaggcacacgaaccctgttgtgaactgcacctgtgagagatctaggttggtgctccttatgagaatctaatgcctgatgatctgaggtggaacagtttcatctcaaaaccattcccacccccacccctgtccatggaaaaattgtcttctatgtaaccagtcccttgtgccaaaaaagttggggaccactgctgtatcttttttattttatccaaaaagctgcaaatagcatttgctataatatattacaagacttataatactattatctagaaaatgtactttttagcctttctttctgtagaatattagggaaaaatcgatgagataattaaaaaggaaaaagtggaaatattcatgaaataggcagaaacaactatt

SEQ ID NO: 469945 - DNA, 544 bp, Homo sapiens
aaaattaaaaattattattattattattattttctttttattattattattatagtttaagttttagggtacatgtgcacaatgtgcagcaattttagcatatttaagacagttgtttttaagtctttgtctactaccgcgcctgtccactttcctgttttttcttttgtatgccttgtgatttttattgaaaattggacatttgactattacaatgtggtaactctgaaaatcatattctccccttctccaggtatttctatgggtggacaagagagcttagagctgcctactccaccatttttgctgacatcactgccattaacttttaattcacaagaacttttgggttacaaagcacctcaaatttctatagtgactcagtgtttctggagtattttgagatctacttatttgtccaatttagttctactcttgatgacggatattgttcttaatgatgaccataatttccgtatttaggttcctggattcttcaatcttaaagaaaaggatattaatgagtaataagaaatcatctgac

SEQ ID NO: 469946 - DNA, 2075 bp, Homo sapiens
aggagtgtgtgaaaagtaagtgacagatgctttttggaggctgcaaagtccaagatcaagatgctagcagattctgtgtctgtggggagcccccttcaccaggcccttcccagcctccaacacctgctcagcgcagccctgacccacgggagctgccttgaggctggggggcatgacccaccaggtggaggcatgaaacggagggctgtcatgggcccaccccaggtgcaagcctggaaggccctggacctctgggagtcctctcaagtcatggaagggaaggccgtggtgccaatgggcaggaaccccatgatgcgcaaggccacccaaggacaactggaaaacagcccagctctggagaaactgttgcctcctctgcaggggaatgtgggctttgcgttcaccaaggaggacctcactgaggtcagggatctgctgctggccaataaggtgccagctgccacccgtgctggtgccattggcccatgtgaagtcactgtaccagcccagaacactggtctgggacccgagaagatttcttttttccaggctttaggcattaccactaaaatctccaggggcaccactgaaatcctgagtgatgtgcagctgatcaagactggagacagagtgggagccagcgaagccacactgctgaacacgccgaacatctctcccttctcctttgggctggtcatccagcaggtgttcaacaatggtagtatctacaaccctgaagtgcttgacatcacagaagaaactctgtattctggcttcctggaggtacccccttctatcatcagtgggtacaaaggatgcctggctctatctgtggagactgattacaccttcccgcctgctgaaaagatcaagaccttcttggctgatccatctgcctttgtggctgctgcccctgtggccactaccgccacggctgctcctgctgctgcggcagccccaactaagtttgaaaacgaggagtcggaggagttggatgaggatatgggatttggtctctttgactaaccaccaaaaagcaaccaactcagccagctttatttgcaaaataagcaaataaaggcttacatttttttaaaaaaaaaaaaaaaaaataaggctattaacatttaaaatttgttctcaaaaacattagtccacaggtgagcatgccccaaatacccagaggaaaaaggccagtcgggcacacagcctaacccagtggagatgggtaagcccctgcagcaagggggagaggactctggtctaattatatcctgggaagtggggcatgtttcatggcatgtttaactcctgagagccttgtgctaaaaccctgcctggatgggtctagacagctcaaggcaatgacttgaaagggggccattcttgtaagctggagagacagcccagggggtgcccacctcacacgagagcttggtttctaagtgctccttctccttgatcccaccacgtttgtacatatctcaaccaatgcatttattccccccagaaatatcacattttgtgccatttgcttgcaatcctttttcccttttaatgaccactcctggttccattcctttcccctcccatttttgcagagcgaaactccgcctcgaaaaatatatatatatatatgtatatatatatgtgtatatatatgtgtgtgtgtgtatatatagtatacatatatgtatatgtatatatgtacatatatacacacatatgtatatgtatatatatgtatatatacacacacatatatacacatatatgtgtatatgtatatgtatatatacatatacatatatatgtatatatgtacatatatacatatacatatatatgtatatatacacacacatgtgtatatatatacatatacatatatatgtgtatatataatgaaatgaccataaatgacccacctctgccagtaggaataaatcaaatggccaagtcccagaaaataatcccagttggtcccactaatcggagtcaacaccccccacccccatcccccaaaccacctgggctgcagaaggccttgtctcagccggatagcctagagatgc

SEQ ID NO: 469947 - DNA, 773 bp, Homo sapiens
gatgtagacgttccctgtgttcttgctcctcggggaagaggagagatgcttgtgtgacccatgggagggaggctggacctcctcagagtgagccaacagcggctgagggcacagaagtcacatgcccagggccggctctccctccacatccctctaagaagtaaatcaaattgcctaattgtcaacctggcaggtggggactggaacccagggaggatgtggcaccggacagaggcttccaatggaggcaacagcttggtccacccacatggcggcagatccacgcatctccctggaccttccgtgtctgagcgtccatctgggagcctccaccaaggggcatgagagaacagaagcggaggaagaccctgagagttggcttcctaagagagaaaaggggcccaaggaggagctcaggcaggtcaaggacattgccctcaacaagacaccctctccagggtcagaggccgaccgagcagaggcacaaggtgcttgtcctgaactgcagcccggggatggggtggaggtgccctatctgtggggccgtcccaaggccctcgctgaggggctgggtacaatgaggcctgtgtcgggacttgccgaactgcacctgcgctgtagctcgcaggcaggaagccaggccctgagcaggctcaggcgctgcctccgcgccctcgctgacctgcaggaaactcgcccaacccaggcctatgtcagcagcaggacgatgacctaagaagccaggctgcagagcaagatggaaaattcccaac

SEQ ID NO: 469948 - DNA, 632 bp, Homo sapiens
tgaatgtcgttggcagaactgtgtcttggagacgatggtctccacctgctgtggtcagtgatgccgaccacctcatttgctgatgccgacagcatcagcaacgcccaacgaggatgtgcatctcctcctaatgctgacatggacaacgagcatttccctctcttctcaggctcgtgctcatgtaagcattggccttaccagtgtgggattcttcatccaagccgacacagcctatttaatacgtcagtctttgaaaacttgtggacttttgtcacagcctctagggtggctatgactcagcccctgatatctgaggctgtccacatggaaagtgtcaattaccctcacaaacctgcccccagccctggttctggacctgcagaagggcttgctgtgccttcctcccactatgtgtctgctactgcttattcctgtcccttttgtgccaccagaaagatagaacagccacagatgctaacccattcaaatagcaccacatcactcccctatgcgatctatttcatttgaaatggccacatatattccactaatgtgtcatgacagttggccctccgtacctgctggttctgcatccaaggattcaatcaactgcaggatagaaaatattcttt

SEQ ID NO: 469949 - DNA, 580 bp, Homo sapiens
ctccaggatctgtaggcttcaatcaacagctcacaccacctccctaacaaatggctatggcgttgaaagcaaagaaggaagcgcttgcccctcctaaagccgaagccaaagcgaaggctttaaaggccaagaaggcagtgatgaaagatgtccacatccacaaaaaaagaagacccgcacgtcacccaccttccagaggcccaggacactgcgactcgaggccacccaaatatcctcggaagagcgcccccaggagaaacaagcttgaccgttatgccatcatcaagtttctgtggaccactgagtccgccatgaagaagatagaagacaacaccacatatgtgttcagggtggatgttaaagccaacaagcagcagatcaaacaggctgtgaagaagctccctgacaatgatgcggccaaggtcaacaccctgattcggcccgatggagagaagaaggcatatgttcaactggctccagattacgatgttttggatgcctcccagaggcaattatcctggctttgaaccccagctcaccctaccttcatttcagtgttccccgatggctacctattgcc

SEQ ID NO: 469950 - DNA, 1362 bp, Homo sapiens
acgtaaaggaaaaaaagaaaactctcgattgtggtggtcacctgtatagtccccgctatttgggaggctgaggcaggagctgctgggtacacctcccagacggggtggctgccgggcagaggggcccctcacttcccagacggggcggctgccgggtgggggctgccccccacctccctcccggacggggcggctggccaaagggggctgtcccccacctcctggagggggcggctgcccggcggagatgctcctcacttcccaaacggggcggctgctgggcggaggggctcctcacttctcagacggggcggccgggcagagacgctcctcacctcccagacggggtggcggtcgggcagagaaactcctcagttcccagacggggtcgcggccgggcagaggcgctcctcacatcccagacggggcggcggggcagaggcgctccccaagtcccagacgatgggcggctgggcagagacgctcctcccttcctagacgggatggcggccgggaagaggcgctcctcacttcccagactgggcagccgggcagatgggctcctcacatcccagacaatgggcggccaggcagagacgctcctcgcttcccagacggggtggcagccgggcagaggctgcaatctcggcgctttgggaggccaaggcaggcggctgggagagtagggactgatggtgctgacagtaaagcccctgtgtggtgggataaaagccttcactgccagctgctcatctagaaaatcacctaaagtactggcatctagactgtcagctgacatcagggttcctcgtctaccaggacatcctcgattgctccttggtttctcagaagtgactacgaccagatcagcactttttctgccctgggaaccaaatgtcacccctgcttttccatctgctggccctggaaccctctggcttttcatctcctccttttctttctcattcccccacaaacagttccctcagtgctcctggaatagctcagctgtgtcccagcaggagggactcaggtctagaacccagaggttactgtggctgtcagttggaaatacttttagtatagaaattttcttggatctgaaagtacgagatgatccacggttaataaacagggatagccagcggcagcaggaatgagaaaggtggaaagaaaagttagtttgtggtgcaagattagtttgtgtccttgaacttcagtgtccattattaaataggagccgtacttgctctgatgaaatgagataatgaaagcactctgtaaactaggaaggaccagatgattgtaatgtgttagtgataatcgttatcattttaattatatttaaatacatcctgccag

SEQ ID NO: 469951 - DNA, 755 bp, Homo sapiens
tggctctggaggacagcacgtactcagagtcaccacagcaatcgagtatgtctggagaactggctgtgaatgggtgcagaaggagactgagactaggaaggaatgcagggatgaagatcacagaaggccttgcctaccatggaaaaggagtttgggcagacagagaggagttgcctactgagaagactgagaagcagcagccagagagagaaaaggtgaattgggagcaagggaatgtctatatcagtcaggactcattggtggcaaataacagaagccagtgcaaaccgactgaaggaaagaaaggagagtcttacacagatacgggagtagtcagatatgcagatataggcatgaatggttccgaaatgaaattcaaagatgtgaagaacaagatgtcctcattaatgactgatgttgtcggggtccacagtagtttaggattcctattccagctcaacttgcaggtttagacagctgtcctttgcggacaaggttaagtgattttaatttggagggcagaggagagtttccagctttctgttttcagggtttccagtgagatgaggtgcacagctgggggcagtatgtccttctctcacttagaggttctctggtcgacatcctcccttcactctgatcgtgatggttaattttatgtatcaagttgactgaattattgtgttcagctatttgcaaatctagatgttgctgtgcaggtattttaagaataggtgactaacatttaaatcagc

SEQ ID NO: 469952 - DNA, 739 bp, Homo sapiens
tgagtcaagtgaagtatagaggcagaacgcaccttgggaaatgcgaaatgagaaaaagtgccttcagctgctgccccacggcaaggtgccttccattcctccacccttccatccaagctccctaagccaaggtcttattcggctctgcttggcactgtctgaaacccctatttcctgcttctcttgctctcagagtccaggtgtcaaatggcgaatctgttttgcaagtcagtgcgcatacaaggaggcaaatagaaacctggccctgctggggattggcagatacagtccatgggatgagactggtaagagctgtagggtcagggagtgtgcatctgccctggtccctcagtcagagccccagtccccggctcctttcctccgtgtgttctgcagccacagtccaggcagctgtggaggcagcagagcccaggacactgaccctcagctgagacctccacaagctgatgtaacagacctgtcttcaccaaaatgtttaacactcctggaaggatgaaaaagtatacttttagcaaattgtaactgttcacctcttaagtgacaagtgatttgaattgcttcacttctggtttttttaatatagtcaaatttattaattatgtctctgaattttcagttatatttagaaagcctttatgtacatcaaggttaatgaggaaatcacccattgcttacatgctatcactttttacattaaaatttcaaactcatttggaga

SEQ ID NO: 469953 - DNA, 662 bp, Homo sapiens
gtggataggtaatacactagttaagactttattgtaccatacatactatgaacgcacaggaacccctctggggacttgtatgtacaaccaaacgaactattcagtttgtgacccaggggatagctagctttatgtatactatgaccctaagcttttacctgggcctgggagtcacatctttgtattttgatatttgccagataacatccatagactcactctttcccgtaatccacagttccatggagtactataatagctgccataaaaagccggcactcacgagctcaagtgtctggctgctaaaatcttctgtcattggaagattctgcattgcccactggggaaaagcctttacaaacccagtaggggaattagtctgcctaggacagcaatattacaatgagacattagggaaaactttatggcggggcaataataagcaaggtaaagatacaaccaggttgccatgccataatccattttcccattttcactctttaaaccactcctggtatcaactagaggcaccaaatgaacacctagcaagcaccttctggcctcgactggatctgtgggccatgagcttattggcaattacctgccaattggacaggggcctgtgtgttggggacaataagaccatctttcttccttgaccc

SEQ ID NO: 469954 - DNA, 1073 bp, Homo sapiens
agtgctttgatgataaagcctaaatccctaacgtgtttgcacacttcctgaccaccctctagcaagttgtcattcctctggatacactttcagtaactatggcatgcactaggtggaccaagctccagggaagggactggagtgggtcttacattaatgctagtggtggaggcatatactactcagactctgtgaagggccggttgaccatctccagagaaaacaccaagaactcactgtatctgcaaataaacagtttcattgctgacaccatggccgtctattactgtaagagacacagtgaggagaagtcagtgttgagcccagacacaaacctctctgcagaaacacatgaagtaaatcagctacgggggcgctcaggacccactgatcagattcaacctcagaggcagatgcagatacaggctgttgtcactttttcgttttcttttctgctccctgaaaaagaaagatgtggtccatgcggtctaaattccaaggctcaagctcttccgctggagctcaggtggggctcaggctgtggctcctgcagccgcatgggagaggctgatggggctttcttctttccccagtgcttgggaccctccaccgtgtttcatggggactcatgtggaaatttgagtggcccaggggaactgaagggcataagcttgtttggtgagagtgaaacgtgactgtggaattgattctttgttgtgcaaaccagaagaaattttgaattttgtcagaatcaaaacggagtcacttttgttaaaacttttgcaaatgggactgggaaaggccatagaagcagggttctcatacacttacacttggtaacaagaactaccacaaatagagcctaaaaaacacaaccttgcacaaaatccaccacaactttaggaaaaagctacccccacaaggatatgtcctcatgtactgtgagtccaactttccactgttgccacccttgttattaatctttgcagcccaggaaaattgtctcaaagcaacttagcaacttacttagcccttcttattttaactttaactgcctaagaatttataccgtg

SEQ ID NO: 469955 - DNA, 665 bp, Homo sapiens
aaaccacaggcctcagatgcattacctggaactcagagcccccactctcacttgtggatttttgggagagctgaggatggacactttattgggctgtgagctctgcatgatggcaatcgtgaggtctgggtgggcacagccagagccaatggagctggccaaaaggaaagacaggacggaattcctgggaagtcctacagctgctgtctaccatagagttccattgtcttctcctctgctaggattaaaccagaccgaccaaccgattaagtgtgcatgcattggtcgaaggagggcatccacccttttgagggaaaatgcatggagggtaaatgaggctgggaagctgatggcatatgatggaagcctgtccctgagtgaaggagagagggaggcaggattgggtggaactttcctacatttctgtgctgtgcaaagaaactccagattatcactgagtctcctgcaagtcaaagttgcccctcaggaaacccccatcactcccagcaatgactctgccccagatgagtgcaaggctcactctattcctgagaaaggagcacaggatatgggatttagcatgagccacgtcatggacgtcagagagcaggagctgggtgcatgatccaagtgcactgttctgcctgtaggtggagagaggaagg

SEQ ID NO: 469956 - DNA, 503 bp, Homo sapiens
ttgtatcgtgggtccggatttatgaataatgcaatacgagaacacactaataaagcggacatctccctcgtttcaccagggtcccttgcagtctgcaaccacccagctaaggagagggatggtccaatctccatgactgacaccatcgaggtgctgcctcaggcccagatggtttgtgatggatgtcactttactaatcttgagttcagggagtataatgccctcctcccgcatgcctcacagatgaagaagccaccctgtgatcaactctctcttcttctgtctgaacccatttctaagtgtcagcaattccgcagtggtggaatcccacattgtggtgtgtttccttatttcaggaagaaccactcacctgataatgcaacagcctggacatctgactttcactttgtaagatgcacccactgaagaggttcttccagaacttttggcattgtggcggtatccccatactcaggcactgggccccatccatcatggataac

SEQ ID NO: 469957 - DNA, 603 bp, Homo sapiens
tcctcacacatgcatactgaacaaacatgtcttcaggccctatgtgcaaacagcagaagcagagacacaaaggtactcagggtgcagcctctgtgaacggccagagccaggccatggtcagcgcccctgagaggtggaccaagctggacacacatgagccaccgagcctggcaagcaaaagcgccagccttgatggaaatggcgagctgagcggcatctactcagtgtggtttcttttgttattaagagctttagtgtggtggctgtttcaaattcccgttgtagtagtaatatactgggtatgtgagcaggcccgtggtcttttgcggggttggaatcaccgaagtaatgagaagctaatctcattttcaactgctgtaagagccggctatggtggcagcagaagggtttatgctttactggtgattaaagtgggaaacttggcgtgttccagatcttagagaaaagatttttagttatttctcattcaacctgatactacctgaaagtctctcgaatgtaacttttattttgtcgagatgggttctttctatacccattttttatgttttttttgtgaaaggatgttgtttcatcaaatgc

SEQ ID NO: 469958 - DNA, 574 bp, Homo sapiens
aatgtggacactgttcagactcacctttgatctacctggatggtcagtcaagctggcaaagcagaatatctgtgtgtcagtgtactttattcacccgttgttgtgtcaggacctgcaggacagacccccacagccggtgccccatgtgaggatcgctgcaaagggagcgtgacagaccccatgaaaacgaaggttgaggaagactgcgtggtcaagtcagtaaaacaggatggctttagtcccattatacaaagaagaacccaaaaaggggaaggaggaagaaacgtcacttgccttaccacctgctcttcccaaaataacaaagaggaaacggaggttttgcctgagccccctctttcaatagatagaaaaaatagaggaaatacactacagctatatgtccctgtcttcgacaagcagcattaaaaggggagctcttagactgcccagtaatgcaagatcagcaaggcaatcaggttaggccagctcacaatttcaacaattttgtcacacgtggaatatccgacattcctcaggtatcccatataaaccccaaggacaagcaatagtagaa

SEQ ID NO: 469959 - DNA, 555 bp, Homo sapiens
ctcacgactgctcagagtgctgaggacaccagagcttcaggacgaacagggggtgctcaggccaccatggggggctcaggaaccaccaggcctaggggtttggagaaagagagttattcagaccatggggaagaatctgacactgtcacaccgcctggtgccttcagtactggactggctcctgccctcattggtgattgcatcaaatattggcctcctcatcagtacaacacattggaggagaacatagggaaatgcaaagacaatgggagaaaaaagtcaaggacagtagagcaattcgaagcctctgataccaatagcttgaggaccaaggtcatgactcaacttttggtggacacagagtcacttctcttagggaaactgcagtattctaaggtgacaatatgcaaacatgatgaatgtacacttgctacatctccaattgtgtactgttttccttacttctgtttgaagaagggagtcgtatactcaggtctagtatcagtgtagggggtgctccctatttgcaagatactagaaaaaaatggtaagtta

SEQ ID NO: 469960 - DNA, 829 bp, Homo sapiens
ttttcctttctcatcagctggagaagtcagcaaacccgccaggagatagatgctcaggacaccagagagaactcagttaaaccagggggcgctcagaacagcagagtgtgctcaggacaccagggggcgctcagaaccaccagcaggagctcagaacagcagagtgtgctcaggacaccagggggcgctcagaaccaccagcaggagctcagaacagcagagtgtgctcaggacaccagggggcgctcagaaccaccagcgggcgctcagaacagcagagtgtgctcaggacaccagggggcgctcagaaccaccagtgggcgctcagaacagcagagtgtgctcaggacaccagggggcgctcagaaccaccagcgggcgctcagaacagcagagtgtgctcaggacaccagggggcgctcagaaccaccagcgggcgctcagaaccaccagggggcgctcaggacggcaggggtcgctcagacaccacgaacagttgattcagaaaggcaggaaagcaggcattcctctaagtctcccctgagacaaatacatatatgatttcttcctccccactataatttatgtaaaaatgaagattcactgagtcagactaaattgtgtattcagtggaaggataataaatgacacaaaagaatgcaacctattgtctcttatcttcttctaacctgcaagcccccattttcatttgtcctggcttacaggaaaaaaaaatgtacatttcacatgtattgactgatgtctcatgtctctgtaaaatgtataaaagcaagctgtacttcaatcaccttgtgcacatgtctcagga

SEQ ID NO: 469961 - DNA, 1460 bp, Homo sapiens
aaccagacttaactggggagccctctattgtccctagtatttaccctatgcctaacgctctaagatgttgttctcatttttccatttgcttttcctgctttccgaaaaaggaagatgtttttgctgtggtcaaaattccagacctcaagcccttttcttggcgctcaggtgggtctcaggctgtggctgctgcagtcacgcaggagagtctggtgggactttcttcactcttcgtcactcaggaccctccactgtgttgcatggagactcatctggaaatgcaagttgccagtgggaactgaagggacaagcttgtctggttaatgtgggatgtggatgtgtttctaatcctgttctgaaaaaccgtcacacagtaacgttcttcactagtggagaaggaagtgggtgtgaacgttgtcagaataaaaatggagccacgtgtgttataatctttacaggcgaagctggaagaggtcatgaatagagggttctcatgcacacatccctgataacaagaattaccctaaaaatactctgcacaaccacaatcttgaacaaaggctaccacaacaataagagaattaatactgaggggatatctgccctgcaactccctgttcagccttaaactgattctacccttgttattgattcttctaccccaggataattgtctcaaaatagctcaggtaatcttctcatttatccttcagacacttgtctttctttaccaacctaaatgtgaccatggataatcccattgcaatgctcattttcaaataaatacgatttgattttggagaatctctttctctctgatgtttaggttggtttgttgaatatttgttagagaccagttctttacactatggcatgtaataaattccaaatggcagtacgtcattgtttacttagcttttgtgcttatatttttcagaggaaaaaaaatactgtaaattgtaaatacccaatacctaacagtattgtatgcaaatctgtgactgttggcagtgtcatctctgagaaacagataaagtttatttactatatataaaaaaagagtttggaaggtggactcctcaccaatttttgaaagagttagagaagcattagcattaattctttaaatgttaagactaattttatgatgtaacatataacctatcatggagaatgttcaatgggtgcttgagaaggatgtgtattacatggctcttggttggaaggttctgtaaatgtctttcaggtaaatttgttcaatactgttgttcaagttcagaggcttattaagaattttctttctggatttgcaatacattattgctaagtgaggtattaaggttttcccttatttttatatagttttctatttctctctatatatatatcttaaagtttgcttaatgcatttatatttgtatttgtactgtgtaaaaagtaaaataaaataataattgctt

SEQ ID NO: 469962 - DNA, 603 bp, Homo sapiens
gaggtaaatcaggacaccagaagagactcggtacagcagggggctctggaccattcttaactggtaaacaaattgtggaaaagtcattcattggcatactactgactgtgaccacaatatactaatgttggatacgctcaacagtatggttaaattctcatatgagaccttgagtagagcacgtctgactgtgtttgtctgttttcacgctgctgatgaagacataccagagacgaggaaacttacaacagaaagagttttattggacttacagttccacgtggctggaaaggcctcacaatcatggtggaaggtgaaaggcacatctgacatggcggcagacaagagaagagagcttgtgctggtgtctgtggattttccaggcacaaagtgcaaactgtcagtggatctaccattccagggtctggaggatagcagccctcttctcacagctccactaggcagtgccccagtagggactctgtgtgggagctcgggccctatatttcctttcctcactgccgtagcagaggttccccatgaatgagccaccactgcagccaacttgtgactggacatccaggtgttttcatacaccttctg

SEQ ID NO: 469963 - DNA, 987 bp, Homo sapiens
gccaggaaggaggcagctgccctggtgaggagccaccccatgtatattcccttgatcagtgtccacaccatggggtctgcactgatctgggcttcccttctcatcaccctcaatattagtgtcccttgtgaatcaggtccagctgcggctgttccacatggggccgttcttccatttcctcagtgtttgcagaagtcctgtgtgaagtttattgatggagtcagaggcagaaaattagagacaggagggaactgcatggtagatgctcctcataaccacaaaggggcagtcaggaccatcaggaggagctcaggacacctgggggtgctcagaaccatgaggggtgctcaggacatcgggggctctcagaaccatgaggggtgctcaggacatcagggggctctcagaaccaccagggggcgctcaggacacctgggggcgctcagaagcatcaggggtgctcaggatatcagagtgccctcagtaccacgagggggcgctcatgacaccaggggcactcagaaccaccagggggggctcaaatatgctcgtctacctggagactctctgccctcctcacccttttctagggtcctgcacacatcacactcatcccatcccctcccttccctaagtaccacagagtgggctctgcagttcctgcttccctgtgtgtgctcagccctggggctcactagtgctttgatgatgacgttcaaatccccatgtgcttagactctctaagaccaccctctaggaagatgccattgtgagtgagtcctggaaatcatgggctgtgttcagtttcatattgctggatcttctctattttaaaggaatactggcaattaagattagagtttgtattgaatattcatgccaaaaaagttttctttcaaaacttttcaaataaaacaatttttcctgcctagtttgaaaactacaatgtaaattcaacaaataatataatacaattttaaaggtgac

SEQ ID NO: 469964 - DNA, 561 bp, Homo sapiens
tggagacttatctggaaatgcaagttgcgactgagaactgaaggggacaagcttgtttggttaacatgggatcctctggattcaccttcagtagctcctggatgcactgggtctgccaggctccggagaaggggctggagtgggtggccgacataaagtgtgacggaagtgagaaatactatgtagactctgtgaagggccgattgaccatctccagagacaatgccaagaactccctctatctgcaagtgaacagcctgagagctgaggacatgaccgtgtattactgtgtgagaggcacagtgaggggaggtcagtgtgagcccagacacaaacctcctgcaggggcatctggagccacaagggggcgctcaggatacacagaggacaggggcagccccagggcaggtgcaggtggaggtcaagggctgctctccttcagggtctgtggcttcctctcatctaacagttccgcagggagcctcttgtatttacagtgatgtgctactgaggtttctaagtttgtaaagtttattactacaggaggaaccactatcaaac

SEQ ID NO: 469965 - DNA, 791 bp, Homo sapiens
tctgcagggcagggcagaagatctggaaggtgatgacactgattgagaacactagagctgtgggagggagcacctggggaaaacaggaggactctaccccagggaaaggggcaagaacacccagaccagcatctcatatggaggagggtcaggaacactcacaaggtcatgcccagactctgggtcacaatgccttcctaggaatatggaaaaaggaatatggacctaggaatatggagtctttagctcccttccctggggagctgagggatccagctccagcaggaagcactggttgtgatggagaagcagagacagcacagatgagggagagggtctgtgagggcttcgccaggccaagaacgcacgagaaatacagatgtcggcatgcacaggttctgaacaacacacctgagcagcaatcatgggccgtggaggtcgcctcacatgtggaaagatctgactctgcaaagctgtacatgggggtctctgcaggcccttagttgtacaggaacagctcctccctcagactcagagtaaggacaatgtgctctttatctgggggagattttctaattattattgaatttatgtttgatttgactgtttcttgtgtttgtttttaaatggatttttttcccttaagaatgagactttaatgcttataattaattacaacctgatttggtttttggtccttagaggggtgaagactctgtaagagttccggggttatggagaatctttgtatgatggctttcctatgtgttgattgcagtagaaatctgctc

SEQ ID NO: 469966 - DNA, 1334 bp, Homo sapiens
caacagaatacgccgcgtctgtgaaaggcagattcaccatctcaagagatgattccaaaagcatcgcctatctgcaaatgaacagcctgaaaaccgaggacacagccgtgtattactgtactagagacacagtgaggggaggtcaatatctcactggatcatctcgagggcccatcctcacccctgtctcccgaagacttctggagaggctgcaggacgggcagaaggaggagccccgtgtgagtccacacgacctggagcctccctctccttggattaggccatctcctcgggatcacagggctcttcattatccttaccccgctgttgtaccaaacaagcaacatcacacttcaattcatcagggtaaggagtgccttttacctgccaccgtgttttggaggccttcacagccatgtggaactgtaattccaattaaacctctttttgttcccagttttgggtgtgtctttgttagcagtttgaaaatggactaatgcgtgggcaaatgacacagacacttctcaaaggaatacatacaagtgaccagcaaatatatttttaaaatgtttaacatcactaatcatcagagaaatgtaaatagaaaaatgttctgatttctgtcactataggtccattttcttgttttgaatttcatatacatggaataaaatattatagctcatttttgtaagaagcttttactatctgtgaggttcattcatgtgatagcatctatcaaggttttgtcaacatatgtataaatatgtatgtactcatacacatatagatatttcatatctgaatcagtccattgcattaataaatgacagattattaaataaatcagttcattaagtgaataagtgacaatatgtatatctattttcctgttgatggaatttaaatttgtttccaatataaatatcataaacaaaactgtcatacatatctttgtacaagttcttctgtttatattcacatatttttattgataaaatatgttgaaatataagtatgcattataccttttcagctttatggagctatcactgacaaataaaattttctgtatttaaggtacaccaattgatgtattgatattcttggggaaatgctcataatgatcaaggtaattggcatgcctatcatctcagagagttaacattttatgcctttaatttattgtgtatgtgtgatgaaatcacctaatatctacttgtctggcaaaagatatgtttataatgcaacattcattagtatagtcacattgctgtaggtttgatctccagaactatttcaacctgtgtattagtccattctcaccctaatgt

SEQ ID NO: 469967 - DNA, 789 bp, Homo sapiens
ccctgaaagcatcatccaacaaccacatcccttctctacagaagcctctgagaggaaagttcttcaccatggactggacctggagggtcttctgcttgctggctgtagctccaggtgctcactcccaggtgcagctggtgcagtctggggctgaggtgaagaagcctggggcctcagtgaaggtttcctgcaaggcatctggatacaccttcaccagctactatatgcactgggtgcgacaggcccctggacaagggcttgagtggatgggaataatcaaccctagtggtggtagcacaagctacgcacagaagttccagggcagagtcaccatgaccagggacacgtccacgagcacagtctacatggagctgagcagcctgagatctgaggacacggccgtgtattactgtgcgagagacacagtgattacagtgaaattgcacagaaggtgtgagaattcccatgaatccctgccccgcacggacaccgcctcctccactacagccatcctgccccacagtcacaaataagtcacaatggatgaatctacaagaactcttggttctttctttttctggtgatcccctaatataacaagcctaaattatcttggaacacccaggtattttcaatggctttctagaagtgatattagtcagagggaaagtgagtgaggctattactatttgagcactttcttccaaaatccacaaaatatatgttaatttggagtttttctaacttctggtttacaatgtcccttcccagagagtaagatttttaagc

SEQ ID NO: 469968 - DNA, 518 bp, Homo sapiens
tcccgtgcacgcagagaagaggccatgtggagacatagtggactagaaggtgcaagccaagaagaagccgcaccaagaaccaaccctgccagcacctggaccttggacattcagacttcagaatgggagaaacaagggccataccccatagaaaaggaagaaaaaaagcagatgggcacccctggagagagctcattagatttggacacaggttttagtggatttcccctggagacagtggaggtgaatccaggcgttccacagtccttaccgttcttctcttcctgtcagcaccgcaggacagcagataagggagctgactgtggatttttcagatccccgggaaaaagcctgcaaggactaatagtttcacatctaacaccattagcacatgcatccaaaattaaaaaaaaaatcctcactaaatatttccaggttagcctgttcctctctcaataccataccgtggcacctgccctgggttcggtaacatgtgggccccagtcctctctgtaggc

SEQ ID NO: 469969 - DNA, 561 bp, Homo sapiens
acactgggcctgactgcttcctgaaccaagcccagcacaatatggttcaccccagtgacattttcagatgtttcttccttactggggatacatcacaaaatgctccagcctctaccccttgggatggtgctgtctgggaaagcaaaacagcaactacagctgaaatgcatccagacacacctccccatcaccactacattgcaagagaaattatctgcagaggagctccctcatttgatgccaatttggccttgaaaccccacaaaacccttcctgcaagtaggatgctctgccccgctccccaccaaaccatgataacaaccctgagccagtctccttccctgccctatcaagccactttggaccttaatgagagacctgccctgctctcagcagacaccttaaggatgcaggccctgagtggtacaggaacagctcctccctcagactcagtctaaggagaacttctgctctttatctggggaggtgagggtgagtgcgtggaaagtaccaaacttgctctaatcaagatctctgcatgtggggagaaccaaagtatac

SEQ ID NO: 469970 - DNA, 687 bp, Homo sapiens
tgcgcttgtttggtcaaagacctctagggagcgctcaggacgccaggggggtgctcagaaccactaggggacgctcaggacactaggtggcgctcaagacaacactgctgcactcatgtcaccacggggtactcagaaccaccagggggcgctcagaaccaccagagggcgctcagaaccaccaggtggcgctcagcaccaccagggggcgctcaggacaccagggggcgctcagaaacactcggggacactcaggacaagagggggtactcagaaccaacagggggcgctcaggaccaccaatggttgctcagaaccacaagggggcgctcaggacataggtggtgctaaagacaacaattctgggctcaggtcaccagggggcgctcagaaccaccaggggacgctcaggacatgcagagtccctaccatgacattgccaagtagagctatggaagggggctaccaacctccagaccccagaatggtagatccacaggcagcttgcagctcgagtctggaaaagccacaggcacccagctccaacccatgagagcagccttatgggctgcattagggaagtcacaaaggtagggctgcccaaggccttgggcacccacccttgcaccaggtcacaagacatggagtcaatgattattttagagccttaagattgaaggactgtcc

SEQ ID NO: 469971 - DNA, 784 bp, Homo sapiens
tcctgagaagaaacctcgaagcacaggaagggtctcatgtataatgaagtgtgttcttggcgttatctctggaggtattgaatcggtccttaccggagtctatgaggtatgtgctacccccattaggattaacttgtcaaaccaactccagcccattccctggagcctggcggacacagttcatgtagtagctactgaaggtgaattgagaggctgcacaggagagtctcggggaccacgcaggctttgccaagcctcccccagactccaccagctgcatctcacactggatacctgcaaacacagagacaccccggtcagaaactgccacacgtatccactgtttctcactcatatccattcatactcaatatctctagttctctatagatcacgttttaaaatagcaacaaggaaaacccagctcagcacaaactccatggtgagtcctctgtgttcggtgctgatcaccagatgaaaacacctgggaattcgggggctgggctcctctcccagagctgcagggtcggggttgggctggtttttatcagcagagagtgggccctatttccatgtctcctactatatagcaagctcaggggtgggacggctgaggagaaggcagtgcccggagcagatgagagtgtcctggaaaactctggagtgtttacctgaaatctacaatcagtgttcacatgtgtgtattttcaggagtccttgattattcaagtgtcggtatttatccatttcttgctctttctcagccaatatattcatttttatt

SEQ ID NO: 469972 - DNA, 816 bp, Homo sapiens
tcgtgttctaaaaataattgtaaccctcttaacatcattgtccatgaacctaattcagctcaatggtactatggtatacgagtacagtggatcagaaggacaactcctcattgctcccccggaattacatcccaggctacgcagagctgccccactactggtttctcttttagccggtcttagcatagctgggtcagcagctattagtacagctgccctagttcgaggagaaactggactaatgtctttgtcccaacaggtagatgctgatttaaataatcttcagtctgccatagatatactacattcccaggtagagtctctagctgaagtagtacttcaaaactgccgaggcttagatctgctgttcctctctcaaggaggattatgcgcagctctaggagaaagctgttgcttttacgccaatcaatctggagtcataaaagatacactccaaaaagttcaaaaaaatctagataggagccaacaagaacgagaaaataacacagcctggtatcaaagcatgttcaattggaacccctggttaactactttaatcactggtttagctggacccatcatcatcatattattgagtttaatttttggcccttgtatattaaattggttccttgattttgtaaaacaacgtattgcgtctgtcaaacttatgtatctaagaactcaatataacccccttgttgtaactgaagaatcaacgacttgattcccctaaaacacaagtggggaaatgaaatgcctaacggtgtttttactttaactcgttactttgaattttgtcctgcttgtctcttt

SEQ ID NO: 469973 - DNA, 554 bp, Homo sapiens
gcacagaagctccagggcagagtcaccatgaccacagacacatccacgagcacagcctacatggagctgaggagcctgagatctgacgacacggccgtgtattactgtgcgagagacacagaccaaggccacggcccctctgtcaatggccttagatttacctctcacggggcatccacagggttcccaggtgagaacaggcaaaaacaaggtgaagacactttccaaatctccagcagtactgagcttgctttagctctgtttgaagaaacaaaacaacaacaacaaacaacaacaaccgcaaatataaccaggattaagtctgtgggtttggaggaaggagattcagccatggggaagaatctgacactctcacaccctctgtgccttcggtactggactgctcctgccctcactatggtgattgcatcagatattgcctccccaccagacaacacgttaacatggctccttgtacctggctttaaccaagaaagttgtcgacttgactcttcgtgacattgtatagcctggtttgtcacaatctttatttc

SEQ ID NO: 469974 - DNA, 746 bp, Homo sapiens
cccgacctggtcaagcaaaagtcttccccaggatctctcaccatttcttccttgtgacctgcgggatgtgtgaggtgaatagggacttgtgtgaggtggccacaggaatgtgtgaggtgacctgggggatgtgtaaggtgacattggggatgtgtgaggtgactcagggcacatgtgaggtgacctgggggatgtgcaaggtcaccttgggtgagtgtgaggtgaccttggggatgtgcaaggtcacactgtgtgagtgtgtccagtgtgaggtgcagctggtggagtctgggggaggcttggtacagcctggggggtccctgagactctcctgtgcagcctctggattcaccttcagtaacagtgacatgaactgggcccgcaaggctccaggaaaggggctggagtgggtatcgggtgttagttggaatggcagtaggacgcactatgtggactccgtgaagcgccgattcatcatctccagagacaattccaggaactccctgtatctgcaaaagaacagacggagagccgaggacatggctgtgtattactgtgtgagaaatcctgatactccactctgttttctggagacgcgtctgagaacgcgtgtggccattagtaatgagggcacaagcttctttggtcaaaatggggtgaggatgtggaattgatcctgtgctgtgtaaactgtcacagagtcaccttcttcaccagtagtgttagaagagcttgtaaaatttgtc

SEQ ID NO: 469975 - DNA, 648 bp, Homo sapiens
acagctgccctcgtctactgcacaacagcttctccaaagtgtgtttaccctgagcattgagattgcctttctcttagttaccagtgagctttgactgttccgaatgggaccagcatggagtcaaggtgcctgctcaatgtcagagacagcgatggtctcagaaacaatccaggtgcccactcccaggtgcagctggtgcagtctggggctgaggtgaagaagcctggggcctcagtgaaggtctcctgcaaggcttctggatacaccttcaccagttatgatatcaactgggtgcgacaggccactggacaagggcttgagtggatgggatggatgaaccctaacagtggtaacacaggctatgcacagaagttccagggcagagtcaccatgaccaggaacacctccataagcacagcctacatggagctgagcagcctgagatctgaggacacggccgtgtattactgtgcgagaggcacagagctgcatcaggaactcacagaggataagggagaattctgagaacatgctactgtggtactgcctagagaggaaggataaatgatgacaaatacatctctgagtaacatatgggcatttgttcatgaaaactgttttttctgaaagcttatgaaggtcttgaaa

SEQ ID NO: 469976 - DNA, 5309 bp, Homo sapiens
cagcactgaacacagaggactcaccatggagttgggactgagctggattttccttttggctattttaaaaggtgattcatggagaaatagagagattgagtgtgtccagtgtgaagtgcagctggtggagtctgggggaggcttggtacagcctggcaggtccctgagactctcctgtgcagcctctggattcacctttgatgattatgccatgcactgggtccggcaagctccagggaagggcctggagtgggtctcaggtattagttggaatagtggtagcataggctatgcggactctgtgaagggccgattcaccatctccagagacaacgccaagaactccctgtatctgcaaatgaacagtctgagagctgaggacacggccttgtattactgtgcaaaagatacacagtgaggggaacaccattttcttgggctcctgggaaacacaacagctttggtttaactcacagctcaggcacactcacgggtcctttcagaggctctcaacttccctcctacagtccctcagctcctcctggggtcctaacttggccatctctatcctctctgctgagcctggccatacacaatccatcccatctggatatgtgtatagcagtgggttaactcagcaggcatgaatagttcaaaccctccacgttcctaaaaaggtaaataactaaaaaataaaaacaaaagtaaacctttgttcatttatggctgtctgttacctcctgggatgagatctccgagtccatgaaatcttacacctgataaaagtgtctgcagatgtctgcagccttgggacatgctgtacgagtttaatcacagtgatttatagtgaacgcctgcttttgttttgctggggagggctgtggtctgagtattgtggtcagttacccaggtgttccatagtctatgattcattccccaaacacagccctggacaagaaaactcaggggcactcccctgggtgttgacacttcacacatgtcatcttacctcatagctggagcattacacatgtgcagaaggctccacagtgggaggacccctgagagcttgtgcctggattctcctgagcttcactctttgtgccttttttttccatgtattttcaattgtatcattttgctgtaataaactgttcctgtgaatacgagttttcatgagtcctgtgtttttactgagttttgagcctgagggtggcagatgcaacttctcaatgcagttgtatcagaagaaggatttcctagagagatcctaagtgacacatggctgaagtattgttcagaaaacataagtattcaggtgtggaatggcaaaatctgatacttgggtggcaacagaattacccggtctgagacagcagctgaactgaagtagatgtctggagataaatgcaatttagaaacgataactcatactcccaaagagctggctcaatcgatacataaggaaaaataaaatgataaaaaataacctaaatatgcaattactatttgtgagaacatccgggagagtgattgcagggaaagtggcctgcgccgacctcagattttggccaatgtcatttctggctgatgggctccagggcactacctaagggagcaattatgctgcaatgacagacagaagcttcgcaagctctctccacccagaaggtggttcaggtggtgaagtgcggggactggtgagccacaaaacactgaaatgagggaggaaagtgagaaagtgaaaggcttttgagctttttctttagcttaataatttttgttaattattaacaaaataattggacaatgactaatgtaaaagtggaccgtgttttgagtcccttagaacggaggagaatgcagcggtcaatgttgtgcccagagattactatagaacaatagtaggtggttgaacatgctccaaacacaaagcctcttgttgctgatgggacagctgccctcgtctactgcacaacagcttctccaaagtgtgtttaccctgagcattgagattgcctttctcttgtaagtgaaaaaatcggaaaactccaaataaaggaggagttgtaacgctctatgtgtaagaaattctaatgtggatttatgataactgggatatgcatccacttatctttttatctgtaaaaattcatgggtgaaagtgcaattttgttacatggatatattgttcagtgatgaagtctgggctttgaggagagtcatcatctggatggtgtatattgtacccagcaagtaatttctcatcccacacaccactcccaccatccaaaccttccaagtttccaatatttattatgccacactctatattcatgtgtgcacattatttagttcttacttatatatgacatgtggtattcaactttattcttctgagttatttaacttaagatagcagcctacagtttcatccatgatactgtaaaatacataatttcattttttattattgagtagtaattaaatgtgtgtatatatattcacaaatatatataatgtatttgtgagggtgtgtatgtgtgtatatatgtgcatatatacatatacaacatgttttctttatccaatcattcattaaaaacacttagtttggtaccgcatatgtgctattgtgaataaggcaacagcaaacataaatgcagcatctatcgaatataaaattcatttttctttgagtcgataccaagtagtggatttgccgaattaaatattagttccatttaataagagaacttaccaacatctgtttcttgtttagtttagtttttatttttgactttttaataatagttattctgactggtttaatatggcttctcgttttgacttcaaattgcatttctgtgatgattaatgacattgattgttttttcatatcctggttgatgatttttatggcctcttttgaaaaataaatgtctgatatttgctcactttttaatgtggctatttgtgctttttgtgttgctttagtttcttgtagattccaaatattagctctttgtcagatgtagtgtttaaaaatatttttcgtcattctgtaggttttctgttaactttgttgattatttattttgctgatcagatgttttgcttcttatttgtattaagtccaaataacctattttggtttagttgtgtttacttttaaggtcatagtcatgaattctttgcctagcacaatgttcagaaaaacacttcctaggatttcatttatgactttcagactctcaggcctcccagtcaagtcttttatccatattggtgtaatgtttgtatgtagtgagacatatgggtccagttttattcttctgcaaatagctgttcagtttttcctgcacaatttattgaacaaggtgacattttcccagggtatgctttttgtctggttggtcacagtcagttggctgcaggcacatgactgtatttctggaatgtctattctgttccaagtatctatggttctctggttgattgttacttgtgtataaaaatcctactggcttttgtatgcttttttatcctttattctaaaacttcactgaattaattcatcaattctaggagtacttctaaagaatattagtttttaagtacaaaatcatattgtcagcaaacacacacaaaaaactgacttcttcttttccaatttgggtgcctttatttctttctggtgtcttatttctctggctaggatttcaagttctatattgattaagagtggtgaaagtgggcatccttgacgtgttctgagtcttaggaggaatactttcaacatattgctactcagtataatgttgtatgtgagtttgtcatatatgatttttattaatttgaggtatgttttccttctattctaattttgttgagggttttttatcataaagaaatcctaaatgttatcaaatttttttttctggacctattgacatgattatatgttttttgtttatgtggtggatcacagttattgagacatgaacgttgaactatccttgcatccctgaaatgaaacttagcagattgtagcatattatctttttgatatgtagttggacttgattttcttgtgtcttgttgaggatttttccatctatagtcatcagtgatattgatctgtagtattcatttttgggtccttgcatggatgtggtatcaggctattagtggctttgtagaatgagttagggagaaaaaccctctcctcgtttttttggaaaaagtttcagtagaattactagcagatctttttgtatattggacagaattcaccttttaaaataatatgctttacggctttgatgttgagatttttttaaattactgcttcgatgtcactaatttttgttggtcctttcaggatttttatttcttcctatttcaatcttgggagattatatatttccagacatttatctattcaccctaaattttctagtttatgagcctggagatgttcatagtagactatgttgatcattatatttctatggcatcagttgtaatcttttcttttttgtttctcattctgcttatttaaattgtctgtctactttacttgcctaatctagctagtggtctgtaagttttgtttatcatctcaaaaacccaatgttttattgtattggttctttgtatttcttggttcttaactttatctagttctgctctggtctttgttatttgttttcttctgctgtgtgtttggtttgatgttgtttttctagttatttgatacgtaatgttaggttgttaatttgtgatctttctttttgatgtggtcatttaacattataatcttatcccttagcacagcttttgctgtaaaccagaggttttggtatgctgtttctctatttttattcatttcacaacatgttacaatctttttaaattttatcattgacccaaagttcattcagttgcaggttgttaaattttcattgtgtgtgtagtcttgaatattcttctagggtttgatttctggctttatattactgtggtctgagaagatatttcatttttaaaaagttattgagtcttttatttctggcatagtatataatccatgtttgaaaatattccttgctaatgggaataatgtatattctgcagtcattaggttaaatgttctgttaatgtctgttaggttcatttggtctagagtccaatttaagtctagtgtttctttgttgattttctgtcttaatgttttgcctagtattatcatttgggcattgaaatccatcacaattgtattgttacctgtgttcttccttaggtct

SEQ ID NO: 469977 - DNA, 850 bp, Homo sapiens
agccctggactccaaggcctttccacttggtgatcagcactgagcacagaggactcaccatggaattggggctgagctgggttttccttgttgctattttagaaggtgtccagtgtgaggtgcagctggtggagtctgggggaggcttggtccagcctggggggtccctgagactctcctgtgcagcctctggattcacctttagtagctattggatgagctgggtccgccaggctccagggaaggggctggagtgggtggccaacataaagcaagatggaagtgagaaatactatgtggactctgtgaagggccgattcaccatctccagagacaacgccaagaactcactgtatctgcaaatgaacagcctgagagccgaggacacggctgtgtattactgtgcgagagacacagtgaggggaagtcagtgtgagcccagacacaaacctccctgcaggggtcccttgggaccaccagggggcgacagggcattgagcactgggctgtctccagggcaggtgcaggtgctgctgagggctggcttcctgtcgcggtctggggctgcctcgtcgtcaaatttccccaggaacttctccagatttacaattctgtactgacatttcatgtctctaaatgcaatactttttttgtcctttttgtttctttgtttttttgcaacaggagtacatatcctcagctccacagaagccagggtgtcactttgggggcagaaataatcgtttcgtggtcaacaggatgagagtcctgaggaatcccagggaaacctggagagtgttttccaattagactcagggcagagacctccatgggaatttctgattagaac

SEQ ID NO: 469978 - DNA, 692 bp, Homo sapiens
gccgagcacaggtcccagctcagtgactcctgtgccccaccatggacacactttgctccacgctcctgctgctgaccatcccttcatgggtcttgtcccagatcaccttgaaggagtctggtcctacgctggtgaaacccacacagaccctcacgctgacctgcaccttctctgggttctcactcagcactagtggagtgggtgtgggctggatccgtcagcccccaggaaaggccctggagtggcttgcactcatttattggaatgatgataagcgctacagcccatctctgaagagcaggctcaccatcaccaaggacacctccaaaaaccaggtggtccttacaatgaccaacatggaccctgtggacacagccacatattactgtgcacacagaccacaaagacacagcccagggcacctcctgtacaaaaacccaggctgcttctcattggtgctccctccccacctctgcagaacaggaaagtgcagctgagatacgttttcctgccagggcctgcatttcccatccccattagactcagagccctgtcttcctccttcttctttaataataaatggcatgactcctgttaatagttcatagaagcagaagctgagtcctgtttgtcaaacattcagcatgaaatgttcatgttacctgggccagatgcatcactggtatgtggcc

SEQ ID NO: 469979 - DNA, 699 bp, Homo sapiens
gaagttcatcatttccctgaaggtgaagaagattggccacttgtccaggtcccaagaagagagtccaggtttgtcctgataatatgactcatccaacttctgataactctactgttacacacattcatggagggtccagctcacatgggaaatactttctgagactcatggacctcctgcacaagaacatgaaacacctgtggttcttcctcctgctggtggcagctcccagatgggtcctgtcccaggtgcagctgcaggagtcgggcccaggactggtgaagccttcggagaccctgtccctcacctgcactgtctctggtggctccatcagtagttactactggagctggatccggcagcccgccgggaagggactggagtggattgggcgtatctataccagtgggagcaccaactacaacccctccctcaagagtcgagtcaccatgtcagtagacacgtccaagaaccagttctccctgaagctgagctctgtgaccgccgcggacacggccgtgtattactgtgcgagagacacagtgaggggaggcaagaaagaagggagaaatttctctgtttaccattaaggttttaacagtcactggcacctttttttcaacaaattcccacaaggcccattttaccttcttgacaaagtatttcaaggcttctcaccatctcttgattggcgtcatc

SEQ ID NO: 469980 - DNA, 1968 bp, Homo sapiens
tcacccaacaaccacatccctcctcagaagcccccagagcacaactcctcaccatggactggacctggaggatcctctttttggtggcagcagccacaggtgtccactcccaggttcagctggtgcagtctggggctgaggtgaagaagcctggggcctcagtgaaggtttcctgcaaggcttctggatacaccttcactagctatgctatgcattgggtgcgccaggcccccggacaaaggcttgagtggatgggatggagcaacgctggcaatggtaacacaaaatattcacaggagttccagggcagagtcaccattaccagggacacatccgcgagcacagcctacatggagctgagcagcctgagatctgaggacatggctgtgtattactgtgcgagagacacagtgctacaatcaactcatgagtgtttaagcttcacctacttgattagaggactatcaacctaacatatttggaatacttctgtaaaaagatgtgttcctcttcctattatttctttatttgatcacttattaatatgtgtattggtttatggatgtctatttcatactctgaagaagatccatgctacattattcattttatttttcaaaccaccacggctttattatgtgctgggagctcattgagtttggatcctgcatccttacagctcacctcatgcttttgtttttgaacacttccctgtttcctgctattataataaattctaaactcattttctatattatctttttcatacatagaatcagccatttttctaaagattgcttgcttctgatgttaaagaatagtatttaaaaaattgtaatactgggtatgtgcattgttaatgtggtataagtacttgcaggacctctcaaccaactggcctagtaaactatgtatctaaccttctgtaatgtgattacattaaaaatgagaacacactggtctctctacccaattatgctaccacatggatctttctagccttccttccttgactgtctataacctctcactgcaaaatgaggaaccccatccaaccatatgccattttattacttagctgcacaatttcaggacacatgcatagcagtatcagaaatgtaaagctgtacccttgtaggaaacatgtttatctactagaatagagtgcttatgttcagtttctttacactttaaacttacagagtttcctcattttcaaagttccttaggtcagcaacttcattttccactttcttcagtgaggtcatttcaatgacactgtataatttgatttatttgaaattctataaaagccaaaactgtagtcaagtgaacaacaacatatagaggatattcgaggagtttagagactggtataaaataagttaaaaagacactgtttaagaagattaaaattatttttagtgatatgcaatggttcagatatgacacaattaatttgtctaagcacatagttttgtgatggaaaatataaacctaaatatatacaattaaaaaaaaatttagcagttcattaacccaaggatcaaatgcagattgtataaaattatctcattacttattttgtgagggtggagatttcatgagatgtatgcaacaaagaatgaggtaattttcctgatttgcatataagatgttgccattcactaaagacctttaattttttaaattgttttttttttaaatcaattttctatgtgacccaggtttttttctcttgacaagcaaataacccacaggattattttctttccttggttgagaaatatttccccaaacttcagctcagttcaggcatacactgtccctgaatgggcatttaccctcagatgggtacacacacctgtcaacatgtggactcttctgtcagacaaacgcacctttactcacgtggattcttctctcagacaaacacacatgtccccacgtggactctttcctcagact

SEQ ID NO: 469981 - DNA, 1862 bp, Homo sapiens
agctcaggacaccagggggcactcggaaccgccagggggcactcaggacactagggggcactcagaaccgccaaggggcgctcagaagaagcagggggtgctcagaacaccagagggtgctcagaagcaccagggggcgctcaggacaccaaagggcactcatgagactgtggcaagggggtgctgagaaccacaggataaccaccaggggatgctcaggaaactagcgggtgctcagaaccaccggaggacactcagaaaaccaggggatgctcaggaaccaccagggggcgcccacgacaccagagggcagtcagaaccaccggggcatgctcagaaccaccagggggcgctcaggacaccaggggatgctcaggacactaggggcgctcaggaaccaccaggggacgctcaggacactagtagggtctcagaaccaccaggggatgctcaggacactagggggcgctcaggaaccaccaggggtcacccaggacaccaggggtcgctcaggaaaccagagggtgcccaggaaaccaggggaggttcaggaaccaccagggggcactgaggacaccaaggggtgctcagaaccaccagggggcgctcaggaaccaccagggggcgctcaggacactaaggtcgctcagaaaaccagggggtgctcagaaccaccagggggcactcaggaaccaccagtgggtgttcaggacagcaagaatggctcaggacaccagggagcactcaggacctccaaggggctctttggaggcagctccatatcaggtacctggggaggatgaggtttccttttccaccttggtgattcctgacctggtcaagcaaaagtcttccccaggatctcttacgatgtcttccttgtaactcatggtttctttcacctataaaacattaacttagaacaggggttcaattcaacttttaactctgcctattttcagagttatactagcaatgatatatctcagtatattttttttaattgtgtatattcaatccaaagtctggctctatgcacaatttttttgttttctgtgctgtcagacacactattgtaaatgcttttctaacaactcagcatatgcatggggtccagtttcttttcctttcatcggctgtttgtgcagatgaaacaccactttaagggctcctgtcctccactttggcccctggtgttctgcttctcaaactttctccatcttctctttttctgtcaaaatattttatcttcctcagtctccatgcaggaaacaggaagtccttttacttcctgtcctccatgtctggtaaatcagttcacttcttttcatgatcactgaagccaaccaagtttaggagagtaacagttctccttagaatacactctacctgcagaccctctgccctcatcacacttttctagggtcctgcagacataacccccacccattcctctttttccctaagtaccacagactaggctctgcaacttatgctaccctctgtgtgctcagcccaggggctcagtagtgctttcatgaagtccaaatccctaatgtgtttgcccactctcagaccaccctccagcaagctgccattgtgattgaatcctgcaaagcatgggctgctttcagtttcctattgctggatgttctttattataaaggcatattggcaaataacgactagagtttgtattgaaaattaacgccaaaaagttttttaaaaagtttttcaaatagaaaagttctatcctgcctagtttaaaaaaatacaatgttactttaatcaatgatttaataaaaatttaagtgatgtttgtcttattagttattcaatttattaataactgactgatattt

SEQ ID NO: 469982 - DNA, 1168 bp, Homo sapiens
agagaatcccctgagagctccgttcctcaccatggactggacctggaggatcctcttcttggtggcagcagccacaggagcccactcccaggtgcagctggtgcagtctggggctgaggtgaagaagcctggggcctcagtgaaggtctcctgcaaggcttctggatacaccttcaccggctactatatgcactgggtgcgacaggcccctggacaagggcttgagtggatgggatggatcaaccctaacagtggtggcacaaactatgcacagaagtttcagggcagggtcaccatgaccagggacacgtccatcagcacagcctacatggagctgagcaggctgagatctgacgacacggccgtgtattactggtggccagacaacgaatgtgctctaactggcaacacctaccagttctctgggcccatagcggcaataggtggttatggaagggccacggaagtcagaccggttgaactacgccgagcgatgggcacctctcgggacaactggcacaagggccgcaaagctgggggcaagagaaggccctgccacaagaagcggaagtatgagttggggcgcccagctgccaacagcaagactgacccgtgccgcatccacacagtccgtgtgcgaggaggtaacaagaaatactgtgccccgaggctggacgtggggaatttctcctggggctcagaatgctgcgctggtgaaacaagggtcatcgatgttgtctacaatgcatccaataacgagctggttcgtaccaagaccgtggtgaagaattgcatcgtgcccatcgacagcacgccctaccgacagtggtacgagtcccactgtgcactgcccctgggccgcaagaagggagccaagctgactcctgaggaagaagagattttaaacaaaaaacgatctaaaaaaattcagaagaaatatgatgaaaggaagaagaatgccaaaatgagcagtctcctgggggagcagttccagcagggcaagcttcttgcgtgcatggcttcaaggccgggacagtgtggccgagcagatggctatgtgctagagggcaaagagttggagttctatcttaggaaaatcaaggcccagaaaggcaaataaatccttgttttgtcttcacccatgtaataaaggtgtttattgttttgt

SEQ ID NO: 469983 - DNA, 623 bp, Homo sapiens
tccaggattcaaggcaattaattgaataaataaaataggaagctaagtaaaaactgtaggccctaggacagcggctgtactagtttacattcccaccagcagtgtagaagtgtcccctgatcactgcatccacaccaacatctaatgttttttgattttttgattatggccattcttgcagggaattatgttgtcatggatggctttttctacactgagtttatttcctatcatatggtcacattctattcaacggcgtatggaacattctccaagacagaccgtatgataggccacaaagcaagcctcaataaatttaagaaaattgaaattatatcaagcactctctcagaccacagtggaataaaactggaaatcaactccaaaaggaaccttcaaaaccatgcaaatacatggaaattaaataaactgctcttgaatgattattgggtcaaaaacgaaatcaagatggaaattaaaaaaatttttgaaccgaaagcaccagtcacatgaactaaaaggcatttgggttaattagtacatattttttatgaatgcttatttatctaagccaatctaaatagaatcccttaatagattttttgttgatgatgccagatttt

SEQ ID NO: 469984 - DNA, 1177 bp, Homo sapiens
gtaaattatttggaatcctttggcaatggtgatttgtctcttctttcccatgtagtttattcagtcactgatgtctgtcagcactgactcatggacacctgtgtcatattttgggtcatgactcaaccctactttattttgttgctcaagttgttctggctttggccattgggagctcttccagttggctcctgtgtccctttaaggattggagactgcagcccaaagcatggagatctggggcctttgggcagagatgggagggcttgtctgtgcccacacacagctgtggggctcagaggggacagttgtacttcactagggtcactggctcacacagcacaatgtggacataaaagtccaggatacaaggcaggcacacctgatggggagcaattggagcacggaggcaaggaggccaaggtcttcatccaccaagtgacaatgctgccttcgcctgcgacttggaacactgacaactcctcacaggagaagctggcggagccttgtgcagaccattccagtcccatgaggtcatcctcatacgtactaacaagctaaagagaccagacaagcccgatacctcccactcagtcttgaaaacgttgatgccttaaacctcccactagacattaaaggaagcttctgcctggggccctgcatgagaagggaggcgcaagatgagaccattgattgaagttctttcttttttcataatggaagcatttttaaggctaaaaatttccctctaagtactgctctaatggcatcccacaaattctaatatgttttcattttagttaaatataaatacttcctaaattatattttaatttattttttgaccattgattatttataaatgtgttatttaattaagtatttaaggtttttacagatttcctttagttattgatttctaatttcaatccactgtggtcagagaaaacacttttgtatagtttgaatgctttttaatgtactgagacttatggcccataatacagtgtatcttggtaaatgttctgtgtgcacttaagaagaatgtatattctgctcttgtgtggagtgtcttataaatgacaattgggtcaaattgattgacagtgttcaaatctatttttcattagtttttcctacttgttctatcaattattgaaagaagactgtaatgttc

SEQ ID NO: 469985 - DNA, 2672 bp, Homo sapiens
tgacctcccctctgacctcctgtcctggtcagttggaaggacaaggactggcagtgcttcccaggaaggaaagaggtggaaagcggcctgggatcccagtcggtcacagcagctgcctgagccagggctgctatacctggcccctgggagtctgagagtgcccaacctctgcttctgaactcaccttgctgtcctgggcagagccacagcactgggcaggcctgcaggctggtcccagaggtgacacagggctaagcaggaacctcctgtgcaaaagaattttatggcaaccagaggatgcaagggtggggccatctgagaaggaagtggaggtgagcctttcctccccaggtggcaggcaatggtgagtgatcagtccccaggtggagttacactgcagggaactccttccctggtcacctgggctctggccacctcttctagaaggcacttgcttccccttcgccctcctccatcatcgtaggtttcctgagcgctccccacaagccatgtggaactccgccgagagtgtgagaatcccttttcctcccgtgaagggcaccatgtgtgctgctgtgctgtggctacccaagcagatactacagattgggatttggaggtgggagcccacagccaccgaggagacccagctgcagctggaggtgccactggaacagagagagggagagaagggcctcacgtgtcctttcatcccacccttcaatcttgggtcagcaccgcccattggccaaatctactggaagacagaagggaagggagcctggatgttgggtcactctgccattgaggagtcctctctaaactatggccaagcatttgtacagactacacagaagccagcagctccacatgacaggggagtggtgaggaagagctttgtgctcaacggaaaccggggagatggatgagcaacccttggaggcattctcacacggatcaggggctgcccttgctgactcctccccagcctaatctccccttgcttcaggaggaggcttacagtgtatatcttaatatatcagatttatactgacttatttccagagaaatatagctttacccttatattcctccattctctccccattttttgatgccattttgaggcccaacaatacacctgtatattacatatattgttttatgtaattactttttaagtaaggcaagaaaataaagggaaagtatgcaattatgcagtcttttgtaattatctatataagtacctttactgacacttttgtttatttgtgtggatttgaattactatcttgtgttgcttgctttcagtctgaagaacttcctttagtatttcttgtaaggcagatttgctagcaataaattatctcagtttttatctgggaatgtctttatttcacctttatatttcaagatggttttgctggaaataagatttttggttgacagtgttttgtctttcaacactgactatttcattccgctgccatctggcttctattatttctaatgaatttagttgttaatcttattggtgtccctttgcatgaattgctttttttttttctcttgctgtgaggagtaaatggggaccttttttctcttgcccaaatacctatctaaggggactggggagtcatgctctacaaaccataaaaatctcatcagacaggtttttataaaatgtggcttgctttccacttgactttggtataatatcacatgacagatagcagactctaaaggacatattaataaaaatattttaccacaaaatatatttctttaatgtactttgcaatggctgccacagtgccaacagattaaaatggccctgcaaagccatcttttatggggacaatttgcagctatagagaatctccatgaatataaccaggtattttcccttccaggaggttttctcagatccaggagagattaagggagagcctgacacctttaaagtctgaaaagagtcactcatcagctatcatatctctgagagctgccacccatgaggcttcatctacataataagaacatggtctccaaaactccctaatcttaactcaggcattcttttctactgatttcaagtccttagacaatagcttaactctctcaaccaactggcaactgaagaatcccctaaacccacctatgacttgtaagcccccactttgagatgtcccgcctgttccagccaaaccaatgtgcacccttctcatattgatttattattttacctgcaattcctgtctccctgaaatgtgtaaaaccaaactataacccaaccacctcaggcacactttctcaggacctcttgagattgtgtaacctgggccatagtcaaacatattggcccagagtaaacctctttaaatatattttggcaacatttggatttttctgtcatcaactgctttcaaaattttctgtttgtgtttgtctctaacattttgattatgatgtgtttgggtgtgtttctctttgtttttatcccacttgccatattgagcttcctggatgtgaggctagtacttttcatcagattcggaaagtttttagccattatttctttgagtacttttcctgtctcctcctatttctcctctcctctggcactcccaatatgtgcaggtcagggtgcttagtggtgttccacatttcac

SEQ ID NO: 469986 - DNA, 662 bp, Homo sapiens
cctgacgtccttgctccaatacccatggagatcaccttttctagctctggcgagagctccaggtccacaccttggctggagcggaccggagcctcctctcaacccccagccaagtgggcacctttctctttccagacctgccaagccccccgcagccagtgctgcatcggccactcccactgccagcaacaagctgggcaggctctgagcaccgcccctgctgccccgggtcctgggtccacccctacagagcaagcccacccgtccagtccccaccgtaccaccagggacagccctccacagccctcagcagcacaatctgaagcttctggatttgctcttcctggctgtttgcctctctccccatggggaggctatcaggggaacccacccccaatatttcaacgtaggttctttctattttccctacgttttggctggctgagaaataaaaagaaagagtacaaagagaggaattttacagctgggcctctgggggtgacatcacatatcggtaggaccatgatgtcctcctgagctgcaaaggtttttattaaggactttcaaaggggagggggtgtacgaacagggagtagggtcttaattattaatattccttgctaggaaaagaattcagcgatatcttccctacttgcatgtcc

SEQ ID NO: 469987 - DNA, 2217 bp, Homo sapiens
gagaatcagggctatggctgccacagccacatctccagccaccagcagggggttcaagttctcgcaggaacagggacctcgacccctaggcccccgctggcagcctcgtcctcctctgccccgtccccaggacccttgggctccggggttgcatcaggactgctgggcaccatgggggctgtgggggctggcttcaggttgccgtggttgttgagaaggacggggtttgccttggccggggtcttcttggcaggcgccatggtgggggctgccagtggctgctgcttctctgccggggcttccttcttccagggctcggtcaagggggatttcccatcggctgccgggggtaccttggcctcggtggtggcctgggtcaccttggtgtcgggcttggggctgctggccgatttccctctggactccgtggtgggcagggtgtatgggacaggcaggtggctgcagcagaggggctcaggacagctcgtcacccctgggcattctatggacacgtcctccggcctcgcctgggttgcgtgctcctctgcaggacggcggcggctgcagacgcagagtagagctcggaaaggtgtcttccaccgtgactgtaagtttcctgaggcctccccaaccgtacaaaactgtgagtcaattaaacctcttctctttataaattacccagtcacggggtgatcagtttttgctccatgtattttgaatatatgttattatgtggatacaatttaggattattatgccctcttgatacattgaccctctgttatgaaattacctatcactgatattatttgccaggaaatttacttatattgtgattaatatagtcattccagctttcttttgatcagtattagcatggtgcattttttcctagccttttacacttaatctgtttatagttttacagttaaagtgggtttctggtagttagcatatagttgcttttgcctttttgtcccaataagacaatctttgcctttcaagtatagtatttagttttaatgtgattatcgatgtgatgggtttaaatcttccactttgttgttttctacttgctttttttccctcatctgcttttttttctttcctctttttccaacttcttttggattaactgagtatttattatgatttagttttatcttctttgtgggctcattggctatacatcatttttgtgtgtgggtgctttaggttttataggatacatctttagcttatgttctacctataagtaatattacaccacttcatgtgtagcataaaattcctataacagtaataatctagttcccttgtcccagggtctgtgttcttgaattatacattttctttctatacatgtgataagccccacaatgttgttatcacatttcctttagtcaattatttatgtgttaaagaacttgactatattttatgtgcattcatgattaaacccacaagtttaccgctcctagtgctcttcattcatttgaacaaatctagatttccatttgctattatttttcttctgcataaaggactttatttaacatttcttataagtcaggtctgacagcaatgaattctcttacctctcttatgtctcaaaaagtcttcatcttgctgtggtttttaagttttttttttctgggtatagaattctagagtgacaatttgcttttcccctttgtattttaaaggtgtttctccactatcttctggatttcattgtttctgataagaaattggtatcattcttacagttgttctgtgtatatgtctttttttctttgcttttaaggttttcccttgattactggttttgaataacttgattgtggtgtgccttgttggcgtttcttcatggtttacctctacctggggtttatttagcatcttgaaaaaatttcagccattacttttccaaatattttacatcccctacttctccttcaggactccaattatacatacattaatccatttgtggttctcctgcaggtcactttttctgtctgtgttttattgtggaaagtttctattgctatgtttttaagttcacagatcttttctgccagtgtcaaatatcctgttaatcccactcagtgcttttcccatcacaagaattgccattctcatcagctgaagttttgtatcaatctttttttacatcctccatgtttctccttaacctgctcatgccttcctcta

SEQ ID NO: 469988 - DNA, 2049 bp, Homo sapiens
gaatgagcgagtgggtgggtgagtgggtgaatgagtggtgctggggcggctggcctggaatcaggatcagaactcctgggttccctgtaatgtgctgagacagagctgcggccgggcctctgactctggggtgggtggggccctctggggcaccccctcgttaaaagttagtgctgaggcagagtcttaagtcggagcaggcagggctcccctgcaggcaggcaaatcacagcctcagcccagtgattaggcaccacctctgtggaagggtcccagagctgcctgtgatccctcaccctgcagtctgagtaattcctgaatgacaaccatccacactccctcacccgtgcggatactgccggaagagcccttgccaggcccctacagctgggtcttcccaaatccaccttccacggctagttccatcctgtcctgggaagaatctgtcagccaccaaaattgctggctgaaaggagcaggaatgaaaagattcaccttgaggacattcctctttgtcaggagcagaaaagattccatttgccagccgggagaggattccgggttcattgatagcagcgtgctgagcttcacggggaagggcttcagcaaatgccaaagcctcacccccagcgaggccctgattctcagttctgtgaaggctgacagggatgaggaagctgcagaagaaaagctggaagctggcagaggtcggttcgtgaggcttaatgtgtgtccccagaacatgaaagtgcagggtgaagcggcaagtgctgacggagaagctgcagcgagttatccagaagatccagcttggatcatcgacgaaggtggctacactaaacaacagattttcaacgtggaagacacagccttccattggaagaagatgccatctaggactttcatagctagagaggagaaggaagcaggaactgcacatgtggtggaaatagcaagagaactagaattagaagtggagcctgaggatgtgactgaattgctgcagtctcatgaagaaactcgaatggatgaagagttgctttttacggatgagaaaagaaagtgaacactgttgaaatgacaacaaaggatttagaatattccatcaaaacttagttgatggagcagtggcaaggattgggaaaattgactccactgctgaaagaagaactactgtggataaaatgctgtcaacagaatcgcacgctacagcaaaatctttcaggaaaggaaaagtctattgatgaggccagcttcactgttgtcctaagaaattgccacagccaccccagccttcagcacccaccacctccatcagacagcagccatcaacatggaggcaagaccctcaccagcaaaagatgattcactgaaggcacagatggtcgttagcattgtttggcaatgaagtgtattttaattaagacccttcctcaggcctcaccccactctggcccaacctcaagctggggcctgccccagggaccaccctccacatcactggagcgtgcaaggaccatgcccagactgagcccctaccccaggatgggctacaaggccctctggagacatggggtggccagaagggacccctggccctccctgagcccaggtcaaggctgtgccctgtgggggcagctccagagctgtgccggctcctcccacagacagcagggagaggagcctgtgctcctcccacaggagccggctcctcccacagacagcagggagagtttagtgtgcaaactggaaggccagggcccttctggggaccggatgctcacctgagcccctccttggaggaggaagctcctcgaggaggtcgtgtccctgattcatcctggcccagagtagagctcagcaactgtaaattggttcctggggagggccggggatgtccgggggggcttcatctcctatcttccccgcaggtcctggtcacttacttgtctgtggctgcaggacgagtgccctgaccacagcccctgggcacaggagaggtcgtgggccccatacgtgccctcttccccactaggccaaagaggcccc

SEQ ID NO: 469989 - DNA, 856 bp, Homo sapiens
gaggagagaaagggccagggcaaggcactgctgagccgggcgggctgctgctccgtgctcactggggaatgttgttcagacctgcggccagggtgtcctcgctggacgtgcactgcccgtcctgtttcagctgctgtcccctcagcagccaaaggggccctggcagtgagatcaagctccaaagggccagctccttctctcagagtctccgagagctacatggagccccagtggcccccaccttcccctcactcagcatgtgcagacgccaccttgctggatacctgtgggcctgatggacagacactgtgtaatgtcatccccaaggctctcgcacgagcacacagtcgtgtgtggaccagaacgctctttgtcgactgtggagcattgagcaaaacggaaggatctgttgaatgggaacggcactttgactgggaagatgaagatgctctgcaggtggatggtggtgacggctgcacgaatgcgactgtgctgaacgccgctgactacgcccgagagtggaaaatcaagaacaaagggaccactgtcggtgtgaatattagaaagagtgatgtgccttccacctgtgacgtagacgtcgatgctggaaagcaggaggatgcctgtctgcacagcctttgatggggagagaggtccctggggccacctcaaggtcatctgtggctgtcacctccatacctgccgttcggggatttggggcacacaaatgcagggacccccttccccgaggccgtggtgaagccaggaaggccagggcctgtgggccaagcttcagtatcctaaagccttcagacacacaccagggctgcactgggctgttttccggttttaagaa

SEQ ID NO: 469990 - DNA, 2925 bp, Homo sapiens
gggacagagaccacaggggacagagggtcatacctgtcagagggaagccgctaggggtgagaagggcggtggggagaggcacagtgcagaggagggcatgccttttacttaccagggcaaagggaaatctgacctccacgagggtggataaagctctgccaagctcgccaactgaagccaagaaaaaacgctaaggaaggaagcacctcgaaacacagcggctggagaggcagcgggagcctcctgggccggtgctccacgggggtgggcggctgcacccctcctcacagcctcgccgatctgggtccggggtcctcctctccctcggactgtcctccacctgacacccctcttctctgccagccaatgcctgggctttctgttccttgagccgtgaggttcggatgagagaactcctcatctgcagagaggagatagcaggacctccaccctggagtgcggggagcaagcaagaagcacggaggggctcagcaaactcagcacctgtgaatgagagagccgccctctacggcccctctaaggcggttcaggacgcgctggtctattcccagggaaagttccaggtttctcctgtgcacgcccctccctccatcctggctcggtccccagcatcagcagcggcacccggagcagcatggcgggctccatccattacctcctgcccaggaggggagcagatggagctggggcgagactgctgtgcccggcacacaccgccacagaccctgggccactgcccctccatgcagccccccacagccattgccaggggccctaactgggaggctctgtgggggtccctgctctggttgacggtcacgcactctgggaccacaggagcccccacacccgctgctggtcgcctgaacctcgagcctcacagcccaccactgcccctccacatgcaggaccccctcgtcacatgtcagcatgtcctggagaagctgccactcgtggtggtctggcgtcagagccagctgatttgctggcaggcgggcaggcggcggatgggcctggagagcccaggagaccctgggaccacttcacaggacaagagcatgggtggggccccccagcaccaccacctctcacctggggtggataaacacgccgcggcctttgttccgggctttcgaggagacatttgtcatggagatttatcctcacttaggccggagctcgtgtgcttgggctccgtgtttatctccgagggcgcccactcaccctgaggcttcctatgggaagagcttcctggcgtggggtgcagaagccccccgggacaagctcgagggtccaggatgtggtgcaacgagctgctacacctgtcaccctgctgcccgcccagcctgaggcagagctggacctggcaagcgttggctgaaagacataagagggggcagctgaccgaggtccccatggggatccactctggggtggctgactgaggtccccacagggatccgctctggccagcaggactgggggttccctgtcccaccattgaaggaggtggaagtgggcccaggtgggctgaagaccagcccaagcaccccctgctgtctcggggctgggcacccattaccccctggccaattcttgtcccgacctctcaggggctctctcgggaggtggggctctggggaacaacagcagctcaaggacacaaagggcatgggaatgatcagcacgcagtggaggtggcaagggcagggcccctccaccatggccacggccattgtgacccaaatgggggctgtctgcagggcagcaggcctgggcaggccagctttgtttcatgctgaccagcagcacctgggccagctcagagcagccttagagatgcccctagctgcttccccttcccacaccagtgtcacccggccccttcttctcccagccctgcccctaaaggagtaaggcccacaagaggggtgacagtgagaggaggaagtgggagtctgggagccccagtcgcagatctgtgtgaacttcttccttcaggagggggcctgggcccctgagccagctgtgcccagagatggggtcagtgagtacttgtggaatgagtgagtgagcaggggcgagggaacaagggaatgaataaagaaaaggaagacattctgcaatgtttcatttttaaaaataatttttcctttttttttttgcattttggggagtatctttaaggccattgctcttcaggggctccccttgccatcttctcccttcttgagttctctgttcttgtccgtcattatctgctttcctcggacagggtagggggcaatgtgtcatcactgaatccttgaatacctcccatgaactcttcctggtctgcaaaggctatcttagctggcctccctcagtagtgcagaggctgtttcactgcctcccaccttcatcatggctgcctggatccatgttctgtttaactaaaatcataatactgaaatgcagacagtttggtcatgatgtttggtcatgatcctttttacacattaccatattcagtctgctgaggttgtaagatgcttgtgtctgtgtttgtgagtgagattttccttcctcatactttcctatttggatttctgtattaagattatgctcacctgataaaataagttgggaagagctccctcttttctttgaaagggtttgtataaaaatggcatttttttatttaaatattaaatcaaagttctgaatgaaggctctttgggcctagagttttctctagggaagaaacactataaagtcaacttctgtaatagtcatagataagaatttttcaggtcttccatttcttgttgtggcaattttgataaatgcctctttctagaaattgttaacttcatcaaatgtttcaaacttattgacatgaatcgattaatactattcacttat

SEQ ID NO: 469991 - DNA, 611 bp, Homo sapiens
ctgctcactggctgcctaacgaggtggggagttggggtgagtggcccaggcaaggcccattgactcaccaatgggctgcggctgcccctcctgctcctgtctgcagggcccaggagagggccatgctgacaagggatcctgtgagcagcctaggagcaggcgcacattccacacatacttctggagcatgtgctcagtgccagatgccacaacaggggctggagacacttggggagctccaggctcacatccctggggaggcaggcgccagccccatagtcctctgagtaactgtcctgcagggtggtgctcagccgtgcctgcccacacctccatcgactccaggtggcacatcagggcagggtcaccctcaccctccagttcccagaggcctcctctgtcaggctgcaccctctatgtcccatgtgcacagagccccgattctggctgcagaggcagctggcaccagatgtgcagacacaaggtgcctgggcaggtgcccagacagaagcctcagtctggggccatgagctgcaacatgtaaacagcttggaagtcactcctctccttacaataagaaaaaggcggaaaaagtgaaaatcagtgacttt

SEQ ID NO: 469992 - DNA, 812 bp, Homo sapiens
gagtccccttctctcaccacgttccccggggcaaggcccagcttcgacctcaaggtcccccgtgccagcacagacttgagggggggcctttgctgagaccctggatgaaaccctgcagccaaaggacaagcccggaacaggcctgcaggtgccacttccagaacgccttactgctccttgtccaaggagtggctgcaactccaccttttccctggaacaggccaccggggcatgtggacaaagaggagcttgcgaggcttggcgagcacggggcggagccaggggccgaccccacagtcctgcccctgccagcctggctctggggcagctggccctggaccgggctcctcctgcagggccggtgcttccatccccggcgtggggagcggctgtccgtgcctcctctccaggaagaaaggcactgcagcccgtcacaggggcagagtgacgtgagtggacgtgtgtgtgtctgtgcccagcacgacgccagcgtgtgctctggagatgaatgctaacaggcacaaaacaattgataaggtaaaatcagtttcttaataaacactgccttgtccaaggctccccaagacattgagcatatggggagccctttgcagagcacctgagtgaagcaagtcattccttctaaacctttcctgtggccaaagctgagaaatgcatttattttttgggtttttttggcaagagaaaaatacatcatgaattcatactaatatttcccatttaaatgtaagattacagtgtttgtgcagcttctttgattttttaatttctatctctctcctcttatgctg

SEQ ID NO: 469993 - DNA, 677 bp, Homo sapiens
gttggggaagaagcccagctgcctcgtgcctgcatcactggcagcaactcagtgccctgcggggcacaacctgggtgccactgcccagtggcgggccccgggccatggggaggtgggggctcttgctgctgttcggctctatggcctttgatagaacccggcgggtggtgggttttggagcagaagatgcccaagaaggaagagaaggaaaggcacacgagttagatctgtacttgtttctggaagcttcttatgtgagggactggctggaagatttgagctggaacatcagctccacccaggtgtcgagtctgctggtgtccggcctgatttgccaccatcagctctcccagggctccagcttactgactcggtgcagccctggaactttccagaagcgtgcctgcctgcagtttctcctttgtgcctatgggcagaaaatgcccatttcccaggcccaggacaaaagctccagaactggatgcttcgaggcagtggccacaggagaagaggacccatctgccgggtgggcaagctgaactgtcacagcccccacgcagtcccacgtcccctcttgctcaggccacagacatgcacaggagatgccaggtcctgtctgccttgaagagtccaaggaaaaactttctcgttgtaatttcgggccttggggagcctct

SEQ ID NO: 469994 - DNA, 1887 bp, Homo sapiens
gtgaggcgcagcggccggccggcagaggagaagtgtccccagcggggcgggcacggccccctgaggccgcagctgagcctcccactcccggcctgcggtcccgagtcccggccgcacctgccgaggcccaggccgcgaaggagggaaggccgagccgggcattagcccccgcgccgggcgccgcggggagggtcttatcagcgcgggcagctggcggcctgtccctgcgcgagcgccccggcccaattcaatggccattgtccgccggcaaggcttgcagcccccagccctgctgtgggcctgtttggctgctctgtcttggggagaccctgccgtggttggggaatgcggctgggccgagcaggaggtggagcccgagagtcctgcggggatgtgtggggtcagcgtgcagaccgagggtcctgcgggggtgtgtggggtcagcgtggagaccgagggtcctgcgggggtgtgtggggtcagcgtggagaccgagggtcctgcgggggtgtgtggggtcagcgtggagcccgagggtcctgcgggggtgtgtggggtcagcgtggagaccgagggtcctgcgggggtgtgtggggtcagcgtgcagaccgagggtcctgcgggggtgtgtggggtcagcgtggagcccgagagtcctgcggggatgtgtggggtcagcgtggagaccgagggtcctgcgggggtgtgtggggtcagcgtggagaccgagggtcctgcgggggtgtgtggggtcagcgtggagaccgagggtcctgcgggggtgtgtggggtcagcgtggagcccgagagtcctgcggggatgtgtggggtcagcgtggagaccgagggtcctgtgggggtgtgtggggtcagcgtggagaccgagggtcctgcgggggtgtgtggggtcagcgtggagaccgagggtcctgcgggggtgtgtggggtcagcgtggagaccgagggtcctgcgggggtgtgtggggtcagcgtggggtctgagggtcctgcggggggtgtgtggggccagagcctcgtcatttatgagctctggcctccaagcctgtggctgcatctgaagcccatggtggacacctcctgctgctgctgggcccgcccctgcactctccggaaggcactgcccagcttggaacacgccgcgggcaaagaggacctgggcccagcccctcaggcactttcggctctgcgggtctcagagggcctgtgtgccgtcggcgggggtcgactcacacgctccagctttcgtgtacatagccagtgacacttcacaaagttttccaatttgttttcatcgtagtaaaagatacacaatgtaaaatgtaccatggtaaccactttttaaaagttttttaaattgaaagagtaatacatgccatgtgcagaagcttggctgcacacacactcacacacacaccccccacacatacccccccacactcacacacacgcacacatacccccacacacacaccccctatacacacccccacatatacatatcccctcacatacatacatctttaactctttacaaaaagactcctttcacatttctcttccttccatactttcttcatcacgccctactttctataatctcttattttcattggtgaattattcaagttctttatttctttacaatatcttttttattaaaacttcttacatattttatatacatccctttctaacttcttatttaacatactaatgtctcttttcataaaaaactcttcattttttttctcccctccctatttctcttttttaccttgtcctctttctatattttttcggctttccttaatagctttatatatttgcaattcttctctatctcttacttttttaccttatttattc

SEQ ID NO: 469995 - DNA, 627 bp, Homo sapiens
ctgccctgcgaggccccacagcccggtggcctcccccgtggtggccttgtctggtgcctggtccatgccatgcgtggctgtgcagctgcagccctcctaggcctgggaccctcgcggctggcgctccagggcctatctctggctaccgagcccctcagggctgttgtggcctcgggggctcctggcctccatgatgagtgtgtccttgccagctgtcggggtcaggcccccttgggccaccccaaacctgtgatggacaaggaagcgacctggccattccatcagagcaaggatgccggatgctgcagccccagaggcctctcgacagccttttccagcccctccaaggctttcaagcagacgcttcctggtccccagatcgacagcaggataacaatattgctgcagaacaggaacctagggaagaattccagtacactcggatgcctctgcacacatttctcatggctttcgatcatggtgccaggttcccgtgtacttggtttgattgtggtctactcactgacctggaaaactcattcatgaggtgtacagatgtctaggacaaaggtgatttgcatttggttctaccaggaacctagggaactgcaagttaggtacacaccg

SEQ ID NO: 469996 - DNA, 496 bp, Homo sapiens
tacaaaagtcaaaatctcagttcatctctcctcaggcccgatagggtgctgatgcacgagtttgcaagggatgcagagtctgctgtgaaaaaagcccacagggcttcacacaggaggacaagtcagtatggccttctaaccttacttatcctgcctcagaaccacctgagaggctgctggatccgatcaccacctggacagtgccctgttaacagatctgcgttaaccaacaaatacagatctgtattaaccaaagagctgcttgaattgacaaaaatatatcctggtttgctgcttgatgtggctacttgggtccctgaaatgaaaggatgtggaagtattacagcaatgcagagatggactgaatccagccattttcctcttgcagaaattgccaacaagatctggtctggtctgtgtgccaataaaagagacaaagactgcagatggctatgggacagatttcctgggagagggtcctcccatagctgacaag

SEQ ID NO: 469997 - DNA, 1508 bp, Homo sapiens
ctgccagcacgctgtcacctctcattgggaaatggggttaaagctccttagaatcaatgtggatgcagctggaggccattatcctaagggaattaatgcagaaacagaaaaccaagtattgcgtgttcttacttataagtggaaactaaacattggtggtctggataggagatcaaaccagccacaatattcccttaagccaaagcctaatccagagaaaggtcctctcttcaattctgtgaaggctgatagtggtgaggaagctccagaagaaaagtttgaagctagcagaggggctaatgcagctggtgactttaagttgaagccagtgctcactgaccattcccaaaatcctaggacccttaagaactaccctaaatctactctgcctgtgctctataaatggaataacaaagcctggttcacagcacatctgtttacagcatggcctactgaatattttaagcccaatgttgagatctactgcttagtaaaaaaggttcttttcaaaatattactgctcattgacaatgtacctggtcacccaagagctctgatggagatgtacaaggaggttaatgttgttttcatgcttgctagcacaatatccatactgcagcacatggatcaacaagtaaaatgctatcaaacagcattgcatgctacagagaaatatttagttaaaggaagggtcactgatgcggcaaacttcactgttgacttgtttgaagaaattgccacaggcaccccaacgttcagcaaccaccaccctgatcagtcagcagccatcaacatcaagggaagaccctcccttcatcagcaaaaagagtatgacttatggaaggctgagatgtttgttaacattttttagaactaaagtatttttacattcaggatgtcatatagttggaatcatacagtaggtagcttttcagattggcttctttcacttagtaatatgcatttaagattcctccattttttttttttgtggctttgtagctcatttcttttcaatactaaataatattccattgcctggaaactgtatatcacagtttatttatcaattcacctcctaaagaacatcttggctactttaaaattttggcagttatgaataaacgcccaagtgtaggtttttgagtggacataagttttcagcgcctttggataaatatcaagaacagttattgctagattgtgtaataagagtgtttatgttttgtgaaaaactacccaactgttttccaaagaggctgtaccattttgcattctcaccagtaatgaatgagagttcctgttgcactacagcctcaccagcatttgatgttgtctgtgttctggattttggtcattctaataggtgtgtagtggtaatacctttttgttttaatttgaatattcctgatgacatatgacatggagcatctttttataggcttatttgccatcagtatatcgtctttggtgaggtgtctgttaaggtctttggctcatgttttaat

SEQ ID NO: 469998 - DNA, 723 bp, Homo sapiens
acaactcaaatgactgtagatttctcatcagaaactgtggagccacaaggaagtgacacagcattttttaaaattctgaaagaaaagacctgtcaacccagaattctatattcagtgaaagtgtccttcaggattgaagaggaaaagtttgaagctagcagaagttggtccatgaggtttaaggaaagaagccatctccagaacacaaaagtacaaggtaaagcagcaagtgctgatgtagaagctgcagcaagttatccagaagatccagctaagatcattaatgaaggtggctacaccaaacatcagattttcaatgtagacaaaacagccttctattggaagaaaatgtcatctaggactttcatagctagacagaagaaggaacatcacaaaccgtggcctgtcatgaaatggggcacgggcagagggataacattgggagaaatacctaatgtaaatgatgggttgatgggtgcagtgggccagcatggcacatgtatacccatgtaacaagcctgcacattgtgcacatgtaccctagaacttaaagtatatatataaaaaaaagaaataacccaatatacagggatctccattgcccatcccctcctctaagattttccgtatgaaatcatttctttccttctgcctaaagtaccatttaaaatttcctttagtggaacacttttacactgttggtggaactgtaaactagttcaa

SEQ ID NO: 469999 - DNA, 669 bp, Homo sapiens
tccaagatcaaggcagcagcaggtttggtgtctggtcgggggatgctctcccctccaagatggcaccttgttgctacaacctgcctcggtgccagttgatattcattaaaataagcccgagtttattttttaagaagcccaagcgtttggagacctgggtgacttggttccctcctgctttgaggaccagcttcaagggcttctctacatactcctcgtacaggtgcttgtctgacctggactttttgccatgttccactaggtcccagtgcccgaccccctcgccaggtcctggccctgcaacactgctttccgggccagagaagaaggctgcatattggaaacccttttaccacatcgatataagaaacatgggcttgctacactcggtccagaggactcagacaccattgagtgtcaccagtgttgacctaagcgaactgctctggaaccaggaaagttcaggatggtttcattttaaaaacaaaaccaaaagcaaaactttaagcctttcgggggtatcactggcatctgtgggggcacttgcttaccacccctcaggaactctgcggtagtgctttaagataatcttttcaggtggctatgtcatgtaagtctgagtttctcttaatctacagctaatattacctgagggaacacaggtctttc

SEQ ID NO: 470000 - DNA, 480 bp, Homo sapiens
tcctctggtagtccccagtaactggcagagtaggactgacctgatgtactcagcaaggtcaggtaaaacatccttaacccacagcagaaatccaactagttctagcagaaataagtcctgcttgcctaagtccaggtggtccaagaagaatagagccggagaagactgccttgcttccgtaagacaccatcacctggagataccaactgggggagagtggggacacgtctttgctgggttggagctccagcatggaccacaggggccccctatgtccagcagaaagaggccagcccagttctgttatgagctgtccagggggttacacactgtaaactcccttgggaagggtcaggaatgtgtcctggaagttcgtctgaaaatcaatgactttcatttatggccaggaacttgtttccagaactgggaagaaaatctatggcagatagctgctcccctctccccagagacttaggagaa

SEQ ID NO: 470001 - DNA, 649 bp, Homo sapiens
aggccagagcaggtgactcctttccttaaagcccacagtggctcccattcacatgctcagattcaaggacggcaacggagctgctgctgatgcagatgaaatagattgtccctctgcagtgttaattaagtgtatcagaaaattacttataaggaatggagtcacactgaaagataaaccatcgcccaaagtcatggaagagcagactgtgtccaaaggtaagaacagttatggcgccctgagttggatggcagcagacacaggaagaatactccccttgagttcaggcccatgcgtgtggacacatgccacaccccagtatagaaagccaccttctggggtatcaggagaagcatctcaggaaggtcctgtgcctaggaactcactacaaagccatcaaggaaatactggggggagccatgcacacagaggtgccacaccgttggaactcactgggaaactgcttttggagccccaggaggagctgtgcatggcgtgctgtgctgcacggaggcaatgttttagttccacaagcaggggcacaaagggtgtgtttgcagccgaaagacaatagatttaataactgacacaatctctaagcaactaatgacctccatctaattctatttacttcactgctatgtgggtg

SEQ ID NO: 470002 - DNA, 1286 bp, Homo sapiens
caattgtcccctctaaagatctgattgtttgaaagtgtgtggcacctccccctgccctcggtcctgctcctgccatgcaagatgcctgctcctcctttgccttccaccatgaatcaaagctccctgaggccttcctagaagcagatgctgccatgcttcctgtacagcttgtggaactgttccataaagacaggcaacaacaacaacaacaacaaaatgttgaattaggtgtggcagggactatgaagactggcaaacagatgtccttactggaagtggaagacaaactagaactctctctctctccatcactgaagacaccagagaggaaagagacggaagaggaccctcaccaagatccaaattggatggcacctctaacttggacttcttcacctccagaagtagaagaaataagtgtctgttgttacacccagtccacggtattttgttatagcagcctgaacagactaagacctagcacgttcttattttctgatgcaaaaagttacttcaggcccatcttctacttgctctcacttccaactctgagatcagcaatttctttaaggaattcttaatgtttttgaaattcatccatgttgtgtgtttcttttttttttttatcattaagtggtattctattaaacaaatatactaaaatgtgtgtacgtactgctgattgaattctgggttattttcagtttttctgttgtaaatgaagttgctgtgaacatatttttataagtcttttgtaggcatacatcttaattttccttggaaaagtaactaggaatagaattgtgtggttgtagaatagatgcatgtttaattttataagaaattgcaaaaagtttttcaaatttcattataccactttaccttttcattatcaatataggaggtcattccacatcctcactaacatttgttgtagccagtcttgatttatccattcttgaatgcatgccaaaattaggcaagcacaacctaccttatgcaaggaattgctaaacgtgaaaaatcattactttcatgggaaaatatggcagttcacagaaagtgaaatttctaaataaaaaatatatttctgaaatataattattgctaaaaaacattttataaaatgacccatgcatattattaaagtatattcggttaaaaataaaaatttgaggttatatacttaaaatccatgtaaatgatcaaataaattcaataggaaaaattatctatttcagcagaagccagagaatatcatctaaatattgacatttcaagaaacc

SEQ ID NO: 470003 - DNA, 548 bp, Homo sapiens
ttctgcatcagtctctctggcagctgcagaccggagctgatacaatgacacaagaggtgggctcccaaggccctggacagctcagcctctttggctttgcagggtgcagcccctgcagatgctttcatcggctggcattggtgcctgtggcttttccaggtgcacagtgcaagctatgggtggatctactattctggggtttggaggacagagaagagctcacaggttcactaggcagtgccccagtagggactctgtgtgggggctccaaccccacatttcccctctgcatggccctagtaaaagttcttcatgagggctctacccctgcaacagacttaggaaacttacaattatgtgacctttcagacagagaatccaaaatagctgttttgaggaaacgcaaagaaattcaaggtaatacagagaaagaattcagaattctatcagataaatttaacaaagagattgaaatagttaaaaagaatcaaacagaaattctggagttgaaaaatgtgggggaaggttccaagatggccaaataagaa

SEQ ID NO: 470004 - DNA, 753 bp, Homo sapiens
ggaagctgctgtagatactcagcctaattggattttccgtgtgtaaagatcaaacacatttctgtcaatggtggaaagttatggagagaagatgccaatgacctgtgcactcaagtgtcagggggagaaaaggctggacagcagggatgtgtgtgtgtgcacgtctgaagtcactgtggtcacatacagtgatggacagagggagagatgcttgacccatcaccaactacttggctgtggacccacagaagtggttgctacagacaggaaattgattgcctcttcatttcacaacacaccacatggatcctctacactggtggaccaggaaatcgcaactactttagacaccttgaaacagctcttggctctttgctggatcctagtatttgaccatggaccattaagtatcatggtgatttctgagattttggtgcacccgttctcccctgagtctccagagtccattatatcatttttatgcctttgtatcctcatagcttaaatcccacttttatagcaactgtccaaatgccttgcacatgagacacttaatatatatgtatttaaatgaataaataattaggactctaagacttgacatttctgcttagtacttctgttagtggtatatttcacagcagtagttcattgtgtatttttacctttattacttttaaaattacacaaggaacacatatttattcaagaaaaattagaaaaaagaaaagctaaaaattacactttactact

SEQ ID NO: 470005 - DNA, 1633 bp, Homo sapiens
ttctcccaagacggctttctgaaagataactacagacaacagaaatgtgtctactgtccctggactgcaggccacaggacatcagccaaggagtcccggtcctaggagccctcagccacaccctctgtgtctcatccctcatggagtcagagggtttgggaaaagggcacattacattgctctacacaggatttccaagcaaaggaaccagaaatcactataaacatgaagtcatcctcattggaatgagccaagtgtactgcagtgaaaaagtgaaccagtgctgccagcaacagaatatgcagccaaatgggcccaaacaggaagttactgctcctggcccaatcaagaagatgctgttgctgcctaacccagaccacatggcctccactgcccctaaaccaagaaaagggatgcccctgcctaaccttttctatgaggtagttttctgtacagggaagtggaccctgggagcagcttttgccaccagtaggatccaaggtagtaaatcatctggtggtcctgtgtatttgtctttgggaaatgaagatatgagatccaaaatgcaagaatgccaacttgggagaaattttccttgcagaaagaaatgtacagacagtgaacgaagcctcacagtcatagttcctgcaggaggagtgggcccaccagctgcaggggcaggctgcatgtctctgggggaagtcttacttaagtcgtgggaagatggcgctggagaaaaatcaaggcttggctacatgagtcagaggctactttctagaatccccatggtctgtttacaggtgcagggaatacagaagtccccaggggtccaggaagtgacactcaactgtctcaccttatcacctaaatttcatcacggaaagaaaagggacacaagtctgaggctcctggcggccatctttgccatcatgtgggcctgagctttcttcagagtaaagccaatataaacaagagccaaacgatagagacacgctgtggtgacattatttgagcatttgcatgatactgttgttactattaatttttgacatgccttacagtcctatgagttagctcagaattctgagttaacacaactatggaggagataacaaaatagaaaatttatccatttttactctataatgtttaatgaggaaaatgcccatcaattaattaccttcattcaaaaaacttaagaatcatttctgtgaattaaagattgttggaggcacagttgctattgaaatgggtaaaactgtgtccttggtaactaacagtttgcattttagtggggagacagtgaaaaatacctgtaaacaccataaggtgttggatttgccacgttagaaatatgcttagggtttcagttaggagataaaggagaaagtgatcagttctaccagtgcaaaagggtcaggacaaggattcagagaagaggggaggtttgcgaacctttcaaataataggcaagtggttaattggggatgggcattccatgctgaggggacaatgctggcaaaggcatagatgcaggaaacaatttcatttgctgagcggatgggcgtgtacagtttggggggatgggaatatggcaacaaatgaggctgagttgctaagcagggtacagact

SEQ ID NO: 470006 - DNA, 923 bp, Homo sapiens
aatagagctataacactcaccacatggcccaagattccattccttggaatccactcatctgccacagggactgggagagatccacgggccctaaactgaaaaaatgtgagcctgtggacagcattcatgaagtatggacaggaaacaggaggctgtggattgacccatgtgtgaactggaggaggaggaggaggttgagcttgagaacgatcaccactccaggaaatcacgcagatgaagggccctgtagccccctgaagaaaacactagcacaccgtttttccttccccaaccattccaaacactcattatgcccaagcctctttggacacttcgatcaaaattttctcctctatatcatccggaggaaatgcaccgtttgctcagggacacttagctcacctgcttcccacgttttctctcggtctccacttgtgtctggactgagtgttgctgaccaccacagcatcaaagagcctgtgagaccactggatgcagtctgggggtcagtgacctcagaggaaataccttcagtgtcccacgggctctgcaggtcagtgcactcagagtgagcttcctcacactttgctggggaaagtgtccagtagcttcaataatctcatgaccaaaagactgaagagaggggagaagacatccgagttcacattttcaggcaatagtagctgacatttcctgaatgatccttgtgtgtcaggcaccttagaaagagctaatattaacctaaatttaaactgttaaataacatcaaagatttactttacaagcacatttctaaatgtactgaaaaactatatttccataataattgattcaatggacagataaatttccttttccctgagtagttctatcatcaactaatagcccttattgcaggaaacgaaaaatctaaacacttttcc

SEQ ID NO: 470007 - DNA, 1040 bp, Homo sapiens
agcctttagcccaattgggagtggcaatgggcgccttgctggatcaggagcacagcagacaccctgccagatctggagggatggaagtcagcagcagatcccagaatagtacatccactggcagcttgcaccctgtgtctggaaaagccagacactcaacaacctatgagagaagctgtgggggtggcaccctgcaaagccacagaggtggagttgcccaacgccttgggagcccacctcttgaaccagtgtgtcctggattgactggggcagttactcagcagccagtgtggtgcaggcttcactgtgaactgctagaccttgaggtttccggcctgcaagcaaatatccccaccctctgtagagaatgtattctgatgcctggctcggatactgtcaaaaccagcagagatcaagatagctccccgatgatgtaccatagttacaaagattttgagggttatgtcatatgcacatgtgggacccacggaaatattgtgctgggtcttcaagggactgcttctcagggagacggaagtgaattccgagccccatgtcagaagagcatatgtggcccagctgcaggtttggagacagctgatagaggcctgaagatcgctgtgtgtctgctccacagagatgccttccctttcatcaccagggagatattgcacagctgcagccccatctgtcccactgtggtctctcaggatgcagtagtacacagcagcatctctcaaggtagcacggtgcaggatcaaggtactggactttctgtcttcagcgattgccagagaggccattctgttgttcacattgcttgtaagaccatgaatcacgtactctggaccctgggagggaagctgtcgataccaatgtatgtaatcagttccactgattgtggagtggttacaaggcaagtgaacaggctcttcttcgttactctccattgaatttggctgtgtggtcttagcatcacccataatacctatggggttgaaaaacagcagattagctctggatcatcagctcttggtgca

SEQ ID NO: 470008 - DNA, 691 bp, Homo sapiens
gagatttaggcatggtctctttttcactcttccaactgcaattatattcgccaagcccagatgaagctgatgattcaagttccgttagccatgttcattggtctaactacggggaaaaagtgattctctatcctttacagcaatggggcgcattagtccacatctctgtttttcttgctcactcacaggagataagattaaaaacaggaactataattgatgctaagaccacccagcccccctccatggattgcgctgaaggaagagctgcaaacctgccttgtaatcactctaccatcagtggaaatgagtatgtgtattggtatcgacagattcactcccaggggccacagtatatcattcatggtctaaaaaacaatgaaaccaatgaaatggcctctctgatcatcacagaagacagaaagtccagcaccttgatcctgccccacgctacgctgagagacactgctgtgtactattgcatcgtcagagtcgcacactgggacagatggggctgcacctgtgcaatatctccctggtggcaagtgaggaggagggtagcattcacctagagcaaaatgtcgataggagtcaaaaagtaacaagaaaagaggaaaaggaagggaaggagagaaggaggaaaatagtatagataagatctactgtaaagggttatagtgtaaaatgtgca

SEQ ID NO: 470009 - DNA, 912 bp, Homo sapiens
gtaaagacgtagaggagttcagagctacaccatgaggttttgtgggggtatagcattccaggcagagtgggcaaaggccttgatatggaagcccgcttggagtaggcagaaactggccgtcagatggagtcacttcatgggatctccttcctcacataatggcaacatcagaatttggaagaagatgattccaatccaaatgtatgacttcaagaagttcaagactttagtggagaaagtaactgcagatgtgttaaaaatagtaggagaactagaattagaagtggagcctgaagatgtgactgaattgctacaatctcatgataaaactttaacaaatgataaattgctttttatggataagcacagaaattgctttcttaagatggaatctacttctggtgaagatgcttaccataatatatatgcggtttttagatgaaggcataattaattacctaaaagttttatgcacttagtatattatgtaaaataagaagaaatatttctagtatagattttttaatggaatatttttgatagcagtgaagaatcttgttgctatgctatgtgggacacaatcaccctaaatgtaatccacaactgctttgaaatagctgattttggaatcagtgacttcaatgatgtacaaagcaataaacatcactattctggctggaatgatctgcagagagattcattttcttataatactaaatgttgattttataagttctgatagcatgttaactatttctgctgatgctgaatatcatttcaaacaagaataaatattctttatgttaggtttgttttgagcattgaagaaaaatagtaagaaaagttgtccaagtccaaatgtcccacaagaaaatatactttggcagctgtcgaaggatttgacactactca

SEQ ID NO: 470010 - DNA, 602 bp, Homo sapiens
ggtcctgcagcattgccactgctcagccatgctcctgctgctcgtcccagcgttccaggtgatttttaccctgggtgacattgatgttgcaggaggaaccagagcccagtctgtgacccagcttgacagccaagtccctgtctttgaagaagcccctgtggagctgaggtgcaactactcatcgtctgtttcagtgtatctcttctggtatgtgcaataccccaaccaaggactccagcttctcctgaagtatttatcaggatccaccctggttaaaggcatcaacggttttgaggctgaatttaacaagagtcaaacttccttccacttgaggaaaccctcagtccatataagcgacacggctgagtacttctgtgctgtgagtgacacagtgcctgagactgcaggagagctgaacacaaacctcctgagatgctgagactttctgtgactcaagaactcaacctgtggagctttcaagagggtcccttttttcttattgtcagttgttccttctcagtcttttttgctgttttttccccacatttaactaatctttaaacattggcaagcctcagaaatttatccttgaaaatcttttt

SEQ ID NO: 470011 - DNA, 1403 bp, Homo sapiens
gagacaaagttgtactgatttctatgtttgtacacagacaaggatgaagaatctatgttgggaagctgctattgatggtcctgcagcgttgcctctgctcagccatgctcctgctgctcgtcccagtgctcgaggtgatttttactctggcattggtgttgcaggaggaaccagagcccagtcggtgacccagcttgacagccacgtctctgtctctgaaggaaccccggtgctgctgaggtgcaactactcatcttcttattcaccatctctcttctgcgaaacttcctcacacctcttggtcttggtctcttcagacactttccttcctgttctctggagatcttgcagaaaagagcctgcagtgtttcccttgttcagccatgctcctggagcttatcccactgctggggatacattttgtcctgagatggaaagaactgttgaagaagcttttatacttcttgtttgcttgaagccttggagggtagcaagtagtctggagaaaaaggagaaggaggatgaatctttccagctgctacttggctcacgctataatgtattagagggtagaaagctggagttcataggtctacgaatccattgtgaggatgattctataagcagagaagcaaagccaaagtttaaacctaaatgtggatcagttacaacacatgtagaatttcagccttacaaggtctgttatatgaacgtaagagaatggactaggaaggactggggccctgagaaccaagatgaagacaagctggcagaccacattgctgagcaaagagaaactgaggaaaatccagccactttgacctctgcagtttgggtctgggaaagacttggtccaatcagtttgaccatgagaatggagagttccaacttgttggtgaatggagagaatgtggagcagcatccttcaaccctgagtgtccaggagggagacagcgctgttatcaagtgtacttattcagacagtgcctcaaactacttcccttggtataagcaagaacttggaaaaggacctcagcttattatagacattcgttcaaatgtgggcgaaaagaaagaccaacgaattgctgttacattgaacaagacagccaaacatttctccctgcacatcacagagacccaacctgaagactcggctgtctacttctgtgcagcaagtacacattgcttcccaggcacctgctacccgtacacaaacctgagactggagctgaagctgcaccccctttcctttgtcatagatcgtcaattatagcatttgtcatattgtttgtttgcaagttgaaactaacatattgacatttaaagcatataataaaaagataagcaactggacagactttgggaataggacaaatattgctatattaacatgtaggtcc

SEQ ID NO: 470012 - DNA, 605 bp, Homo sapiens
ggcagaatccttagagagagatgtgctaccagaaaggggtcccgatccagacccctaagagagggttcttggatcttgcacaagaaagaattcaggaaggaagttctggccttcctatccagccaatcaatggcaagcctgttcagccccttacacatactggcctaatccagctatgcagtgaacttcgtttcacatctgagacaggctctgagggggtaggaaatactgccctcttgtgttcagaaagttgttataataatggaacgtgctcccagcttcaggtcttttggagtttgctggaggtccactccagatcctgttttcctgggtattaccagcagaggctgcagaacaacaaatattgctgcctgatccttcctctggaagcttcgtcccagaggggtattagcctgtttgaggactctctcagcccctacagtgaggggtttcccagtcaggctacacggaggtcaggggcctgcttgaagaggccatctgtccattcttggagcacgaatgccatgctgagagaaccactgctctcttcagagctgtcagacagggacgtttaagtctgcagaagctgtctgctgccttttgtt

SEQ ID NO: 470013 - DNA, 629 bp, Homo sapiens
gaataggagagtgaagtaggtttatctgtaaatcataaggcacggatagctatgttttccatgttcctcattttttatgtcctgacactgattgggaatgttctcattgtcataactattatctatgaccaccggctccatactcccatgtatttcttcctcagcaacctgtcctttattgatgtctgccactccactgtcactgtccccaagatgctgagagacgtgtggtcagaggaaaagctcatctcttttgatgcctgtgtgacccagatgttcttcctgcacctctttgcctgcacagagatcttcctcctcaccgtcatggcctatgatcggtatgtggccatctgtaaacccctgcagtacatgatagtgatgaactggaaggtatgtgtgctgctggctgtggccctctggacaggagggaccatccactccatagccctcacctcccttaccatcaagctgccctactgtggtcctgatgagattgacaacttcttctgtgatgtacctcaggtgatcaagctggcctgcattgacacacccacgtccttgagatcctcattgtctccaacagtggattgatctccgtggtctgttttgtggtcctggtggtgtcctac

SEQ ID NO: 470014 - DNA, 747 bp, Homo sapiens
tgataacagaatgcttttgtctaatgatcagaatttgagaggaaacatcatttttaataatgatggggcttctgggggtgctgccctagtaacaatcatgtatcttgtcataggcactgcaggacaaagccttgagcagccctctgaagtgacagctgtggaaggagccattgtccagataaactgcacgtaccagacatctgggttttatgggctgtcctggtaccagcaacatgatggcggagcacccacatttctttcttacaatgctctggatggtttggaggagacaggtcgtttttcttcattccttagtcgctctgatagttatggttacctccttctacaggagctccagatgaaagactctgcctcttacttctgcgcttatcctgtggttccacgtatggaagatggaatttacttttggaggaagctttttatacaagggaaggatcccttggtgagtgctttagtttatgcagtaaaagatactgaacgtttgaatggagaatctaacactgaggcaaatgacctttaacatgtgagttatttgtaaaaatgaaaaaaatttcgagtgcttcattgaaatcaagaaggagataaagtctaaaaaactttcagcaaggagtgaatggtcaatggaaatgaactatacaaaatcaattatcttaaatttgaagacgttgctctgtgaatgtgaaaatgaaaactctctttgtctgtgcttctgttgctgttgctgac

SEQ ID NO: 470015 - DNA, 1115 bp, Homo sapiens
ctttcaatctttccccattcagtaggttgttgactgtgggtaagattctctgggatatggaaagaatcaacagcacactgttgactgcgtttatcctgacaggaattccgtatccactcaggctaaggacactcttttttgtgttcttttttctaatctacatcctgactcagctgggaaacctgcttattttaatcactgtctgggcagacccaaggctccatgcccgccccatgtacatctttcttggtgttctctcagtcattgatatgagcatctcctccatcattgtccctcgcctcatgatgaacttcactttaggtgtcaaacccatcccatttggtggctgtgttgctcaactctatttctatcacttcctgggcagcacccagtgcttcctctacaccctaatggcctatgacaggtacctggcaatatgtcagcccctgcgctaccctgtgctcatgactgctaagctgagcgccttgcttgtggctggagcctggatggcaggatccatccatggggctctccaggccatcctaaccttccgcctgccctactgtgggcccaatcaggtggattacttcttctgtgacatccctgcagtgttgagactggcctgtgctgacacaacagtcaacgagctggtgacgtttgtagacattggggtggtggttgccagttgcttctccctgatcctcctctcctacatacagatcattcaggccatcctgagaatccacacagctgatgggcggcgccgggctttttcaacttgtggagcccatgtaaccgtggtcaccgtgtactatgtgccctgtgccttcatctacctgaggcctgaaaccaacagccccctggatggggcagctgccctagtccccacggccatcactcctttcctcaacccccttatctacactctgcggaaccaagaggtgaagctggccctgaaaagaatgctcagaagcccaagaactccgagtgaggtttgaaagtgtctttctcccactagggaagctgccacaattagaatttattataatgtttaggcttcggtaacttttttcttttcttcttgttttttctcttttatatagccatactgtatg

SEQ ID NO: 470016 - DNA, 1230 bp, Homo sapiens
tagacctttaaggaggattgccccggcttgcctgcccgccatggccgtcaaggaagcagccttcgatgatggagtggaagacgatgagaaaggagaatttggaggttttggttcagttagtggaaacattgaaatagaaatcaagatcaaccatgaaggagaagtaaatagggcccgttacatgccgcagaactcttgtatcatcaaaacaaagactccttccagtgatgttcttgtctttgactatacaaaatatccttctaaaccagatccttctggagagtgcaacccagacttgcgtctctgtggacatcagaaggaaggctatgggctttcatggaacccaaatctcagtgggcatttacttagtgcttcagatgaccacactgtctgcctgtgggacatcagtgccattccaaaggagggaaaagtggatgcaaggaccatctttacggggcatacagcagtagtagaagatgttttctggaatctgcttcatgagtctctgtttaggttagttgctgatgatcagaaacttatgatttgggatactcgttcaaaaaatacttccaaaccaagccactcagttgatgcttacactgctgaagtgaactgcctctctttcaatccttatggtgagttcattcttgctacaggatcagctgacaagactgttgccttgtgggatctgagaaatctgaaacttaaggtacattcctttgagtcacataaggatgaaatattccaggttcagtggtcacctcacaatgagactattttggcttccagtggtactgatcatggactgaatgtctgggatttaagtaaaatcacagaggaacaatccccagaagatgcagaagacaggccaccagagttgtttattcatggtggtcacactgccaagatacctgatttctccttgaatcccagtgaaccttggatgatttgttctgtatcagaaaacaacatcatggaagtgtggcaaatggcagagaacatttctaacggtgaagaccctgaagggagtgtggatccagaaggacaagagtcccagacgtatctttacttcttgtgattttagactccccttttttcttctcaatgctgagagtgatttaacactggttttgagacacaaactttgttcagctatccctctatataatagaaatagtaatttttaaaaaattgctttttaagaaaattttatttcaatagtttttggag

SEQ ID NO: 470017 - DNA, 516 bp, Homo sapiens
agcagcagcagtgactaaaaccaccaccacctccatcttagttgttttcctttgttgatgaaaagagtcaaactctgtaacgtatttgaaaaggtttgttctgagccaaatgggagtgaccaatggcccatgacacagccctcaagagatcctgagaacatgtgcccaaggtggtcaggctacaacatggttttatatattttagggaaacataagccatcagtcagtacatgtaagatgtacactggttcagttcagaaaggcaggaaaactggaagcggtcagcttccaggaaacattccaggcaagtgtattaaaaataatgatttactgcttggatttgtagtgaacatgataataaataacagcacagattcacatggaaatcatgttagactaatctaatctcctgccttaggtagaattaggaaatgtggagaatattttgcatctttacttctgcaaagcacttgataaagtctctcaatgcaatgactaccttcctaactggttaaa

SEQ ID NO: 470018 - DNA, 1905 bp, Homo sapiens
gggagcctgggtcccagggggtcctaacttatgtggggctcctatggtgggtccgtgccatggtccgagggttccttaagcagctgctagcaaggtggcttgctgctacatgttttatagttctctttggttcagaccaggtctctgccggtgaacacccttgtttctaccatttgagacaaagatatgtccagtgccccttcaacttactagtcattggagaacagatgattgatgtcttagggccggagaaacgcagacggcgtaccacacaggaaaagatcgcaattgttcagcagagctttgaaccggggatgacggtctccctcgttgcccggcaacatggtgtagcagccagccagttatttctctggcgtaagcaataccaggaaggaagtcttactgctgtcgccgccggagaacaggttgttcctgcctctgaacttgctgccgccatgaagcagattaaagaactccagcgcctgctcggcaagaaaacgatggaaaatgaactcctcaaagaagccgttgaatatggacgggcaaaaaagtggatagcgcacgcgcccttattgcccggggatggggaacgaaccgatgactggatggatggccgccgcagtcgtcacactgatgatacggatgtgcttctccgtatacaccatgttatcggagagctgccaacgtatggttatcgtcgggtatgggcgctgcttcgcagacaggcagaacttgatggtatgcctgcgatcaatgccaaacgtgtttaccggatcatgcgccagaatgcgctgttgcttgagcgaaaacctgctgtaccgccatcgaaacgggcacatacaggcagagtggccgtgaaagaaagcaatcagcgatggtgctctgacgggttcgagttctgctgtgataacggagagagactgcgtgtcacgttcgcgctggactgctgtgatcgtgaggcactgcactgggcggtcactaccggcggcttcaacagtgaaacagtacaggacgtcatgctgggagcggtggaacgccgcttcggcaacgatcttccgtcgtctccagtggagtggctgacggataatggttcatgctaccgggctaatgaaacacgccagttcgcccggatgttgggacttgaaccgaagaacacggcggtgcggagtccggagagtaacggaatagcagagagcttcgtgaaaacgataaagcgtgactacatcagtatcatgcccaaaccagacgggttaacggcagcaaagaaccttgcagaggcgttcgagcattataacgaatggcatccgcatagtgcgctgggttatcgctcgccacgggaatatctgcggcagcgggcttgtaatgggttaagtgataacagatgtctggaaatataggggcaaatccattatatgaagcaagcatttcttactttgtatctctctcctacagttagcaaacagaatttcacatagttcctacttgcctgtgaacccaacgtgtctttctcctatttcctttctcattcattccatgaacaaaatttaggtcttaagtccattgttgaggaccattgtattttaaagtcctccaaccttctccctatgtttctgccaagcgaacatgattattatcagataaaatcatttgtgctaatatcttctacttgatgtgtcatccttaggaaaggtaacaccttagcccggcaaacatgcattgaacttcttagaaaccttcttaaggaactgagtctagtggagatatctgtgagtgtatggttgatagaggaggtgttctttctcatcccgcgtgtgtatagcttacatacagatgacagcctactgtagttttgtattagaaatccttggcatgtacgaggtccccagttcactctccggcacctct

SEQ ID NO: 470019 - DNA, 1509 bp, Homo sapiens
ggcatcaccccatccctccttaccaccaccttccactttgcgtgatttggctgtgacatccgtgccagaaagatggcgtcagttaacggcagcagccagaactgtgtctcggttcaggagcggagccggccgggggtcctggccatgccctgcatcagtgaactcatttccaagagctgtgtgccgatggagttcgaggagtatttactgcttatgttccagcagactttctacctcctgcagaagatcaccaaggataacaatgcccacacagtgaagagcaggctagaagagctcgatgagagctttattgagaagtttactgactttctttggctctttgtacgaagatgccctggtgctcctccccacagaggtgttgaatcaaatccagttcagatacaaccaggccagctggaggagttggatgacgagactctggatgacgatcagcagatggagttgaacatcatggcagagaacgactgctggtggctgcactgctccctgagagacttgagctccctgctgcaggccatgggccacctggccgggtactttattggggatgtgtttgctgcatggttcaatgatgccctcacagttgtggagagtttggtcaaagtcactctgtatggatctcagataaagttgtacaacattgagccagtattgaaacctgacctcattgatgtacgtgctcagtccctggctgtgctgcaggcttacactcactggttagtgcagtattgcagtgaagctcaccagcagaacacacagcagttcgtgacactcatccctattaccatgaatgcaatcacacctctaatcagcaccaagttctcgaagcagcaaagcctaccgtctacaccttttatctaactctgtctctccttctgttcctatacccatttattagaaaatctaaatatgacacagagttagacccataaatctttccgctttataaaactgttatttcatcttcctttttacttgtagcccacatgcattcaaatacaactttacttttttggttatataagttccacatgctcactgtgaaaaaccaaaatattgttcagatttccagactaaaaagttgtgatacctttgaaacattttccttcaggcggtacacacagttgggcattggttgtgcaggcacacctcgttttgttgtgtttccctttatagcacttcgtagatactgtgttttttacaagttgaaggcttatggcaaccctgcattgagcaaatctgtcagcgccattttttcaacagcatttagtgcttccatgtgtcacattttggtaattattagaatatttcaaacttcttctatgactatatctgacagtaatttgtggttagtgatctttgatgttactattgtaattattttggggtgccacaaactgaagatggcaaacttgattgataaatgtgtgtgttctgactgctccactgattggcggcttccccaccttcctgtctttaggactccct

SEQ ID NO: 470020 - DNA, 816 bp, Homo sapiens
ccctcagaggctaacttgagacccacttagcataagacagggagtggacttaaactcaatggatgctaggtcccttggggtggcttgctgtacccccactaggtgttcagcagggggaagaagacacggaaatgtgggaaagtttggaacttcttagagacttgttgaatgactttacccaaaatgctgatagtgatatggataataaaatgcaggctgaggtggtctcagatggagataaggaacttgttgggaactggagcaaagattattcttgttatgttttagcaaagaaattaacagcattttgcctctgccctaaagatttgtggaactttgaacttgaaccccagaatggtagatccactgacagcttgcaccgtgcacctggaaaagctgcagaccctcaaggccagcccaggaaagcagcttggagagaggctgtatccttcaaagacacaggggtggagctgcctaagaccatgggaatccacctcttgcatcagtgtgacctggatgtgagacctgaagtcaaaggagatcattttgaagctttaaaatttgacagccctgctggatttcggacttgcatgggctctgtaactccttcgttttggcaaatttctcccatttggaatggctgtatttatccaatacctgtacccccattgtgtctaggaagtaacgagcttgcttttgattttacaggctcataggcagaagggactttccttgtcttagataagactttggactgtggacttttgggttaacgctgaaatgagttaagactttgggggactgttgggaaggcat

SEQ ID NO: 470021 - DNA, 2343 bp, Homo sapiens
tgtaaggacagagagagaaggatcatgtttttgttgttggacaggtgaaaaagacaatgagtcctgatgggaaccacagtagtgatccaacagagttcgtcctggcagggctcccaaatctcaacagcgcaagagtggaattattttctgtgtttcttcttgtctatctcctgaatctgacaggcaatgtgttgattgtgggggtggtaagggctgatactcgactacagacccctatgtacttctttctgggtaacctgtcctgcctagagatactgctcacttctgtcatcattccaaagatgctgagcaatttcctctcaaggcaacacactatttcctttgctgcatgtatcacccaattctatttctacttctttctcggggcctccgagttcttactgttggctgtcatgtctgcggatcgctacctggccatctgtcatcctctgcgctaccccttgctcatgagtggggctgtgtgctttcgtgtggccttggcctgctgggtggggggactcgtccctgtgcttggtcccacagtggctgtggccttgcttcctttctgtaagcagggtgctgtggtacagcacttcttctgcgacagtggcccactgctccgcctggcttgcaccaacaccaagaagctggaggagactgactttgtcctggcctccctcgtcattgtatcttccttgctgatcactgctgtgtcctacggcctcattgtgctggcagtcctgagcatcccctctgcttcaggccgtcagaaggccttctctacctgtacctcccacttgatagtggtgaccctcttctatggaagtgccatttttctctatgtgcggccatcgcagagtggttctgtggacactaactgggcagtgacagtaataacgacatttgtgacaccactgttgaatccattcatctatgccttacgtaatgagcaagtcaaggaagctttgaaggacatgtttaggaagtaattgccacatattatggcaataaagcatgttaaaccatccattttcaacatgtgtttcattgtgaaaaataactttgggctcaatttaattcaataaaatttgttgaatactgtgttctaggaagtaagttgattctggatatttgaatcctgtgttggatgcatagttcgtgaatattttctctcactctgtgggttgtcttttactctgctgattatttcttttgctatgcagaagctttttagtttaattaggtctcatttatttttgtttttgctgcatttgcttttgggttcttggtaatgaattatttgcctaagtcaatgtttagaagagtttttctgatgctatcttctagaatttttatgatttcaggtctttgatccatcttgagttgatttttgtataagatgagagatgagaatccaatatcattcctttacatatggcttgccaattatcccagcaccatttgttgaatagggcgtcctttccccacttatgtttttgtatgctttgtcaaagattagttgactgtaagtagttggttttttttctgggttctctattctgttacattggtctacatgttttgttttgttttactggtaccacgctgttttggtaactgtagccttgcagtatagtttgaagacaggtaatgtgatgcctccagatttgttctttacacttaactttgcttgggggctatgcaggctctttttttggattcatgtgaattttaggatttttttttctagttctgtgaagaatgacgatggtatttttatgggaattgtattgaatctgtagattgcttttggcagtatggtcattttcacaatgttgattctatccatccatgagcatgggatgtgttttcatttgtttttgtcatctatgatttctttcagcagtgttttgtaattttccttgtagagatctttcacctccttggttaagtatattgctaattattttattttttatttttgaagctgttgtaaacaggattgagttcctcatttgattctcagcttggtcgttgttgctgtatagcagtgctactgactgtgtacgttgtattgtatcctgaaactttcctgaattcaattgatgacatccaggagctttttggatgagtctttagggttttctaggtattcgatcatatcatcagcgaacagtgacagtttgacttcctcttttccaatttggatgccctttatttttttctcttgtctgattgctctggctagaacttccagtactatgttgaatagaaatggtgaaagtgggcatggcatccttgccttgttccaggaggaatgcttttaacttttccctgttcagt

SEQ ID NO: 470022 - DNA, 862 bp, Homo sapiens
tgctgtggccttgggaaaaaaagctccagatattttcctgtctggacctgcgggacccacaggagagaaatttgctaaaatcaatcagatgatgaccttaagtgcttcagatcttaacaggacctgcaattggataaactggggatatgagtcccatatcatgatgaagcaacacactatttcctttgctgcatgtatcacccaattctatttctacttctttctcggggcctccgagttcttactgttggctgtcatgtctgcggatcgctacctggccatctgtcatcctctgcgctaccccttgctcatgagtggggctgtgtgctttcgtgtggccttggcctgctgggtggggggactcgtccctgtgcttggtcccacagtggctgtggccttgcttcctttctgtaagcagggtgctgtggtacagcacttcttctgcgacagtggcccactgctccgcctggcttgcaccaacaccaagaagctggaggagactgactttgtcctggcctccctcgtcattgtatcttccttgctgatcactgctgtgtcctacggcctcattgtgctggcagtcctgagcatcccctctgcttcaggccgtcagaaggccttctctacctgtacctcccacttgatagtggtgaccctcttctatggaagtgccatttttctctatgtgcggccatcgcagagtggttctgtggacactaactgggcagtgacacttggtcgttgttgctgtatagcagtgctactgactgtgtacgttgtattgtatcctgaaactttcctgaattcaattgatgacatccaggagctttttggatgagtctttagggttttctaggtattc

SEQ ID NO: 470023 - DNA, 894 bp, Homo sapiens
tttttctaaagcccggaagcccccgctttgagttaaagggcagggccacagctgcctgaattctgcttttcacacgtgtactgtccatgttctctccagatcaagatgttgcagaggctccgcgttctttgtctgcaggaaaaatgatgagaactctcatcaccacacacccactgcccctgcttctattgccgcagcagctgctgcagctggtgcagtttcaagaggtggatacagattttgatttcccagaagaagataaaaaagaagaatttgaagagtgtttggaaaaattttttagtacagggcccgccagaccacctaccaaagaaaaagtcaaaagacgtgtccttattgaacctggaatgccactaaatcatatagagtactgtaaccatgaaatcatgggaaaaaatgtttactacaaacaccgttgggtggcagaacattacttccttcttatgcaatatgacgagctccaaaaaatctgttacaacagatttgtgccatgtaagaatggaattaggaaatgtaacaggagcaaaggtcttgtagaaggagtgtattgtaatttaacagaagcatttgaaataccagcgtgtaaatacgaatcactttataggaagggctacgtccttatcacttgttcatggcaaaatgaaatgcaaaaacgtattcctcatactataaatgatctcgtggagccacctgaacacagaagtttcctcaagctgagctcctaatttatcaataggttgatgtaagtaagggcctagaacgaaggacggctagactccattttagtgtctaagggaggaacacaggaaatcaagcttctaggcacttgtgatggttgattttctgtgtcaacttgactgggttaagggatgctca

SEQ ID NO: 470024 - DNA, 613 bp, Homo sapiens
tgaagactgacgctgcctgatcacctcagaagccctgtagaccatcatggatgccgagcttcaagtaactctcacagtggaggatacctctgctccctccttggtgaccgatcatgcaccccttaccatctcattaaaacctaatcacccttaccccattcaatgccaatatcccatcccacagcatgctttaaaaggattaaagcctgttatcacttgcctgctatggcatggccttttaaagcctataaactctccttacaattcccccattttacctgtcctaaaaccagacaagcctcacgaattagttcaggatctatgccttatcaaccaaattgttttggctatccaccccatggtgccaaacccatatactctcctatcctcaacacctccctccacaatccattattctgttctggatctcaaacatgctttccttactatttctttgtaccctgcatcccagcctgtctttgctttcacctggactgaccctgacacccatcaagctcagccaattacctaggctgtactgctgcaaagcttcacagacagcccccattacttcagtcaagcccaaatttcttcctcatctgttacctatttc

SEQ ID NO: 470025 - DNA, 727 bp, Homo sapiens
gcatatttgttaaattattgaatccttgagaaagcccaagctcagcaaggttaaaaaaacgtttctgccaaatgttgcttttctggccagaaatctctgtggccagtggtgcctttgcccaagttcttgtccggcatccaggaagaatgaggtatgcagacaagtggagggcaggtcatcccattgagcgtacagctctcagcagagaagagaccctggagctccggtgtgtgatgttcccctccctgtgtccatgtgttctcattgttcaactcccacttatgagtgagaacatgcggcgtttggttttctgttcctgtgttagtttgctgagaatggtcaccatcattttcagctgccaggtggactttatagcaaccttggataaatatgggccagaggagaaggcaaacagtaaccaattgacagccttggaagagtgctaatgaactagttggtattaagctggaaacctagtcaaaaactggaagtttgggctgaaaatctttcccttatgttttccttatgcatgctgtgattttagggtgggccttcccaggagaagggatcatgattaggagtggctatgtggacaagtagggaacagaaggtgcttagctggacaaaagggcttgtgaagtcatgagaatgagcctctgtcatcattgtcatcatcatcaatcatcatcatcaccacttaatcatagtggctgccattcatcaagct

SEQ ID NO: 470026 - DNA, 574 bp, Homo sapiens
ctgttttgattatggtcattcttgccagagtaagctggcatagcattttttggggtacgattgaagccatcactaaggtaatgagcatctcaccttctccttctcttcactctgttacagagaacagaccctcccagtcttcagtgcactctaaatacttgctaattctggccaatggaaggcatctgtggaagaaaaaagcctcagatcatgtgctatctgtctttattcagtgtgacatattaggctacagtgaggatttcttggtggagagcataccccgatcaccccttcacgctatatcgaatatcatgctagggtttctccaccttgctggaagtgacctgatatccagaagtttgatggctgaggagtataccattgtgcttgcgtccttcatttcctgcatttcttcctccatggatggacaggttgtctgttaggacttttatatttgaagtcttctatttcagtctttggttcatcttgagttaattttccatatgatgacaagcagggctgcagtgttaattgtcctgcacatggctagtcatgtatcccagcgccattcatc

SEQ ID NO: 470027 - DNA, 922 bp, Homo sapiens
gattgcctgcccagttcccttgccctttcatcctttccaaaggaaccctgagttccttcagtaacacacctctacccaggaagcccagagggatgtgtactccatgcctggctgaacttgatagtgattcctatagcagcagcacagacagcacccccatggggagcatcaagtcactctcttctctttcctcagaacaaaatagcactacaaagtcagctttctgccagcccagggagaaatctggagggattccttggattgcaacccaatcttccaatggacagaaaagccttggtctctggacaactaatcctgaatcaagttctagagaagatgcaaccaagacagatgcagaatcagattgccagagtgttgcttcggtcactagcccaggggatgtttccccacccatagacctagtcaagaaagggccttatgggctttcaggactgaaaagagcttctgcttcttctctcagatccatctctgcagctgaaggaaacattagctacagtggatctattcaaagcttaacttctgtaggttccaaggagacacccaaagcttcaaacccagacctgcctccaaaaatgtgcaggaggttaagactagacaccacctcaagcaatggctatcagcgtcctggctcagtagtggcagcaaaagctcaactgtttgaaaatgttggttcacctaagccagtttcttctgggcaccaagccaaagccatgtactcctataaaggagagcacagcgtgagctttccttcccacaaagagcgatattttccagtgtggacccatcagtggaaccaggatggttaaaggcagcttatgaaggcaaaacgggactagttgcagaaaattatgttgtcttcctctactactatttagtggatggcagtatcttcatggtatcc

SEQ ID NO: 470028 - DNA, 3932 bp, Homo sapiens
cagtaacctgtcttttgtggacattgcctattcctcggccacagcacccaagatgattgcagactttgtttctgagaaaaagactatttcctactggggctgtataactcagatgtttaccttccacttttttggttgtgctgagatttttgttttgactgtcatggcttttgatcgctatgctgctatctgccaacccctccgttacactgtcatcatgagtgctaatgcttgtactgtgctggcatcactgtcctggttgggggccctgggtcattcctttgttcagaccctcctgaccttccagctgcccttctgtaatgctcaggttatagaccattacttttgtgatgtccacccagtcctaaaacttgcctgtgctgatacaactctgataaatatgttggtagttgccaacagtggtctcatctccctgggttgtttcctcattcttttggcctcctacaaagtcattctgcttagtcttcaaaaacagtctgcagagagccgacgcaaagctctctctacctgtggatctcatctgactgtagtaactttcttctttgttccgtgtatctttatttatctccgtccatccactactttcccattggataaagctgtgtctgtgttctataccaccatcaccccaatgttgaacccactcatctatactctgaggaatgaggatgtaaagaatgccatgaggcagctatggagtagcaagatctccttgaaggaaaaacagagaggatagtttgtcagaattgcaaaatcagagaattagtggataccttcaatgatccctaatttattaataattaaaaaaatagttcctaaaaatgcagcttttataggttgtctaaacaggaaataatttgaggctattttagacaggctaaacttaaaactttccatacttggcaaggtttatcctctcttacttctagatcttttcctataaatattgcaaaatctagtcagggaaacagatttgcaaggagacaattataatacaatacaacaaatgcagacatagaaatatacacttcctacaatgaagggggtaatgtgtatatgtcataaggtttgagggaggtacatctcacacaggagtgcaaaaactcagtcatcacacttatgaaccacaaagggatcaaaagccacttttaagatgacagatgtatagtaggcataggagacaacagaaatggatgaaagcagaagatggaagccctccaggttcataaaacagaaaggaaagggtgaaaatttatattgtctaatatattgaagcatcttagttgtaaagattatctcatggtttttatttcttattctgttaatgtggtgtagcacatttgttgattgtgtatgttggataattcttacatcccaggaataaatcctactttgtcatgatgcaaaatctttttaatgtcctggtatatttggtttgccagtagtttgttgaggatttttggacctttgttcacaagggatattggcctataatctatttttcttgttggtgtccttatctgggtttggtatgaaggcaatgttggcattgtaaaatgagttttaaagtatcccctcctcttcaactttttggaaggattttagaaggataggtgttagttcttttcaaaatatttggtagaattcaactatgaagccatcaggtcctaggattttctttgataggagattttattattgattcaatctccttactcattactgttaagattttctatctcttcatgattcagtcttgcaggctgtatgtgtctaggaatttatccatttattctaggttatccaatcttttgacttgtaatggttcatagtattatcttataattctttatatttttgtagcatcagttgtaatgtctcctttttcattttggcttttatttatttaagtcttctattttttctcagtgtagatcaagtattgttgattttatttatatttccaaaaatcaatcttagtttcatgatcttttctactgtttctctagtctcactttcattgatttcttttctaatctttgttatttcctttttttctaactttgggcttagtttgttctttttttagttcattgagctgtaattttaggttgttaatttgagacctttcctctttttttgtaaacatttattactatacatttctcccttaaaactacttttgctgcatcccatacctttttgtatgtcatgtccattttcatttgtctcaagatatttttacatttaccttttgatttctttttttggcccattggttgttgtttaatttccatatgtacatgaattttccagttttcctgttattattgattttagttttacaccactatggtcagaaaatatatctgatatgatttcagtcttctgaaatttgttaagacttgtttgtggcttaacatacaatctgtccaggagaatattctgtgtaagcttgagaagaatgtgtgttctgctgttggattgaatattctgtgtatgtctattagattcatttagtctgaagtagttcaagacaatgttttcttaataatattctttctggatgatttatccattgttgaaaattggatattaaagttctctattaatattgcattgcagtctatctcttgctttagatttgttaatatttgctttatatatttaggtgctctgatgttgggtgtattcatatttataactgttctattatctcaatgaattgactttcttatcaatatctaatgaccttctttgtctcttgtgacagtatttaaagtctattttgtctgatacacatgtaactgctactgctcttttttgattttcattttcatggaatatttttgttttttacccctttacttttagtctgtgtgtgttattaaaggtgaagtgagtttcttgtaggcagcattaagttggattttatttttataaatcaattcagccactctttgtcttttgattaacaaaatttgcttatttatagttggtaagtaaagatttattattgtcaatttattaattgttttctggttgctttgtagatcctttatccctttattactcctttgttgttttcctttgtgatttgatcattttatttggtggtatgctttgattcttttctgtttatcttttgtgtatttactatagatttttaatttgtggttgccatgaggcttacataaatattcttattgtttaaccaattcatttaaagacgataacatcttaactttgattgctaaagaagctctgtacttttacttcccttctcttacattgtgcttttgatgttacagtttacattttttgtatgtcttaagaatttattatagctatagtcattttgcatacattcatcttataactttataatgatggtgtgattcacaccaccaccattatagtgtttgaatattctaaatttaaccatatatatactttaccagttagttttacatttttgtatgttttaatgttactaattagctgccttttatttaatcttaaaaatccccctttagcatttcttgtaaggcaagcaatagtgaagactcactcaactttttttgtttttctaaaaaagtctttatcttcttcatttctgaaggacagctttgctggcaaaatattgctggttggcagttttatttttcttccatcactttgaatatattatttcattctctcctgatcctcaaggttcctgctgagaaatccactgatagctttatttgggtccttttttatatgacatgattcttttctcttgctgcttacaagcttctctgtttttgatttttgccaggctgatgttaacgtatgtttgtggattctttttttggttgaattgactggagaactttaggcttcgtgcatgtggatgctcatttctttcc

SEQ ID NO: 470029 - DNA, 900 bp, Homo sapiens
tcaaagaatcctgtgtcacatccatgagggctcccctaaaatgctcatagacttctttgtggagaggaagataatttcctttggtggatgcattgcacagctcttcttcttacactttgttggggcttcggagatgttcttgctcacagtgatggcctatgaccgctatgctgctatctgccgacccctccactatgctaccatcatgaatcgacgtctctgctgtatcctggtggctctctcctggatggggggcttcattcattctataatacaggtggctctcattgttcgacttcctttctgtgggcccaatgagttagacagttacttctgtgacatcacacaggttgtccggattgcctgtgccaacaccttcccagaggagttagtgatgatctgtagtagtggtctgatctctgtggtgtgtttcattgctctgttaatgtcctatgccttccttctggccttgctcaagaaacattcaggctcaggtgagaataccaacagggccatgtccacctgctattcccacattaccattgtggtgctaatgtttgggccatccatctacatttatgctcgcccatttgactcattttccctagataaagtggtgtctgtgtttcatactgtaatattccctttacttaatcccattatttacacattgagaaacaaggaagtaaaggcagccatgaggaaggtggtcaccaaatatattttgtgtgaagagaagtgaaagataaattatacattttatagtcctcctgaggatcattgtcctaaagcaggaagtatttgcagtaataatgctgcattcacttcctccgttcatttgtgttcttaaaattttactataatttttctctattaattcctctttatattgaaaaaata

SEQ ID NO: 470030 - DNA, 1074 bp, Homo sapiens
aagaaacgggtaatgccaattgccagggaaatggaaagcgagaacagaacagtgataagagaattcatcctccttggtctgacccagtctcaagatattcagctcctggtctttgtgctagttttaatattctacttcatcatcctccctggaaattttctcattattttcaccataaagtcagaccctgggctcacagcccccctctatttctttctgggcaacttggccttcctggatgcatcctactccttcattgtggctccccggatgttggtggacttcctctctgcgaagaagataatctcctacagaggctgcatcactcagctctttttcttgcacttccttggaggaggggagggattactccttgttgtgatggcctttgaccgctacatcgccatctgccggcctctgcactatcctactgtcatgaaccctagaacctgctatgcaatgatgttggctctgtggcttgggggttttgtccactccattatccaggtggtcctcatcctccgcttgcctttttgtggcccaaaccagctggacaacttcttctgtgatgtcccacaggtcatcaagctggcctgcaccgacacatttgtggtggagcttctgatggtcttcaacagtggcctgatgacactcctgtgctttctggggcttctggcctcctatgcagtcattctttgtcgcatacgagggtcttcttctgaggcaaaaaacaaggccatgtccacgtgcatcacccatatcattgttatattcttcatgtttggacctggcatcttcatctacacgcgccccttcagggctttcccagctgacaaggtggtttctctcttccacacagtgatttttcctttgttgaatcctgtcatttatacccttcgcaaccaggaagtgaaagcttccatgaaaaaggtctgagtaatattccattgtatacatgtactgcattaaaaaaaatctcttcatctgctgtcagacacgggttgattccatgtcttggttattgtgaatagtgcagcaataaatatgaggctacagatgtctctttcatatatc

SEQ ID NO: 470031 - DNA, 2504 bp, Homo sapiens
ggaaactgcttatcatctccgtatctctgacttcttattgtaagatagaattattattgtaattgctcggttgagtgcaaggtgatcagagccctcactacatcaggacaggacctgaggacctgagaggcttccttccatacggcatagtgtagggaaccaagttaaaatgcatcaagttaagattatattacaaatattttcagtatgaagactcatagcagaaagtgggaaatggaaacaaaccagaggacaccaaactgggaaaataaggaagaagtgaaagacttggacaactttttcaaagtccacttggcttttacagtggacctgccattctgtggtcccaatgaggtggatagcttcttttgtgaccttcccttggtgatagagctggcttgcatggatacatatgaaatggaaattatgaccctaacgaacagtggcctgatatcattgagctgtttcctggctttaattatttcctacaccatcattttgatcggtgtccgatgcaggtcctccagtgggtcatctaaggctctttctacattaactgcccacatcacagtggtcattcttttcttcgggccttgcatttatttctatatatggccttttagcagacttcctgtggacaaatttctttctgtgttctacactgtttgtactcccttgttgaaccccatcatctactctctgaggaatgaagatgttaaagcagccatgtggaagctgagaaaccgtcatgtgaactcctggaaaaactagggatcattacgaaggagcataatcctgaattagaatgaagaccctccagtgtatcatagtgtcatgccaaccatctttgccagacatatgggttattgagttacagaattggctttttgttttaagtgcaagggaattgcatcaagtcagtctctggttctatttaaatataatgttaactattttttcattgtttataattcaaaagtacaaattgtcttgaaaatatttagtaatattttaaaatattttataaagatttagagattccaatgtgcataaaatgttattcatgttactaagcttgtgattctcttcaattgaatacatcataaatttagacctgacaatcaaaatgtacagtcatactgaatttctgatatctttacccaatttattcataacattacaacatacattgacatagtagaaaaagtatcacattttacaacatggatttcaccttactgttatatatttttagcttttctttatcttatgtattattttagtaatttataatttggttattatatatttgtgtatttatagttttccctatttactattttattcctatttttttctgttttcctttagattatttgacataaatttttgctttttacaaaattttctaggtatttggtgccatcaacaacatatatatatatgtgtgtgtgtatatatatatataaaatatatataatatatataaaaaatatataatatatataaaaatatataatatatatttgtcagaagcctacttatttttaaagtagaataaattggctataatgaattccacattattcacagaaaatttcaaatatctttgaaactgtttgcaaatatggcagatgttgaatatttaagttcaaagaaaaagtaaagtatctaacgcatacaaatgtacagaatgacacaaatcatttgctactgaaaatccaaagtgaaatttgttctttcatatttgtttgaaaacagaagagagaaaagtaaaatttatgtacctctaatactagtgattaaaagcatctgttaagtattgtttcattttccagctaaaagttttcttatgtacttctccctgagatttgcattacgaaaagtccttgtaataggaagactaattgtattctataataacaatgagataaagaactacttaatggaaaatataaagcctgtgattgtcatcactctagattcctattttaattataagagttatgttagtggctatgtgtacagatattaactctgcatgctaaatcctagtggaagtaaaattttagatataggcacacagtcctgttaaatcatcatattatttagctggttttttatttttttgagcttcagattatttttggttaacttcatttgtacactgtcaaacataatgacctgttaaacttgactacctgttatattttttatatggtgccaaaacattttggacacacaataaacatgaaagcattgatgatatttttggtagtattattttctcctcactacagtggaagtgaaaaggtgttgaatgtatacttcaccaatgaggtcatttcactgctctaattctcatatgtaaaataaagttgttaaaaatagctattttgcaggaactatgtgacacaagaggatataatggaaataaaggcactttatgaagcatgaaacatacaaatagctttagtgttattacttttgaaaaggtaattctg

SEQ ID NO: 470032 - DNA, 534 bp, Homo sapiens
atttcagtagatggaacatacaatgggcttttataccgagacattccattgcccagggacgggcaggagacagatgccttcctcttgtctcaactgcaaagaggtgttccttcctcttatgctaatcctcctcagcacagacccttcatgggtgtcgggctgggggatggatctgttgttggtcaaaggctggcaagcctgtaccaatggctcagatgacagtggggcagctctttggctgccacagagaaaggctgaagccaaggctcctgcagaatccactgttggacagaggcaagcaaacccaccctggtggtccagagtgtatgtctgtgggagggtattcccaggctgtagcagagagaaggctatggtagtggttctgagaagtaattactgtgtcattttaacaatccaagtaagaaatggtgaaagcctgacctgaggctgtagaaagtgatgaggaggagggtatggttaaattatcagatggaattgtgaagatgagataacagaactgcatcactgatgaca

SEQ ID NO: 470033 - DNA, 2057 bp, Homo sapiens
cttctgacttaagttcttaagaccaggtttctgtaggcagagcaagagtgagaaattatggaaacacagaacctcacagtggtgacagaattcattcttcttggtctgacccagtctcaagatgctcaacttctggtctttgtgctagtcttaattttctaccttatcatcctccctggaaatttcctcatcattttcaccataaagtcagaccctgggctcacagcccccctctatttctttctgggcaacttggccttactggatgcatcctactccttcattgtggttcccaggatgttggtggacttcctctctgagaagaaggtaatctcctatagaagctgcatcactcagctctttttcttgcattttcttggagcgggagagatgttcctcctcgttgtgatggcctttgaccgctacatcgccatctgccggcctttacactattcaaccatcatgaaccctagagcctgctatgcattatcgttggttctgtggcttgggggctttatccattccattgtacaagtagcccttatcctgcacttgcctttctgtggcccaaaccagctcgataacttcttctgtgatgttccacaggtcatcaagctggcctgcaccaatacctttgtggtggagcttctgatggtctccaacagtggcctgctcagcctcctgtgcttcctgggccttctggcctcctatgcagtcatcctctgtcgtataagggagcactcctctgaaggaaagagcaaggctatttccacatgcaccacccatattatcattatatttctcatgtttggacctgctattttcatctacacttgccccttccaggctttcccagctgacaaggtagtttctcttttccatactgtcatctttcctttgatgaaccctgttatttatacgcttcgcaaccaggaggtgaaagcttccatgaggaagttgttaagtcaacatatgttttgctgaatagaagaaagagaaaagcaagaacggagaaagtccagttgaatttagctaaatcatttcctcattcatgcattgaatcagtcagtcatttagcaagtattataattattaagtacttcccattttcaggcactattccaggcatatgaatgagacaggtaagattccaggtctcctagatttatattcaaggggataaatacaggttattagatttattcaaggggataaatacagtttattaaatttgaaaaacaactatagtttcagaaagaaacagtgttctgtagcaagcagaaagtggtattatgctagagattagctggggaggtggtaattaccttacttttggttgttaagtgaggcctcaagtggtgtttagctgaaaccaatatgattcgaaagaaacaaccatgcaaatatctggggacagaaattctaggcaaaaaggctgactagtacaagaatccaaagatcttatgagcttgttatatttgatgaccataaaaaggaagagaacagctgtactatatttagtgaatgtgaaaatggcaaaaattgaagtcaaagaatttggtaggggcaaaattatgtagagcattttagtcaataagaagttcaatttattcagatttcaaaaggagattcttgaaagacaataagcaggagagtaactctttaatgtttcctatttgacttaagggaagatcctcaagattctgattacagaactatgagtagtaaaatatcattaagtggaaagtgcgtgctgctaagtattttttatttatgtcaacacttaaaaggtctagttactttttctaatttgatagagagagaaaattaaaactgttatattttatcagaaactgtgaaaagacaatttagctatatatttcaaagttttgcagagatttctgcttattcctaatgggtaatttttaaacattagataaaaacttgagttcacttacaaattatttcaccctgaatgcaatgatcaatagttatatgtaatacaagttattatttagataactaaaccactctgattatttgaataagcatatata

SEQ ID NO: 470034 - DNA, 998 bp, Homo sapiens
gattttaccatgttggccaggctaatcttgaactcctggcctcgggtgatctgcctgcctcggcctcccaaagtgctgggattacaggcgaatacaaaccgagcctgtgccttctcattgatacatctctttgccttatgtggactcaaaacctggagcctgacccagagaatcctaggatatataaaggtaactgttgaaactcccttttctcctttcctgaagtgctcaaaaggaacacttacagggctacataaaggacctcagtcacctccgggcacccagaccttccaattgtctcatccagcagagaaaggtcaacaggaagtggtcaataatcctagatccacagaaggacatttgggagatgttgacgataggaatcaagaaccagatgaaaccaagtacccagcaattgaccacaagattggtacagagacgtctggtcataatggttggatagcgtagaggccgacagatggcaagcatacttattttgatatttatcatattgttgtgtgttagaatggtgcattccttttattgctcagtagtattccatatgtatatactacaattgagttattgattcatcctctgagggacatttgggtggtttccaatctttggctactacaaataaaactgttatgtttgtgtacagaactctatgtcacttaaatacttttaaatttgttgacacctgttttatgacccagaatatggtctaacttgataaacttgaaaagaaggagtattccaatgtttatttgtgaaagtgttttataatgtcactaacttctaattggttcatagtgttcttcaggtcaactacaagtctgataaatttttgattaccacttctattaattaatgagggaggtatattgaagtgtttgattattttttttataatatgaggaagtttatcactacttgattctgtttataagaaagttaaacaaaggatgctaattagtaacattagcattaaagta

SEQ ID NO: 470035 - DNA, 632 bp, Homo sapiens
cggcctggcttttcctagttatggcttatgatcggtacctggccatctgtcgtccattacactacccctccatcatgactgggaagttctgtataattctggtctgtgtatgctgggtaggcggatttctctgctatccagtccctattgttcttatctcccaacttcccttctgtgggcccaacatcattgaccacttggtgtgtgacccaggcccattgtttgcactggcctgcatctctgctccttccactgagcttatctgttacaccttcaactcgatgattatctttgggcccttcctctccatcttgggatcttacactctggtcatcagagctgtgctttgtattccctctggtgctggtcgaactaaagctttctccacatgtgggtcccacctaatggtggtgtctctattctatggaacccttatggtgatgtatgtgagcccaacatcagggaacccagcaggaatgcagaagatcatcactctggtatacacagcaatgactccattcttaaatccccttatctatagtcttcgaaacaaagacatgaaagatgctctaaagagagtcctggggttaacagttagccaaaactgagatatctttgaaaaagaagccaaa

SEQ ID NO: 470036 - DNA, 967 bp, Homo sapiens
ttggactcgaaaggaatggtatcgaatggaatttattcgaatagaatggaatcgaatggaatgccatcgtatggaatagaatcgaaaggaaaagaatcgaatggaatggacaggaaagaaactgactggaatagaatggactcgaatgcattggattgcaatttatgtgatttgaatggaatggaaacgaacggaaagaatgcaatggaatggaacggaaaagaaaggaatggactcgtatggaatagaatcatttggaatggcatcgaatggaatggaatggaatggaatggagtgaaccaaaatgtaatggactccaatggaatggattctactacaatggacaagaaaggaatggtctcgaatggaatttattcaaatagaatggatgtgaatggaatgcaattgtatggaatggaatcgaatgaaatggactggaatggaatggacaggaatggaatggactccaatgtaatgaatggaatggagtgtaatggaatgctatcgaatggaatgcaatggaatgatatggacttgaagggaatggattggaatggaatggactcgactggaatggactggagtggaatggactcgaatggaatgctgtcaaatggagtgcaatcgattgcaatggaatcgaatggaatggaattgaacagaattgaaaggaaaagaatggaatggagtgtaatggaaaactatcgcatggaatggaatggaatggactcgacaggaatggactggagtggaatggactcgaatgcaatggaagtgaatggaatggactggaatggaatggactcgaatggaatggactggaacaagaatggtatcaaacggattggaatcgaatggaacggaatggaatggaatgcaatgaaatggaatggaaaggaatggactcgaatggaatggagtcgaatggaatggagacgaaaagaatggaatcaaaaagaatgaaatc

SEQ ID NO: 470037 - DNA, 814 bp, Homo sapiens
agcctgctcctctcagagttttgcactctggctcttccctctgcctgaaatggccttctcttgttacccgcgtggcctctatgaacaaggaggagaccttcctgctccttttgtgtctggaagaatccagcttatcctccaaggcttggaagagacaccacaggctcctcaccctgctctgtgcaccacccccgctttgtgtcctatggacctggatctcggcaagaggagaagtacttctagaagaaagcagaacactagaaggccttagtttcttctttgaaacatggtgctccatccctatctcaaaagcaagttctcagatgcctgtggtgggtgaagatgtggatgctgaggctgtctctggcctgctgtattcaacatctccaactacctttggagaagatgctggtctctcaggggtggctgtgaccagaagtcacacatggagtgattttgaaatggatccctggttttacagctccagagatgtgaaatgggtgaatgatggagctacactcatgtggctcttcaatggcacagtgaaaaaagcaagcaagatggagccagatagacctgggttcaatgccagcaatgatttaacctgtgacctgaggcagtaacttcccctctctgagcctcagtttcctcgaggattggaggggcccaatactactcaccacatggcattacttttaagacctaataggctaacaacaaggactttgcacatggtggccctgaacaaatatttgttttgacctggcttcctagcatcccaggaggggtgaccctctccaatccccacctccct

SEQ ID NO: 470038 - DNA, 503 bp, Homo sapiens
ggcctctgccgggcccagcctatgaagttgacgaatttgggtcaggtaggagaggctgcccaaggcccgggagcagcgacgtttgaacactcagcggcgttgcccaagccaattccccgcagcggcggcggctcccttcccccggagctctgcggggcccaccgccccagactcgcaactgtacgtcggagccgcagcttcgggcccggccactctcccgccctccagacgccagcagttgcgaggctgggacctcgaaccctgaacctggccccggggagcctcggtcctgaccgcggcgttcctgggacatttcttccagggctctttgccacgttctggaaactctattcatctgcatctttcatgcacagtctccatcaacaaggtgctagtctgtacttggccacacaatcctcattactgcactgaatcccagtattttcaagaaagtttacttttacatcaatcagaccccgatttaaaagcctctaatctttccc

SEQ ID NO: 470039 - DNA, 658 bp, Homo sapiens
agtgttctgtagtttgtttaggacggtgattatatatctgtgagaagcccagaagggctgcactgtggatggctagccagaggcattttgagtatgagctaaaagcaaataggcctagagcttctgatgaatatcttgtcaggtactactttgaaagcctgcatacggcttgcactaacaaacacaagcctctcagtgctcagcgagtgagtcatctcactatcaaagagactcgcccagacaagggaataagtgtggacacagacattggattggaggttattgggacatgtgaaaaggatggggcttcccaatgggagtatacggggagttatggtaggaagcccagtcctaaagcagacgccagtgctgcctccctgagccactgcccagcctcctggaaagcccagggcactgctgccagctggccctctctgagcctggctctgagagcaggccgactgtgcacgggttcagaggcatccatcacctggagaaggcacagaaggcctgctgcggtagggctggatttgagtccaggtaggtggagaggagaattacacattaggaaaccatgtgagctaaggcaggaacacacgaaatctcttccaggacagggaggagccctgttgtgagagcctgagaagggaagaaaaag

SEQ ID NO: 470040 - DNA, 1047 bp, Homo sapiens
gctgtttgcactctctggtttgctctctctctccctgccacgctctcctctttcttaatgtacctggcgaagatgacacaaaaggggcttgttcaccagtcagcaccctcagctgcaggtctgttgcagtttgctggaggtccactccagaccctgtttgcctgggtattagcagcggaggctgcagaacagcagatattggtgaacagcaaatgttgctgcctgatcgttcctctggaagttttgtctcagaggagtacgcggccatcctcctcaatggtgggtgcccctcctccaacttcgctgccaccttgcagtttgatttcagactgctatgctagcaatgagcgaggctccatgggcataataccctcagaggcatgcacaggatataatctcctggtgtgccgtttgctaagaccgttggaaaagcacagtattagggttggagtgacccgattttccaggtgccatgtgtcacccctttctttgactaggaaagggaattccctgatcccttgtgcttcccagataattcaaggatactgtgaacacctttatgcacacaaactagaaaatctagaggaaatggatacatttcggaaaacatacaaccatcctagattaaatcaggaagaaatagaagccctgaacagaccaatagcaagtagtgagactgaatcactaataaagaaaaattgccaacaaaaaagtccaggaccagatgaattcacagctgaattctacctgacattcaaaaaattggtaccaatcctgctgaaagtattctcaaagattgagaaagaagaatttctctctaaatcattctgtgaagccagcatcaccataataccaaaatcaagaaaggacataaaagaaaataatagatccatatcactgattaacatagatgcaaagatcttcaagaaaatactagataattgaatctaatagtgcatcaaaaagatagtacaatatgatcaagtgggttttatcccagggatgcaaggatggtttaacatacataagtcaataattttgatacat

SEQ ID NO: 470041 - DNA, 3681 bp, Homo sapiens
acatggctgccaccggggaatgtggtggcacctggtagcttggagactccaggagctgctaggccacagagagggagtcacagccctggcctggggagcttctaatcctgccatgtggcaggtcctgagttcttgccctgtgtccaggaagaatgaggtatgcagacaagtggaggccagttgtcctgatgtctgctcagctgtggctgagcccagggcatttatgggcctcagaggggaggaagtgcacaccaattggtccacaggcagccatgggctggcctggaaaacacaccacaagtttccattctggtctgtgggactcgaagcccagcctgcagccttcaggccctccctgggcagaaggaacctgtgtgtctcctgctacattcatggtgcccgtgctgtaggtgccaatgggcacctgcaggccagcatcaagctgccctcagtgcccccttggcttccctcctatgctcaacagtgcccaaagtctggagggggcctaggcagcaggtggctggtgtgtcagcactgccctgagtgtgtgcacacctggctgggctgtgatagtgtccgggcttggccctgacttttctctgagatcagtgcaggcactggcaacagggagaagccaggcagcaggataaggtacttccaagcctgcaagggcagggggagacttctggagtccccaagagtgcagggatgcctgggtccacaactgtggtttgggttgctgcagctctgcctggtggggtggggattctgcctgctccatgaagcaggaggccctggtcagcagccatgacttgggtggctgcggctgcacctggggagctccctttccatcaactcagaaggggcagggttcccatttgtccctggctcctgccagctccacggagtgtgcagccctggccacgcctccctgttgcagccagagtgatggcagcagctgctccagatgggcctctgctgccatcattaactttatatcatagcatttaaattactggatatcagggaaaggagtaaacatccaatgactttgctttcttttctggggaagaagttagtgcattttcagttgtgtgcaagacaattgtatcctaagaagatgcattcagatgccaggttgacaagaagtaaacttgtgacggttcattttatgtgtcaactttgaggatgtttttggatgagattatttaaaacaatttactgttggtaaagaagactgccctccataacatgggtgggtctcattgaattagttgaaggcctgcatgaaaaaaaaaaaagactggtctccccagcaaggtaaaatttttcagcagtctgcctttaaatctcatctgccccattggctcttctaggtctcaagcctactggcccacactacagatttgaatttcccagcctccattccataatttatgtaaatcagttccccataggaaatctctttctctctctttctctctctctctccccctctcctctccccgtccctctccttcctctcccttttcctctccctctgtccatttctgttggttctgcttctctggataactcactaatgcagcctattaatgtggtgaatcacattcattaccttcaaatattgagtcattcttatttaggataaattccacttcattatgatggatttttaaaaaatattgctgtatccaatttgctaatattttattgaggacttttgggtctatagtcataggagtattggtctgtggttttcttttcttgtgcttgtcttagttcagttttggtatgacagtaacattggcctactaaagaagttaagaagtgttctctccttttctattttctggatgggtttgttaagtatcactgttatttttcatttgaatgtgtggccaaattcacaatgaaaccatctggcttggagtttgcctttttggttttgtttttaatggcgagttcaaattttaaaaaatatataagactatttacacagtttatttcttcttgatttaattttggtagtttgtggcttttaagaaattggctcatcatctaaattattaaatttatgagcatagagttgttcatagtatccctttattatccttctgatgtatttaaaaggtgtcagatactatgaacaacaatcaggaataccttctttttccccctgatgtcggcaatttgtttctttcatctttttttcttggtcagtctggctataggtttatcaattttattgacttttttaaagaatcaaatttggttttattgattttatctgttgtttttacctcttaaatgtcgttgattcctgctctcatctttattatttctgccctcctagctttaggtttattttactcttttttctagctaattgaagtggaagcttaaattattgatttgagacctttcttcttttataatatatatttcatataccataacttttcctctaaacactgctttagctccatcccacaaatttttatatgttatattttcattttatttacttcaaaagattttttaatttcccttgagacttctttgttggcctatggattatttagaaatacattatttaattttcaaatatttgaagattttccagacattattctaatattgatttctagtttaattcctttatggccataaaccatacttgaataatttaaaaaaaattaaatttaacttaaaaaaattagaatatgatcttattttgtaaatgttctatatgtacttgaaaagaatgtgtattctgcttttgttgggtgaagtatctacacatatcaattaggttgagctggttgatggtgttcttcatgtcttttatatacttgctgattttccatctatttgtttgattactgagagaaatgcttaaatccacaactgtaactgtatatttgtctatttctcctttcagttctatttggttttactttatgtattttgaagccctgttgttaggaacatacacatttaggattgttatgtcttctttaaacctgtaatttttttagtatttaaaaataatcttatagaatgaggtgacattcaattgaaaaaaaagcacaatggattaaccctttttaaagaaaaactttatttttaatgtgtactctgaatttcctcattttttaaagcaaagagcctctggaaatcatattacattataggctgctgtgactaagttttgattaaatgttttttttctttcctaaatatctccctttgttacattagttaagtgtaggtcctcattttggttggtgtaattccaaaaaatcaagggtagggttttttcccttcaggccccaaagccacagtcaaaagtagtcagttgtctctctctccctatgcccctccttctgcatgggtttctgtgtgtgtttacttgtaaaacataccaactcccatggaaaaacgatcaaatctcaaaactaaaatacagaagctccgcttttacctatagccttgctgccagttattttcagacaagggttaggatgtatgttttccagagttccccaaagtgagccagtgtacagtgttggccctgacaagcacgggtgggaatgagggaaaataaagaaattttcgcccttgcgtcaggctctggaaagcaaaattcagaaaaaaggctgagaaaagctttcttcc

SEQ ID NO: 470042 - DNA, 3514 bp, Homo sapiens
ccctcctccatcatcgtaacccttacctccctccccaccctggcactgtgagtactacacccccatgactgacctccccaccctggcactgtgagtactatacccccatgactgacctgcccaccctggcactgtgagtactacacccccatgactgacctgcccaccctggcactgtgagtactacacccccatgactgacctgcccaccctggcactgtgagtactacacccccatgactgacctgcccaccctggcactgtgagtactacacccccatgactgacctgcccaccctggcactgtgagtactacacccccatgactgacctgcccaccctggcactgtgagtactacacccccatgactgacctgcccaccctggcactgtgagtactacacccccatgactgacctgcccaccctggcactgtgagtactacacccccatgactgacctgcccaccctggcactgtgagtactacacccccatgactgacctgcccaccctggcactgtgagtactacacccccatgactgacctgcccaccctggcactgtgagtactacacccccatgactgacctgcccaccctggcactgtgagtactatacccccatgactgacctgcccaccctggcactgtgagtactatacccccatgactgacctgcccaccctggcactgtgagtactacacccccatgactgacctgcccaccctggcactgtgagtactatacccccatgactgacctgcccaccctggcactgtgagtactatacccccatgactgacctgcccaccctggcactgtgagtactatacccccatgactgacctgcccaccctggcactgtgagtactacacccccatgactgacctgcccaccctggcactgtgagtactacacccccatgactgacctgcccaccctggcactgtgagtactatacccccatgactgacctgcccaccctggcactgtgagtactatacccccatgactgacctgcccaccctggcactgtgagtactatacccccatgactgacctgcccaccctggcactgtgagtactatacccccatgactgacctgcccaccctggcactgtgagtactatacccccatgactgacctgcccaccctggcactgtgagtactacacccccatgactgacctgcccaccctggcactgtgagtactacacccccatgactgacctgcccaccctggcactgtgagtactacacccccatgactgacctgcccaccctggcactgtgagtactatacccccatgactgacctgcccaccctggcactgtgagtactacacccccatgactgacctgcccaccctggcactgtgagtactacacccccatgactgacctgcccaccctggcactgtgagtactatacccccatgactgacctgcccaccctggcactgtgagtactacacccccatgactgacctgcccaccctggcactgtgagtactatacccccatgactgacctgcccaccctggcactgtgagtactacacccccatgactgacctgcccaccctggcactgtgagtactacacccccatgactgacctgcccaccctggcactgtgagtactatacccccatgactgacctgcccaccctggcactgtgagtactatacccccatgactgacctgcccaccctggcactgtgagtactatacccccatgactgaccctaatcttgaatggacgcagccatttgccttctccacatagctgttgttgccagagaaaatctcccaaccaggacgactggttctgcctccatccattagaacatgactcaggggcactcagcattgctcagggtcccgaatcccttccttggagttgacttttctgctctctgaggccatctcatgctgtctcctcccctggtccacccacagggctgccctcacctcctggtcctggggatcccgtgaaacactagaagtgaagggacctcccttcacttcctgcatcccatggaagcacgtctgagtcctgggaactgtgacctgctctcctaccccagccctcatctcgtggcatcctgcgcctgcccctctggcccttcccctctctcaccatagccttcagcctgtacactggatcatccttggacatgcagattccagcaccttctacctgaaaaaaccacaccctccgccccatttcttcatctcattctctgccctccttcacgacagagggtctccaaaatggctgtctacacgctgcctccatttccccacctccacgatccatacctcttcaactctctccagcctgactattgtcccctagctccgtggaagctcccttattagggccaccaatgtttccttgttcacaaatccagtagacacttttttctccctatcggcgttggtcacagtcataaagaacacaaggaaggcagaccctgccacccccagcatccccatggcgagggcctgccgggaggggtctgtctcccggggctgctcccgtggttcccagggtggcagcaactagattccatttttgcaacacccctcaagtcctctcaagggtcatgtgaagttcttgagataatatcaatttaaattcacctgaatgtttaaacatggttctttaaagcaggaagacagagaggtggaagaagctgaatggccgtgcccgcgggagcatggctggtcagacgccgggtctgaggagtaccgagccctctttggcttccgtctgcctctccagctggcagaatcctatcgtgcctgggctggcggcaccggcaggcacctgggcagggccggccaaggtgagagccaggccaccaggtgagcccaggccacgataccagcaggtgattcagacacggataaacagaccaggcgaggctccctgcccgggctccacagctgaaccagtacaggaacgcaggtctgtctgacagcgaggcttctgctccttcaaccaggccatgaggcttgctggccagccgtgggggacaggcaggagccaggaaccccaaaatgatcacaccgtaaactctagcatccagagattcctagtacaatgcggtcgaccaaatactccactgagattcgtatgtgaggccggctgcgggaaacgctgcccagggagggaggtccatgacaacagggcaggtaggggtggaggtggaggtggcggcaatggtggagatggtagagcttgtggtgatggtgcttgtggaggaggcggtgatgaccacggggttccgtccatttctgtggctgttgactcccaagtccgtgtttccagcccagaaccctcccctgagcctcagttcctacatggtagttcttcaggacatcctgtgtctgttctgcgatcaaactcagcatgtccaaatgagctattttttaacttccatcctggtctcaaacctaccatcattctacattctctatcatgatgaatccatgcagacac

SEQ ID NO: 470043 - DNA, 7045 bp, Homo sapiens
gtggaggagtcggcagagcaggcacagcggtgcgacgagatgctgcttctcagagctgctgtccaacctgcactcgcttgggaaccagaagacactcgtggaggcgtcggcagagcaggcagaccaaggagttcatcttctcagagctgctgtccaacctgtactcccgtgggaacgagaagacactcgtggaggcgtcggcagagcaggcagaccaaggagttcatcttctcagagctgctgtccaacctgcactcgcgtgggaacgagaagacactcatggaggagtcggccgagcaggcacagcggcgtgacgagactcgcgtgggaagaagaagacactcctggaggagtcggcagagcaggcagaccaaggagttcatcttctcggagctgctgtccaacctgtactcgcgtcggaacctgcagacacttgtggaggagtcggcagagcaggcacagcggtgcgacgagatgctgcttctcagagctgctgtccaacctgcactagcgtgggaacgagaagacactcgtggaggcgtcggcagagcaggcagaccaaggagttcatcttctcagagctgctgtccaacctgtactcgcgtgggaacgagaagacactcgtggaggcgtcggcagagcaggcagaccaaggagttcatcttctcagagctgctgtccaacctgcactcgcgtgggaacgagaagacactcatggaggagtcggccgagcaggcacagcggcgtgacgagactcgcgtgggaagaagaagacactcctggaggagtcggcagagcaggcagaccaaggagttcatcttctcagagctgctgtccaacctgtactcgcgtgggaaagagaagacactcgtggaggcgtcggcagagcaggcagaccaaggagttcatcttctcagagctgctgtccaacctgcactcgcgtgggaatgagaagacactcgtgaaggcgtcggcagagaaggcagaccaaggagttcatcttctcagagctgctgtccaacctgcactcgcgtgggaacgagaagacactcgtggaggcgtcggcagagcaggcagaccaaggagttcatcttctcagagctgctgtccaacctgcactcgcgtgggaacgagaagacactcgtggaggcgtcagcagagaaggcagaccaaggagttcatcttctcagagctgctgtccaaccttcactcgcgcgggaacgagaagacactcgtggaggcgtcggcagagcaggcagaccaaggagttcatcttctcagagctgctgtccaacctgtactcgcgtgggaacgagcagacactcgtggaggcgtcggcagagcaggcagaccaaggagttcatcttctcagagctgctgtccaacctgcactcgcgtgggaatgagaagacactcgtgaaggcgtcggcagagaaggcagaccaaggagttcatcttctcagagctgctgtccaacctgcactcgcgtgggaacgagaagacactcgtggaggcgtcggcagagcaggcagaccaaggagttcatcttctcagagctgctgtccaacctgtactcgcgtgggaacgagcagacactcgtggaggcgtcggcagagcaggcagaccaaggagttcatcttctcagagctgctgtccaacctgcactcgcgtgggaatgagaagacactcgtgaaggcgtcggcagagaaggcagaccaaggagttcatcttctcagagctgctgtccaacctgcactcgcgtgggaacgagaagacactcgtggaggcgtcggcagagcaggcagaccaaggagttcatcttctcagagctgctgtccaaactgcactcgcgtgggaacgagaggacactcatggaggagtcggcagagcaggcacagaggtgtgacgagactcgcgtgggaagaagaagacactcctggaggagtcggcagagcaggccgaccaaggagttcatcttctcggagctgctgtccaacctgtactcggcgtcggaacctgcagacactcgtggaggcgtcggcagagcaggcagaccaaggagttcatcttctcagagctgctgtccaacctgtactcgcgtgggaacgagaagacactcgtggaggcgtcggcagagcaggccgaccaaggagttcatcttctgagagctgctgtccaacctgtactcgcgtgggaacgagaagacactcgtggaggcgtcggcagagcaggcagaccaaggagttcatcttctcagagctgctgtccaacctgcactcgcgtgggaacgagaagacactcatggaggagtcggccgagcaggcacagcggcgtgacgagactcgcgtgggaagaagaagacactcctggaggagtcggcagagcaggcagaccaaggagttcatcttctcggagctgctgtccaacctgtactcgcgtcggaacctgcagacacttgtggaggagtcggcagagcaagcacagcggtgcgacgagatgctgcttctcagagctgctgtccaacctgcactagcgtgggaacgagaagacactcgtggaggcagctgctgtccaacctgcactcgcgtgggaacgagaagacactcgtggaggcgtcggcagagcaggcagaccaaggagttcatcttctcagagctgctgtccaacctgtactcgcgtgggaacgagaagacactcagctgctgtccaacctgcactcgcgtgggaacgagaagacactcgtggaggcgtcggcagagcaggcagaccaaggagttcatcttctcagagctgctgtccaaactgcactcgcgtgggaacgagaagacactcatggaggagtcggcagagcaggcacagcggtgtgacgagactcgcgtgggaagaagaagacactcctggaggagtcggcagagcaggccgaccaaggagttcatcttctcggagctgctgtccaacctgtactcgcgtcggaacctgcagacacttgtggaggagtcggcagagcaggcacagcggtgcgacgagatgctgcttctcagagctgctgtccaacctgcactcacgtgggaacgagaagacactcgtggaggcagctgctgtccaacctgcactcgcgtgggaacgagaagacactcgtggaggcgtcggcagagcaggcagaccaaggagttcatcttctcagagctgctgtccaaactgcactcgcgtgggaacgagaagacagtcatggaggagtcggcagagcaggcacagcggtgtgacgagactcgcgtgggaagaagaagacactcctggaggagtcggcagagcaggccgaccaaggagttcatcttctcggagctgctgtccaacctgtactcgcgtcggaacctgcagacacttgtggaggagtcggcagagcaggcacagcggtgcgacgagatgctgcttctcagagctgctgtccaacctgcactcgcttgggaacaagaagacactcgtggaggcgtcggcagagcaggcagaccaaggagttcatcttctcagagctgctgtccaacctgtactcgcgtgggaacgagaagacactcgtggaggcatcggcagagcaggcagaccaaggagttcatcttctcagagctgctgtccaacctgcactcgcgtgggaacgagaagacactcatggaggagtcggccgagcaggcacagcggcgtgacgagactcgcgtgggaagaagaagacactcctggaggagtcggcagagcaggcagatcaaggagttcatcttctcggagctgctgtccaacctgtactcgcgtcggaacctgcagacacttgtggaggagtcggcagagcaggcacagcggtgcgacgagatgctgcttctcagagctgctgtccaacctgcactggcgtgggaacgagaagacactcgtggaggcagctgctgtccaacctgcactcgcgtgggaacgagaagacactcgtggaggcgtcggcagagcaggcagaccaaggagttcatcttctcagagctgctgtccaaactgcacttgcgtgggaacgagaagacactcatggaggagtcggcagagcaggcacagcggtgtgacgagactcgcgtgggaagaagaagacactcctggaggagtcggcagagcaggcagaccaaggagttcatcttctcggacctgctgtccaacctgtactcgcgtcggaacctgcagacacttgtggaggagtcggcagagcagtcacagcggtgcgacgagatgctgcttctcagagctgctgtccaacctgcactcgcgtgggaacaagaagacactcgtggaggcgtcggcagagcaggcagaccaaggagttcatcttctcagagctgctgtccaacctgtactcgcgtgggaacgagaagacactcgtggaggcgtcggcagagcaggcagaccaaggagttcatcttctcagagctgctgtccaacctgcactcgcgtgggaacgagaagacactcatgcagaccaaggagttcatcttctcggagctgctgtccaacctgtactcgcgtcggaacctgcagacacttgtggaggagtcggcagagcaggcacagcggtgcgacgagatgctgcttctcagagctgctgtccaacctgcactcgcgtgggaacgagaagacactcagctgctgtccaacctgtactcccgtgggaacgagaagacactcgtggaggagtcggcagagcaggcacagcggtgtgacgagactcgcgtgggaagaagaagacactcctggaggagtcggcagagcaggcagaccaaggagttcatcttctcggagctgctgtccaacctgtactcgcgtcggaacttgcagacacttgtggaggagtcggcagagcaggcagaccaaggaagctgctgtccaacctgtactcgtgtgggaacgagaagacactcgtggaggcgtcggcagagcaggcagaccaaggagttcatcttctcagagctgctgtccaacctgcactcgcgtgggaacgagaagacactcatggagaccaaggagttcatcttctcggagctgctgtccaacctgtactcgcgtcggaacctgcagacacttgtggaggagtcggcagagcaggcacagcggtgcgacgagatgctgcttctcagagctgctgtccaacctgcactagcgtgggaacgagaagacactcgtggaggcgttggcagagcaggcagaccaaggagttcatcttctcagagctgctgtccaacctgtactcgcgtgggaacgagaagacactcgtggaggcgtcggcagagcaggcagaccaaggagttcatcttctcagagctgctgtccaacctgcactcgcgtgggaacgagaagaaactcatgagttggcagagccggcagaccaaggagttcatcttctcggagctgctgtccaacctgtactcgcgtcggaacctgcagatacttgtggaggagtcggcagagcaggcacagcggagtcggcagagcaggcacagcggcgtgacgagatgctgcttctcagagctgctgtccaacctgcactcgcgtgggaaccagaagacactcctggaggagtcggcagagcagggagaccaaggagttcatcttagagctgctgtccaacctgcactcgcgtgggaacgagaagacactcgtggaggcgtcggcagagcaggcagactaaggagttcatcttctcagaactgctatccaacctgtactcgcgtgggaacgagaagacactcctggaggcgtcggcagagcaggcagaccaaggagttcatcttctcagagctgctgtccaacctgcactcgcgtgggaacgagaagacactcgtggaggagtcggcagaggaggcacagcggcgtgacgagactcgcgtgggaagaagaagacactcctggaggagtcggcagagcaggcagaacaaggagttcatcttctcggagctgctgtccaacctgtactcgcgtgggaacgagaagacactcctggaggagtcagcagagcaggcagaccaaggagttcatcttctcagagctgctgtccaacctgcactcgccatcatcggcgacatcaacatgaacaccatcagcacagctacgggggcccgtggacgactcctagctgcagccctcacctttgtgacctgcaacccccaacaagctgaggctcccctcttagacttataagtctatagccagtggcatccagctgcctgtcctccctacctcccccagggtcccttcagagggtcctgggctttctgactgcccaaaaggggctccggcgatcactccagccatccatcccttttagcttcatcatcctggttcaagcagtgttccttctctatcaggactggtggctgttgcgttgggttcccaaaagcaagagatggccccgggccagtgggttcaaagacagggtgaccagagaagagggacactggagggggctgagcattgctctgaacggtgggtgcaccgccctgggtgccctgaaagaggccagcgtgtggggggtggggagggccgccagagcccccaggcactaactgtggagcattgctctgaacggtggctgcaccgccctgggtgccctgaaagatgccagcgtgtgtggggtggggagggccgctgcaacccccaggcactaactgtgaagctctgcctccctccttcttcctctcctttcctttccagccccactttcccaggagcctcgccatacccgcacctgtgccctccccacccctgccctcccacagctgctgtggcatgcctgtgctctgcacttgcctcatcagctctctgctcacttttctctctcctgcttctctctgcttgcttttctctctcctgcttctctctgctttctctccaactgccagctgattgggtccggcaagaccatcccatcctcagagccccagcccctccttcaacgtctaaacagatccctcctcttctcagtgacctccctttccaagcctgcctgagcggctgttctgtgacttga

SEQ ID NO: 470044 - DNA, 804 bp, Homo sapiens
agcgcttcctctgcaggctcatggagtatgttccgggctgtgagctcttcagctacctgcgcaaccgggggctcttctactctgcagagatcatctgtgccatcctgcactctaaggagatcatctacagggacttgaagccggagaacatcctgctggatagggacggacacatcaagctcacggactttgggttcgccaagaagctggtagacaggacttggaccctctgcggaatacccgagtacctggcccccgaagtcattcagagcgagggtcacggaagggctgtggactggtgggccctcagcatcctgatattcgagatgctctcgggatttcctccatttgtgtgtgtgtgtgtgtgtgtgtgtgtgtgtgtgtgtgtgtgtgacaacatgtttggcatttatcagaaaattcttgcagacaagatagatttccccagacatttggatttccatgtgaaagatctcattaagaaactgctcgtggttgacagaacaaggtggttaggaaatatgaagaacggggcgaatgatgtgaaacgccatcggtggttccgctctgtggactgggaagctgttcctcagagaaaactgaagcctcccatcgtgcccaagatagcccgcgaaggcgacacctccaacttcggaacttaccccgagaatgactgggacacagccgcgacccatcggccagcttgagaaataaagggacagagtacaaaagagagaaattttaaagctgagcgtccgggggagacatcacatgtcggttttactcatgagggaattagtgtgt

SEQ ID NO: 470045 - DNA, 743 bp, Homo sapiens
taggcttcacatttgagcggggtgaaaggcacccggtacccgctttgtaatgcacccctactgctcccgacaacacctctccactgtcatgcttaattgtctacatttcatttgtcagaggcacagaggcgagagagcagctcatggcaagggcccagaagctgcccactgttgtgtctggaatctagtgggaaagggcaaaaggaagtcctggagcagcaggttgcgagcaggccattgtgccaaggagtctggtcttgatcctataggtgacaattggatgaagatggaagcctcatgtcaggaaaccaattctgcagtggtctcctggcagaagatggttttaaaaatgcatgagcccattactgaaaaacagaacgtcttcgaagagaaaggcagaccgggaagccctgatgtgggcggtactgctgatgtttggtttgtgagagatacaggaatcaacttgttgaagctctctacttgtcagagcacctttaaataatccaagcccagagttgtttcatcttcaggcaagagaaagtgaaaatggcttcaaaggtacaatatctcaaataaacactataaaatgcatccacacttgcctttgaaattgtagtggttcaagcacacagagacaagcaacaatgtttatttcctgatactaatgagcttgtctgtctttgtctatgatgattgttcttagagacaaacaaataaaaatgcgaattatatctgactgttct

SEQ ID NO: 470046 - DNA, 567 bp, Homo sapiens
aaaaccagacaagccttacaagttagttcaggatctatgccttatcaaccacattgttttgcctatccaccccatggtgtcaaacccatatactctcctatcctcaatacctcactccataatccattattgtgttctggatctcaaacatgctttctttactattcctttgcacccttcatcccagcctcttttcactttcacttggactgaccctgacacccatcaggctcagcaaattacctgggctgtactgccccaaagcttcacagacagcccccattactttagtcaagcccaaatttcttccttacctgttacctatcttagcataattctcataaagacacacgtgctctccctgccgatagtgttcttagtattcagtgaaacctttatatcccttacagtcctcagtcttcaggaaagaattcaggcctgtccttggaatgctacaagtttttcaattcatacaaaactgtatccaggccatcaccaataattctaaatgacaaatgtttcttctaacaaccgcacaatatcaccccttaccacaaaatcttcctt

SEQ ID NO: 470047 - DNA, 562 bp, Homo sapiens
tcagagacagctcgaggagagggcatattccatagttcagagacagcataccgggtatggggctcttcagcccagctttggacattggtgtgcatcaactgtgggcattgggcctagagaaggctttggtgtcagagctgtggtgtagtcactctgagtgtccttgtctgctacagcagatcaaaatgcacaaaggcggcagtacagagcagaaatggctttgtacatttgaattagcgatgagaataactgtggagctgcagcatgttccagaggccagggtgtggacaagagatgagatgctggaactcatgaaagcccatgtgatgatgtggtgccctcctagttggattttagaggaagccacaggaagctctaggaaatcaagaatgaggggttctagtgcatttgtgagttgcctaacaaggaattccgcctctctactcttggctggtttgctcaccctggtggagcccaaggctcctttgcacgtggaagcacttcaagaaatggctgacctggctgtcaaggaagcactgtcctcttggtaatccagtggggg

SEQ ID NO: 470048 - DNA, 937 bp, Homo sapiens
atttgtcaactatcactgctaacaaagccaatggttggggcaaatcactccgtggtgtcagagtttgtgttcctgggactcaccaattcctgggagatccgacttctcctccttgtgttctcctccatgttttacatggccagtatgatgggaaactctctcattttgctcactgtgacttctgaccctcacttgcactcccccatgtattttctgttagccaacctctccttcattgacctgggtgtttcctctgtcacttctcccaaaatgatttatgacctgttcagaaagcacgaagtcatctcctttggaggctgcatcgctcaaatcttcttcatccacgtcattggcggtgtggagatggtgctgctcatagccatggcctttgacagatatgtggccatatgtaagcccctccagtacctgaccattatgagcccaagaatgtgcatgttcttcttagtggctgcctgggtgaccggccttatccactctgtagttcaattggtttttgtagtaaacttgcccttctgtggtcctaatgtatcggacagcttttactgtgaccttcctcggttcatcaaacttgcctgcacagacagctaccgactggagttcatggttacagccaacagtggattcatctctctgggctccttcttcatactgatcatttcctatgtggtcatcattctcactgttctgaaacactcttcagctggtttatccaaggctctgtccaccctttcagctcacgtcagtgtggtagttttgttctttggtcctttgatttttgtctatacgtggccatctccctccacacacctggataagtttctggccatctttgatgcagttctcactcctgttttaaatcctatcatctacacattcaggaattgagaaatgaaggtggcaatgagaaaagtatgcc

SEQ ID NO: 470049 - DNA, 566 bp, Homo sapiens
caaggtttgccaaagacacctgcagatctggatctccacctgaaaacgtccacccgaagacactcctgtgtgtccctgaggcgcaggcagggataacactgaaagggaagctgtgttggtcagctgctttccacttttgtcatggctccaattttgtcctcatcttgcaacagtttaggtgaactcaccagcacccacatgcccacctgcacatataagcacagcggagccagctccctctcctgtgactccacatccacagactctggctccaaaggggagtccccgtttgcacagccaatagtcctgtgggatggccaggtctggaaactctatcacaggcactctcatgggacaggaagactcagagaacatgacagctgccgccagttgcccggaaggcagcccatgatggtggatgagagagattctgtagcactccagaaggcaaagtataggccagatggccagcgttcagaacccacccagccccgtatacagtgtgagagcaggcagtgcggtgttctcacaccgttagccactggggcatcctcgttcgagtgatg

SEQ ID NO: 470050 - DNA, 459 bp, Homo sapiens
tgcagcaaacctgtcaagggatggagacatgtgcgtggtggtcctttcatcttccagatggacggcctatgaactctcagaggcgtctcctaagctgcgttgctccattacctttgtacaacataagaggttaaaaaacaattgtaaaaatggcttaaaaaagaagggctgtattttcagccattttttggtgttgacacattccaggccctcagttgggacctctggggaacgatgcagaaaggcaggggaaccagagtccagtggagcctctgcaagactgcagaagcagatgctggtgccacgcttgtacagccagcagaactgtgaaccaaataaacctcttttctttataaattacccagtctcagatattcctttacagcaatacaaacagactaatacatcaggcataccaagtaatagaaagaagcaagaaaacagacattagaaatggaa

SEQ ID NO: 470051 - DNA, 746 bp, Homo sapiens
ctagcacgttggattttgccagacttattatattggccatttccatggttcgtaagaaactattaaacaagaattaccttaatgagaacagcattgattacagcaaatatagcagtggcctttgcagggtggcctaccacacactgccatcttctcatctttgccctatggtcagtgagggtcagacccagagcacagccaagagaggggatcagagacaagtgtgctgagtgggcagcaggaagagattcagttcaccctctctaccagctctgcctccttcatttgggccgggctcctaacttctgcagccctggaaggccgtcgttctcacatcctccatctcctcttctttggttggccaagcatactatacactggctcctctactctctggcaacccataggctggatttcagagagcaaaaagcatggctttttgcaacaccagttggtctcacaagtaggcatgggaggcctggcattagtatttttttaaaaagaaggtttttagggcaaccccagtctgatcttttcccaagtagcactttggaataataaccagggcatctgcccaactgaaaggaacatagctaattattgtgaggctttaaaaacatcaagttaataaattaaatgaaaaagtgaaaaaaatatctagagaataaaccatctagaaaatactgtattcgaagcaatatttgaaaatgacctggctttgttcagtgtgattcaaagggatcatt

SEQ ID NO: 470052 - DNA, 997 bp, Homo sapiens
tcgggttacgtgcgcggcaggtccgcagagggtggggtagtctgtgcctgctcagcgctaagtcacatcagcaggatgtcttcaggacagtgctcagctagcagccagggtggcccctttctctgacttttctgtctcagcggctcttctagcacgcttgagagggcggcagagccccagcatttggcctttgctctgacttcatgccacggagagccaggtcttcttcctgaagcgtgcaaccccagactgacccttcaggagctcccagaccctatcacttgccaccggtttaccccaagccacatcttcccagacctggaataggagtttgtcccagataagtaatcaccatgttttctacaatcatagttgtgaggacccatgaggagcccctgccctcagaggggagccccacagtagctagggatgccggcactgagcagtcagtccctagcccgcatcctttggagagtttggattacagtggaaatctccttgggaacattggtactataagtccccgacagggacagctggccaagagcgagcccttccaaagagggcgacttcagcactgggaggaaggccgggaatggagtgggagctggcagggggtagggaaatggttcctcattatctccctggtccttttggtcctggccggctgccttccatggggactggggcatagtgggctgggcactggcatggggccaatcactgcgggagctggacacttccgggaggagctgcgaggagcctcagaggaagaaatgggagcaaactgatgtcaaaggtggggttgggagaaccaaagattttataagatgcaggacagggtgattgttttcctcttggctctagttttaagaggtttctttagatcagtgctttctgaagatgcattggatttgctatttccagccttttgagtgtgaaatatgtgtgagaagcctctttcatctaaatcatgaatttcagagtcccactaggc

SEQ ID NO: 470053 - DNA, 693 bp, Homo sapiens
tttattctaaacaacatttctgaaagcagcatatgggcacagcacactgtgctgaggtaccagtgtgggcgggctggagacaggggagtgacagacctggggcagaggcagacaagcctgaagaccacaggggcggtgaaatgtgggcagtctgctgctgtgaagtcttctgctggcagcccctaccatcctggttacctacctgggtcttccatcgtggctttgcgagcactgtgcctgctgtggtgggctggaccccacgggccaccttagatggtgccttctcaacagaggggctctcttccatgtctccgggccctccaggtctggtgtacaacaggtgctgaagatagaaaccaaccatacaccattagtgtagtggaagagagaaaagttacattgagggaagaaccattaaataaaaagaaaccaggacttgatcgtttgaaaaactctcagtccttccaggttgtaaacgacactaaaattgagagatttattgtcagaaaagcatgttctagagaaaaggctgacgagtggccctgcatccaacaggactgggtccttataccaaggggaagtgtggacacagagaccgatgtgcacagaggggtgatgattaaggccaccaggagtgcctcacctacaagccaggggcaaaagggagaggcccggggctaactctccctcaca

SEQ ID NO: 470054 - DNA, 682 bp, Homo sapiens
tccggggtcagctgtgcctcttttcttagtttctgtaaatagaattgtgccagaatacctaaatctgcatgaacagaccattgatagaaaaaatggacattaaaggtgctggtgttaagagctcagaaggaagtaaagaatatatattggaaattggaggagagatcttcttgcttctcactttttgggttcggatttccgttaaaagctgtaacactgggagagtctgcggcttcactcctaaatcaggaagaccacgaactcctcgagagaagcgaactctggacgtgacacttttaggagctatggatgcaaaaggacaatgcgttgacactccaagtcgacctggtggtggtcactgtgccctggcaggttttattactgaacgtggaatgagcccagcaaacctgaccacttggaaagccgccttaaggctggcatataaggaagctagatggaaacatgttagcagtggacaagacaccacagcagccgaggaatttgccagtgaaatcatctgggcctggtgatttcctttttaagagccttttaattacaaatttataggtttttcaaatttctatttcatgttgtttgatttttgggtaatttttgcgtttcaaagaactgactcacttccttaaagttgttgaatttatgaatgaaggttgttcatggcatt

SEQ ID NO: 470055 - DNA, 918 bp, Homo sapiens
tccatctctcgctgctctttctctcatgcttttggtttgggaagtcgggaagaagagtgagacggctcagtccaagctgctgcctgctttttgtggacacacaatgctggcatgttgtggggtcacttgtctgtgtcctgaggagccacggctgcaaggtgctccaggctcatttgtacatttcctgctccaggcctatggtcagccattttccaaggagccctggttccttttactggagaacgcgattagaaaccaaggtctgggcactagttatgctcattcctacttaggtgtcattgactctgagccttctcagctgacagaacaagggaatgctgtcaaccaaggtgagcttcttatgcaatgtctcatgtctgtgcccaagtcagaacgtactgccttcatcagaggacaatggggacctgctcgtgtaaatcccattgttggggatcaaggaggggttcctcagtgtcgagagcagctccagggaaaccacatcccacttaagtcagaggagagttggtgagggctgcagagcaagtgatgacaagcactttccacagtcagtccccgtccagagagatggctggctagaatcataatgctgattcaaggaggatatttagattttctcacttacttgatggaggactgaggtgaggactatgaatggtcagaatgtcacttattccatactaaagggcacattactctttttggatcagttaagcacccattgtagcttattctgtgaacatttaccctcctcgcttgattgaattctgcccttccatgcgctgggtcactactctgtggtctcactctggtaatgaagggggaatgcaacggaaactgccttttgggctctgtcatgcatctcatctcccttgggaaaatctgactttccttgattac

SEQ ID NO: 470056 - DNA, 1203 bp, Homo sapiens
ggagccagcagtggcacacaattctgctcctctttctcctcaagcctctcttctgcagggctgctgtggtttgctggaggtccactccagaccctattcacttgggtccttcccgcatctggagatgtcaccagtggaggctgcagaacagcaaaggtggctgcctgctccttcctctgggatctctgttccagagaggtgccggcctgatgccagtgggaatgctcctgtatatggtgtccggaaacccctggctcacccagtcaggaggcacgggatccgggactcgcttaaagaagcactctggctgtctcttggagagggggtgcactgtgctggagggaattccactcgtccggactggctgggttcctcagagccagcagggggaaaaactaagtctgctggtccttggagaccacggccacccctttccccaggagctcagtcccagggaggtcaaagttctgtccctaaacccctggttggagttgctgaaattcccgcatggaggccccgcccagtgaggagggatgggtcagggtcctgcctaaagaggcactctggccatgatctgccacagccgctgtgctggctgtggggaattcctcccgggtccataccatccagtctccctggtgctggcaggggaaaaacagctgactggagctgcagtgatggcagccgcccctccccaggtagctcagtgaccttaggcagcagcagatgcagaagcggtggtgatggccgcccctccccgggaagctcagtggtcttaggcagcagcagatgcagaaggagtgatggtggggccattgcaccaccgtgcttttcctcgctctctgtgggtcgcaccaactgcctagtcattcctggtgatagaatctggatacctcggttgccggtgcaggatttgcacactgtttttgttcttttccatgggaacctcgcatcgcagctgtttctagagccataagataaaaaaattatatattttttactttataaaacttaaagctacagtaggcaaaaaacaagataagtaaaattttaaagattaaacaacggagagaaatagtcgcaactcatctcagagagcgctccatccttagtgtgtaaagatcccctagaaatcaataagatgacaaaaatcccatgcggaattgatcaaagtatagacaattgaaggaaatataaatgacc

SEQ ID NO: 470057 - DNA, 555 bp, Homo sapiens
gaggtaaatgaggtaacaaataaagtttgtgagaggccattgttttgactatcctcctgcattaggccccctgcagaccagaccaaaccagaatggagtccactcatgctaagcgccacacaattaaactgaatttagaaatgggccagttttccaaaaaacaggagagtcccagcaacccatcaaaagactcccagtcaacaggagcaagcctgacaaggaatttcctctgctttaacccataccaggaaagccactttaaaatgaaaaatctgctttttcttccttgtttctgctttcttcgatcttttctgtctatgaagcccacccgctgtgctcagcttcgagaacccctttctgtttcatacaggagttgctgcctggtccatgaaaccactcataaaagccaattagatcttcaaagtcaatttgttgaaatgttatttgacaccaactacagtgactctagggaactttcccacatcctcatctatctggaacatgagaaagatgccagctttcactgatgttattcaacatagtactggaagtctt

SEQ ID NO: 470058 - DNA, 1704 bp, Homo sapiens
ttgtcaaagatcagttggctaatttagcatcggggtccattccaagatggccgaataggaacagctccaatctgcagctcccagcatgatcaacacagaagatgggtgatttctgcatttccaactgaggtatctggttcatctcattgggactggttggacagagggtgcagcccacagaaggtgatccaaagcagggaggtgcgttacctcacccgggaagcgcaaggggtcgggggatttccctttcctagccaagggaagccgtgacagactgtacctggaaaaatgggacactcctgcccaaatactgcgcttttcctatggtcttagcaactggcagactaggagattctctcctgtgcctgactccacaggtcccatgcccgaggagcctcgctcactgctagcacagcagtctgagattgacttgtgaggcagcagcctgacagggagaggggcatccaccatggctgaggcttgagtaggtaaacaaagtagccaggaagctcgaactgggtggagcccaccacagctcaacaaggcctactgcctctatagactccacctctgtgggcagggcagctgaacaaaaggcagcagaaacttctgcagacttaaacgtccctgtctgacagctctgaagacagcaatggttcccccagcacagcgtttgagctctgagaatggacagactgcctcttcaagtgggtccctgacccctgtgtggcctaactgggagacacctcccagtaggggctgacagacacctcatatgggtgggtgcccctctgagatgaagctcccagaggaaggatcaggcagcaatatttgctgttctgcaatatttgctcttctgcagcctccgctggtgatacccgagcaaacagtgtctggagttgacctccagcaaactccaacagacctgcagctgagtgacctgacggttagaaggaaaactaacaaacagaaaggaatagcatcaacatcaagaaaaaggacatccacaccaaaaccccatctgtaggtcaccaatatcaaagaccaaagataaacaaaaccacaaagatggggagaaaccagagcagaaaacctgaaaattctaaaaatcagagtgcctcttctccaaaggatcacagtcccttgccagcaacaggacaaagctggatagagaatgactgacaagttgtcagaagcagacttcagaaggtcagtaataacaaacttctccaagctaaaggagcatgttctaacccatcacaaggaagctaaaaaccttgaaaaaggggtagacgaatggctaactagaataaacagcgtagggaataacttaaatgacctgatggagctgaaaaccatggtacgagaagttcgtgatgcatgcacaagcttcaatagccaatttgatcaagtggaagaaaggatatcagtgattgaagatcaaattaatgaaataaagcgaaacgacaagtttagagaaaaaagagtaaaaggaaacaaagcctccaagaaatatgggaacaagcaaatgttgagagattttgtcaccaccaggcctgccttacaagagctcctgaaggaagcactaaacatggaaaggaacaaccggtaccagccactgcaaaaacatgccaaaccgtaaagaccatggatgctatgaagaaactgcaacaattaaagggcaaaataaccagctgacatcat

SEQ ID NO: 470059 - DNA, 480 bp, Homo sapiens
gctgtgaaaccaacatgcctgaaacatgttcctttcttgccattttgtgggtgaagagaaggagagaagagttgctgccttttggaaagcccagactggggagctcccagagccagggctgtggcttcctctttggggtctttggttcttggtgtctccaagcttccaggcaccaccacattccccagtgccagccagggaagctgcttacactgagcctgatccagctgcagtctcgtagaaagctggcacccacgccagcacctggatctgcctgctccatggcagcagccagcatgtctaactgcacagtggccggaccccatgctcgctcacacaccccttgccactccacacctgactcacagtctcccttggaggcttgggatccaggccggtacctgaagtgaattattattgcacatacctgggtattcttctgataggctagtgaggcttggctgataactaaaatggggg

SEQ ID NO: 470060 - DNA, 815 bp, Homo sapiens
acttgcatcttcagtaaggtgacatgctatgtcttcgagtagaggtggtgatcctgtttgcagacagctcagatgaacaggaaatgactgcccttcatatggcagaagacacaattgcctaccgcactaaaatgaaaaggttttatgcagggatcagaagggctcctctgctcagagctccaccccatctaagctggcttaatgttaagcttgttaaagagagggtctggagtgagcattcaaggccaaacagaaggaaggagttacccttcctgttcatggcctcggagccagcagagcagtgtgaaggaagctgggcactgctcagctcagtatcttgtgtgcacaagctctgccagtctgcaccctccagcaaatgtcttcactatccacggaccattgctatggaccagctcccatctgcagcctctgtcaaaatgaaagttcaaagtgaccaaaatacatcagaagctccccagaaagaaagaaattatatcctacacaaatacaatggagatttaaacgttctggagaatgagctgatggcttctgcctttattgtgtcatacagtaatggaccttgaccagcagaagatttgataagtataaaatattactgctcgatgctaatttggtccctttttaatgactgataatccttgtcgatttagtgtgattgtcacaatccagtactgtttcccaccccagctgtgactgtaacaggagccattaagtgtgtctgcataataaaattagtcagggaagctgtgtacgttctttccaggcttttgaatttccattatagtggtgaggct

SEQ ID NO: 470061 - DNA, 623 bp, Homo sapiens
ataacaaaagactgcaataagggctatggctatcagccagaaaccgtggacaaagaccggaagtagccattttaagagggtctggggaaacatccaagtaacagaagctgcaaagttgaagatgatcagtggagcatgtatggttatgtggagggacagagaaaggccagtgtggctgagtgtaaatggggaaggacagagaggagggcaaagagtggggcaggctgttacttggggcacagatatatgcgtttctgttgagtatatatctagaagtggaaataccgggtcgaagggtgtagcagacacgaactctaaccatatactcttggcctttacctcaacggtccggaagtggcttgctgaaaacacaggcatctctctgctgagagacttttatttagccattgttgaatatttggcccacacgagcccagaggaatactgttacaggtccaagttgtttcactcatagtttattttctttctattgatcttgaaaatgacatctaatacacaggtatgctttgtttaagcatttcttattttctcttctttcacagccctcttctttgtcttgaaatgttggaaaacagaacctaagtaattattacgtttaagtt

SEQ ID NO: 470062 - DNA, 540 bp, Homo sapiens
ggttttgaagtgggtgtaaattaatcccgaggagatagaaagtctgagtaaagaatccatacattctccctgaggactgatggagtttcactcttgttgcccaggctggagtgcaatggtgcgatctcggctcactgctcgctgcaacctccgcctcccgggttcaaacgattctcctgcctcagcctcccaagtagctgggattataggcatgagccaccatgcccggctaattttttgtattttagtgcagacagggtctgtcaccaaagcagtagaatgtgatagttcaattctcagcatctacagcagtgctgtccaacagatgtataacattagacacatagataattttgaaagttctcatagccacattttaaaaagtaaatatattattgaattaaggtcttactctttaacccacgatagagtgcagtggtgcaatcatggcttacggcagccttgaactctggggtcaagcaatcctcctgcctcacactctccagtagctggaactacaggtcagatttttatggaaat

SEQ ID NO: 470063 - DNA, 596 bp, Homo sapiens
ttctgtgtgttctggggtgccgatgagcagaagctggctgctctggagaaaattaggtctggagggcactcagtttccagtagggaagagaggaaagcttggttttccaaggggcgatggtattccacctagagggaaactggttttctctgtgccaaatagcagggcttcttatgtgaaggtcaaaaacacatttggcattttgaatttgtgtgtgtggatgcaaaatatgtgtgaggaaaagtgcataaataccccaacagctgccaccatcaggccaagaaataggagactgccagccccccggtgtatccttcccaaccacaaatccggcgtcccccagagacctattcaatgcttactattcaatgcctgctgcttactcttccggcattgttcaaggaatacagcaatgaacaaaacagaaaaaaattccagctcttaggtggcttataaatctggtgggagtacacaaacagtaaccaagataaataaataaaatataaatgtcagatggtagtaagtgctatggagaaacataaatcaggtgactagttcttgcatcaaagttacgcctgaagaccagttacctgatc

SEQ ID NO: 470064 - DNA, 1024 bp, Homo sapiens
ctgacagcagtctgctggttctcttggctaactcagccctggtaataccttactggtcatggaactgtggtgtggaagggacaggaactgccccagacctctcatgattttaaagttgttccctgaactcccaccctcaacagctgctggttgtgccgagctaaacatgttaccctatgggaagagtgtgtcttcctctgtaacagtgcctaccgctggaggtcatcgtcaagcccaagaacacaacacatatctcatttccaaactcaattcttccctgaatgacatggggggactttgtaaacaggttgagtttgaaaccttttctgctacttcccttcatgaggaactatctatagattaccgaagagtagagctcctagtgaacacttccttccctggagtaagtcctgggaagcacaaacgtttcagtgccgaaagacgtaaagacaggcacaaagaggaacatgggatgcttgaggatcatccaaatttcaacctacaccattatgacagtgactatcgtggactagctgcctgagttacaacactgttcacgattttgccattaacaagaaattctaaacctctatatctcagggggtcacgtctccttcggtgggaaacgagcaagattcatttcctttccccattaccaaatggggaaatttctgatggaaacaaaagacatctaagatatgttttttcaacttacattgggaattatattttttactttgttttttatgtgtacatagtaggcgtatgtatttatggggtatgtaagatattttgttacaggcatacaatgcataatcatatcagggtaagtggggtatccgtcacctcaagcatttatcatttattgtgttataaacattctaattatacttttggttactttaacatgtacgataagttattgttgactgtaatcaccctgttgtgctatcaaatgctagatcttattccttctatctaactatgtttttatatccattaaccatcctcaccttctcccttc

SEQ ID NO: 470065 - DNA, 918 bp, Homo sapiens
agggggtttaaaatccactgattcagagtgactcgcagagacaatgaatagtacagacaatggaaaaggggtgtcagaaaagaagaaggaggaggaggaggaggagaagaagcagcagcagaagcgggagaaggagaagcagaagcagaagaagcagaatcagaagaagcagaagaagaagaagaagaagaagaagcaggagcagcagcagaaaaagcagaaaaagaattcccactataaaacagcagatatctcatctctggggcttgcagtggccactgtgggggatggggatgtggttctcaggccaatggagttatgctcctatggggattgtggctgcctctgctgcatcacacaggttgccagggaagtgatggaaagccagcagcgacaggcctcaatcaaagcccacacagacagaaaggccagtctcactcccactgtgttctccaacagcactgagtttatatccaggcagctggtgagcaggcctgagatcttgacccaggcttcaagcctcctcattgagaaagcaagcacggctttcaggcttcgcccttccccaccactgcttctgcgcttgtatctgcacttcccattcagcccccaacttccagattctgccctggaaaattcacacatggtcaaaattattacaaatttcagctggaagtttccttctctctgtggtctttccccagttccactgacaaccctccccaagggtcccagtgagataaagtcagaaatggattccctgggcttccttaggggctgggagtgccaaaggcctgagagcccctggcaaaccactggtgtaagtccaagagtccaaaagctgaagaatttggagtctgatgttcaaggtcacggagcatccagcatggcagaaaaatgaaggccagaagactcaac

SEQ ID NO: 470066 - DNA, 987 bp, Homo sapiens
tggcttccagccaaagcactaatcatgatcgcctctgaagtggttccaatcgtctggatgaggcggctcctgctcttatgttgtttaattcccacgtgttgtgggaggggcctagagggaggtagtcgaatcatgcgggccagtctttccagtgctattctcatgatagtgaataagtctcacgagatccgatgggtttatcaggggtttccgcttttcctttgctctcattttctcttgccactgccatgtaagaagtgcctttcacctcccgccatggatctgagtcctcccaagccatgtggaactcttggttctgtgggtgtcctgattgatggtgtcctagctggactactggactttcctagatttgacttcagcaccaccttaaggccacactgtcctcgacacttttttaccttaggtttttgggaacaggtggtgtcggtcacataaacaaattcttttgtggtgatttctgagattttggtgcacccatcacctgagcagtatagtgtataagcattcttgaggaagttttaaagaaagataatttattaattccttgttagttatatttgaaaatgttttctccttatctttatcttatgtttttatctcctggtatttttttgctatgcaaaatttaaaatttagtatagtcaaatttatggatcactttttcttaataatttctgcttgttgaatcttgtttaagaaatgtttctataccccaaggccatgttggatgttaattatagtgtgaggtatatggaggctttttgtactatctttgtaatttttctgtaaatctaaaacttttaaaatgaaaaagtttatttaaaaattactgtgattagtatgttaaagaacagatattaaaattgaaaattttaccagaaaatgagaatttataaaacataattaagtggaaattataaaaataaaaatatagtaagtgaaattaaaagcttcatatatggattt

SEQ ID NO: 470067 - DNA, 836 bp, Homo sapiens
agaagccatctcacagcaggaaactcaacctggtagaggaagagggctgatgcacggtgttaggcactgatgctgaggaccactcgagtacctggtggaccgagtctgaagagagctggcttcttccttatgcaagaccccagcctcttccactggcccactctgtccactttcattattattgacagggagaccagacccttgaaaaccctcgtggatgtgactttggaaaacagcaacattaaggatcaaatcagaaatctgcagcagacgtatgaagcatccatggacaagctgagggaaaagcagaggcagttggaggtggaatcgtcccaagaagccaatgctgaggtgatgcgagagatgaccaagaagctgtacagccagtatgaggagaagctgcaggaagaacagaggaagcacagtgctgagaaggaggctcttttggaagaaaccaatagttttctgaaagcgattgaagaagccaataaaaagatgcaagcagcagagatcagcctagaggagaaagaccagaggatcggggagctggacaggctgattgagcgcatggaaaaggtttttctgcagcgtaaagaagcaaggtgagccggcagcatagcagggtggtctgggggagatgccgtcatacagagaatccacaggtagtggtcatgaacataggctttagaatcagacagtctggggatttgaatcttgtgtctctttgtagttgtttgcacttacttggtttttcctaactcagtctccacttctgtaaaatgctgataatggtacttcttattcttagggcttttgtgagcaataaatgagaaaaa

SEQ ID NO: 470068 - DNA, 752 bp, Homo sapiens
tgctgcgacgtgccacccacatcctcctcacccagctgcagggagtgatggaggatgccgatggcccacaggaattgccctcgactggagtaagctgcctccccaatcttaggtcccttcctcagggcaagcctgaatccagggactggttaacagtcctgccatcctcactccaggacagggagtctcctaagagtactccccaaaaaccctactgcacacaagtccccacctcagagtctgtgttccagggaacacaagcaaagacaggcatggagacacatagcacattctggaaagtcgaaatcatcagatccagctgcttccctccaatcgagatgaagataaatgcggaagccacagaagtcactctcagggcagctcaccctctttctgcacccgttcagagttaatgcggccataggctggggaaaattgcttctcctaatcccactcctgggttagttgggcccctcctttctctgaatagagggtcaccagttctgtagactccagaggactgctgactgggcagaagttctcagcttttgattcctcttttgaaaagagtccatctttttttaaaaatcatcttctctcagaaatattaatggaaaccagtgactgtgacttcattttttactttttcctctccactctagatccacttttccattgatttcagtcctacttgtcttcccattttccttctttcccactttctgggctccccactctcctctctcttgcag

SEQ ID NO: 470069 - DNA, 697 bp, Homo sapiens
caagacgcagcctagggcataagacaatatgaggggtgggctcctcccttatacatgtgaatcaaatgttacacgattccttggaatggatttcagctctctactgaatctcaatgatcttcattgccatccagattctgaattctatgtctgtcatttcagccatttcattctggttaagaactattgctggggagctagcgcagtcatttggagcttgggggcagcaggggcaggaaccttggcagtggcaatggtagagggcctttcactcgtctcttgggtctctgccccagagaaacgcagggccactgccaatcagaacaatcagcccaagagaaatgcagagctgcaacggattgaagtgatcaggcagggcctgggaagctgtgctgggggcccagagggaaggcaccagaatgaacaaagggaagacacagaagctaggctgaagcaggaggaagctgggagccctgcatggggctactatgcaccaggactcattcctggccctcagaaactctgagggaacagcgagatacacatatttttattttttcctattaaatttgaaatgtcacgcattcaaattttatcttgagatttcatcttatcacttcttacctataatgtcaagctttcatcagttgacacattattttattcagcctctttttatgtaacagactcaaggcaa

SEQ ID NO: 470070 - DNA, 715 bp, Homo sapiens
gcagaagcatcctaagaagggtgatttgggcatccttgtcatggccctggggacagcatgacagaccacctgtgtacaggctctccttcaacgcccgtagaaaaccacagcagctgcagcaaggccgagtcaggaccctcagctgcaggtctgttggagtttgctggaggtccactccagaccctgtttgcctggatatcagcagcagaggctgcagaacagcgaatattgctgaacagcaaatgttgctgcctgatcgttcctctggaagctttgtctcagaggggtacctggccgtcctcgctgccaccttgcggatggatctcagactgctgtgctagcaatgagcgaggttccatgggcgtgggaccctctgagccaggcgctggatataatctcctggtgtgccatttgctaagactgttggaaaagctcagtattagggtgggagtgactcgattttccaggtgctatccatcaccaattcccttggctaggaaagggaattccttgaccccttgcacttcccgggcccctcttctgcaggtctgctggagtttgctggaggtccactccagaccctctttgcctgagtatcaccagcggagactgcagaacagtaaagattgctgcctgcaccttcctctggaagcttcatcccagaggggtacctgccaggatgccagctggagatctcctgtatgaggtgtctgtc

SEQ ID NO: 470071 - DNA, 1222 bp, Homo sapiens
tatccagcgagggagctgagactatctttcctgacagctggtaatgaggcctccccgcaatattggtggaaatcatatgaggagcctggacttccaactcactcagcagcaaggaaacatacttcccttcctggtggggaggtgtcagaggaggcctggcagagaatcaagactttcgccaacacccaccagtaatgagatcaccctcacgaaggtgtcagtgcagaccacatggagagctagaactctcactcccgtccagcagttacaaaaagtcccctaccttgggtgtcaacagaggccaggtggtggaactgtgagaagagggccaccgtcctacagaccccagaatgttagatccactgacagcttgaaccacgtgcctgcaaaagccacagacacccaacaccagcctgtgaaagccgccaggatgtctgtaccctgcaaagccacagagagattaaactccaggtctgagagccagataacagccctcctcaagataaccagtcaagtttggcactgcaggccctgagccattttggtccaccctgctttgaccccaccccttgtccacatcagctcctgtgaagccaccccagaagaaaaccactattcgttcacattggctgattgatgctccatacgtccaaaccttccagtcctcaagaaacaagtatggctgagttctgggtaaaagtggagaacatgaccctctcctcactctgtgccatgttttatataagaaataaattaaaagtatataaaaacacatgtgcatatgtttacatatatgtatatatacatatattaatgttatataaatacaatatatatctcatttttacgaaaagaaactaacaaaaataagggtaagtttggaagagatagaaatgagaatatttctgactatatttttatacggtttttacttttgaaacatgtaaatgttttacatattcaaaaaaataaaattaaaaaagaaaaatgcactcccttaaacaaaatacaagtagaaacaaatgatccaaattatatttcagtttgataaaatatccacccagaggaaatagttactttgaataacatataaatgcaatcagtaggtttattattgctagtagaaatactggaattgtaattttaaaactgttttaaatacattttaggtaaagaaaataagtgtgtattaatgttattagaaaccgagattttcaacatt

SEQ ID NO: 470072 - DNA, 2421 bp, Homo sapiens
aaaatcaaggtgccagcggatttggtgtctagcagctcggataacctactccttgctagaaaaccaggcatgggtccggcagaggataccgaggatctgccactgaataccattcctaatgctggtatggactcaagtgctgacatggacccagtctgcaggggagagactggaaagtcttatcaccttgggacactgctccccacattctggctgctccagctccagccatggctcaaagggtctcaggtacagcttaggccatacctccacagggtgcaagccataagccttggcagcttccatgtggtggaacattcaggaacaggagatgaggactcatgggagattataatagaggaactggtgaactccaggcctcaaggaatggggaaatttcttgaggggcacctattgttttggggtgtggtgtcacatgatgattttcagattattgcattctggaaactgactgaacccacccagaactgtgactcatggctcaactggtcctgtggcccctacccagaggtagactcagtgcatgaggagtgttttccatacccctgtgatttcatccccaatcaaccagcaggacccattccctagcccactgcccaccaaattattcataaaaaccctagcctctgagttcttggagataactgatttgagcgataactccagttcttcagtgtcgcaagccttgcatcaattagactttttctctgctgcaataccacagtctcagtgagctggtttttgtctgtgcagtgtgcaggaattacctgtcaggcaattatagtacctttttatgtggcctttgctactacttgttcccatttgaaaataatttcatacaacacttatttgaatacatttcttatcatttgattaggatttgatgctatataataaaaattatttttaaagtcttccaatttttcattttcctttctggagatcagagaatggacttgatcttacttttcttttgaaagtcttagaatatggctgtccagatcatgtatattcttgacttggctaaattccccttttctagttattgcaaaatccaagtttatgtgcttctcataaggttttaacattttcatctagccaactctttattccccattagagaagtagtttcgcagggtattttctgtagtttcagagagaaatacattttggagagaaagtttagaatttctcaggtgggatttgcccaaatgagatgtcctgattgttgatctcttagatcacatgtataaattgtacttataaggtttatatctgtatcaaagtttaataaatcatatatttttttagtctggcatattgcttgttaatcaaatatcttcttagtctgggatgttgtctgttgcacagttttgcaataattcactcctctcaccccctccattttttctaaagccaaatattctgtgccatcctttcattcttcaatttatatgtatttcttggctacagaagataagtagagtagtatttatagaagctatgtttgtgatgacaaaaattggaaacaatctaattgtccataagggagataatggataactaaattatggtatacccataaaatagtatactatcgggcagtgaataaagcttgtaaatattaagttgaccaaagaaatgaagttgcaggacaatacatatggcatcatatcataaatacggactttaacaacatgctaaataatatatttgtacacatcatttagctcccacttctatccattgatggacaattaggttgattccatatgtaaaccaaaaaatatctgagacagatctaaatcaatttagaagtttattttgccaaggttaagggtgcatttgggtgacaagtctttgcctttatccaaagatgcttttgagggcttcaatatttaaaaggaaaaagcaggctggaggggaaagagggaggatatagtcatattaccaaattaatacattgcaagagaaaatgagcaggtacgggaagagtcaatcatgttttcagctcttgctcagtaaattggcacttttcataaggatcgggggagggagggactaagtataaagggacatgagggaatacttttggtgaaggaaatgttctgtatcttgattgtggtgattgttatgactgttcgtcaaaattagtatacactttaagaaaggaagttatattctggtggatgtacccagaagggacaggagtgtttccaagcagagacattcaagttaaggcctaaaagggaaactaggctaacaccctagaaaatgttctgaaaataaaacaaaaccagtcattttaaacatttacagagtctttatgctaagaaagactaagattttccaacttatgaacttcgctcttacactaactgaagccccattcaacttgat

SEQ ID NO: 470073 - DNA, 714 bp, Homo sapiens
ttgtaagcagcattttcttttttcaatttccccatggctttgtttacactgtgaggggagaactgcctactcaagcctctgtaatggcggacacggggtgtcccccaccaagcttgagcgtcgcaggtcaacttcagactgctgtgctggcagcgagaatttcaagccagtggatcttagtttgctgggctccatgggggcgggaatcttccctagcctttgtcttgaagctggccgtaaagaaattctctggcctaacttgtctgcttccacatttatgcatggttgtcaatcatgcctatcaaacgaagtccatagctatagaaagcccaagaggacaagatcctaaaagcttccagatagctgaacacctgaggttcttggaggagcagcctggaaacaaagtgacctgcaatggcttgagaggttctttctggaaagaagctattaaaaggagcctgaggcagagacacatgtcctcatatcctagagtccattcctcttagtgttactgactttcagggcatgcgtgttgctcactttcacagtcaatgtgaaagggaacacacagacaagccttgatcttcacggaacttaggaaatgcgaagcccttttcacacgcacagctgtgttcccagtgtgtcaatactggattagctatcagcccctactgaacgttatctaaccacaggatgtaaagtaaatttcatttt

SEQ ID NO: 470074 - DNA, 1028 bp, Homo sapiens
aggaaaaccagagacctttgggacaaagagcgaaaactagttcacactcaagatctatctcccgccaaaaatcaccttctggggatgcctgagtcctatacagattcagtccaatgttcacatcccatatccatatttacaatccctatacagaggatagcgctgagttctgtgcttcacagtcgctgtattctccctaccctggtgcccagagatgttctctgcgccaagcagctgcttctaggagtgggcatccctggtcatactccactgaacacattcctgtaccaaacactctgggcactgcagaggctggagtcctacacctccctgcaagctcaagtgtccatgggtgtcatgggatctattgctgccatgattccagaggtccatagcaagaataagtcattccttgactgtgaaattcaccccttgccagtagtcattggggaccacgaaggaatcctgtcaggacactcagctacaagtctgttggagtttgctggaggtcagcttcagtccatgtttgcctgggtgtcatcagcggaggctgcagaacagcaaatattgcagaatggcaaatgttgctccctgatccttcctctggaaggttcatctcagaggggcacctggctgtatgaggtgtcagatggcccctactgggaggtgtctcctaccacactggcagtggattggattgtgggtccattgtggatagatgtggacccatccacagtgcagtcttggaggtggggcctgatgggaggtgattggattattggggcatagccctcatgaattggcttcgtgacatctccttagtgccttgatagtaagcttcctgagtcctcattagaaggtgagcagatgccggtgccatgctttctgtacagcctgcagaactgtgaaccaataaaaccacttttctttataaattacccacccttgaatactgcattgtgtgattcaagagcagtctaacatacttataatgttgccaggatccttagggtgtcacttttgcagcc

SEQ ID NO: 470075 - DNA, 545 bp, Homo sapiens
gcaacaaatgataacaggaatgatggtgacgataaagaagcaatgtagatatctatctcttcaacatactgatttcaattcctttggctatacacccagaagtgggattgctggatcatataatagctccattttcagttttctgagacacttccatactgttttccaaagtgcctgtactaatttacagtaccaccaacagcatgtatgggtccacttttatccacattttcaccggtactttttatattatatctttttgattatagccaatctaatagttaattcggctgtgaatccatctggtcctggactctttttggttggtaagctgttgattattgccacaatttcagatcctgttattggtctattcagagattcatcttattcctggtttagtcttgggagagtggttgggaaggattatgaatcagaactctggcttccctgaaaaaaaaaaaccagcatctaggaagctgatgattagctacacagttttctcttatatgcattcatacctggcaagcaactggaggtgagga

SEQ ID NO: 470076 - DNA, 802 bp, Homo sapiens
gatgataagagatttaggttatttccagtttgaggagttagaatggctataatttttaaaagacaaaaaatatcagatgctggcaaggacagtaagaaacaggatattcctcgtgaagatcagggaccaaccaccaagaatttggatttttggccccaacttattacactgatggttactattattgatgaggataaaactgcctacacacctgtcctgaatcagggatgcaacagtgaacaagatagccctggtccccaccctcatcaagattgcagaggaggactacaagaatgcaaacagttgcaatgtggagtggtgaggacttatgatgacggagtgtctggagaagcacctacagcagacatggggctaggggacaaggcaggcttactatgggaacttcctctaagaaaatgtaactttgataaagacctaaaggatagagtaacaaaaagataaatattaaggtgatagatattctaattaccctaatttgattatatgaatatatcaagttagcacatgtaccctgaaaacatgtacatctattatgtatcaataaaataaacaatttttaaagatatgatttctatatatttatatttaaatacatttctaacaaccacaaaaatgttactcatttgaccatttaataagctaatatttaaatagctactctgtgtcaggcactgtgctaagtacttgggacaataaagacatagaatctctgccctaatagagtccatagagtcagggagataggtatttaacaattattcttgcttatttaagtaagagc

SEQ ID NO: 470077 - DNA, 576 bp, Homo sapiens
atagtgttggaccacacggggttcagaagaagatagaaaaatgttaggaagtttggaacttcctagagacttgcagaattgttttgaggaaaatgctgatagtgacatggacaatgaattccaggctgaggtggcctcatatggcgatgaagaacttgttgagaactggagtaaaggtgactcttgctatgcaaagagactgacggcattttgcccctgcctgagaaatcttagcaaagtgttcaagaggaagcaaagcataaaagttttaaaaattttgcagcttgatgatgagatagaaaaggacaacccattttctggacagaaattcaagccagctgcagaaatttgcataagtaacgaggagctgaatattaatcaccaagacaatgggaaaatgtcttcagggcatgtcagagaccttcacggctactcaaaccatcataggccaggagacctaggaggaaaaaaatggtttcatgggcccggtgcagggacttgcagctctgtgcagtctcagggcttggtgccctgtgtcccaatcatggcttaagggccaatgtacagctcaggcca

SEQ ID NO: 470078 - DNA, 3871 bp, Homo sapiens
cccagcagcactgtcctggaattctatctgtgggagaaccattcagacaagagcaggaatattctggaatgctatgtgagggacagtcattcagacacagctggggtgctctggaatcctacgtgtgggacaaacattcagaaccttgtagcattgttctggaatccaaagtgagggacaaacattcagaccacagcaggagtgttcttttatcctacgtgagggacagagattaataccctcttagcagtgttctgtaatcctatatgaggtacaaactttcagacaacaacagcagtattctggaatcctacgtgagggacaaacattcagaccacaggaggagtgttctggaatcctatgtgaggggcattcagaccacagcagtagttttctggaatcctatgtgggggactaacattcggaccatcgtagcagtgttctataatcttatgtgagggacaaacattcagaccctcgtagcagtgtactggaatcgttcgtgagagacaaacactcataacccaacagcagtgttctgggatcctaagtaagggacaaatattcagaccatagcaagagtgttctggaatcctacgtgatggagaataattcagaacctcgtaggagtgttctcgtatcctatgtaatgggcaaagtttcagaccctcgtacccgtgttctggaatcctaagtaatggacaaacatttagacccacgtagcagtgttctggaatcgtcggtgagggaccaactctcagaacccatcagcagtgttctggaatcctatctgaaggagaaacattcagactacagcaggagtgttctggaatcctatgtgagctacaatcattcagacattcgtagcaatgttgtggaatcctatgtgagggagaaacattcagaccacagcaggagttttctggaatcctatgagagggacaatcattcagtccacagctggggtgttctggaatcctacgtgttggacaaacattcagatcacagccggagtgttctggaatactatgtgagggacattcagaccacagcaggagtcttctggaatcctatgtgagggacaactatcagaccacagcagcagtgttctggaatcctttctgagggacaaactttcagaccctcttagcagtgttctggaatcctataagaaggacaaatctttagacctacgtagcagtgttctggaatcgtacgtgagggacaaacactcagaaaccagcagcaattttatggaatccgctctgaggtagaaacattcagaccagagcagaagtgttctggaatcatatgtgagtgcaaacactcagaattcagcagcagtgttctggaatcctatgtgagagtcaatcattcagacaaaatctggtatgatttggaatcctacgtgtgggacaaacattcagaccctcctagcattgttctggaatcctcagtgagggacaaactttcagacgacagcaggagtgttctggaatcctatgtgaaggaccaagatacagaccatcgtagcagtgttctggaatcctatctgagggagaaacattcagaccacagccggattgttctgtaatcctatgtgaggtaaaatcatttagacccacgtagcatttctctggaatcctaagtgaagaagacacattcagaccacaggaggagtgttctggaatcctatgtgagggacaaactttcagaacacagcagcactgctctggaatcccatgtgaggaacaaacattcagaacctcgtagcagtgttctggaatattatgtgagggacaaacattcagactctcgtagcagagttctggaatctatgtgaaggagaaacattcagaaaagagaaggagtgttctggaatcctatctgagggagaaacattcagaaccttgtagcagtgttctggaatcctatgtgagggtgaaacagaacccagtagcagtgttctggaatctcatttgggggacaatcattcagaccacagatggcgtgttctataatcccatgtgtagcacaagcattcagaccctcgtagcactgttttggagtccaaagtgaggtacatatattcagacaacagcaggagagttctggaatcctatgtgagggacaaaaatttagaccacagcagcagtgttttgaaatcttatgtgagggaccaaaattgagacacatgaagccgtgttctggaatcttatgtgaaggacagatattcagaaccccgtagcagtggtctggaatcctttgtgagggagaaacactcagaacccagatgcagtgttctggaatcctatatgagggacagtcattcagaccacagctagtgtgttctggaatcctgagtgtgggagaaacattcagaccctcgtaacactgttcagaatcttatgtgagggaaaagctttcagaccacagcagcagtgttctggaatcctctgtgagggacaaacattcagaccacagcagcagagttctggaatcctaagacagggacaaatattcagaccacagcaggagagttctgaaatcctatgtgacagacaaacattcatacccaagtagcagtgttggaatcgttcgtgagggacaaacactaagaaaccaacagcagtgttctataatcataagtgagggacaaacattcagacgacagcaggagtgttctggaatcctacgtgatggaaaatagttcagaacctcgtagcagtgttctcgaatcctatgtaatggacaaactttcagaccctcgtagcagtgttctggaatcctaagtaatggacaaacgtagacccacgtagcagtgttctggaatcgtacttgaggaacaaacactcagaacccagcagcagtgttctggaatcctatctgagggagaaacattcagaacagagcaggagtgttctggaatcctatgtgaggaagaatcattcagacattcgtagcagtgttctggaatcctatgtgagggagaaacattcagaccagagcaggagtgttctggaatcctatgtaaggaacaatcattcagaacactgctgggtttttctggaatcctacatgtgggacaaacattcagacaacagcaggagtgttctgggatcctatgtgagggacaaacattcagaccacaacagcaatgttctggaatcctgggtgaggaacaaacattcagaatcctgtagcagtgttctggaatcttatgtgagggacaaacattcagaccacagcaggagggttctggaatcttatgtgaaggacaaacatttagacacacgttgtagtgttgtggaatcatatgtgagggacacccactcagaacccaaaagcagtgttgtggaatcttatgtggtggacaaatatttagactcacgtagcagtgttctggaatcgtacatgaggggcaaactctcagaacacagcagcagtgttctcaaatcctatctgagggagaaacattcagaccagagcacgagtgttctggagtgctacgtgtggtacaatcatttagactctcgtagcagtgttctggaatcctatgtgagggagaaaattccagaccccagcaacattgttctggaatcctatgtgagagagaaacattcagaccacagcaggaatattctggaatcctatgtgagggacaaacatttagacacataccacagcagtaatgttctggaatattacgtgacggacaaatattcagaccacagctggatttttctggaatcctatgtgattccattagacccacgtagaagtgttctggaatcatacgtgagggacaaacactcagaacccaagagcagtgtgcttcaattctaaatgatggacaaatattcagaagacc

SEQ ID NO: 470079 - DNA, 2855 bp, Homo sapiens
gaatgtcagggacagtcattcagaccacagctggggtgtcctggaatcctacgcgtgggacaaacattcagacacttgtagcattgttctggaatcctatgtgagggacaaacattcagaacacagcaggagtgttgttgagtcctacgtgtgggacaaacatgcagactctcgtagcatggttctcgaatcctatgtgagggacaaatatttagacccacctagcagtgttcttgaatcgtaccagcgtctggaatcatatgtgaaggacaaacattcagacccacgtggctgtgttctggaatcgtacaagaaggacaaagactcagaacacaacagcaacgacagtaggagtcctctgaaatccaatgtgaggaacaaacatttataccacagcagaagtgtgctggaatgttatgtgcgggacaaatattcagaaactcaaagcagtgttctcgaatcctatgtgagggagaatcatttcgacccatgtatctgtgttctggaatcctacatgagggaaaaacactcagaacccaacaggaggagtgttctggaatcctatgtgaagtacaaatattcagatgacagcaggagtgttctgaaatcctatgcgaggaacaaacatttagaccacagcagttgtgtttgggaatactatatgagggacaaaccctcacacaatagcacgagtgttctggaatcctatgtgaggttcagtcattcatactctcgtagcagtgttctggaatcttatgtgagggagaaacacgcagaaccctgcagcaatgttctggaatcgtatgtcagggacagtcattcacaccacagctaaggtgttctggaatccaacatgtgggacaaacattcagaccctcgtagcattgttctagaatcctatgtgagggagaaacattcagaaaacagcagaagtgttctggagtcctatgtgcgggacaaactttcagaccctcgtagcagggttctggaatcctatgtgagggccaaatattagacccacatggcagtgttctggattcgtacgtgagggacatatactcagaaccaacagcagtgtcctggaatcctaagtgggggacaaacattcagaccacagcaggattgttctgaaatcctatgtgaggaacaaacattgagaccacagcaggagtgttctggaatcctatatgagggacaaactttcagaagacagcaggattgttctgaaatcctatgtgaggagcaaacatttagactacaaaaggagtgttccagaatcctatgtgagggacaaatatttagaccctcgtagcagtgttccggaatcctatgtgagggacaaatatttagaccctcgtagcagtattctggaatcctatgtgatggacaaacatttagacccacgtagcagtgttctggaatcataagtgagggacaaaccttcagaccacagcatgagtgttgtggaatcctatgtgagggacaaatattcagacgacagcagaagtgtcctgaagtcctatacgaggaacaaacctttgtaccacagccggagggttctggaatcctaagtgaaggacaaacattcggaggacagcaggcatgttctgaaatcctatgtgaggagcaaacatttagaacacaacaggactgttctggaattctatgtgcaggacaaacattcagaccctgataacagtgatatggattcctatgtgaggcataaacttttagacccacgtggaagttttctggaacgtgaggggcaaacactcagaacccaacagcagtgttctggaatcctatgtgagggactaatattcagtccacagcgggaatgttctaaaatcctatgtgacgaacacacattcagaccacagcaggagtgttctggaatcctatgtgagagacaaacattcagatcctggtagcagtgaaatggatccctatgtgaagtacaaacttttagaccgacgtgagagtgttctgtaatcttacgtgagggacaaacactcagaatccaaaagcagtgttctggaatcctatgtgagggacaatcattcagaccacagctggggtgttctagaatcctacttgtgggacaaacattcagaccctggcaacattgttctggaatcctatgtgagggacaaacatttagaaaacagcaggagtgttctggagtcctatgcgtgggacaaacattcagactcttgtagcggtgttctggaatcctatgtgagggacaaacattgagaccctcttacaagtgttctggaatcctatgtgaggtacaattattcagaacctcgtagcagtgttctggaatccaatgtgagggagaaacactcagaacccaccagcagtgttctggaatcctatgtgaggaacaatcattcagaccaatgctggggtgttctgaaatcctaagtgtgggacaaacattcagaccctcgtagcattgttctggaatcctatgtgagggacaaacattcagatgacagcaggagtgttctgaaatagtatgtgaggaacaaacatttagaccacagcaggagtgttcaggaatcctacatgagggacaaacactcagacaatagcaggagtgttctggaatcctatgtgaggtttagaaattcataccctcatagcagtgttctggaatcttatctgagggagaaacactcagaacccagcagcagtgttctggaaacgtatgtcagggacagtcattcagaccacagctggggtgttctggaatcctacgtgtgggacaaatattcagaccctcgtagcaatgttctggcatcctatgtgagggaaaaaccttcagacccacgtaacagtgttctgga

SEQ ID NO: 470080 - DNA, 6820 bp, Homo sapiens
cagcgggagtgttctggaatcctacgtaacggaaaaaggttcagaccctcatcgcagtgttatggagttatatgtgagggagaaacactcagaacccagcagcagtgttctggaatcctatgtgatggacacacatggagaacccagcagcagtgttctggattcctatgtgaaggacaaacattcagtccccggcagcagtgctctggtttcctatgtgagggacaatcattcagacactcaccctagcagcagtgttctggaagcccctgtgagggacaaacattcggacccttgtagcagtgttctggaatcctatgtgagggagaaacactcagaacccatcaccattgttctgaaatcctatgtgagggagaatcattcagaccccagtagcagtgttctggaatcctatcattgttctggaatctatgtgaggaaaatacattcagaacagagaacgagagatctggagtcctatgtgctggacaaacaatcagatcctcgtagcagtgtcatggaatcctatcagtgttctggaatcctaagtgagggcaaacattccgaccccagtagcagtgttcttgaatcctatttgagggacaaacactcacaccacagcaggatggttctggaatcccttgtgaggcatgaacacccagaccacagcagaagtgttctggaatcctgtgagagagtcaactattcagaccacagcagtagagttctggaatcctacatgtgggacaaacattcagacaacagcaggagagttctggaatcctatgtgaggaaaaagcattcagtccacagcaggagtgctctggaatcctatgtgagggacaatcattcagacaacagctggggtgttctggaatcctacgtctgggacaaactttcagagccttgtagcattcgtgtggaatcctatcagtgttatggaatcatacctgagggacaaacactcagaactcaacagcagtattctggaatcctaagtgagttgcaaacattcagactacagcaggagtgttctggaatcctatgtgagggagaaacattcagaacacagcagcagtgttctggaatcctacatcacagaaggattgttctggaatcccatattaggcacaaacaccaagaccacagcaggagtgttctggaatcctatgtgagggtcaaccattcagaccacagcaggagtgttctggaatcctatgtgagggtcaaccattcagaccacagcagtagtgttctgcaatgttctatgagggacaaacattcagaccacagcaggtgtgctctggaatcctatgtgaggaacaaacattcagaccacagcagcagtgttctggattcccatgtgagggagaaacactcagaacctagcagcagtgttctggaatcctatgtgagggacagtaattcagaccacagcttgggtgttctgcaatcctatgtgagggacaaacattcagaccctcttagcatttttctggaatcctatgtgaggaaaatacattcagaatacagcaggagtgttctggagtcctatgtgtgggacatatattcagatcctcgtagcagtgttctggaatcctatgtgagttacgaatatttagacccacatatcagtgttctggaatcctattggagggacaaacactcagactacagaaggaatgttctggaatcctatgtgagggagagtaattcggaccctcgttgcaatgttatggaatcctatgtgaaggacaaacattcagaccccagtagcagtgttctggaatcctatttgagggacaaacactcagaccacagcaggaatgttttggaatcctatgtgagggtgaaccattgagaccacagcagtagtgttctcgtatcctatatgaaggacaatcatttagacccatgtagcagtgttctgcaatcctaacactaagattaacacaaacactaaatcccaacagcagtgttctgtaatcctaagtgaggaaaaaacattcagaccacagcaggagtgttctggaatcctatgtgagggtgattaattcagacactcgtatcagtgttctggaatcctatgtgagggacaaacattcagaccccagtagcagtgttctggaatcttatgtgaggaagaaacagtcagaatccggcagcagtgctctggaatcctttgtgagggacaatcattcagaccacagaggattggtctggaatcctacgtttggaacaaacattcagaccctcgtagcattgttttggaatcctatgtgaggaaaatacattcagaacacagcaggagtgttctggattcctatgtgcgggagacacattcaaacacttgtagcagtgttctggaatcctatgtgacagacaaacatttagacccacatagaagtgttctggaatcgtacgtgaagcacaaacactcaaaacagagcagttgtgttctggaatcctatctgaggaacaaacattcagaccagagcaggagtgttctggaatcctatgtgaggtacaatcattcagacactcgtaacattgttctggaaacgtatatgaggagaatacattcagaacacagcaggagtgttctggagtcccatgagcggggcaaacattcataccctcgtagctaagttctggaatcctatgtgagggacaaacatttaaacccacatagcagtgttctggaatcatacgtcagggataaacactcagaacccaacagcagtgttctggaatacaaagtgagggaccaacatacagaccacagcaggagtgttctggaaaactatgtgagggagaaaaattcagacccttggagcagttttctggaatcctttgtgagggacaaacatttagagaacccagtagcagtgttctggaaccctatgtgagggagaaacaataagaacccagcagcagtgctctcgaaacctatgtgagggacaatcattcagaccacagctgtggtgttctggaatcctaccagtgggacaaccattcagacccttccattgttatggaatcctatgtgaggaaaatacattcataacacagcaggagagttcttgagtcctatgtgtgggacaaacattcagaccctcgtagcagtgttctgtaatcctatgtgagggacagacatttagacccacatagcagtattctggaatcgtttgtgagggacaaacactcagaacccaacagcagtgttctgtaatccgaagtgaagaacaaacattcagaccacagcaggagtgttctggtatcctatgtgagggaaaatacttcaaaccctggtagcaatgttctggaatcctatgtgagggacaaattttcagaccccagtagcagtgttctagaatactacttgaggaacaaacacttagaccacagcaggaatgttctgcaatcctatgtgagggagaaacatacagaccacagcaggattgctctggaatctcatgtgaggcacaaacagccagaccacagcaggattgttctggaatactatgtgtggtacaaccattcagaccacaggagtagtgttctggaatcctacatgagggacaaacattcagagagtacaggagtgttctggaatcatatgggaggaacaaacattcagaccacagcagcgcttttttggaatcctatgtgagggacaaacactcagaacccagcagcagtgttctggaatcttatctgagagacaaacattcagaccagagcaggggcgttctggaatcctatgtgaggtacaatcattcagaccctcgtagcagtgttctggaatccgatgtgagggagaaacactcagaatccagcagcagtgttctggaattctatgtaagggacattcattcagaccacaggtgggctattctgcagtccttcgtgtgtgacaaacattcagaccctggtagcattgctctggaatctcatgtgagaaaaattattcagaacacagcaggagtgttctggagacctatgtgcgggagagacattcagaccctcgtagcagtgttgtggaatcctatgtgaaggagaaacttttggatccacgtgacagtgttctagaatcgtacgtgaggaacactcagaacccaacagcagtgttctgtaatcctaagtgagggacaaacattcaggccacagccacagtgttctggaatcctatctgagggagaaacactcagaaccaagcagcagtgatctggaatcctatgtgagggacaaacattcagaccacagcaggagtgttctggaatcctatgttagggagaataattcagatccttttagcaatttcctgaaatccgacgtgagggacaaacattcagacaccagtagcagttttctggaatcctatgtgagggagaaacactcagaacccaacagcagttttccggaatcctatgtgagggacaatcattcagaacacagctgggacgttttggaatcctgcatatcggacaaacattcaaaccctcatagcattgttctggaatcctaagtgaggaaaatattttcagaaaacagcagatgttttctggagtcctgtgggtgggacaacattcagaccctcgtagcagtgttctggaatcctatgtgagagaaaaacatttagacccacgtagcagtgttctggactagtatgtaagtgagaaatacacagaacccaacaacagtgttctcgaatagtaagtgagggacaaacattcagacaacaggtggagtgttctggaatccgatgggatggggaataattaagacacccgtagcagtgttctggaatcctatgtgaggggcaaacattcagaccttcatagcagtgttctggaatcctgtgtgacggacaaacatttagaatcaagtagcagtgttctgtaatcaaaggtgagggacaaacactcagaacccaacagcagtgttctagaatcctcagtgagcgacaaacattcagaccacagcaggagagttctggaaccctatgtgagggacaaacattcagacactcatagcagtgttctggaatcctatgagagggacaaacatttagacccacgtaccagtgtgctggaatagtacgtgagggacaaacactcagaacacaacagcagtgttctggaatcctaagtgagggacattcagatgatggcaggagtgttctggaatcctatgtgagggagaataattcagaacctcgtagcagtgctctggaatcctatgtgagggacaaactttcagaccccagcagcagtgttctgaaatcctatgtgagagagaacctctcagaaaccagcagcagttttccagaatcttatatgaaggccaatcattcagacgatagctggggtgttctggaaacctaactgtgggacaaacattcagaccctcgtagcggtgttcgggaatcctatctgagggacaaacatttagagacacgtagcagtggtctggaatcgtaaatgagggacaaacactcagaacccaacagcagtattctggaaacctaagtgagagacacgcattcagacaacagcaagagtgttctggattcctatgtgagggagaaacactcagaacccagcgtcattgttctggatcctatgtgagagaccatcagaaagatcacagctggtgggttctggaatccaagtttgggacaaagattcagaccctcgtagcattgttctggagtcctgtgtgagggacaaacatttagacccacgtggcagggttctggaatcgtacatgagggacaaacactcagaacccaacagcagtgttctggaatcctcagtgagggataaacattcagacgacaacaggagtgttctggaatcctatatgatggagaataattcagacccttgtagcagtgttctggaatcctatgtgagggagaaactttcagaccacagtagcagtgttctggaatcctatttgtgggagaaacactcagaaaacagcaggaatgttttggaacctatgtgagggagaaacattcagaccacagcaggattctggtcaacaattcagaccaaggcagtaatgttctggattcctatatgagggacaatcgttcagaccatagcaggtgagttctggagtcctatgcgaggaacaaacattttgaacacagcagcagtgttctggaatcctatttgagggacaaacgtgcagaacctaagagcagtgatctggaatcctatctgtgggacaaatattcagaacggagcaggagggttctggaatactatgtgaggtacaatcattcagaacctcgtagcagagttctggagtcctatgtgaaggagaaacactcagaacccagcagcagtgttcgggaatccaatgtgagggacgatctttcagaccacagctgtggtgttctggattcctaagtgtgggacaaacattcagaccctcttagcattgttctggaattttatgtgaggtaaatacattcagaacacagaaggagatttctggagtccattgtgcgggacaaacattcagaacctcacagcagtattctgcaatcctatgtgagggataaacatttaaacccacggaacagtgttctggaatcttacataagggacaaacactcagaacccaacagcagtgtcctagaatcccaagtgagggacaaacattcagaccacagcaggaatcttctggaatcctatgtgagggagaataattcagacactcgtagcagtgttctggaatcctatgtgagggacaaacattcagaccacagcagtagtgttctggaatcctatgtgagggagaaaca

SEQ ID NO: 470081 - DNA, 3837 bp, Homo sapiens
cagaccacagctggggtgttctggatccctaggtgtgggacaaacattcagaccctcgtagtaatgttctggaatcctatcagtgctctggaatcctacgtgaggaacaaactttcagaccacagtagaagtattctggaatcctatttgtgggacaaacactcagaccacagcaggaatgttttggaatcctatgtgagggagaatcatgcagaccacagcaggattgttctggaatcccacgtaaggcacaaacacccagaccacaacaggagtgttctggaatcctatgtaagggtcaacctttcagaacacagcagcagtgttctggaatcctataggagggacaaacattcagaccacagcaagagagttctggaatcctatgtgaggaacaaacattcaggccacagcagcagtgttctggaattctatgtaagggacaatcattcagaacacagctggggtgttctggaatcctacgtgtgggacaaacattcagaccctcgtatcattgttccagaatcctatgtgaggaagaacattcagaacacagaaggagtgttctggagtcctatgtgcatgacaaacactcatactctcatggtagtgttctggaatcctatgtgagggacaaacatttagaagcacgtagcagtgttctggaatcgtacatgagggacaaacactcagaacccaacagcagtgttttggagtcctaagtgagggaaaaacattcagaccacagtaggagtgtcctggagtcctatgtgagggagaataattcagaccattgcagcagtgttctggaatcctttgtgagggacaaatattcagatgtcagtagcagggttctgcaatcctatgtgagggagaaacactcagaacccagcagcggtgtcctggaatgctaattgagggaaaaacacacagatcacagaaggaatattctggaatccattgtgagggagaataatacagaccctcgtagcagtgttctggaatcctatgtgagggagaaatgctcaacccagaagcagtgttctgcaatcctatgtgagggacaatcattcagactacagccggggtgttctggagtcctacgtgtgggacaaacatgcagacccgcgtagcatttttctggaatcctctttgaggaaaatacattcagaacacaacaggagtgttgtggagtcctatgtgcgggacaaacattcagtccctcgtagcagtgttctggaatgccatgtgagggagaaacactcataacccagtagtagtattgtggaatcctatatgagggacaatcattcataccacagttgaggcattctggaatcctatgtgtggggcaaacattcagacccggacccttgtagcactgttctgcaatcctatgtgaggaacaaacttttagacccagggagcagtgttctggaaccgcaagtgagagacaaacacttggaaccctacagcagtgtcctggaatcctaattgagggacaaacatacagaccacgaaggaatcttctggaatcctatgtgagggagaataattcagaccctcgtagcagtgttctgcaatcctatgtgagggaaaaactttcagaccacagtagcagtgttctggaataccatgtgagggagaaacactcacaacccagcagcagtgttctggaatcctatgtgagggacaatcattcagaccacagctgagttgttctggagtcctaggtttgggacaaagattcagactcacgtagcattgctgtggaatcctatgtgaggaaaatactttcagaacacactaggtgtgttccagagtcctatgtgcgagacaaacattcagtcccttgtagcagtgttctagaatcctatgtgagggacaaacatttacacccatgtatcagtgttctgtaaccgtacgtgaaggacaaacagtcagaacccaacagcagtgttctgcattcctaagtgagggacaaacattcagatcatagaaggagtgttctgtaatcctatgtgagggagaaacattcagaacccagaagaagtgtgctggaatcctctgtgagggacaatcatttataccattgtagcattgttctggaatcctatgtgaggaaaaacccttcagaacacagcagtagtgttctgcggacctacgtgcgggacaaacatacagaccctcatagcagtgttctggaatcttatgtgagggaaaaacatttagacacacgtagcagtgttttggaatcgtacgtgagggtcaaacacacagaacccgacagcagtgttctggaagcttaagtgagggacaaacattcagaccacaacaggagtgttctggaatcctatgtgagggagaataattaagatcctcatagcagagttctggaatcctatgtgagggagaaaaattcagatcccagtagcaatgttttggaatcctacgtaaaggagaaacactcagaacccagcagctgcgttctggaatcctatgtgagggacaatcattcacaccacatctgggatgttctgggtccctatgtgtgagacaaacattcagaccctcatagcaatgttatggaatactatgtgaggaagaacattcagaacacagcagcagtgttctggagtcctatgtgagggacagtcattcagaccccagttggggtgttttggatccctaggtgtgggacaaatattcagaacctcgtagcattgttctggaatcctatgtgaggaagaacattcagaacacagtaggagtgttctggagtcctatgtgcgggacaagcattcagaacctcgtagcagtgttctggaattctatgggagggaccaacatttagacccacgtagcaatgttctggaatcgtatggggggggaaacactcagtacccaagaacagggatctggaatcttcagtgagtgacaaacattctgaccagagcaggagtgttctggaaacatatttgaaggacaaacactcagaacccagcagctttgttctggaatcctatgtgtgggacaatcattcagaaaaccactgaggtgttctggaatcccacgtgtggaacaaacattcagacccttgtagcattgttctggaatcctatgtgaggaaaataccttcagaacaaagcaggagtgttctggagtcctatgtgtgggacaaacattcagagcctcgtagcagtgttctggaatctgatgtgagggaaaatcatttagacccacgtagcagtgttctggaatcgtacatgagggacaaacactcagactccaacagcagtgttctggaatcctaagagtgggacaaacattcagaccacagcaggagtgttctggaatcctatatgagggagaataaatcagacgctgttagcagtgttctgtaatccaatgtgagggacaaactttcagacaccagtagcagtattctggaatcctatttgtggtacaaacactcagaccacagcaggaatgttttggaatcctatgtgagggacaaacagtcagaccacagcaggattgttatgaaatcccatgtgaggcaaaaacacccagaccacagcaggaatgtactggaatcctatgtgagggtcaaccattcagaatacagcaggaatgttctggaatcctatgtgagtgtcaaccattcagaccacagcactagtgtaatggaatcctacgtgagggacaaactttcagaacctcgtaacagtgttctggaatcctatgtgagggacaaacactcagaaccccgcagcagtgttctggaatcctaagtgaggggcaaacattcagaccacagcaggagtgttttggaat

SEQ ID NO: 470082 - DNA, 1118 bp, Homo sapiens
cagccgcgcccgcgccgcccgcctccccgcgctgctgcccggctctcgggctctcgctttttttttttttttttctttccgcggcagtcttaggattcttgtcacatgatggcttcatcgggcccttctcctcctgatcctttcaagctctttctcctgcctggcatatcaaaggagatttgtgggtccagagtctgtttgctgattctttgttcacttgttccctcctccaacgatggcataaaccctctccttgtgccaggttgggcactggagctgctgtgcctgatttcggctgtcagaagctcacagtctgttgtgagttatgagctatgtggaggggtgatgggtagcaggcaagatgacaatgataataagcaggcaagggagaggggcaacgagggactgtggaccactcagggctatcaaggaatctgcagcccagaagctcctccattttcctccagactagcccaggtctcataccctttggtttcacctttctgtacttctttcatgttgcccaggataattcctcatcattacttgtcaaatggttgtgttctccctgggctacagattagatgaggttgggaattcccttttcactgcctctgtatctcaatagcagccccatgccaaacacttcccagggactgagtaaagatttccccaaagggtgagtgaatgttgaggaaaggcagaaagcaatcctccttaagtgggatatcagaatgctgagcttaacttgaaaccgtttctaaaccatagactcttatttaaaggaaaccaacatgaaaatgccaacaccaccttatttacaaggtactttgttcactagagctattaaagggctgtgttgatgggaagctgtgtataattgtaggtattatgccagagaccgctttctgtcaggctgccagaccaaaggggtagggaccgtactctagagaccctcacccaacaggatgattaaacgaatttgtaagggttaatagatgggcggtggctcattaaaaccaactctaaatgcattactttgaccacagactcgtaatatggaccatcttggagagcctggtgaaggatgaagtgcatctttgctaggtttgcgctac

SEQ ID NO: 470083 - DNA, 710 bp, Homo sapiens
ctggaatagtgtgggcctctaatccaatatgacacgtgtccttataagcagaggaccatgtaaggacacacacagaggataccatgtaaagatggaggcaggggctcgactgaggcatttacaaatcaaggaacaccgagaattgataggagagaggaaaggaacggattctcctccctcagaactctcaagaggaaccaacccacctaagactctaaatgtctgctttctgccatttgaggacccagcattcctccactctgaaagaggctcccttttggaagcagagaacagccttcaccagatgctggcacttaatcttggacttccaggcctccagaacgtgtatcctgtggctttggctgacatgtggtcttgggttctctgtctttctagctctctttgccttatcatgacctcactgataatggatacccagatgctgtcaatggaggctgtcttgaacattggacattatactttcccgattccctacaagttctcttaggcaaaataaattccaaggccaagtaactggctccattacctaagcaattggtcaaccctaaacaatttctatgtaatgtttcaatggaagttaaaggtacagagttctttggaaagaatgaaaatgttaatacttcagcactagtaattcagactcacaaaattcctatttcatggtcttccaatggtgcgatttattcaac

SEQ ID NO: 470084 - DNA, 943 bp, Homo sapiens
gaggactgccagcacgctgtcacttctcaggacagcatgcaggaaactccctaataaaaggaagtacacaggatgcgagcagctgagtaagccttgcaatatgcagctatggaaggagaagcatctgacatcgctggtaccactggcactgctggcccttgccaatgtacagagcctcaagactgctagctgatgggctctacgggaaatttgggaaattacaggtcaattacacacgaaatatgtgtgagaaggagaggctaaacaatcctgcgaagatttggtatgacagcaacagcagcagcatctacaatgaactttttggaaatctaggggatgacccctgggtattaatgagggtcagcttaggaaacccgggcagcaaaacttccccacgtcacagtgagcaaccagcagtagaaagttcaatggtccacagccacaccacctgtcttctggagtggtttgagtcacgttgttcagaactatgctctgtttatcaacagctgtttatcaatagctctaggggctatggacattctgggtttccatacttcagatacataagaaggaaatatttgtagagtttgggtgggggtgggaggactcactcgagtgtcatctcaccttactcttcattggaacatatgctgatctgaatttactttataaaattcttagttagaaaattcaatctgcaggacaagaagtagccatcgtgcatttgaaacattatatagtagccacaaaaaactcattaccaatggactagcatgtggttaaatcccagattatcacttgtttaccatgagtcttgtctctgacactcgtagattgagtaaagttgatcggccagaaatgttatcttttagaggctgggaaattgtgcataaagcccaagtcagtgcttctgtttctatccctgagtgcttttaaaaaattc

SEQ ID NO: 470085 - DNA, 1573 bp, Homo sapiens
acccccaacacattcacagaccaagtttcaaaatggagtgggatgcctctggaacgaagtatggcccagaatgtgccctggggcatttggctgatcctttctaaaaaccccaaagaatacagtgagcaatgctcatttcaagataggcacgccaatggctgcagaagtgatactgccatcatagtcacatcccagtccctccagacagctggtacctgcttctcctgcttcactttcaccttctccatgttttccaactctgctacccctgagatagcaagatcaacactttctccttctcagcctagtcaatgtgaaggtgatgaggatgaagacctttataatgatccacttctatttaataaatatggcaactctcctcaaatttctgccttcttttcattcttcagtgcctgcatgtggaagtttttctgttttctccagaatttattgtagaagataaaatctgaccaaaatagcccttagagatatctgaggacaatcaggatatgagcactgttgtttattggtgagcatgacaatggaatttgccatataaaagaatgaatctttcgaaagcacatgctttctagaagtgtcgtgatttggtttttttgtttgcttgtttacttatttgttttggatgatttatcagaaattatctttgtagcactaatatttaatttttactctttgcaatatcattttaagttctttaaatgttttattattgcacttttagcttagctttctagtcactgagagtcagtttattttttgattgattttgtttggacaattttattccacttttctttgatatccttcttcccctgctcccctctgtgtcagtatttttaagctaatcatcttattctaaacttgtttataattacttttgaactttacaaagatattacttaatttttatttttctaaatatcgaagtttaaaatacattctcctaatgaaaatgaggaatcaaacatatccttattctccccaccagcattctatgtgcttgtaatttttcctggaaatatgttcttagttttatttactgttgctcaatcattttattctttacaaacattttaagagcataatctttgatgttagaatctaatactataatcaaatttaactatctagaattgctatcaaaatttgttatatttatataaattcagtcctttttatagtgaattttatgttcaatatttgtatttatctcttctttgactggactatattcttcaggtaatattgcgaacattgcacaagttgtatattttcttagctattacatacttgaaatttacagtagaaaagtgggctatttagaaatatagtatatcaaaaccgttcctcttcataaatgtatagcattttccaaatgtgtttcgtcattcagtgctgcaaaaaatgtctgagtctaacctattttgtggttattagtggagctgtaaatcagagaatatttttcttaaccatgtgactgtaatttttcctttataaataacatgtaattttcttttcattgcatttggaaagaggatatgtcacttagatc

SEQ ID NO: 470086 - DNA, 906 bp, Homo sapiens
gcgctatcaacatggggaagctccagggtagaacaagaatgaaaatgagcagagtggagatgagcttcactgatgtcttcagtgcaaatgtgaaaactgaattggaaaacaaaattctgtctggcatccaaagggcagcttcttctgccttgggtttccggtatcaaagagcccctggcctgaatgggcaggacactgtaaaatggaccaatcagcacactgtaaaatggaccaatcagcaggacatgggcaggaaaaataagggaataagagctgcttaccccagccagcaacggcaaacagcgcagcagcatgaaaatggactaataacgggtggtatggcagattgggtggtaatacacagtattagtttcaatgggcaagtatctaactttccagaacttcctcctccacaatctgtgggtccttgaagtgtttttatttagggctttctccatgaccttattccaagccacatgatctttctttctttatgcactagttcaggatattggctcctcttatgttcattaaggcggccctaaccaagcacatttaattcctcaatgactaatttggttctgagaggttaagaactggtgaggctaaggcaacggtctatagtatctggtgatgagataagtgcagattaatttgtgagatagaacatttctacccttttccctttggctttaaggtttatttagaattcatgaagttgtgtctgtgctgaaaagctttgaaccgttaaagggaattatttaacaaaatttctaaaaatgcctgtgcaaattggtttgtcttgaaattctggtgctttgttatttttgccaccaagaaaaaggcttaaaaaaacgcttgagggagaatatgaatgtaataaatatttcatttttgtagcacatc

SEQ ID NO: 470087 - DNA, 6827 bp, Homo sapiens
tggaatcgaatggaatggtttgtcatggaatggactcaaatggaatggacagtaacaaaatggaatggaatagggattggaacggaatgcaatggaatggaatggaatggactggaatggaatagagtcgaatggaatggagtcgaatggaatgtaatcaaatggaatggaatcaaatggaatggaattgaattgaatattaaggagcagaatggaatggggtgttatcgaaggatatcgaatggaatggaatggagtggaatagacttgaatggaatggactggaatggaatggaatcgaatggaatggactggaatggatatggaatgatatcgaatggaatggactcgaatggaatggacttgagtggaatgaattcgaatggaatggaaacgaatggaatggaattgaatggaatacaatggaatggaatcggatggaacggaatggaaaggaatgtgaaatggattcgaatggaatggactggagtgaaatggattcgaatggaatggactggagtggaatggactcgaatggaaaggaaacgagtggaatggaatggaatggaatggaatggcttgaaatggataagaaatgaaaagaatgtaatggaatcggatggaatggaattgaatgtagtggagtcgagtagaacagaattgaatggaatggcatcaaatggaatggaaacgaaaggaatggaattgaatggactcaaatgttatggaatcaaagggaatggactcaaaacagactcgaatgtaatggattgctatgtaattgattcgaatggaatggaatcgaatggaatgcaatccaatggaatggaatgcaatgcaatggaatggaatcgaatggaatgcagtggaagggaatggagtggaatcaagtggaatggaatggaatggaatggaattgaaaggaatggaatagaaagtaatggaatggaatcgaatggaatggactggaatggaatggattcgaaaggaatcgaatggaacaatatggaatgcattgcaatgcaatggattcgaatggaatggaatcgaatggaatggattggcatggaatggacccaaatggaaaggacaataacaaaatggaatggaatagggattcgaacggaatgcaatggaatggaatggaatggacttgaatggaatagagtcgaatggaatggagtcgaatggaatgtaatcaaatggaatggaatgaaatggaatggaattgaattgaattgtaaggaacagaatggaatggggtgttatcgaaagatatcgaatggaatggaatggagtggaatggacttgaatggaatggactggaatggaatggactcgaatggaatggactggaaatggaatggaatcgtttggaagggaatggaatggaatggagtcgaatggaatagaattgaatgtaatggcatcgaatggaatggaatggactcaaatggaatggacttgaatggaatagagtggaatggattggcaccgaatggaatggaatggaaaggaatggaattgaaatggattcgaatggaatggactggagtgaaatggattcgaatggaatggactggagtggaatggactcgaatggaaaggaaacgagtggaatggaatggaatggaatggaatggcttgaaatggataagaaatgaaaagaatgtaatggaatcggatggaatggaattgaattatggaatggaatcgaatggaatggaatcgaatggattggaacgaaatcgaatggaacggaatagaatagactcgaatgtcatggattgctatgtaattgattggaatggaatggaatcgaatggaatgcaatccactggaatggaatgcaatgcaatggaatggaatcgaatggaatgcagtggaagggaatggagtggaatcaagtggaatggaatggaatggaatggaattgaaaggaatggaatagaaatggaatggaatgcagtggacacaaatggaatggactggaatggaatggacacgaatggaatggactggagtggaatgaacacgaatggaatggaagcgaatggaatggattggaatggaatggaatggaaaggaatagaatggaatggaatcaggattcgaacggaatgcaatggaatggaatggaatggacttgaatggaatagagtcgaatggaatggagtcgaatggaatgtaatcaaatggaatggaatcaaatggaatggaattgaattgaattgtaaggaacagaatggaatggggtgttatcgaaagatatcgaatggaatggaatggagtggaatggacttgaatggaatggactggaatggaatggactcgaatggaatggactggagtggaaatggaattgaatggactgtaaaggaatacaatggaatggagtgtaatggaaagatatcgaatggaatggaatggaatggaatggaatggaatacactggaatggaatgcactgaagcggaatggtctccagtggaatggaatggaatgcaatgaaatggaaaggaatagaatggaatggaatccgaacttatttcaatatgatggaatccaatggaatgtacaaaaatggaatggaatcaaagggaatggaattgattggaatagaccagaactgaatggactggaacagaactatggaatggaatcgaatggaatggaatcgaatggattggaacgaaatcgaatggaacggaatagaatagactcgaatgtaatggattgctatgtaattgattggaatggaatggaatcgaatggaatgcaatccaatggaatggaatgcaatgcaatggaatggaatcgaatggaatgcagtggaagggaatggagtggaatcaagtggaatggaatggaatggaatggaattgaaaggaatggaatggaatcgaatggaattcagtggaagggaatggagtggaatcaaaatggaatggagtggaatgcaataatatggaatggagtggaatggaatgcagtggacacaaatggaatggactggaatggaatggacacgaatggaatggactggagtggagtggacacgaatggaatggaagcgaaaggaatggaatggaatgaaatggaatggaaaggaatagaatggaatggaatctgttggagtagaatggaatggaatggagattatggaatggaatcgaatggagtgaaatggaatggaatgaacgtgaaaggaatagactggaacaaaatgaaatcgaacagtaggaatcatacagaacagaaagaaatggaacggaatggaatgcactcgaatggaaaggagtccaatggaagggaatcgaatggaatgaaatggaatggaatggaattgaatggaattgaaaggaatagaatggaatggatcaatggaatggactcgaatgacatggactctaatggaatagaaatgattggggtgacatcaaatggaatggatggcaatggaattgaatggaatggacccaaattggcatcgaatggaatggaatcgaacggaatggaccggaatggattggactggaataaaatggactcgaatgtaaagcattgcaatgcaatggattcgaatggaatggaatcgaatggaatggaatggaatggaatgcgccggaatgcactggactggaatagaactcgaatgcaatggattgcaatggattcgaacggaatgcaatggaatggaatggaatggaatggacttgaatggaatagagtcgaatggaatggagtcgaatggaatgtaatcaaatggaatgtaatcaaatggaatggaattgaattgaattgtaaggaacagaatggaatggggtgttatcgaaagatatcgaatggaatggaatggagtggaatggacttgaatggaatggactggaatggaatggactcgaatggaatggactggagtggaaatggaattgaatggactgtaaaggaatacaatggaatggagtgtaatggaaagatatcgaatggaatggaatggaatggaatggaatggaatggaatggaatggaatggaatggaatacactggaatggaatgcactgaagtggaatggtctccaaatggaatgcaatccaatggaatggaatgcaatgcaatggaatggaatcgaatggaatgcagtggaagggaatggagtggaatcaagtggaatggaatggaatggaatggaattgaaaggaatggaatggaatcgaatggaattcagtggaagggatggagtggaatcaagtggaatggaatggaatggaatggaattgaaaggaatggaatggaatcgaatggaatggactggaatggaatggattcgaatggaatcgaatggaaaaatatggaatgtggaatggaatcgagtggagtgaaatggaatggaatgaacgtgaaaggaatagactggaacaaaatgaaatcgaacagtaggaatcatacagaacagaaagaaattgaacggaatggaatgcactcgaatggaaaggagtccaatggaagggaatcgaatggaatgaaatggaatggaatggaagtgaatggaattgaaaggaatagaatggaatggatcaatggaaaggaatggaatggaacgcactggattcgagtgcaatggaatcaattggaatggaatcgaatggaatggattggcgtggaatggactcaaatggaatggactggaacaaaatggaatggaatagggattcgaacggaatgcaatggaatggaatggaatggacttgaatggaatagagtcgaatggaatggagtcgaatggaatgtaatcaaatggaatggaatcaaatggaatggaattgaattgaattgtaaggaacagaatggaatggggtgttatcgaaagatttcgaatggaatggaatggagtggaatggacttgaatggaatggactggaatggaatggactcgaatggaatggactggagtggaggaatggaatggaatggagtcgaatggaatagaattgaatataatggcatcgaatggaatggaatggactcaaatggaatggagttgaatggaatagagtggaatggaatggcaccgaatggaatggaatggaaaggaatggaatatatcgaatggaatggaatggaatggaatggaatggaatggaatggaatcgaatggaatggaatggaatggaatacactggaatggaatgcactgaagtggaatggtctccaggggaatggaatggaatgcaatgaaatggaaaggaatagaatggaatggaatccgatggaactgaaaggaaaggaatgcagacgaatggaaaagaatcaaattgaatggcatcgaacggaatgggatggaatggaaaagacccagttaatggaatggactgtaatgggaagatatcgaatgggatggaaagaaatggactctattggaatggactggaatggaatggactcgaatggaatggacttgagtggaatgaattcgaatggaatggaaacgaatggaatggaatggaatgcaatggaatggaatggaatggaatacaatggaatggaatcggatggaacggaatggaaagcaatgtacgcaatggagtgtaatggaataatatggaatggagtggaatggaatgcagtggacacaaatggaatggactggaatggaatggacacgaatggaatggactggagtggaatggacacgaatggaatggaagcgaatggaatggaatggaatgaaatggaatggaaaggaatagaatggaatggaatcaaatcaaatggaatggcatcgaatggaatggactcgaatggaatgtgctcgaatggaatggaatcgaatggattgatatcaaatggaatggaatggaaggaaatggaatggaatggaattgaaccaaatgtaatggacttgaatggaatggaatcttatagaatggactcaaaagcaatgaatggaatggggtgttatcgaaagatatcgaatggaatggaatggagtggaatggacttgaatggaatggactggaatggaatggactcgaatggaatggcctggagtggagtggactcgaatggaatggaaacgaatggaacgaatggaattgaatggactgtaaaggaatacaatggaatggagtgtaatggaaagatatcgaatggaatggaatggaatggaatggaatggaatggaatggaatggaatgcactgaattggaatggtctccaatggaatggaatggaatgcaatgaaatggaaaggaatagaatggaatggaatccgatggaactgaatggaaaggaatggagacgaatggaaaagaatcaaattgaatggcatcgaacggaatgggatggaatggaatacacccagataatggaatggagtgtaatgggaagatatcgaatggaatggaaagcaatggactctgttggaatggactggaatggaatggactcgaatggaatggacttgagtggaatgaattcgaatggaatggaaacgattggaatggaatggaaggcaattggaatggaatggaatggaattgacaggaatggaatggaatcgaatggaatggactggaatggaatagattcgaatggaatcgaatggaacaatatggaatggtacagaatggaattggaatggaatgcagtggacacaaatggaatggactggaatggaatggacacgaatggaatggactggagtggaatggacacgaatggaatggaagcgaatggaatggaatggaatgaaatggaatggaaaggaatagaatggaatggaatcagttggagtagaatggaatggaatggagattagtggaattc

SEQ ID NO: 470088 - DNA, 1225 bp, Homo sapiens
ctttttccaggggtgacccaggcctgcagggttccagtgtcacaggcaggccttgcatgagcctccacccgagcttctgctcctcctctcccacagggaacgtgatgttctcttcccggggggctgtgctagaggggaggaccccggctgccctgaccctcctgcccctggcttcccacagccacgccgtggcactgacccgagactctgagcggctgctggaggtgcggaagcggatcaatgtcctgcccctggggagtggggccattgcaggcaatcccctgggtgtggaccgagagctgctccgagcagaactcaactttggggccatcactctcaacagcatggatgccactagtgagcgggactttgtggccgagttcctgttctgggcttcgctgtgcatgacccatctcagcaggatggccgaggacctcatcctctactgcaccaaggaattcagcttcgtgcagctctcagatgcctacagccaagggtccagccccttcagcgccagcacctctgtccccagcacgggaagcagcctgatgccccagaagaaaaaccccgacagtttggagctgatccggagcaaggctgggcgtgtgtttgggcggtgtgccgggctcctgatgaccctcaagggacttcccagcacctacaacaaagacttacaggtgcgaggccgggggaggcctggctagtatgtgccagttctcagggctctggcacactcaggcagggccccaccccgggattgccatacatcctcccatcctgtgcacacagctccatccgtggctgcccttgaactctctgcccttcctttgttggggtattgagtgttcttcccatggaaggcagtggggatgcctcagtgggggggtggggctgtggggaccctgggtgccagggggctgctaggccctcacctcctgccatgtgcctcccaggaggacaaggaagctgtgtttgaagtgtcagacactatgagtgccgtgctccaggtggccactggcgtcatctctacgctgcaggcaagacatcacccccctgcttctcctcccctaggtcccaggcactggggtgggcatgcggggagggtggccttgggaggaggtgaggtggggctggaggacctggggcagggaaggagaggtgtgctcgctcctgctcctggggaacagggaaaggacagaaactgctgccatgcagtggaagtaga

SEQ ID NO: 470089 - DNA, 682 bp, Homo sapiens
tgagtcgaagctccctgagacctcttcagaagcctagtagatgctggcgccaggcttcctacacagcctgcagagccatgaagatttatcctacctcctagagtctgatactaacatcaccactgctgataaaatccagatcttcactggaacactggaagagcggaaatacattgtatgtggatttccaaagaatggtgtcagaagtgtgacagtgtggaaggacagctttgtggaggagtatgtggaggctgccagagaggacatagcagccagtcattctcagctgagtgaggaccatggggagcaccagctcagggagtttctagtttccaatgagaagtattctaaagcatttccttctcatcactatagcacaaaggaaaatgtagaagcctctcaaagtttgcaaagggcactgtcactcatcaaggccaaagcaagaatgccttccatttactttagataagaaaagaataaaaagtattgtaattgctgcttgtaggcaggcattcctggcaccagtacatgatgtaactcacatgaaaccaactagggaccgttggaaatgtatgcattgtgcaatggtcatggatgctttgattctgaggattttgtttctttcagtatctttttgtatgaatgcagaagttaaagtactgaaaatagcagtgattttcac

SEQ ID NO: 470090 - DNA, 689 bp, Homo sapiens
agcagccagtcattctcagctgagtgaggaccatggggagcaccagctcagggctgaacggcctgtaccaatgccaccctgacatctcacctggcaattctgccttctcagggctctctgtctccacacctttccctacagagacaacacttgtgtctcaacaacacttgatcagtgtgttcataggtgctcctgctgatgtgagagaggatttgttccagttctattctagattaaaaagccctcatctgccagagacaaaagttctatgttccaaaggtaagaggaggccagtgttgcagaaggcccataaaggagttgcatattggaagttgaggcttggggcactctcagatttcctgagaagttgggaggaggtatattacggaaacaaggaaggcattattgaacagatgacagtgaattttatcagtcttctaatcatttttgactgtctgctgttcaccaagaactggggagggtaagagatgacaaaaagacagaatccttcccttcacataatttatatacaagtcaggagttaggacagcttgacaacttaaataaagacaatttttgattagtgtttttgtattgataataacctgcatatagagagaacatgggctcattctgattggaaggaattagaagattcatgaaaagggtcagttaaaaatttgtcacct

SEQ ID NO: 470091 - DNA, 2018 bp, Homo sapiens
gctctctcttcttcaaattctctccccaaatccgtcgcgctgcccttttcttttaatttgccagtcaggggttaatctgtatggtggtgaggatacttctaccccagggctgggcctggagggtcagtgtggagcatgctctaatcatattaagacttcagccccatctgggaccatggagaaaggggctttcagatggccaagtcatccctaaagggagcatggctgcagctgtgaggtcagcaggcttcattcccatagacctggctgccaagaagacagtgcgcccaagaggaatcaagacagtttatgactcacacagacagcaaagccatgagcagtgcggtgtcaggtccctgggcccctactccacaggtcgactgaaacagaaaggtcaggtgatggccggcttgagtgtttatctgtttttggatgatgtttttgtgctcttggtgtcctatttaagaaaccattgcctaacccaaggtcatgaagattgacttttatgttttcttctaagagttttgtagttttaactctttaatctcatagacggttaatactgaatttatagattgatattaattctatgaccatttcgtagaatttggcggttaatctaggacctgggctcttcttaatgggaagttttcttttgtttcaatttggtttttaattctaattaaatctctttacttgttataagtctattaaggttttctatttttatcttgaaccagttgtggtagttttctttttccaggaatttgtctatttcatataaattatataatttggtggcagacagttgtttatagcattctcttattctcctttttatttctgtaaggtcagtaatcttatagcttttagtggtttgagtcttctctctttttcatggacagtatagctaaagatttgtcacttttattcatcttttcaaagaaccaaacctgtgttcaaaagaacaaaaccgtagattttgttgactttattcttttatattctttatttcctttatttctactctaatcttttttatttccttccttttgtttgctttggttttagtttactcttgaggaatataagggtaaagctatatttacccttatatttctccattctctccccattttgtgatgtcattttgaggcccaacaatacacctgtatattacatatattgttttatgtaattactttttaagtaaggcaagaaaacaaagggaaagtgtgcaattatgcagtcttttgtaattacctatataagtacttttactgacacttttgtttatttgtgtggatttgaattactgtcttgtgttgcttgctttcagtctgaagaacttcctttagtacttcttgtaagtcagatttgctggcaataaattatctcagtttttatcttggaatgtctttatttcacctttatatttcaagatggttttgctggaaataagatttttggttgacagtgttttgtctttcaacactacttcattccattgccatctggcttctattatttctgatgaagttagttgttaatcttattggtgtccctttgcatgaattgtttttttgtttttttctcttgcccaaattcctatctaaggggactggggagtcatgctctacaaaccataaaaatctcatcagacaggtttttattaaatgtggcttgctttccacttgactttggtataatatcacatgacaagtagcagactctaaaggaaatattaataaaagtattttaccacaaaatatattttttaaacataccttgaaatggctgccatagtgccaacagattaaaatgaccctgcaaagccaccttttatggggaaaatttgcagctatagaaagtctccatgaatgtaaccaggtattttcccttccaggctttctcagctctaggagagattaactgagagcctgacacctttaaagtctgaaaagagtcattcaccaactattatagctctgagagctgccacccatgaggcttcatct

SEQ ID NO: 470092 - DNA, 568 bp, Homo sapiens
agatccttaatctctgttaatctgatgactataaagcaaaaggttactttaattttcattttcctgctttgtggcacctcttgttgtatagaagctattaatcataacatagtcagctttatcaaacttcagttttatgtggtttatgtttgtctgtcttgctggagaaacttttatgggccaggtgcagtggctcacgccttgacatttgaccaacgaacagttgttcctgttgatgtatggatccctgtgggcagaggatgcgaggtgaattctcacattgaagttaggggtaccattgacgggcagcggtcagacacagccgcgggtcagcagcgcttaaaaaggaggtgtctggaccatggtccggggggcggctctgagcgtcccctccgagcatccctcggtgtctcctttagccattctccttactctgctccactggtccctgaccagtcactgctgtgagagagaaaagctatccctttatgtcacttcgttgcagactttgtgactcgcaaaatattaactgactgatgtttagagacacttcatccttggcagaatc

SEQ ID NO: 470093 - DNA, 1926 bp, Homo sapiens
aggaaaaccagagacctttgtgagcccagacttgcactgatcccagcccaggagccagacatacgagacggccggggctgcggaagccctggagcagcttctatactttaaagcgcacaaatgccatgaaagcttgttagaaacggcctgcttaccaccctgaggtggcaggtctcaggcctggcagcggcccggaacaaaggccgcaggtcgacggcctggccacccagaacgctgagtccacgcccccgcccggccagaagcagctgatctcgcgagcccgccccctgctcggcgagaacagagcttactgtccctgaatcctcgctacgcctccgcatgacactaaggcagccagccagagctccagccacgcgcggcgcctggactgggccgagattcctatgaaatacataggaatccattaatctgtctactgggcagcgccggggcctgcggctgcacaggagccggagccgggagccgcgctccgccaagagttgggcagacgccccccctcccctggttgtcatgggccccctctcggggcctcagcgggcaccagccgcgggaacccccgggcctcctcgcgcccgagcctgagcgaccctcgggttctccggcgccccctccctcgccctatttttttcctgctctcgctaccgctaccgcttctgctctcggttatggcaaaagagccaccatcacccctccgggtcgaggcgccagccccccggaaatgcgggccccaccggcgatcgaggccatccctgagggcaccgggcagccggcgggcggcagactccgcctcctcaacggctaagtgcccctctcgtatcaggtggccggacacatgaacgggaaggacaaagtgggtatactgcaacactcagatggcacagctttgaaacagttacaaccacctccaaggggcccaagagagcatacggtttatgctgctgactgttctgatggtgttcttctagagctacgaaaatatttgccaaaatatggcatctgctatgatatacaaaaccagcattatggaagaagcttaacaaaaggaactacaaaggatggagtctccggattttttcataatgggtactgcttaagaaaagatgctgttgctgccagtattcagaagattgagaaaattctgcagtggtttgaaaaccagaagcagcttaacttttatgcaagttcattactattggtttatgaaagttcatctcagccaaccactacaaaattgaatgacagaactttggcagaaaagtttttgtccaaaggacaactgtcagacacagaggtactagagtacaataataactttcatgtattaagttccacagtgaatggaaaaatagaggcttaagtgggcaaaaacttgtccaagatgtatgctcgtcacaggaaaatgtatacaaaaaccatcacagtcagacttcaatgaaagttgaaaatctggagcaagacaatgagtggaaaagcatgtcacagaacatttaaatggaaatgtactttcccaactggaaaaagttttctaccatcttcccactggttgccaagagattgctgaagtaggagtgcgaatgatagattttgctcatgtgttccctagcagcacaatagatgagggatatatttatgggctaaagcatttaatttctgtacttcgaagtattttagacaattgaatcctctgttgcagtctttttaaggggtgggccaatcataatgaagaggagcagtcaatatctctgcacctttaatgctatgtaaaaaatttgtattaagttgtcattgttactcattgagagctcctgtcatctttaataacttgcaaggcaatttttacaacgattatattcatgcttatgtgtggttactgtagtctttgtcccatcttctccaaggccagcc

SEQ ID NO: 470094 - DNA, 865 bp, Homo sapiens
agactgcctctaagatcccaagatacccccccccctttttttttttttgagatgcggtctcactctgccacccaggttggagtgcagtgctgccatctcggctcactgcaagttccgcctcccaggatcccttccatgctgcttcgctggccagaaatctccacagccagaggcgcctataccgggcttcgccggggcctctggaccactgggctcgctctgcccacgcggccaagcaggcaacgcttggctgctgctactgggcctggatcccaagcctgccgccgctctgtgctcagcccgcagttggcccggacatgccgcaccagcttccaccttgagtgccggggtctgaacaaggaggacgcagcggcacctgaaaacggagatgctagcaactggcgagccccaaggggtgttacatcttttgctcagggagtctcgaggtctgagcccgcaggaagtgttacagctctctcacgttcttgccacccacagctcagcgaatggggtgtgtcacagctcctttggtcccactgcccacagttaactctgcaaaggtctttaccatggcgtgctggcatcccctctgccaacccccgccctcaaactctgaaaggaacatataggatattggacaatacacaatggaacaagtggagagacagaaacaaatggctgttgtgatgagaaagccaagagattcttgatgcaggctaagggtccaggaaaaaggcagccaacagtatatgccaacaagaaagccttgtctcctcagaaaactgtactttatttatgaggggggaaaatcaaaagcattgtagaaattgctctaatttcccataacacaaatgttataaaacca

SEQ ID NO: 470095 - DNA, 542 bp, Homo sapiens
acagtccccagagtgtgatgttccccttcctgtgtccatgtgttctcattgttcaattcccacctatgagtgagagtatccggtgtttggtgcatatgattcttttaaaagtttgtgaaggaaccaaaacaacaggcccctttgctgcaggtctcctcgagtttgctggaggtccgctccagaccctgtttgcctgggtatcaccagtggagactcagttggaaatgcagaaatcacccaccttctgggttgatctcgctttggagctgcacaccggagctggctccttgaagaagtggttgatttcaaaatgtgggcatggagaatgcaagatagtcctggagcatcttgcggtgccagaaagtgagacagtgctcaagagagaatggggccatcttaagaaggcacagaagccaacctgaaagacgttccaaaggccaaaactggaataatttaagcaacaaaataaatacaatactgaattacagcccatagaataaaatgaatatccatacgtttgaaatactgatataagcaagaga

SEQ ID NO: 470096 - DNA, 1171 bp, Homo sapiens
gcgtttcttgatgtgttctaaataaggggtcctcagaccccaggctgtgggccggtaccagcctgtggcctgttagaatccaggccgcacagcaggaggtgggtggtgggtgagtgagcatgatcgcctgagctccgccttctgtcagatcagcggccatgttagattctcataggagcacgaacccaattgcgaactgcgcaagcaagggatctaggttgcgcactccttatgagaatctacctaatacctgatgatctgaggtggagcagtttcatcccaaaaccataccccttccgcccagtctgtggaaaaattgtcttccatggaatcggtccctggtgccaaaaagaaagttctgctgccaaacttatattgaaagcatcattcttactgctttatttttctaaaaacttcatagaacaagactgctgccaaaagggcctctttgcactcaccatggccgtggctgtggtcatgcgacctttcaatggcatctctgaaagtagtttgaccctgagttgtcaaggattttggcgtctatcttctcttatcttcaaaggcattttcactaagaatttccaccccaaattttggaatccttgtaaacatctcatctatttccgccctttgctttgggattgcaggcagaaatgtgataaaggtttgaaagcaggaaaacaacaaagaaacatcaacaacaacaggggaaattatgaagcatttgcctatggtgctatctggtttgacctcagaggtcctccatatctggatatagaaatcttctgcatagatgaaaaaaaaaatggaaaaatgcagccctctgctctgctggccccaagtcctggcaagaacatgtcggtgtctctgggaactgctgaggctgaaggaaggatctgttaccagctcggctccctctcccactgaccccatgccggcggacaagtcccttgaacagattgtgccagtctgatgccagactttcaatttgactcctctccaatgaaaaaggatttaaagactgcttgtgggggtcacaggagttccaggggggctgttaggaagccagctctgcaaggttgatgcagggaacaagttggcacatgctgttttatgtcacggaagagtgacaaccaccaagaagcctttctatcgagccagttatcgaccc

SEQ ID NO: 470097 - DNA, 479 bp, Homo sapiens
tctacacatactctatcagtaacactcaccatgaaggtctgcagcttcactcccgaagtcagcaagactgtgaacccaccagaaggaagaaactcgggacacgttggaacatcagaaggaacaaactccagacacaccatctttaggaactgtaacactcactgcgaggatatttcaacgggctcccccgagcctcagagtaaacataacattcactgtgaagaaaaagcgctccccaccctgctctcacagatctacaaggccctacacaccccccaccatagtcctactctgccctgtcccactctgctccagccacactggcctcccgaccattcctggagcaccaggtgcccctccactgtcgggcctgtgccctggctgcctactcttcctgtaacatctttccccaggtacatgatggttaattgcttcatctttcaactcctggtttagatgtcatattttcaaagaaacct

SEQ ID NO: 470098 - DNA, 1971 bp, Homo sapiens
gcaccattgtcatacattacttccacaggcccagtaacaacgtatgcacattccagtggctctatatcgtcagcaaacacttggtatctttttcaggatgctgtttgcagtagtgggtcactgtcgccaaggcagtgtgagactgagagattttactctgcatttccaagtagcacctccagaattttgtctcactgagcaaacatcatatgtgaaaaatatgaaaaataggacatgcacgtgggaattcctctatattacaagtcttctggctgtccagtgcataatgttcttgaggttcctctatattgttatgcatatcgatcagaaaccaagacaaacaacacaaaacaaaccaggagatgagtcaacaccaaggaaacacaaagatgctactgagctactgagctgttttaaatgtgcaaatttttccctggagaaaagtgttatttttgaaaagggacccatgcttttggaagaagaagcattgccttgctgaggaagaagaaatcttctttctgccaccccaagttactaactttattgacataaaattataatactattctatttgtattatttcaattgtagactctccattttcttttctgatatgtagaagttgtgcattttctccctttttaagaaaattaaccttgttagggatttatacatttagttgatctttaacaagatgcaacttctggattttttcttctttgtatcttttacttcatcaatatctactctgattgttatcatttcttattatgctccttatatttatttatttattttatttagcttcttaagctacaaacttgaatttcattgattttaaaacgtttaatcttttcatatataggcacttaaatacataaattttcctattgctttggctgcatcccaccaattgtgatatattgtgatttcattattaatcagtttgaaatatataaaatttatctatgggctcatttttcaacgagttacttagaaatatgttatttaatttccaaatatttggagattttgtagtatcttagatctattgagttcccatctaattcttaccagacaccaactcagctggcaccttgattttagacttctagcctccagaatgttctctgtaaagtttcagtctcttaaaagttattgagaccttattatatccctgcatatggtccaccttggtaaatagcttgttggcactggaaaagagtgtgtgtttggcagttactgggaattatgttctgtacatagcaataacatgaagttggcatgtaatatttttctgattctctatcatccttactggttattttttgctgtaattgtttaacattgaatcttttttctaaaaatgagttaattatttataatttttatgcacaataaattattgctgataattatatgcaatgattattttatgcaatataacaattatatgcaataattatttctaataattatatgcaataagtttgctaataattatattactaattattattactattattactaataattactaataaatctaaaatgatgcaaatattatacataaattaagtaaaacgtttgcatcattttagatttatttggcagagaataaaagaaaggcaggaaaggaaagatagtcttttgggttagcactattccagtatgtaatcgtttattacatatttgtaattgcaataataattattgctaatatgtaataaacgattacatataagaatcatcatcattttagatttatttggcagcaaaggaaaagaaagataacctttcaggttagcattattctattctagtacgtaatcgtttatgtgctaacctgaaaggttatctttcctttcctttgctgccaaataaatctaaaataatgcaaatgttttacttcatttatgtttttcatgtaaaaggaataaactctggataaataacttgctgtgtgaa

SEQ ID NO: 470099 - DNA, 1299 bp, Homo sapiens
agaagagccacagaagggtttgatggagagccagagtgactagccacggtatgcatatggtacacaaaggaaccagcggtcctcgtggccacaaacatctcttctccctctcttccttaggagcattgcacagcattcaacagaatttattctggacagtatttcaccccactaaaagatcatactcttcaggatcccaggaatctaggtgtaaattctggccagtgagatttaagtgcaaatggatgcaacttgcggaaatgttccttgaaaggagaaagtatgacatttttcactactttattcacacttttgatcagaactcaaatgagatggctggacttcttgcagccactttggactatgaggaggaggttttttaccaaggcatcagtctgcattccacatggctacagagccacttccaagtcctggactcctctgctctgagcagacttacctgaggaataaacgttttcctatcctgtttaacctactgtttttcaggcctttgtaactcacagataaatctaatgtgaagtgatacatctgatatcctaataagccatcagtatttttaccctaatacaaagagtgtgaaggagtaaaataggttatgtattcatgaagaatgtgatcataatatctatacgtttaaatgaggggaaaaatacctgttaaacctttaaacaatgcatttcatttactttgtcagactcctctaagatgaaattgaacattttctcagaaaaataatactaaaacaatctcacttttggtgtaaaaaaaatcaatatccacttttttaaaactatctttactacaagactagttgtaaaaaaaaaaaaaaactttaattcagctcctattaaaagtattttagagcaaagctgctccagagaattctcaaagaaacaggaaaaacaatatcatttctctggatctacttgaaagagaattgggtgacttttacttgccctttcttctcaaaacaaatttttggactaagacaaagtacggaaaatttctatgaagtatttgatacttcagtgaatgagaaagcaagcaagctgtaaatgcagtgcaaagtgtacattcaggcttcagggatacaagaagtaataaaagttttgtgttgttgttttttgtttttaaaggcaagcactcacttggaacatttaaataaaactttaaagatagcgagtaagacattgccattttctaacaagaaacattcatcttcttgttagatgagggaactaaattgtgtccctcaaaattcaaatgtttctgaacctt

SEQ ID NO: 470100 - DNA, 1460 bp, Homo sapiens
ccctggcagcaatggccctattagcacaagaagcagataaactaacccttgggcaaaacctgactgtggtaaccttgatgaataccaaaggacatcattggctaacaaatgctagattaatcaagtaccaaagcttgctatgtgaaaatccctgcataaccattgaaatctgtaacaccctaaatcccgccaccctactcccagtatcagagagcctggttgagcataactgtgtagaggtgttggactcagtttactctagcagacctgacattcgggaccagccatgggaatcagcagactgggagttatatgtggacgggagcagcttcatcaacccacaaggagaaagatgtgcaggatatgctgtggtaactttggatgctatcattgaagccaaactgtttccacagggcacttcagcccagaaggctgagctcattgctttaactcgggctttagaattcagtgaaggtaagactgtaaacatctacacggacactcgatgtgcctttctaaccctccaagtgcatggagcattatataaggaaaagggcctgttaaactctgggggaaaggacataaaatatcaacaagaaattctacaattattagaggcagtgtggaaacctcagaaggacttctacatctcacacttctcagtccttgccaaagcagtagcacaacggtgtgttacttgccaacagcacaatgctaggcaaggcacctctgttctgcccggcatacgagcttatggagcagctccttttgaggatcttcaggtagatttcacagagatgccaaaatgtggaggtgattgcgtgtggatcaaggactggaacgtagctcctttacagccatggtgggaaagacctcagaccgtcatcctgaccaccctcatggctgtaaaggtagaaggaatcccagcctggatccaccacagccgtgtgaaacctgcagccgctgaaacctgggaggcaaaaccaagcctggacaacccctgcaaagtgactctgaggagacgacaagccctgctccagtcacacctctaagctgactggtccacgcatggccgaagcatgaggaggatcattgtgggactcattttccttaaaatttggacttgtatagtaaaaacttccactgattttccccacgtgaaggactgttctcagtgtatacatcaggttaccacggtagggcaacaagttaaaacgatctttctgttctatagttatagaatgcctaggaagtttaaaaggaacatgtttatataatgacactcagtacaagttttcctgagaatatatgaattgtttcggcaacacagaaaaattattctcattgtggcctcaaggttgcaggctcacttctttaataggaggacacagagaaatggtgcagatttaatcttcaaacacaatgggggttgtaatttttctcttccctgtgtgatttct

SEQ ID NO: 470101 - DNA, 916 bp, Homo sapiens
ggctagctttagactgatggattccacatcaaggcacagcggccccctgctctgctctgctttcagatcatgcatgtctgtgacatccgtggccttccaatgggtgaggtgtactgtgatggcagaaggacaaccagagattgtgttgatgtctcagtgtggcactgaagatctgatagcagcacgccctgtgaaggcgtctacctggacggataactggcttccctgtgttctttcctgcctaggcttttggttcctgctcattttccttggagaatttcaaatagaaatagtgtggtcggaagaaaccagaaattgtatgaatgttatgatatgtgtaaagataattgctgtcaatgaaccgccatactgtttccataaatggctgcagcaatctgcattcccaccaacagggtacaggcgttcccctttcttcacaccctcaccaacacttgctatctcttgtctttttgatacatgtaacagccattctaataagtataaagtgatatatcatgtggttttgatttgtgttgccctgatgatgatttagtgagatcattggattgtgtttgggtttcccctccctgtatcacagcaaagcagaagcaatgataaggctcatctcatttgaatcccttctctcggttatggcagtcttgtgctgcctgttgttcaatttttgaaaaccactgtttcgcatagttagttgggttttccagttgcttacattacagtaagcagtgtcgggcctcttaagtatttatttgtaaaattgctgaatgctgttgtgtgtagttgtagttcacacattatcattgtggtacagtagtccattgagtgcatttgcacaattgttggattttggctatgactaatgctagtatcagaacattttaggtaatgtgttttggtg

SEQ ID NO: 470102 - DNA, 576 bp, Homo sapiens
accaccactaaggcagaggctgcctgtgggtggagtcaactcagaggaaagtgtggccgagggatggacatagaaacccaaaggccatcaaagactcctcatcttccatttgcctctgaaagcaccaagcatccatgccttcccctctttgatattcatcccctcagtccgtatagatcagaaaatacaagttggtcacctataagtgaaacctactctaggacacatagtgaggtcctgtctcttaaaagaaacaaggaagaagaggaagaggaagaaaaagaagatgaagaagaagaagaagaagaagaagaagaagaagaagaagaagaagaagaagaaggagaaggagaaggagaaggagaaggagaaggagaaggagaaggagaaggaggaggaggagatggaggaggaggagggagaaagaaggaagaaagaggaagaggaggaggagggaggaagaaggaagaaagaggaagaggaggaggaaaaaggagtaaaaaggaaggaggaggagggaggaagagaaagaaagaaggaagaaggaaagagtaggagaaggagggaggagggaag

SEQ ID NO: 470103 - DNA, 3828 bp, Homo sapiens
tgcctgaaggcttttctccccctaaagatgtcgtggggcctggggaaccacttaaagttccttgccatgcttgcccaagaaacacaaagtgttggtgaagctgtcttagactctgatgaaaacgtaggaacatcaagagcatctgtaaaaattacagctttaatgaaacagatgaaacaggccatcaaagatgtcaggcacaaaagctgcagacctagtggggtcatcatacacttgttcatgtccttacctgttttcactgaacaggttagaaaaagaaactgctactgtctttctggatgtgtgattgctacttgggttggacttgacaacaactcggaaagatgtgtcaaaaagatagcgggaccacttatattaaagcttccaaaccaaaataccaaaagctgtgagcatactgagtatttaagtatgaataagagtgaaggtggggggtaggtttagctaaataaaagattgcttgatatcttggggttctttgaagagttttataggcttagagttcacagtttgaatgaatgacatttttttaacttttatatatggaagtttgttaacctgcatttcaattattgaataattaattatactaattacctttgtgaaaaaatttgcaccgtgagcaacctaagcttcagtcataaattaaagcttatagaattgatattgaagtaatttaaattatcctaggatgtcagtgatatttatttttcaccaaagaatgttcactttgcattaaaaaatatggagatactctggaatattagcttagtatatatcaaacaagatatgtaaatgttaaactatcaaaatgctttatgcaaagcggccagatatttacctgttatataatttttgctttgaggatttgtaaatattggcaatcaaagaaaataaaatgtgtatacattaaatgcattcttatgaggaaaacggatttctatttcaagaaattagttaagaaacaaggaagagtccattgcaaaacaaatgccgatttatcattggaaatactgcctttttaaaaagcagtttagtggaattgatatataccagaaattctatagattaaagaaagaaaattcgtcattctttaataagtgtttactaccagttttttaaattcttattctttatttacctgagaatacttaaataagtcttcaaaagcactaacaaaatcaattgaatctttcagatgtctatgaaatactttcagtaacaaaaataaatagaggcaaacaaagtacatatgggccagtattgacacaaaccaatgagaaacagaaaattcacttttattctgtttgcattttttcctcctagcaaaactctctgctacagtatttctttttaagaataaacaaaattaagatgccaaacttttccctggtttatttattaaccatgatattaactcagaattttaatacatcttttttaaagtatttaaatctttattaactacaactggtgtttggtctgtataagggatctgaagtgtagaaataagttcaatagataaaaatgagtaaattaaagttgtcactcaaaatgttggcttatttttaatccaatggatccagatatactcaaatcactttattagattttattatttattatggactatagaaactgaaataatagtattttattagaattttctaaaacagaaaacattttaaaataataaatgatttaaaataataaattataaaatcaaaaccaagcccataaatcattcataaatcattactttctctgcacttcctgatgctgcctttagaaatgactattacaatatattaaacatattagggcaaacaattcctaagatattgctttacttttctacaatattatgctacctcccactctcattgcccttgaaatatatatgtgatatatatatgtgttttatatatatatatgtgatatatatatgtgtgttttatatatatgagttaaattttattacgtggaattattaatatgaaaggcacatttttataagttagaatgtaaaaattatactatcattttaaaaaacctctaattctgacagcccatgtaaaaattgtgaaatctgcatgagatttgttttatttttattgtattacagtccacgatcaaatagaaatatattcagatgtgtctaaaattaaccttctataaatataaaaatattgacaagggaaaataaagctctactatattaaaataaataagcaatgttattgttaaactctacttaccataatttattttaatactttttaaatagatcttaaatatctaatcaatgactttgattcaattaatttcagtacaagtatttaaataagtcacaaaaacttaaacataaaaatattaagtacattattctgagttctatttcatttaggtataaaacttaaggaaaaatacttcttaaaaatgaatttaaacaaatattagtagaatatttaacatagtatttgatttaatgaaaaattacttgcaaaatggcaaaaataaagggcaaaaaaagaatttcaatttcttctggaaatttaaattactaaaataaaagactcattgtttatattgaaacattataatgtgtatattaattttaaatttaaaaactttaaaaataccatcatagtttttttataagtgaagtttctttagcattaagctatgaaaaataataactatgtcttctgtttaagcataaactgagatgaattctttcatgttttttaaaacctaaggtatagacataatttaatataatcaaatatatatatttagtgttgttagttttgaattatttggatgcaaattatatattcttacctgaaaagctcagtttttaaggaaacaactcaatatttaaataaaaatattttgcactaaaacttggaactattttgctttattttagtggcctgtgctaacttgctttttacaaagcttttgaaacaaatattagtagaatatttaacatagtatttgatttaatgaaaaattacttgcaaaatggcaaaaataaagggcaaaaaaagaatttcaatttcttctggaaatttaaattactaaaataaaagactcattgtttatattgaaacattataatgtgtatattaattttaaatttaaaaactttaaaaataccatcatagtttttttataagtgaagtttctttagcattaagctatgaaaaataataactatgtcttctgtttaagcataaactgagatgaattctttcatgttttctaaaacctaagatattattttgtcagataagttttctgtgccattctccatctcttctccctctgaaattttcttaatgtgaatatttgtttgcttaatggtatctctcataagtcttacaggcattctttgccctttatcattcttttttgtttttattcctctgactgggttatttcaacagacctatcttcaaggtcagaaattcttttttccatttaaattcatcttcttttgaagctctaaattttatttgtttaatttttttttattgaagtgttcagctccttctgtttgtttttttaatgatgtcattatctttgttgaacttctcattccgatcataaattgctttcctgatttcattgaattgtttgtctgtattctcttgtatctcactaagtttccttaagattattattctgaattcttttgcaggcaattcataaacgtgcctttctttggagacagttactggagaattattgtgtttccttaatggtattatgtttccttactttttcatatttcttgtgtctctg

SEQ ID NO: 470104 - DNA, 592 bp, Homo sapiens
tctgaactccatgtggcagacgtctgaggctacctttagctgttcattcatccacctgtgtacctaccaagcagctgggactataggcacctgtcatcacatccagctaattaagacaagagaccttgtctctacaaaagagactatgtttcctagtctggcttattttacattaagaacttgttccttttgtccattatggctaagagccaggactctttccctaaaaaaacaaaacaaaacaaaacaaaacacagcaacaagaacaataaaactacttattaaggccgaggacaggatggcttactgtctgggccattccaaacagacatcacaccatgtgtacaaaacaaaaagatcagcacaacttgtaacagtttcaccagctgactatggaaagggcagctatccgttcatttctgtccagagctcagttaaggtcagcagaaatcagctgaacctcagccaatctacaccatctacatgagtgtgaaataagttatggtgctatgagctactgaggcttggggttgtttgttacagaacacagttgcagcaacagctgactagtacattaaatgtgtgttgtaac

SEQ ID NO: 470105 - DNA, 656 bp, Homo sapiens
tggcgttaattctttgttttattgacagtcttcccaaccagaatgtattacatgcaacattattacttcaccagaaatcagactgtgatcacagtgcctatctgtgagcacaagctacagtctgcacacattttctggacattcgtaattgggcccagtggatgtatccatcgccaccaccttacctggcaatgcaatgtcaaaagtggagtgggttggggactgaatgggctctgccacactatgatccagaatgttccaactctgggttctgagggatttggttcccatgaagaactcagaaatcagcaattttgcttggaaagagtttattcaccttggatttggtggatatggaggttttgtatggtgattctgtgtttagataaatgcttaaatatgaagagcagagaaaatcactatgtcttcttgtgtatcacactttagagaggcaaagaccaggatgcaaaggataaaaagaatctggattagctctgggattttcagtaaagggaggttccggtaggatgcagtagccaggaacatgggttcttaagcgggaccacctagcactgcttcccgctgactgtattcaacatttttaagcctaaaattcccctacagaaaataatagcaattacctcattgggttgttt

SEQ ID NO: 470106 - DNA, 714 bp, Homo sapiens
cagccatgttgctcacacaaagcctgtttggtgttctcttcacacggacgcagtttgtgacatgactgcttgtttcttcaaagacagcaggagaacctctctctctcctttctgctgaaacggagtcctatgtatcataacacggtgataaggcctggacagctggcatcttggttggcattccctgctcagcaggtttggactgcaggacctctgcaaattttgtcatccagtgggccacagatgcccatcttcttcaacaaagtcaggctttcagcccagcaagttttgccagcaccttggcatgtagtttccttgctcttggtattcagtagagccgaagttccacattggtcattgagcttcatcagcagcacagtgggcaatttctactccctggctttatcctgccagcaatacagcaactcagctaacttccctaatatccaggagaccgtagctacaccctcaacatcaaggtctgtcatctcagctttggtcatgggtggacttgcttccaagattattccttctttgtgtactcagacttaaaaaatgatagaaataaatgtttgcatatggaaaataattttaataaatgtggatgtttattaacaatatatttatgtttcaatgcttggacaaattaacatctttataaatttggcattgagaaattttgcaattgccaaggaaatgacaccatagatccag

SEQ ID NO: 470107 - DNA, 1131 bp, Homo sapiens
gtcacggacatagtgttacaggacagtgcagctacaacaagaatataggaaagagtacatgaatgatatcataaaattcaagagggatagtatggtttctgtgataataatactattgaaacatttgaataagaaatttgaagttgaagaagtcaaataccatatgaagagagttgtcaaaaagaaattcatgagagaatacattctgctctgtgctggatccttccctaagcttatctcaggttttgtcaaccatggcaccattgacattttggaccagataattctctgttgtatggcctgttctgtgttttgtcaaatctttggcatcatccctggcttgaatctaccagatgccaatagcactttctcacttaagaccattgaaatatttcaagatgttgccaagtgtccctcagggttgaaggttgcccctaattcaaaccactgctttgaggcatgccatcacagagagggttgcctaagactgaatgtgtgcctcagactaatttacacacctaaatcaaattctacagtaactctgatcagtaggaaagctggtaccttaacttcctactatgtaaatttttgtctctgttaagcagtccaaactttgaaaggatgttgggtattgatcttttacaacctcaattatgaagaaagcacttatattggtttatctggttggaaaaaaaactataaatgcattataacttgattgatgggaagctaacaaagagataaaaatgttaaaagataatcttcacctccctccatattaataatttgtatgagggccacatttcactgcttaagaagactttatttcttcagatatggaatcggttggcaagttttgaaagagattggaatatagtcagagaaaggaatatattctctaagtctcactttgtctaaaaactatttctcacacagttgaaattaatggacaagagcgtaggttctaatgtcagatagccttgagtcatttattaactctgtaactgcacttaatataaatattttctctgatcttgttttcttaccttcaaggaggctaatattagtgccttttacacatttttaaaaaaaattttaagcattacattagataatatgtgccaagtactt

SEQ ID NO: 470108 - DNA, 874 bp, Homo sapiens
gctgaggcctggatgcttcctgtcggcctcagtgacactgagcctctgctggaacctgctccgggaagctctcaatgtgccctgattatctgtttcctatcagcttccactgataacgagaacctctcaaaggccggcccctgtttgcactgcccggtcgtcagccgtaggaagatgttcggtgacaggcaaggacccacccattgggcaaatgcggacgtgggccctgcaggattctggggctggtcacgcagcagggagctgctactgccagtgctactgcagctattactacctccactgctactgtggctgtcactaccaccactgccaccacagctgtcactccaccaccgctaccgcggctgtcactgccaccactgctactgcagctgtcactaccaccactgccaccacagctgtcactccaccactgctaccgcagctaccgcagctgtcactaccaccactgctactgcagctgtcactgccaccactgccaccacggctgtcactgccaccactgccaccgcggctgtcactaccaccactgctcctatggctagtactaccaccaccactgctactgaagctattactaccaccactgctactgctgttactgctgctattacactggcagtggcaatggtaacagtagtactaggaagaggagtactaggaatatgaatagtgataattaccactacttgaagtactcctcctcttcctattactactggtagtgctagtacggctagtaggggtagtaatcgtggcagtaccactactactcctagtactgctgggttgtaaatagaaaactccctagagaaaataaggtgggactgcaaagcttttatttcctgagcct

SEQ ID NO: 470109 - DNA, 1234 bp, Homo sapiens
accatctggccgcacgctaggaaaaaggtggactcgaggaagatgcaaagagggtactggggctgtatgggaacactgaccaaggtcctgagtctagaagactgccctgggaagttagagaaagaagccaccttcctgccctcctgcgtgtggtgtgaagagaggtgccttacaagcaagtgccttcatggtgaggataagctcacaggctcaaggaagaaacacaattgtaagaacaacaatggggaaaaggcaggatccaagtattttgaatcacagtcgcaagaaagagcttcaagactcagtgtggcacctggaaagctgagtcacgatgctgttggtgtgggctcacaccttgtgtgcacagtgcacatggccatgtcttgcctccagcggcagaaggcctcatactgtgtggggggcacacagcgggttgggggggttgctccacagagtaaagaaaaggctcttaccagatggagagcagatttcagatgaagatgacccaattagccttgattccagcatgtgcacagatgctatgactgaaataaagtaggaagtggcactggtgaaatgttgcataatgaaatacataggtttttattaaagaaaaatgttgagattttaaaaggcttttaaaaaaggcttttaaggctcgccccaatcgtgttattagtaatgttagcaaagaccccttttccaagtaaggtaacaggtaccaggggttaggacctgatatctttgggggggttgcatttttcagcccactataggtgtctatgtttatgtacatatgtgtgtatgggggcatatggatgtgtacatatgtgagtatgtacaggtatatgtgtgattggtatgtgtgtgtatgcatgtgtgagcgtatgtaaacatgtgagtgtaggtgtatatatgcatcttagaggaaaagctttcaacttttccctgttgagtatgatgttggctatggatttgtcgtatatagcctttattgtttgaggtacatttattttataactaatttgttgagagagtttttaatcatgaaagtatattatattaggttggtgcaaaagtaattgttgtttttgtcatttacttttaatattttgtcaaatactttttctgcatctaatagtataatcatataatttttgtccttcattgtgttaatatagaatatcatgtttattgatttacaaatattgaaccatccttgtgtcctaggggt

SEQ ID NO: 470110 - DNA, 935 bp, Homo sapiens
tacacgcactgtagattcaaattgtgtctactttaaaaatccagaaactactttcacaaccaatttgcgacccaaaagcaataaaccagggtcccaaagccaatatgaggaaggcagcaggggagggagaggatgctcccattgtttttgtgtgtgacaactcctctgactcccccagtttcccccaacctcccactccagtgtcgctgttccttgcccaggtcgacggctgtcaggtcacgtgctctcaggcccttcagtaccaagcctttccttgggccaaagcctgcatgtggtacaaaactgcaaatgctgttaattatgacaatgccctgggaccctggaaggacaaatcatcctgcccagatttcaaagaaatcccagagaggcattcttgctgttatatctccaggactccagccagcacaaatcaagaaaatggtttccaggtgcagacagtctccccctcttcccccctcactttaaaatctagtgattgttccaagctttaatctgaagatggacgatagggggaacagaaggatatagaatatcattttacattgtcaaaatataaaaatctttagattctattctataactacaatggaattttctgtatttttctaagatcaggtctaaatattttaaaacatgatgatttttgtttgtcataagattattatgtaagcattattcactgactggttacctgtttttattttggtgctgtatcattaaactcatgctttggagaatcccacaaatttattaaggcaataaaacacatacatgattttcttctcaccaacaatgctgctttgataataagtttaatatttctctttgattcaaaccaacaaatactcgttgagaaactgttatgctcatagtgttgtatttggtgctttgaggtatatataaataagatatgg

SEQ ID NO: 470111 - DNA, 833 bp, Homo sapiens
agaaaggggctcccacagtgcagcagtgggctgaagggctcctcaagtgccgccaaagtgggagcccaggcagaggaggcgctgagagcgagcgagggctgtgaggactgccagcatgctgtcaccactgccagcacgctgtcaccactgccagcacgctgtcacctctatcatcccagcaaggaatgtggcatggatgtagaaactgtagcaagttatccagcagatctaggtaagatcatggatgaaggtggctacgctaaacaacagattttcagtgtagacaaaatggccttctatttgaagaagataccatctagaaattttatacctagagagaagacagtgcccggcttcaaagcttcaaaagacaggctgatgctcttgttaggggctgatgcagctggtgactttaagttaaaatcaattcttatttaccattatgaaaactccagggcccttaaaaatgctaaacctatgctgcctgtgctctataaatggagaaataaagcctggatgatagcatgtatgtttaaagcatgttttactaaaaattttaagcccactattgagacctactactcaaaaaagaaagatttcctccaaaatattattgctcattaacaatgcgcccagtcactcaagagctctgaagatgtacagggagattaattttgttttcatgcctgctaatgcaacatccattctgcatcccatggatcaaggagtcatttcaattttcaggtcttattatttaagaatatataacatgtattttttaagactatggctgccatagatagtgatttatctgtttgatcgtaaatggaaaa

SEQ ID NO: 470112 - DNA, 531 bp, Homo sapiens
agcgcttacacgcatgcttcttgcagttggtatggtcagttgtttggattttaatcattctagtaggtgtgtagtgatatcttgtcgttttaacttcattgataacaaaagaccccctgcagaagataacagctcagggaagaagcaatcacatctaatgggacaatgtgagcccgaggaatatggagaccttggattgtgggcactgatgaagctggaaacaaattctcagcaaactaacacagaaacagaaaaccaaacactgcatgttctaactcgtaagtgggagttgaacaatgagaacacatggacacagggaggggaacatcacacactggggcctgtcgtggggaagcaggcagcacagccggaggtgagcagtgagagcattaccttctgggccccacctcctgtcagatcagcagcagcattagattctcacaggatccacaggatccccagccctactgcgagtgtgagctgcacatgcaaggaatctaggttgcgtgctccttaggagaatctaactaa

SEQ ID NO: 470113 - DNA, 769 bp, Homo sapiens
tgcaaggaggtaacctttctgctgctacatcctgacatttgcatggaggcaaatgcatcactggtaattgcacctgagtgtcaaagccacttgatgtgtgtgttccgaccaagatgcaaagaggaaactcaaagcttgagaagtctgcatacgagcctacactggggcagctttggggtgatgataccacaggaagtcaacactctggaccttgaaagaggagctctcgtcaaactcaaccatgatggcaccctgattgatcttggacatccagcatcaagaactgtgagaagtaaatttctgttgcttgtaagccacctagtctatggtactttgttagagcagcccaaactgagacacatgcttacagatttggggctatcgaacaccaaaactagatttaaagcaaggtctggggtgggtaccaagacagctttcctaagcagttcccagttgatacagctgctgctggtctggccaccactcctgggctcctctggtgtgtatgctgcagatgtcagtaaggtgtctgtggtcctgtctgctgctaaggatgaatcattcttgcaaataaaatgaatattaatacatttatatacatagtatactttatacaaatcctttgaatgttgttctaagaaataagtctggaagcaaaataagttcttaagttgacaattttgacacgtgattctgcatagtattgttaactgtgttggaatatcagaatgttatattattgtgatatgacccaataatgttagctggc

SEQ ID NO: 470114 - DNA, 772 bp, Homo sapiens
acccgagcagctgtttccgggctacaccccaagtagcaggatttgggccaagacaacacatgggaggaggaggcactcagtctgtggacacagagaggaaaacatctcaagggacaaagttcttgtccccatttggagagcaattctctccacatgaatctgccatggcacacacagcaggacttcagtcacttttgagagtctttttggacctcatcactttaagaggactccttggggctccagagcacttcctgtttaaggagaaaattggtgatacaactcttcaaatcaaagttagacattcgttgagtaagatatttagtaggatagtcaccatcttctctgccccacttctgaacgatcctggccatgtccactccagaaatgcctgggtgactgaccagacacatccttttgagagggagaggaagcacctcacttctaaaaggaaatgtacaaacgaacatggcccctttgtgtcccttcctcgaggtcagctatcagagttttccaaaataaaacattatgacatttgagaacacaaatattacagtaattatttctttactttgacccagtcttgacatgatttgctcccttggccttcagacaatattttggaaatgatgtgagcataacatgttttttcaatattgagtcataaaactatttcatgcattttaacatccttgcttgtggtttatgcaaactacagagatttgcatagttccaaacacataggcttgtgtaaagtctgtcttttactctc

SEQ ID NO: 470115 - DNA, 815 bp, Homo sapiens
cccagtgacatggagtgctccctgagactttgtcgatggaaccgtcatggaagacggatttattacgttgggattgctgaactttccacatggctgggaggcctcacaatcatggcagaaggcaaggaggatcaagtcatatcttacatggatggcaggaggtcaaaagagagcttgtgctgggcaacttcctctttaaaaccatcagatcttgggagacgcattcactatcatgagaataacacgggaaagacccgaccccataattcactcatctcccaccaggtccctcccacaacatgtgggaattatgggagctacaagatgagatttcagtggggacacagagtcaagccatatcattctgcccctggacgctttcaaatctcatatcttcacatttcaaaaccaatcatgccttgcaacagtaacttttctgcagcgccccactctgctggtaccaatttactgtattaatctgttttcacactgctgataaagacataccggagactgggaagaaaaagaggtttaattggacttacagttccacatggctggggagatctcacaatcatgacagaagcaatagtttatttaatcattagagaaacacaagtagaaattaatatatttagtaaagaaaatattcttttgtaattattttattgaaggtttgatagttggtgtctagtattgtaaagttttgtctcagaaaaggtttatggtcttttctcaaaatttatgagagatttaagttaaataagtactatattgaatattctacaacttcaaaaaattatttatgtaaaaac

SEQ ID NO: 470116 - DNA, 719 bp, Homo sapiens
ccgccatttttctttgataccaggcgggggcacccctaccgctaaaatccataatctcagtataatcatgaaaaggatattagacaaattccactggggaacatttacagaatatctgaccagcactctgttaagattatcaaaaacaagtctaaaaaactcttacagcccaggggagcttaaggagagacatcacaaccaaatgttatgtggtatcctggatgggatcctagaacagaaaaagggtatcagggttatagaacgaagctggagacatcacattatccaacttcaaactatactacaaggctacagtaagcaaacagcatgttactggcacaaaaacagacacatagaccaaaagaacagaaaagagaacccagaaataaaaccactcgcctacaaccacctgatcttcaacaaagtcaacaccttgcgtgctagggctgaagctgacttcattgtggtggataagttttttgatgtgctgctggatgcagtttgccagtattttattgaggatattcgcttcaattcaggccccttttctccaagtctgctgcagtttgctgaaatttcaccccagaccctgtttgcctgggtatcaccagtggaggctgcagaacagcaaagattgctgcctgctccttcctctggaagcttcatcccagaggggcactggcctgatgcccgcgggtctcctgtatgagctgtctgtc

SEQ ID NO: 470117 - DNA, 605 bp, Homo sapiens
ctgcttctttttctagaaacttctgaacatggtaaacgaagagtttgaactcatgatattaaagatcatatccagcgtattagtcagccagggctgtcataacaaaacaccacagactggtggcttccagaacagaaatttattttctcacagctctggaggtttgttttcccactggctgtctctacatcaggggtcaccagccctcaggccgtggactggtactagtctctggcgggttaggaattgggccgcacagcaggaggccccagcttcttgtgatcagcccatcagaacacaggggccatacccttgcctcagagactcttatctttttgcatggaagctgagtgaacagaggatcagaaccaacttggctgggtcctgggccctgcagcaccaggaattagatagatgcacggccatcaccttcacttaatttaggtctttactcaaattcattttctcagatttagcttatgtgtagtcatctattttcatatgttattgatcatttcagtctaacctttgaaattaaacttaacgctctaaacaggaatactttctgtttcctgcaggaattaatttgcatttttgtctctgta

SEQ ID NO: 470118 - DNA, 1207 bp, Homo sapiens
aactgggtcctcctccaacaagaaagacaaaaggatgtcttgtgacacaaccagataactggtgtctgtagttatgcttgctaagatttgggtgcatgatccagggagacagcatgaggaaaaagatttgacagcaattgctggcttcaaagatggaagggacccgtgggccaaagaatgcaatcagcttctagaagctgggaaaggcgtgaaaatggattctcccacagggccttcagaaagtcatgcagccatgcctacaccttcatttcagcccaatgaaagccatttcaaaatactgagtgttctaagcgggaatctcacagaggatgtgcctcatgtgaagaacaaggatggcaccatgtccaggaaggaggagatccgacatgagagcagcaaaaagaatcactgggcttatacatcttggatggagctagaggccattattctaagtgaagtaacacaggagtggaaaaccaaaaaccgttatgttctcacttataaatgggagctaagctatgagtacacaaataaaaaatttggggtacaaggtgtggtaggaagtggcactgctgatcagcaggtggagctcttttctctcattatatatttaccccaataccaccaacaacaaccatttcctccacccttgtatcgtgagttcattgggtaatgctcgctatgtctaatattcaactgagactccattcagcgccatcataaaactttatataaaaaggctttgataatattaaaactttttatcaagctgcatttgcgcagaatctataaagtctaataatgctcattttgtgcctctattcagttgaataaagttgatatttgttatatgaagatttgttgagagtaacaggtaaaatatgccgtgacatgtatataacagctgttaaaatacttagcttacatagtcatagcgcattatacacttaatttcaaattgtgtttgcataaatttacaactctgagcaaggcaggtctaggataattatacccatttagcagattagaatagtaaggccagagacattagatgaagttaactgaatacgaaaacattcttattgggacacgggattttcggctctttctaggcttcttccactataatatgttggttgttaccgatgctctgtgagtaactgttgtttccttccttaccttttttatcctgtgctgtactgaaaat

SEQ ID NO: 470119 - DNA, 584 bp, Homo sapiens
tggccatttcgtatgcactttgagtctttgtctgctcctgtgaaaaagcccattcacaggcgtgaccatttgtggagaccactgtggtctcattgtgtgcagtcatatgaagaagctattgcattttcctcttcctccattttaacccagcaccagaaggacatcaagagctttctcaatgcctttagggaaaaccctggactagctcatggtttgggtggagaagcccaaaaagctgatgataagcaggtaggaaaggcagccccctcccttcagtcatgcataacctacgctatcctgcctctggaaagtagatctatcccctccaattccatggagataatcccctccaattcagtggagtctacttttcattatggacatgtaccagcacttccaaacaatgtcagtaataaataactcctctccattggggtacactactccaaagccttcccctcatccagtgtgctacactgatgcttcagaacataacttttcaaacaaaattgcttattagtttgcagcggttaagtctttcaaagcacattttataaaaaaagcattttacagattcttgaatg

SEQ ID NO: 470120 - DNA, 1438 bp, Homo sapiens
catctatatagaggagggagaaccaatttagccttcaaatatccatccatgcctctctgtctgtatctatacagacacagtccctgcctaatgacacccccatttttcaattccttaatagccacaagccctatagaaggaaatccttggccttaccacgtactttcatttgcaggaataacttcaatggtgggtcttatatccagtgactggtgtcctcaaaagaagagaagacacagatacaaaggaaagaaggtcttatataaacagaagcagagattgaatttctgctaccacaaaccaaggaatgccgggggcttaccagacactgaaagacaagaagaatccgtcctaggaacttcagaggaacaaggccttgctgacgctttgatttctgttttctggcccccagaactctatatcattgctgttctaaaggcacaaagggagaataagcatttctcagaagacatcggcggcggtgaagctaccacatcatccatgcgtgctgaaggcttactttcaatttttccaatgcagaagaacattgtttttgaaaagaagatgatagaatgcattataatgcagctctttaatacatgggatttacgtgtgctgaaggtcaaatgatatgttctgaagctactgaaagccagtaagactgctagtagatcagttatttcagttccctcagtacagctttattgtgtttttgctttatttgtgtggtacagtgtgctttgttattatccttagggttctgattgctgttattttcatcttttcaatttgcaaaatacactaaaataaaaaacttaatgctgaaactaattttttatctaaacccacacactagccagatgtattctgtcacaccatgctagtatatgctgtttgatgttgtgtatcatagtattttttaaattgttcacatattgaatttaaatttatgcagtaaaagaaagtagagaaaatgctctcttagtttgcttttttgctgctatttatccatatcacttttttatttaaatggcaaatctccaattttgaggttttatgtgagtgcctgaaatccaagcagggtgagtggttttattttcattgtttgggaaacaaaaatgtacctctgataatttttgtctttgattactgcttcttcaaaggatttaaaccagaatgaaagcctttgaaatcttcagagatgaggagacatgagagttattctgtatgcactagataaacagatgtcttagcttttcaaaccaaacctgaaaaatataatctcaagcttcatcagaaacagaacactttttgcaggtgtattatgttttatattttactaatgtgaaatggaaaaaataatgtcattttattcctttttcttgtctaagaatttagttccaattaacatttcagaaaactttttgtttaatatctc

SEQ ID NO: 470121 - DNA, 506 bp, Homo sapiens
ctgcaacagctcgggatcctgttcgtgatgccaattgtcaggttctaacaggtctgaggggagtcgacatgagagcttctagtttcggggcctgtggatcctgggacttacagtaccctttcccctggttctcaggccttcagtcttgggctgcaagttacattagcagcccacctaagttctcaagctttggacttgggctggattataccactggcttttctggatttccagcttgtggacaacatatcatggaagttctgggcctcccactaaatgccaacatcaaaaagctagacagatctcaaatcaacaccctagaatcacaactaagagaactggagaaccaagagcaaacaaaccacaaagctagaagaaggcaagaaataaccaagatcagagtggaactgaaggaaatggaggcacagaaaaactcttcaaaaaaatcaatgaatccaggggatggttttgtgaacaaaataataaaatagaatgctagctagtct

SEQ ID NO: 470122 - DNA, 1345 bp, Homo sapiens
acctgtgagaagagttacttgggctgagtccagcaaagccataagatctcaggtacgtctttatcagcagcatgaaaacggactaatacagtaaatcgggcagggaacaagagaaatgtggatttggatccccgacccagagtccttactggggcaccatctactggagctgtgagaagagggtcaccgtcctccagatcccagaatgatagatccaccaacagcttgcaccatgcacctggaaaagtcacagacaacgccagccagtgaaagcagccaggagaggatccgtatcctgcaaagccacaggggcagagcttcccaagaccatgggaacccacctcttgcatcagcatgacccagatgtgagacatggcatcaaagatgatcattttggacctttaagatttggctgccctgctggatttctgacttgcatggggccagtagacactttgttttggctaattttccccatttggaatggctgtatttacccaatgcctgtacccccattatatctaggaaaattctacttcataatagaagtagtagcgcgtaaaacattatctatggcagtgctctctgggaaaaccagattgtatgacaatgggaaagctaaagacccaaaatatgttgatgaatgggctcagcagaatgcctgtggcctgggttcggtcacagaccctgcagaaagaattgctgatgctaggcactatgcattactctataagatcctgtcctttgctgtggaaacctggattcctctgctagcattctcagaaaaatgggttccagggagacctgttttttcaatgtgcatctgaattgatgtttcttattttttctaaagttatttttcttcattttaagattagattgagtcgtgttcttatttaataatagtaagatatgagagtcagtcaaaaacaaattgcagacacatatctcctatatcataatataaactttaaagaaagtttaaagaaagattgaagataaagggttagaaagagattaaagaaattgacgtggaagggaaggagaaaagaagaatatgtgatgatggagttattaacatcaggcttaaaatctcattttctccacttcctggctctacatccttaaagaagttagttacttctccatgctgttgcagaaagtcagggaccccaaatggagggaccagctagagcctcaggagaggaacataaattgtgaagatttcattttaatatggacatatttcagttcccaaaattaataattttataatctcttatgtctgtctttactgcaatctctgaacataaattgtgaagatttcattttactatggacattt

SEQ ID NO: 470123 - DNA, 799 bp, Homo sapiens
ctcactagcacagtggaagttaaggtggagaagaaggacatagataccatttcaaggggatcccctggtagtaacgcaaatgatgactatgtacaccattagccagcaaatagtcacattcactggtgcaagtaagctgactccttctgcctttgtacagtttttcaaaattatggccacttccagacagaaggatggaaaagagaaacaacataatgataatctccacattctttggaccactgaggttccattttctatttctctggataaagagagattggttcaaccatgtgtgtttaccatggccttggaagcccttcataatgatgacaagaactgtgatggagagaaaatcaccattatcttcaatgagcaagatgattcagaatatgagggaacacccaaggaaacaccactactacacttcactatgctttatgtattcttccgggctgggcctcaagtcttggtgaggaaatatatccgaacttcatcccctacactctgttgtccagtgcctttgcacagtgacagactgcataaccagaaagtgagtgaatttgataaaaatgtactcttttcttaaattaggtaaatagatacttaagacctaatttggttctaagttaaagtttccttacctgatttctcattttctgcttcctgctagtctcttagttttccatattgtcgtcctgtatagaatgatctattgagactgtcatgggtattaaagttaaggtatgataaacttcttcttcagtgtctccaaatgcttagaaagatattatgtatg

SEQ ID NO: 470124 - DNA, 678 bp, Homo sapiens
agtctccaggcatggaggaactgaaacaagtcatccctatacacccccctgaattcttggacaaaattaaaaggtcgttccttcagagcaccaaggagatgcacctaagtaaacgagagaaacgctctggatcactgcaaatgttcaaggtcagggaggagactagtgaggaaaagggaagtaggagtatgtggtgtctgggaaaacaattgcggacaatgtttaatgaggaaggagcaatcaactgtgtcaaacacaatttaattgatgaccccggagattcacaaatgaaaagtggccgctatcctcaagtcatctccattttggtgaggaaagaatgtaaaaagattctctccctcatgtttaacaaggaagagcagagttgggcaaaattatctaagaggctccctccctcacctgccacaaggctttggtcaagtacctttgccatgagcccagacatttttcaattgcagcaactctccgtgtcccactccagaacctcctatgctgttccattcacgttttaacctactatatcatctgtaatctcttaaagtgattcaacttactatcataatttaaattatgattgtttatatgtgcctcatttccttagattgtaaactacacgaagatagcagtttctgttgagtttatttgttggtgtaccccagc

SEQ ID NO: 470125 - DNA, 759 bp, Homo sapiens
gctgggtcatatggtagttactagttttttgagaaatctccattctgatagcagctgtacttatttacatccccaccaagagtgtataggggttcctttttgtcttcatccttgccagcatctgttattttcttttctttttataatagccattctaactgaggccaagcacagagtttgtgccattgctggaggcaaggccacatctcacagccccacacaggtaactctcaggctctggaaagcacgtgctttggatctctttttgccaggggctgtctttttggtgtactgtactgtcatttccctgggcagtagtatttcctgtgggctagaatactggggaccccacagcacctttaggtccagtcagtactgtgaagatatggaagctgtgctctccaggcaggatgcagtcccctgatggctgtgctctcacaatggcacctggctacagccacttaggtctcagttcgggggcgggcaggagagtaagcaacacagcatgagtttcctgtctgttgcagtgctcttgcagcggctccaaatcactgctcacgtgtgtcagggtttatgtgtttcctatattccttataaccattttgatctttacattctgcattgctgtctacttttatcttgagtttttgtttatgacacttaaatttctttctcactttcttttgtgtatattctatagcaatcatcttaatgattcccaaggtgtattagtctgttctcacactgctaataaagaag

SEQ ID NO: 470126 - DNA, 695 bp, Homo sapiens
tttttgtttaatgggcatagaaaacaacacacacactgtctttctctctctctctctctctctctctctctctctccctctctctctctctctctcagaggaagttgcctagcaaggaagctctcttgcattaggaatgctgcaacggattgtgacagcaccctcgaaaatgaaggtgaagagaatgcatagtcaggctgctttggtcctgctctacacagaagagcctaagaagggaagggaggaggaaccatcacctaccttaccacctcctccttctccctcagcactgccattactgggtaaagacacaaaagagaaaatggagatttcccctgagcctcctcctccaataaattggaagaaagacaagggatacactacagctatgggaccctgtcttaggcaagcagcattagaaggggagctcttagcctgcctggtgatgcaagatcaacaaggcaatcagaaagtacttcctcaaggaatgctgaacagtcctaccatgtgtcagtatcacattcaggctttgctccccagtagaaaagaatttcataattgcaaaattattcattttatggtgatattttactagcagctctaacggagccagtacttttaaatttatatgcctctgtccaaaggaatacactgttaagaggtttaatcatagcacctgaaaaagtaaaaatgta

SEQ ID NO: 470127 - DNA, 3728 bp, Homo sapiens
cttcagtctgcaggcccacagtgatgttgctgtgagtgttggttgttaatggcagccttcttctggtcctgtctgcaaatttctcttcaggctgaacaagaacagcccttggtgggagcacggacatcatctaccatctcgactcctctgagcctgaatgcaataactgatgggcaaagggatgcaaaatgcagagtctccttgcctcaagttcagaaccagttgaaagatgaatacatgaaaaaactgacggatataaaattattagcattattattaataatttatgttcatagagcagtaaaaacaactcaagatggaaacgttaagggcaacataggcaagcggtggaaaaacctttatgcaaatattagcagtgcagagtacaataatttgttaaggaaacaccatgggttggaccttaaccacgatgaggatgagtcagaaaagaagatctaatctttgggttgtagattgtgaagggattctcatcagtgaaccataagaagctttctttacctagtgaaaatacactgtagcataataacctactgtcacaacctcagccctcttgcacaggaaagcttttatacaaccagaagatatgcaatgaaaatgacaattgaatgaaatcccttcaccagtctttaaatggtccatcaggtagccaaatgtacctgaagctttgattgtcttctcaggaatctggaacaaaacactggttttaaactatttctgcaatttataagtcaccacaccaacatattcaatttgaattattttatattttccatgacaagtcatggaatgcagaacctttaattacaaaagctttaaggactcaagaaggacaaggctgttctggtacttcaagagtccatacttaacattggacttacgtcctcttgaatacagttgtttttccaatttatgaactgataactaatggagtatcattaaaaattagtataataatataatagcactgataactaatgggttattataggtaatttgattagaccaagaagttcattcaaattgtatatttaaacaagtttagtattggttgatttatcatgataatctagagcttgatttggaaaggttttttaaataccaaaggttaaaacattggatattacaaaatagaaccttaggttaccataagtcattcatttagcctaaatgataactaaaatattttctaaaagaaaaaacattattctgatagaagacagctttccaaacaagacccaatggggatagcatgaggcaaattgactctgtctcctttctttcccttccctccctttttcttttgtaagtttacttaaaagccctgaatcttcagaatagtttcatttgcctcaacaaattaactaaaaactaatactgatttttataagttttcatcaagcaataagagtttatttaaaattatccatgagcagctcaggtactcagatgtgttcttagtgactgaaaatgaacaatttaagcatctttagtcattactattaaccgagaaaacaccaccagtaaaaggcccagtataatatatatcttaagatgctccacttgcaatgattgtattgttcttttaaggcttcatttattcttgacagaaacaattatgtgaagtaattatatctaaagtcaggcagtgtgcagtgttcaatttggaaggtaaagagcattgtttgactgttgttaccaggaacattcctgacagagaacaaatgcttacatcaataggaatcatgcacttggtaatttattcttttattcgcatatgccgttatcataataagtgccaggttaaccatcttaaacacaaggacgaaattactagaataacatcaatgggggaaagcaataaagtagcagctcatcagtattttacttgcatgacttgttattttatagggctttttctttgcatgaccaaatgttgcataattgactggacagaattgttccacaagatacccaaacaagatagaaaggccaaaataaactggctaatactgtgaattgaaaacatttaatttgaccaaattcttcaaattaaatgacatgcttcttaggtataagttatgtattttctcagaaacaaaaatgaattcatttcttaaggaatatgattagacacaaattgttacctacactaatacacagttttcttgtagtttgaaagagttcaaaattcctctgaggttgtccacattataagccaaactgacatatgagtcctttacttatatccaaataactccatatgcgatgcaagtttttaaacaatttatggtatagaagaaaataaaaatattgaagtattttaccttgaatgtgtattttgtttcttttctactctgttttactcggtaaagctacttatctattaatgaattaagtaatctatttttattttatgagaaaagttcattttgctttaagagattaaaaagtatttgagtgatctgtatttatttaaagccctattctgttacaacaaaccaacaattctgcatcactatgatctccagagtagaaggtatctctaagcaatgtcttgaacataccattttgccttctcaacaaaactaattttttaaatctaatttattataaatgacttgatgcagcatacattttatttcataaaggtgtaataaggccacttcacaccaaaaggcactggctaaaataaccagatattgaaatgattttttcctttgtgtacatattttatcttcattccaagagaaagtgaacaatatatagttttataatatatagaatataatattagcttttcagagatatccttcttcctgttatacttctagcataacttccagtatgacaggaagaaggatatctctgaaaagattctagattattctagaaaatgattctagatcccacatgtgcatcaaatacatgtgagagaccttaatttgggctacatagatttctaggatccagagattacctttaggaatctgtgaactgaaacagtgtgaagtttgttgcctattatttttgtggtgtcagggtaagcaattttttggtcatattctcaaagctttatgcaccctaaacatttataatatgtatatttgtgttgtagtttttcaaattgagaaaatgtaaattcttcttaaaagtgattatatttttgcaaacaaaattatatatgctaatatttaaatcgattcttgaaatttagcaagagagatattgtgaagagaccggaaaatcttaagcattagactatctctggttgaaagaataaaaataaaatatacaaaaagttgacagaagtgtgtacttctgtgagttatactttatcccttcgagaggagagatggtatgtcaaaaactattcctttcacatataccaaaattccatgaaaatttagatggttagctaaaaaaaaaaatatttaaaagaaagatttaattgaaatattatgcattgtgtgtacacccagatccatagctatttatttccataataccaaggtaaatattcatattaggcaattccaaatcaccttgtggtgtagataaaaactttttttgtaccctaagggtattagggacgtgaaacaataaaatttctgaacattggtaaaattttccttgaaactaattctatacaactgcctaactataactatactaagattatgactatctatgtatttatttatctatac

SEQ ID NO: 470128 - DNA, 1392 bp, Homo sapiens
ccagcataagaattctgacaccatgaaaaatataaacgagacatcaccaaaggatctcactagctctctagcaatggaccctaagcaaaatgaaaacttagaaattacagataaaaaacttaaagcatggattgcaaagaagcttaatgagatccaagagaaggttgaaaatcaacacaaagaaaccatgaaaggaacccaaataaggaaggaaaatataaatatttttaagaaaaaaatagagaaagaacttccgaaaatgaaaagctcactgaaggaatttccaaatacagatgaaagcgttaacaataatctagaccaaacggaagaaagaatttcagagtctgaaagttggtatttaaaattaacccaatcgaacaaaaataaagaaaaaataatctttcaaaatgaacaaagccttcaagaaatgtgggattatataaaacaaacaaacctacaatttataggcattcctgatagagaagaaaacaaagtaagccacctggaaaacatatttaagaaaataattgaagaaaacttccctaatatctctagagaggtagacatccatatacaaggagttcagagaacacctgctagatactatacaagataaacattcccaagctatatagtcatcagattatccaaggtcaacactaaataaaaaatcttcaatgcatctggagaaaagggtcaaattacctataaataaattacctatttatgtaaaatccatttccctatagagtaaatgtgtataggttttcacatgcatctaatttgtcataagaagctttaattaactgtgtagctacccaataatccagatgacagccaaaggaaataagaaaattcttaaaaggtccaaagccattcctaaagtttctgcaaatttttagaaaacgtacattatctcagtaacctctgtcttcattctgtaccatggtgatccatagaaatgaagctttttttatgtcttcccatcccaaataaataccatgtacataattaatgagtgcaacagaatgattttcaatttttaaaaatttagtttaattgataaataataatgccacaggatccttagggtgtcacttcaccagccagaaacttgtgtggctggaggcacctctgcctgaggtttgctccagccactgggctaattcacccactcagcctagaaggctgagctcgacttgcactactggcccagatcccatgtttgccaagggtgagccaggcacagagtggcaaagggcgtgtgagtgagtttatgctatggtttgaatgtatgtattcttccaaaatttatgtattggaaattagctcccaaggaaatgctattaacagagtattgtctgtcccataatgctgcaaaattacaaatgc

SEQ ID NO: 470129 - DNA, 934 bp, Homo sapiens
ccaacagcttgcaccatgcacctggaaaagccacagacactcaatgccagccctgaaagtagacaagagtggggctatatcctgcaaagccacaggggcagaactgcccaaggccatcggactccacctcttacatcagtgtgacctggatgtgaaacacggagtcaaaggaggtcattttggagctttaagatttgactgctctgctggatttcagatttgcatggggcctgtagcccctttgtttgggccaatttctttcatttggaatgcttgtatttacccaattcctgtaccttcattttatctagtaaaagactccgatgagacaatttctcatccaactctctggagctatttactacgagcgcacagggatcaattattagaagagtatactctggtggaatttgaagaaggaagtattatcatctaaatatagagctatttaaattatctatttcttcatgagtaagcttggatagtttgtgtctttcaaggcatttaaatatttaattcaatatgttcaagttcacatccatccatatgcctatagatttattggttgtattgattttatttgaaataccagttttaatatcattgattcttctctgatgtgtttctattttctattttataaattttggtcatacattacatatttcattctatttgccttggggtgaacatctttttttgggggggagggggttctagtttttaagatttagaagtcatgaatcattacttttgctactcaccagctagtaagagaaaaagttgttacataaacctggttttatcttacatgtaaagttcattaatacaagacatcaagatatagttaaaagaaaatttaaatattaacattatttatttaataatgagatatagtctcttttaaatgtattgtatttatctttgaaaatgt

SEQ ID NO: 470130 - DNA, 4476 bp, Homo sapiens
gataagcctaaatgccacctgctagcggaattggggataaaaaggacatgtgtcagataccctgtgaattagtcctttctcatactgctgataaagacatacccaagagtagtctgaataagggtggctctcttctcacatctccactagacattgcccaagtggggacactgtgtaggggctccaaccccacaattcccctctgcactgccccagtagaagttcttcatgaaggctctgtccctacagcaggcttcttcctggacatccaggcttttccatacatcctgggaaacataggctgcactgagcagcagggctctgctcctggcccacaaaaccattctgtcctcctaggccttcaggcctgtgatggggagggctgccatgaagaagaggttcttacactgctggttgtgccttatgagggttggtcctcattgaattgcttctttaaccaaagatacacaaagtgcaacattagatagatcaattccagacctggtgaatcagaaggttcagtgtattagcaaatattcaggtcagcttcttttcacagaggcttcaaacagtagtaatttaaagaagtaaacctttttcagttctaatggtcattcagttacataattctgaattatgtgcattctattgagaattctatacattgttatatatcagaaagtcagtactataacataacatatgaagatttgtggccagtgactgttcaaatgaagattttgacatgctgtacttcttactcaaatacaatttgactcataaaataaataaaataaagaaacaacaactaaacttcctctctcttttcatcaggtcccatgttcacttctccgtctaggttggagtcaacctcacagttggctcagaaaccttgaaatctggagattttctccatcgtgaaatatattattttaggtacaccccagtgtcttttgtcctcctctttgtgtccatgtgttctcatcatttagctcctgctttggagcgtcaaaaagaaatactcataattatctgaaaaggcttttaaattcacttcctttttctgaaagaatataaacatcagacctgattttcttttcatattttagccaaaacatatattatagatatagtgcagtagaatatatgaaaatctaattgtcttctaaaaagacaaatttgccaaaatacattgctcaataatagttgtgtgggaaaatgtttttataaaaatataagttatttttgttaaaatgtaatagatttattaatgttgaactattgtcagtagcggctactgtcatagtgatgttgaaagaagctattttgtttcatcaaaacagcatcatctatcacatgaaatcgatgacaacgttttaaatgttgatattttgtatttaattaacttagatttatgtttattagagtcagaagaatatgtagtttacaagtacttttaagtttgctacatgataaagtatattataataaaaataatttaattaaaaactaaatgtccatgtgaatattttattaggtttgtacaaccttcacattttgagaaacaaatatatattcatctttaaatatatttaaagacatgctaagtgatattaattatgtaataaaagttcacattctaatagcatatttttagtgttattcaattagatactattaatcataataaagagtacctcatttaatatttatacaatattttgggagaatagaagttgaattttaccaatttattttcaatccctattagaaaaagttctaaccattttattaaatattaaatattttcactgaatgttataattgattgtactaattggctttctaacttttttattaccttgcaataaatcttatttgtctatggttatctatcattttattttacgactggattaaggtgctagtgcttttttctaatattattggctaattttttataatattattgattattttctaatattgcttttataatgttatttctctgaatgcttatttcaaaattatgctatttgaaatatataatcataaatttaatagaaaaaagttttagtcttttgtttatattgaactagattactggacatgaaaatgatcagcatcttgagaggctgagagaatttttgtgatgccatttttagatgtagttctttaaaataattaatttaacaatatcatatttattgtacacatacacttcgcatattctatttctccttaaattaattgagtaatttctctgaaaattttaatcaagtttataaaacaaatgtcaccaatggtaatctttaatttattttgtctctataaatttgcctactctggatccttacttcatataattggaattaaacaatatgtgtctttttgtgtctggattattttacttaggatgtttccaaagttcatcccaattgtagcatgtatgagaacttcattcctgtttatggctgaataataccccattgtatgtatatactacattttggttttcattcatctattgatggaaacaggagttgtttccatcttttgcctgctgtgaataattttgcaatgaactgtggcctataagtatctgtttgagtccttgttttgaattatcttgtgtatatacatagaaatgaactactgagtcacatgctaattataattttagttttctgaggaaccattaaagtgtgttcaacactggctgcaccatttttccttcccaccaacaatgcacgaagcttccaatttctccacattctcaccagcacttgttattttctgtttttatttaaaataatagccattttaatgtgtgtaaaatgatatctcatcatagttttgatttacatttccctaattactagtgatttttttcatgtacatattggccatctttatgtattctacagataaatgtctattcccgttctgtgaccattttttaattgggatgtgtgcttctgttgcggagttttggggttttcatatattctacatattaatcacttatcaagcatgcaatttgcaaatactttcactcgttctgttggttgcctttttactctactgatggtgtcttttaagctggtaattttaatgaagtccagtatgtctatttctttttgccttgttgcttatgtttttggagtcatctctaagaaataattgccaaatttaatgttctgaaggtttttccccaagtttttcttctaagagttttataattttatttcttacatttagatatttatgatagctttttacatatttgtcttatatcttacaatcgtgctcgactaacttattagttctaggaagttctgtttgtgtgttttacataatcaggaacgtctatgtagaaaatcatgttatgagcaaatagtcttatatgttttttttttctaatttgtatcccttttatttccatatttcttattgcactggctagaactttcagcactatattgaataattatagtgggagatgacaactttgccctatacccatcttagaagaaaatcatttagtctttcacaattaagcaaagggtagggtgttcgtatttctgtatattacatgctcttttatcgagttgggtaagttcctctctctttctatttttctaagaggtatttttgtttcatttagtgttgtgtgtatgtattttttgttgttattttgcattacgaataggtgtttaatcttgaaaacaaattttcttctgcatcaattagtgtgaccatccatttcctcttttacttgttaacatggtcaatagtatttattgattttcaaatgttgaaccagactttgatgactaaaataaatcctatttgctcaagaggtataattctttctatatgttggtttattttatggctaatattttattaaggatttttctcctacattcaagagggcatattggtcaatagtttaatttttgtgtattccctttgtctgactttgatatcagagtaatactagctttatatgatagattttgaagctttattttcacttctaatttttcagaaacattgtgtataattgttgtgtttctttaacaacatttggactagagggtttttttagggggagcaggaggaggtgggtggtattaaatgataaatttattttctttaattgttataaggctattcatgttatctatttcaaagtgagtgagttgtggaatttttttttttttaggaatagttttatcaaagctgtccaatttaactatgcagatttattcaaagtatcccactatacttttagtatctgcaaggtctgtagtggtatcccatatttcattcctgtgggtttttctgctacagtatggagagttactgtctagaagttttctgtgtttccaggttgctcctttcctgttcctttggctagagagaggaggtctttattaagactatttttgcttgtgcctttggtttttt

SEQ ID NO: 470131 - DNA, 668 bp, Homo sapiens
cacagaaagaaaaatccaacaggatgctcatcaatagtggactggataaggaaaatgtgatacatatactccatgggatacaatgtggccataaaatgaatgaaatcatttgcagcaacatagatggagccaaagcccctgactggggctgctgcttttctttcagagatgcactgcccagagagcaggaatctaaagaggcagtctggcaacaggggatttccagagctgcagtgagctccgtccagtccaaacttcccaggagccttgtttacactgcaagtggaaaattgcttactcaagcctcagtaatgacagacaccccttcccccaccaaactggaacatcccagattgacttcagattcctatgctggcagccagaatttcaagccagtggatattagcttcctgggctccatggtggtgggatctactgagctagaccacttggctccctgcctccagccccctttccagaggaatgaaaagttctatctcactgacgttccagtcaccattggtgttggaggtggggcctagtggaaggtgtttaggtcatgggggcaccttcccacctgaatggcttggtaccctccctgcagcaatgacttcatgtcagagctggttgtttaaaagagcctagtacctctcttgctccttcttgcc

SEQ ID NO: 470132 - DNA, 2027 bp, Homo sapiens
gtttattctcctttctgctgccttgtgaagaagatgtcttgcttccccttcaccttctaccacaactataagtttcctgaggcctccccagccatgctgaatttttccattgtcatacaaaatgagaggattcctccttgctactggacagaagttcctactgagacttctggtctctacatgggctccatgatggtgaaggctttattcatcctgagtgttgatgagagtcctgactctctaccatcttcagatacagcccacgtagagagggacaaaggagagaataggtttaagggcaaactggaggcaaatggatcagttatgaaaactgattcaaaggtaaaagagaagatgatcatggaagaacctggtggtagtgatgtaaactttagattaaatgacaaagactttgagtcaatacacctgtgggtaattaacctggttgccctccccccaagagagccatcctgcctgccaatgatcaaaggttagtcttagcaacacatgagtaaacaagttatttagataaactcccttacattattttgtacctactttaagctatctactcaaggtttgttacataggtatacatgtgccatggtgggataacattaggagaaatacctaatatagatgatgggttgatgggtacaccaaggccctcacctcttaataccatcacactgccattaagttttaacacctgcattttagagggaacacattcaaatcatagcagtgtttccaaatagtactgtccaatataaccagaaggtacaaattgattaacaaaatcctttgaaaaacttttaatatatttaaaaactgtattaaaaagatgacttagtcccaatattttgagtgtacttattacacagatcaaaatgcattgaaattttaaaaaagaaaaatcagaaataacatatggcctttggatagcaacaaaagcacaattcaaagtaattaaaatcctgactatagatgttatttaggacacagttccctttatctgttgaagttatctcctagacatatttaaatcctgagttattccatcctgtacgtagataaggcaggaaaaattcaggtgctatcctaataaaaagacacattgatgtttattaatgccttacatttgaatgatgagtgtgtggctgaagctttctgaatgtggcttcttttcatccagaaacttaaaaatgaaagacaagttatgcgtccccatacacccaaatataatggtgagacaagaattgcaaaacttatctgtacatatttgcaagtaattatactgggcacaattgcaatgccatgaaattttacagtgtgtactcacataaggttctaataaatgtaaagaatatggttcagctgcagacagaaagcttaagcaaatatggagaggtcccagtgcctcaggtgcagctcctagagaactttctcaattatagaaaatatgttttgtgtttggacagtgaattctcaggatatttctaagatacattagtcacaaaagccaaggttcaagtttactgggggatcttttataccccattagtagcataacgaatatcctgctctataaccaaagcaggttttaatgatcggtatatacattttcagtaacaaacttgacaacttacgtatcccagtagggaattttcagactttaaacaaatataagccgttgtctagtatgtttcatccctatcttggccaaagacaagtacttgagttccaggcatttctcgctatcactatagagctaccatagactatattcatattaatcctacccacttcaaaaataaaagaacagtaagcacatagcagtccctgatcctgctgcagtacaactattttcagttctctgaaaaaggaaatgtgttttcattagggcctggttcttcttcctgagagttcatttctattacattattctctcttaatatagcctgcattctctcagatcttgtttctgccctcggaaacatatttttattttccataagaaattgtgc

SEQ ID NO: 470133 - DNA, 807 bp, Homo sapiens
cctgccagaccaagtgggtggaacgagtccagcaggcccaagcaaaatgggtaaaggcaccaccggccacagagccaagagagttaaccaggttcttctagaaagggatccctttcctgttctgatggttaataccaagagtcaacttgattggattgaaggatgcaaagtattgaccctggatgtcaacagtcttgaccttggcagtgcagacatgataggcagcttgattccagtgagtgccttcagaggatgggcctttactgtggacatctatggtccaaagccaaagaaccagaagtctgatgtccaagggcaggaagagaggaagaaaacatccatcacaggagaaagaaggaagccagaagactcagcaagccagcttaccccaccttcttccctgctttattctagtctgatgtccaagggcaggaagagagaaaggagacatccatcaggggagaaagatggaagccggaagactcagcaagccagcttatcccaccttcttccctgctttattgtagccgtgctggcagtggattggatggtgtctacccacatcaaggatgagtgtctttctctcccagtccactgacccaaatgtcagtctcctctggcatcaccctcacagacaaacccagaaacaatactttactagctatttaggcatccttcaatccaatcaagttgacactaatattaaccattacaaaccttccatacagttgactttgggaggataggaatagactggttttgtttatactggttctatactggttcttgatgataacgtagaaatta

SEQ ID NO: 470134 - DNA, 2838 bp, Homo sapiens
gcagactgcaaccagaactggcagcccagttttcagacttcagactgtcgttggcttgaaagtcgagctctacaagaagcatggtgccggcatctgcttttggtgagggcctcaagctgcttccactcatggtggaaagggatgaagcccacttgatcatggtggataagctttttgatgtgctgctggattcgcagacaggaccctcagctgcaggtctgttggagtttgctagaggtacactccagaccctgtttgcctgggtatcagcagcggtggctgcagaacagcagatattggtgaaccacagatgctgctgcctgatggtttctctggaagttttgtctcagaggagtacccagctgtatctcaagctgcgtgctggaagaaccactactctcttcaaagctgtcagagagggacatttaagtctgcagaggttactgctgtctttttgtttgtctgtgccctgcccccagaggtggagcctacagaggcaggcaggcctccttgagctatgactaatttatgtatatacacatacattgatacatatatgcctaatgaatatatatgtatatatacacatacacacatatgtcttgtgtgtgtgaatatatatctgttattatatcattagctttttattagtgtttgcctcagttttttcaatgcttttaaaattctatggctttatattttgaatcttccccttataaacgatgtgtatacagtatgacaattgatattttaacatattgcttcccttgagtttaaatgctggctctgagtctcattactttgataccttaaaatagcattcaggagcctagtatactgtatgtaaaatgaggataatcatacttgcctcatcaaaggcactatatttaatacatagcaaaatatagagcacagtgtctggcccatgctaagaactcaatggatgagagctaagtcagccttatgtaatcaataaacatttaaacttacaatgtattttccaaatgtaagaactgtctttataattttaatttgaaaaaaaaaaaccagttatttaatgcagagcattttagcagcctaaaataaatagatcttattctccccctcacttgtgatgctatgtgcaaaggaataagatataaagaagtatactcaggattatctcatatgcagttcttctgaaatgaaaacataataggcatgtggggtagatgatgataaactgatttaactgttgctatcaagtactggttgattaccagaggtgaagaccttacaaggagaggctaagagttaaaataatcaaatcaggtcttttttttcatattatcatcagcatattagacatggaaaagaaaaatccaagggacgtaactgttgtagtataagaggaataaaagaaataaaattgttaacagtaagttcttaaaagaaaactctcacaaatatggcttcacctccatatacttcatgcactaattaattttttatgtctgttatggaaagagtttttgctatttaattattatgaaactttgatatgttcataaaaactattgaaaaaaccactttctccctattacccaccttgttatgtttatgttatgcaatatgatactctactgaataaaagttaataatttacagatcgtttagtatgccatctgggcttcaaaaaaatgacaacatttttgcctaaattttaatgggaaataatatgaacttttggaaacgtatctggagaattcaaactgatataagagtaagtaaataatcgtgtatagaaaattgtgctataaaagggagaattaactctaaccttctccaatttagttgcctacttttcttcacctctcctttttaaaatacaggtaacctttaatctttgactttcccttaaataaaaatgattactatttcagtagtaacactcattctatgtttgaaaaggtgcacattgagaaatactatttaaaaatttatttaaaaattattttatagttcaaaaatgaaaattttattcaattaaatttaagaaatcaatgttgaatatatattatatgaattaaaaatgctttatttctcaatttcatattacagtgtatctgactggtggaaaggtcaaagtattcagaataatatatggagaaatcataaaaaataatttaataacgttttaaacacagaaactgaaatgttcaaataaattaaactgatttattttttatatttaactttacttgcattcatggactaaacttcactttcctctttttaaaaatataattggacctaattttcaacttttttttaagaatttacaactatttgcatgagaaggatcatgtgtattttttcccttgttatattattgccagttatgctgtcctttgacttgagaatgattccctccttttctgtaaaagttcatgtaaaattgttgttttttctttcacaattagaaataatttgttagagaagcaagttaccctgaatttttatttgtttgtgggaaagacgtatacataggttaattttcttaaatacatatggaaggcttggaactactttttctggtattaattttggtaagttgcgttttttaaagaatttctgtccttcctcaaaatattccaaattatatacagtcattcataatatattctcattgtttattatacgttggttctataattatgtgtcctcttttactccaaatattagcaactgcatactcttattttttgtctgtataattgcttgattatacacttattttttatgtgtgtaattgcctgattaatttattgatgattccaaattaataactatgttttc

SEQ ID NO: 470135 - DNA, 605 bp, Homo sapiens
cttctctctctctctctgtgtgtgtgtgtgtgtgtgtgtgtgtgtgcgtgcgcatgtgtgcgttgatataaattcaaagccatgtactataatcacttacctgaattttggttcttattaaggtgctttttctttgtatggatagttgttaaatttagtgttcctgtggggagaacaatcagtggagaaaaggaagagaagatgaagaaaaatttgaaactttctagaaacttgttaaatcgttgtgaccaaaaggttgacagtgatatggacaatgaagtccaggctgaggaggtctcagatgtaaatgagaaacctactgggcactggagtaaaggtcatatttgctatgtgttagcaaagagcctggctgcactgtgttcctgctctagcaatcttggaactatgaaactgaaagagatgtttaagagctcattgatggaaaggacttgccttgtctcagatattttggactttggacttttgagttgatgctaaaataagttgtatgcatttccaaagactatattttaatagaaattattgagtcggaggtatgtaaattatatttgtatttgtgctgccaaatcaaacaccaaatattt

SEQ ID NO: 470136 - DNA, 872 bp, Homo sapiens
tgaatatagtgccctatatctcgtgagacttattcactaccatgagaacggtatgggggaaactgcccctctgattcaaattatctcccactgtgtccttctcacaacatgtggaaattatgggagtacaattcaagacgagattcagtctaatggaatcattgtgtctcctggtagaaacattcttctcttaggagctgagatttctagtcaacaagagaataaagttatgaaggcaagaagcaaaagctttcacactacagagaggatccccggagaatctccaacccaccccacaagtgtttgtgtcagatgctattgtgcagatgaggcagctggctcaggggcttgtctgggtgtgcccaaaacagactcgggggcccgcctgcacaatgggaaagtggggtggagccactgggaattcatgccttgtgcaggaaggaggagcctggcctctgcagctcctcctccctgcacaaggtggcctggtattcaatcttgaaaatatggagatattttcataaaaacaaaagcatttttatcagcaacagaatgtcaatttataaagaagaacaataccacagaaaaaaattgaaatgcaaaagaatggtgaagatataacattgacaaaaaggaaaaaatgtaatataaaaattatccatataaagtttttgaaatgatgataataataacatactgtaaataatgcatattttgaaggaataaaaaattttagaactaaagcattggaaaaagtattagtaagtcagcaagagaccgatttttgttacatcccctaaaatatttccattagtaaagtaaaggagtaaattaatattaaactctaaagtcataatagtagaatattaagg

SEQ ID NO: 470137 - DNA, 440 bp, Homo sapiens
gtgataaggcgataatgtcagagctcttgaaaatatatattttctttgagatctataaagatttttcttctagcagtaggagaccaataccactggccatgttcagctgttctggcataggcgaggaaaagtacattgttagagagaatcagcgtcggacattttttcaggtcaatgcaatgaaggaattgtttctggtttcctctcgtttgcatagacaatgtcagtgggaagatctggggctcaagggctgctgttcagattctttcatcccatggggtgctccctggatatgggtgtccaggttgtttctttctgagagcccaactgcagtgattgttatttctcttctggatctagccatccagtggagctaccatgctccaggccggtactggagagtgtctacaaagagtcctgtaatgtgatttgtcttcaga

SEQ ID NO: 470138 - DNA, 1415 bp, Homo sapiens
atgtttgtatggtcctattggatgacaattttcacatctcctgcttccccctccaaagaattctacttgtccaattctgaaaaggaacgttatggaaaagaattcagccaagaaagacaacaagaaattttgagaagagcagcaagagctttacctatctgtaccacgccagtttcaaaaactatcagatattgtgaaaaatgtcagctgattaaacctgatcgggcgcatcactgctcaacatgtgactcatgtattcttaagatggatcatcactgtccttgggtgaataactgtgtgggattttctaattacaaattcttcctgctgtttttattgtattccctattatattgccttttcgtggctgcctacagttttagagtactttataaaattttggacgaatgaactgacagatacgcgtgcaaaattccacgtactttttcttttctttgtgtctgcaatgttcttcatcagcgtcctctcacttttcagctaccactgctggctagttggaaaaaataggacaacaatagaatcattctctgcacccacattttcatgtggacctgatggaaatggtttctctcttagatacaataaaaattggagacaagtctttggtgatgaaaagaaatattggctactttcaatattttcaagcttgggtgatggttgcagtttccaactcgccttgtagggatgggtccagaacaagcttctgttacaaaccagaatgagtatgccagaagtggctcaaatcagccttttcctttcaaaccacttagtgaatccaaaaaactcttgttggacagtgaattttcactcagtggctagagaatagagctgaagaaggcatcgtcataccaggtgtatgaaaacattatagactgatgttttcaatttcatttgcaagaaaatgatcaatggaatgaaataattgaagtataacagaagacatttttttaaaaaagaaagcctttgtacagttcctgggatccacagaagcactactccagagcaggacgatgccttaatcttaagtgtccatttgtgcagcattgacttagagctacaaaagtgacttaatgttattctggaaataactcttacctgttatgagatgctataatgagctatcatcacattttaacatgtaaatgtatttttcaatacctgaattacattattagcatttcagacacatacgtactccaaaataattgattgctttcagttagtgggtggagatgaatctcagtagcatctcagctgcggaagtagcaaaatatttgctttctatttgtctccaaaatttttggcttctaggattttaatttagattgaccacttgtcattttcatatcaaatttcttttggtgtttgaagtaaatattgcagaacacttttta

SEQ ID NO: 470139 - DNA, 3634 bp, Homo sapiens
gaagcggcactgaaagactcctgacactactttgcattttactgacatgccatctcagtcacctccaacctgtaacagtttttcatacccttttattgtttttatgaccttgaatcgtttgaagatttctgcccagtacacagaagacaatagaagactagataaggtgagaatcaaaatgaagtacaatattactatgtgttacagacaaaagtttgatcttgttgaaggagattggaaaaaccttcatggaaatggtgacattcctaatgattgttcaataatgtgcagcctccagaagaaaatagcttgtgaagccatcaggtccagggcttttctttaccatggaaatgagaaaaatggaaagaagtggtttgaatctggcttagacactattgaaagaatctgcagaaatccctcctccctaaacatacacacagagaaatattgcataggttttctaaaaatggaaggagaaactaccaaactgtacagcctggatgacattaattacagagtgaaatgttaaccaacatttaaaatgatggatttctatggattgtcttcaaataattatattgaatgtcagcatatgattaatatatgaagactaatcatttcaatccacaagtggactggtatctcctacaatgatttccttttttctgatgacgggaaatagggagaatatgactcatctaaagtaaagggaacttatagaaggagagccaagtaataaaacatttcaacactgaaattttaccaatatttaacagatagatactaatatttaaaccaaaaaaggggaaatttattggaagcaaacatattacaatttcttatgctgaagggaaatgaatatctcttagaacttgcaatgtattataaatatgtgcttttatttttgtgtaaatcacaacaaaattcaaacaacaattcacttactggccagtcttcacattttcaatagaaatggaaaattggggtaggaatcaaacaagataaggagactagaaatgatgttcactttgtaccaaaaaaaaaaaaggacaagaaggaggaaaacaatatcctaggacaactaatacatattcaaatatatttcttaagtgttactaccacacacacacaagaagaaaattataattattgaggtggtggatatgttaattagcatgattttggtgatcatctcacaatgtatttaggtatcaaaatatcaagttttggccttaagtatatataattctgtcaattataactgaagaatttaatagattggaatgaaatgaaaataaaaaccaataactaatcccccccaaaattcacctatttgtgttatctatgtgtttgcaattgtgctgtgcattagttaaaatggtgaacacatatagtacttacttttattccagtgagaattgtactaagtcatacattctattgaatatagaaccagaagtctgtatacatgtaagatggaaaatagtttagtattccatgaccctattattattattattatggcatttaatatggatgacaaatttggtgcttagtataagacaagtaccattttaagaggtttgcatgtaatatttcatttaacccttacaatgaacctatatattattattgtttattagctccattttaccagtaattgaatttaagaatacagtgaagacaagagaactgcataagatttcacaactgataagtgggtgtaataagtctttgaaagccagggcattatccactggatgtgagacaacaattctaacggaaatcctcactttgttgtctgatcttgttggcctagaagaatcagaaaacaaaatctgaaactgctatgacatcagaaaatcttgaaagacaagacaataaactgctgtagaattttcaacctgcaaaagttatgcatatatatatatacataggtatactatttgtttcctagcttcctttgccacttcaaaagtcccagagattaatgttttaaaggcgacaagagcatgtcaagaaataagaacagagcttattttgtactgaggcaacagaaatatcatgttgtaaacatgtttattaaccttggcttagagagcagacagacagcctactgctgtgttaataaccaacctgaagaggacaaaatgaaaatgtaattatgtgacatcaaaagcttattgatttgtcaaaatgcaatctttcaagcattttttttactattattctgccagaattctctctcattaacctcttcatattttaacaccaggagtatcaccatttatgaaaaataaatgtaactgagataatttcagtttatcaaaagatgttaatttaaaggttttctaggaagaaaaatattaaaaattataaaaaagagtatggacactagttttatgaaagttgtattttaaagttattcatgcttgaaggagtggcaatggatatatatttcttattttatttgtttaaaggattccaggtatatatgcaatacttgctataactagggaaaagaaggccatgaccatatagtcaatttaaaaacttaaaattataaatgatattattacgtttaggtacaatgaaaggtttacctttggttttggagttattttagaaatgttcttaaagtcttaattcttaaattgaagttaatactccaaatatatatatatatatatatagagagagagagagagagagagacagaaacacagagagagagagagattaagaataaattgttatattaattaacttttcagttacttaacgacttaacattttacagaattaagttagtttaaacttttggagagaagtgttatatttaaaaacattcacatagagcaatattaatttgataaaatatgataatagcaaaaaatcagattatttaagatataattatatcttttttatttagaaagagaatttgattcatcaagccacctaaaagaaaacgagaacatgaaataaacacatatgaaaggtattaactctttcttaacctcagtctcctcgaaagcagagcctaagtcaagaccctggaccagtgatgatttagaaaatgatctctgaaagcaagaaagagaagccaaaggagttgactgaggttattccaattttggtctcgtgaattttcttttcttgacaataagccatattttctgttttgtggggattttttgacattgagaataatatgatatactgtagaaatgacgcattctgccaaatttctctgaagaatattatatttttaagaaggtagttgatttggctgaattcatactgtaactatttcttaagcaacagagagtggagtaaatttcagttcaattcctttaactttagcttacctgcatgaaacttgattatacataagtggttcatggatccataataaaatgagcaaggagtacaggtaatatgcagaaagtcaatctcacttctttgacatttctcacttttcaaaactctggttgacccaaaccctagcacatgttttttcaggacaagattgcatgttttctgttaaaactttacttcttattgtacaaactttgataagatctataaaaataagcttcagatatatttgggaactgtcacagtattcatc

SEQ ID NO: 470140 - DNA, 728 bp, Homo sapiens
aatggtgttagtgagttcaactatgtccttactgatttttctgcctaatggatatttccatttccgagagaagggtattaaagtctccaactatgtttgttacacaggtatacacgtgccatggtggtttgctgcacccatcaacctgtcatctacattgggtattactcctaatgctatccctcccctagaccccaccccccaacaggccccagtgtgtgatgttcccctccctgtgtccatgtgttctcattgttcaactcccacttatgattttccatctaacagtcaggaccctctgctgcaggtctgctggagtttgctgggggtccactccagaccctctttgcctgggtatcaccagcagaggctgcaaaacagcaaagattgctgcctggtccttcctttggaagctttgttccagaggggcacctgccagatgccagccagagctctcctgtatgaggtgtctattgatccctgctggattgtgttccagatggctcttctgtcctcccattaaacagggagattgcagaatgcaggccgtcaactgcacaaagtatttgttgttgttgttatttgtccactgatgtatgtttggatagagtgcgcttgttttatgtacaattggggagcagatgatttatgagttagatttaactcctagccaaagctcaagattacctactcttcctctaccctgaaaataaaatgtatttgggcca

SEQ ID NO: 470141 - DNA, 1500 bp, Homo sapiens
tttcaattattgtaataagcaaatgctgcatctacccttgtttcatagctctctgatagcagttacaagccttacagatttctgctgttatctcattttctttgaaaaacatgcttataaatcacacacactgacgtgtaaagacataaaagaaagtcgaccatcttcagcagatgtggtgttaactgaagaaatcggtcaacttacactagcaaaagacccatctagtgacccaataggagccgctccatggctgtggcagaagcctaacccattcatgcacctggtaacaagcatgcagtatgcaaacctaactggagactctgaaacagaacattgccctgttgtcaaccctagtgaccagggttctagagtcaattttatgtgctcagggacaaaaagaattcatgctggcctaagcccatgataacaggctaccccatgtgtggatctcactgtgcacccaacagcagccatgtaatcaatctccaaccctgattgactgtaatcctggagaaaagtccataagtctttggactcaacaagagaagaactttacctgctgaaattactatttaaagactgaaagaggtgttagctccttccaatgcacagatgcacatatctcaacaaaagcctccatgtatcattcacaatcaggccaacacaacaccataaatggtcaccaataaagccacagtaaccacccctccaaaaaatggagatctatggattgtctgaataagaattcaaaataaatcttaaagaagctcagtgaaaatgaatagtttacaaacaaaatgaatagttactaagaaaattaaaaccatgaaaaagaaacaaacagttatcttggactcgaagaatacaataaatgaaaacttaaatagcttaactgcaaaattaattaaacagaagaaataatcagtcaacttaaagacagatatatttaaaattagccagttagaacaaactaagtccaaagttagtaagaagaaaaaaagaataatactaataatcagagcagtaatatagaataggcactaccaagacaatagaaaagataaaaaaaaatgtaatcatcaaggaatatagagtccctattcccaaatttctgtgggagagcaggagcctaactttgataggctcattgtcgaaagttagaaagctcttaattttttggctcttaaaattttccagtcctagtttcaaagcaatagacttgaataaagtttatctttcatatttaaattactccagtgcaatttttgctttgacattgttttcatgtttttattttggttaacttaaatatgtatttgaatgtttacctttgactaagaaaatggcagaagcaacagaaacctttttgaatagacgtattccttcttgtggccttctactgcttcgacttcccttccagtaaagttatttacacaagcatataatttaaccatggtaatagtactatttaagaattgattcttaattgattcgtaa

SEQ ID NO: 470142 - DNA, 614 bp, Homo sapiens
cagcgccgtggagcacgctgtacaggaagcatgatgctggcatctgctaggcttctgggaaggctttaggaaagttacagacatggcagaagatgaagcagtgagtgcttcatgtgaccagaatgggaggaagaccgagtcgagagggaggagatgccacacacttgaaacaaccaggtctcataagaacgccatcaaaggaaaagcactaaagtgggaaatttgcccccatgatccaggggatctgagctcagactatccttgggtggggcttgccacggtcactgtgcgggatggaggggtggttcttgagccaatggggttcagagggaaatgtggctgcctctgtcgccagggaagtgggggaaagccggtagcagtaggcctcacccagctccctcacagttggtgtggccggcactgtccaaagaacctgcctcactttcagggcacccggattgctggggagatcagcatagctgagacatctggagatggcttgcaacaaagaagaaggacaagggctatcagtatcagccacaagagggtgccaccgtggtccctggtgacttgctctgcacaggacgccagcggccttcaccactgagaacatc

SEQ ID NO: 470143 - DNA, 646 bp, Homo sapiens
caaagactaacaaaaagccaacagcgactgttctcctgagcagtggtcgtttatctccatctgccttctcccctacctaagtgcgtgccgccacgcgatggaagattcgatggacatggacattagtgaactaaaggccaacaaagatgatcactttaaggtggataatgatgaaaatgagcaccagttatctttaagaacggtgagtttagcagctggtgcaaaggacgaattgcacgttgttgaagcagaggccatgaattacgaagggattccaattaaagtaacgctgacaactttgacaatgcctgtacatccaatggtttcccttgggggctttgaaataacaccaccagtgctcttacggttgaagtggggttcagggccagtgcatattagtggacagcacttagtagctggggaggaaaatgcagagtcagaagatgaagaggaggaggatttgaaactcttaagtatatctggaaagccttctccccctggaggtggtagcaagtttccacagaaaaaagtaaaacttgctagtgatgaagatgatgatgaagctgatgatgatgaagatgatggtgatgattttgatgatgaggaaactgaagaaaaagcgccagtgaagaaatctatatgagat

SEQ ID NO: 470144 - DNA, 762 bp, Homo sapiens
caaccctcaccccactcccacttccccaccttttggcatttcctgtctatttttccactctgcttgtccataggtatccattgtatagctcccacttgcctgagagttgaaagctctgtcttgctttctttactacaacgttctctcctttgactgagactttgcccaaaggatgcaatgccagggcaatgccacagcatctgctttcacaaaacaaatgtcatggactgggcaaggctgggtttctgttccagggcgtgacctccatggatgagcagaggctgcctcatgcccagcatctggtcactagcctcctgagtgtccatgtggactgtagcaggtacagtgtgatccagcaaccagttgaggagagctatttcgatgggaactttgagcagcactgtatcatagcatttcattttgctgaggacctgtcagcaggacacacacgggcctgtcctcatggcattgacatgcagagatgtgacttgcagccccggagactgggccctgtgctctccccaccaagtgttttgccctcctgtggggacagcagccggctgagcaggatgaaacgcccctgcctggactgcaccctgctgcccaccaccagaactttctaaacatatgcatgctctctcactcttacagacttctggggactttgtctttcctttactgcaattgttctcaactttggatgcacattagaatcacccaagaagtttcaaatctcaatgcctcaggccacatcctggacca

SEQ ID NO: 470145 - DNA, 1674 bp, Homo sapiens
gaatggtgttgaagtggtacttccggttcatgcactggaacagacaatggagcatttggcgggaccgaacaatgcttcgaaactagcccggccgcagaggacgcccaggtgatccagtcctgggaaaacggggcgttttaagcagctgtgtaaaagtagcgtctaccatggctttccttttaacgagattagtcttgcttttcccctcctctttatttcactgtctgggggccacctcttggctctcatggcctttgccaacctgcgaaggttctctggacagtgctctgaaggggattcgaaggttcagtgacccaggagcccagagacttgagcagttgtgtcaaggcaccatctgggcacaaagacacgagtctatttggaagtacacaaaggctatcagtgtcgatgttattcagactgtgagtaacagttccattcctgccaatgctgtcttcattcttccttctccagggctcatggtcatcaagtccccccagtgggacaaatactgcatatcttgtgagaaccactggattactaagatgttagcagccccatggacttcccggagcctgtccctcgtcaggaaatgtgccatctaacgcatgcacatcagttcacagtgatgcacagtaaaaccgaaagccaagggtctgattaactggcatcactgaaggctctggttttattcccatcctgggtgacctgggagcatccttcagattgtgcatctaggtgcttacagcagtgcctgaaactgcgcttagaaatttggggtgtgccagtggaggctgcagtacccatgggagtcagtgtcaattccaggttgtatccacctccatttcagggtgcactgcctgaaattcattccctgcatggaagggtggtcaagctttatataattttaatatacaacttctttcatttgtctatttatattaagataattcctttccaaagtccccaaccctgtgtagttcaaaacttactttcagttgggaataagtcagccttattcacatttcttcacctaccattcccaggcagtactgattgctgtcagttctttttctcaggaagtctgtggacttatctcagcctcttcaaaatattttctttttctgccaacctaaagctttccacaacagttttactgcacttgactgtttgcagtgcctagtatgtgttaacttattcaattctccccatggcttcttgcctctgctcaatcagttaccattcaatttttgctttccagcatccaaaaatgttgttgctacagtctcttgtctctggttcatttgtccttctggggtaatatgcttttttgaaaaaggacctcaccattacttatttgagggttcagaggaagcacaagtaaatgcttatattcaatccaacatcttttataaggagcccaaagtgagccctttgcatgtagtgtcattgactcatcacaataatcctgcactgttattatcctcatttcccagatgaggaaactgaggtactgaaaagttgaataacttgccaagaccccaccgtcaggaagtgggacagaactagaatccaattccaggcagtctgactccagcatttatcattttttctctagaagaggggaggtgctagaaatagaaaactgactgaaggtctgtttaagaagtagtt

SEQ ID NO: 470146 - DNA, 610 bp, Homo sapiens
caaggccagctcccagagaggaggatttgaactatggctaaaatacatgtctgcctcagtgaatgttacaaagtcccaagtcagatcaacaactccaacaaagtatttggtaacacagagagaagcaggaactttgatgttgtcattatgaaaatgcatccaaagacttcagaaaaaactgtggcatgcatgaaggagctgctgaagtcaatggaggaagatgtagaaagaagtgagcctgacaacaaaggcccggatggagcatgtgacagcaggtggcatttacaggaaaggctgtcggggattgaactgcatgagagaccagggagactgcttgaattcttgctgttaataaagccaattctggagaaggaggaggaggaaaagaaaccaaaacatttctataggcttgtagaaaaacagaaggctgctgctgagagtagtcagggtcccagaccaatgcggacatcgacgtagaaggataagcatactttgtggtcgtaagagatgagaatcaggttattaaaataggatcaagtctttctgtggttaccacttgttctacctggcccaccaaaatggaggtctcaatctcttggtcctgagtggc

SEQ ID NO: 470147 - DNA, 1063 bp, Homo sapiens
cactcagtgcaggaagaggtagggactcaggagcccggctggcttcacccattggatcccgcgccggggctgcaggtggagctgcctgccagtcccagggctgtgcacccgcaatcctcagcccttgggtggtcgatgggactgggcaccgtggagcagggggtggcgctcgtcggggaggctcgggccgcacaagagcccatggagcgggtgggaggctcaggcatggcgggctgcaggtccagagccctgccccgcgggaaggcagctaaggcccgtaccccctccacagctgctggcccgggtgctaagtccctcattgcccggggccagcagggctggccggctgctctgagtgcggggcccgccaagcccatgcccacccggaactccagctggcccgcaagcgccgcacacagccctggttcccgctggcgcctctccctccacacctccctgcaagctgagggagtgggctccggccttggccagcccagaaaggggctcccacagcgcagcggtgggctggagggctcctcaagtgccgccaaagtgggagcccacgcagaggaggcgccgagagcgagcgagggctgtgaggactgccagcacgctgtcacctctcaataacaacccagctagtcttatatagacagccccatttcagtgaccaggaaactgaagcttggagaacaactgtgttgcttgagaccacagaactggggttagaagaaggtctaactgaccccagagcccatgctcttcccaatatgctgtactgtctccacagcacaccacgtgccacacatttcccatttccaatccaaagatcatgcccctcacataaatcaaaccacagaccatgggagctacacacaggacactcagcaaccctctgactataattatttgatgttgcttgccacaggctgtttgtgctgcctgacaattatgtctgtgcagccagaaagcggaagagatataaaagctgacagcaatccacactacaagaatgctgaaagttcttaaaacagaaggaaaatgataccgaaaagaaatataa

SEQ ID NO: 470148 - DNA, 536 bp, Homo sapiens
tttcaaagttcttgactccaggcaggagcagatggttcagaccatggaccctggtgactgtttgggatgcagagaatcaacaaagtcaatggtgttgcattggaggtggtggaaggagacgatgacctcagggtttctggctttcccattgcggttgatagagagaagttaaatcaactgaaaaaaggaacaatggaggagaactgggtttggtggggagaagatcatatggacaattttggagatgttgagcttaaaaggactttggacattgaagagatgttaagtacacagcaagaaaaaggagagagttggagagaagtcgagggcttttctcccaaaatcctgggggatgacgtggcatcagccgtggcctatagtgcacaggccagaaactgccccctgcagctaaagcactggaacagaaacgaagaagattcatgactcagctgaagagaagtgaaaagacatagacaaacttatgctaaaatgaatatggaaaggctcaggatctagaatagctgaaataatcttgt

SEQ ID NO: 470149 - DNA, 597 bp, Homo sapiens
tcagctctcctctgttcttcgggcttggcgcgctcctttcataatggacagacaccagtggccttcaaaaggtctggggtgggggaacggaggaagtggccttgggtgcagaggaagagcagagctcctgccaaagctgaacgcagttagccctacccaagtgcgcgctggctcggcatatgcgctccagagccggcaggacagcccggccctgctcaccccgaggagaaatccaacagcgcagcctcctgcacctccttgccccagagaccgtccgagctggagccacaagccctccattcctcttggaatcttcaaccccaaggatccgggggggatcacgcgcggcgaccctaccgagcgctccgtgcgcgcccccatctctcggatcgtgttcctggctctgtcgaagctgctgagtcccgcgattcgggaaatccggcacttgtttctcaccctacaccatcacgtggaaatcattgaaaatgggaaccctggtggagtatctgggagagcacgcttgtgccgaggggcctgagctatgggacttcctccaggtccctctgtttcctgccggcgtaggggactcgtagtgtc

SEQ ID NO: 470150 - DNA, 1189 bp, Homo sapiens
gctgattcgaaggaaaacaaccctctatgcagatagcttcaattcatttcttcagtattcatgcacagtttggtggtattaaggacattcacgttgttgtgcaaccatcattgctatcccgctccagaactttttcatcttggaaaactaaaaccatgtgcccattaaaccccttcccacttctcccttcctccagcccctcaccaccgccacccactgtctctctgaatctgactactctaggcacctctttctggtggagtagcatcaggggtgtagccattcccactgcttgtgccagcgtgtccctgagccaaaggcgtttcatctcacaaattcagatgtctctctcctgctgcagacgaactgagccccccagccccaaggtgcaggcaggagctctcacagccccagagaccctcagtgtgtggaggaagtgggagggtggttcatgcacagggggtgagccttcagaagtcaaagaaaacagcatacacgctgcgtgattccatatacatatacctatacctacacctatacctacacctatacctatacctatacctatacctatacctacacctatacatatacatatacctatacctatacctatatatatacatatacctacacctatacatatacatatacctacacctatacctatacatatacatatacctatacctatacatatacatatacatatacctatacatatacctacacctacacctatacatatacatatacatatacctatacctatacctatacctatacatatacctacacctatacatatacatatacctacacctatacctatacatatacctataccatatacatatacatatacctatacatatacctacacctacacctatacatatacatatacctatacctatacctatacctatacatatacatatacatatacctatacctatacatatacctacacctatacctatacctatacatatacctatacatatacctatacctatacatatacctatacctatacctatacctatacctatacctatacctacacctacacctatacatatacctatacctatacctatacctacacctacacctacacctacacctacacctatacctatacctatacctatacctatacctatacatatacctatacatatac

SEQ ID NO: 470151 - DNA, 675 bp, Homo sapiens
ttgagctccagaaccaggaagaatccacagcctcggagcttcctgtctcaacacatgcctgacttgatgatcctcaggcagtgttgtaagactgaaagagcagacttcctgaagcacccacgaacgttagaacacgcaggcaagagtttaaactggaattcaagtctggaatccagactggaatccaggtccactagggtatccaaaggagctgtcatcgtttgctcatgctgggacctgcacttgcacccagaacaccctgacaatttctgtcagactgttcaactctcacctaccatgtatgagtgtgggcccaggtgccctgtgcccaggaagtctttcctgagccctctcgtcaaccagacccttctctcctctggaatgtacagtgcattttatgtcccaggatatggtgtcttggtgaatgttccacatgagcttgagaaggatgcatattctgctgttgttggatgatatcatttatagatatcaattatatccaggtgattggtgggaaaggatggctagggtgagctggagctggatgtttccgttctcccaggtcacttaggctgtaattaaaccctagcaagttaggctctggttgaccagtttctcctgaaagcaaaccttgttaagaagaacggagcactctgtatttcaaaatacaggtcc

SEQ ID NO: 470152 - DNA, 919 bp, Homo sapiens
tctcctctgagctgttactggacaaacgagcttctctctacacacacgtggacacactcattcaactcacaatgcgtgtaagctgctacacccctggtgaacaggccgtgaaattgccaagagctttctccatgggtgctactggcatccagcaggtagagaccagggatgctgctaaatatcctccaatgcacaggacagctcctcccaccaacaaaaaattgtccagccctcaaagtgccgagatctctcttaccgggggatgcaccaaagcccagctgttcagtgtcaatggctgccagctcccaactacatcccacacagacgggagccacctcaatgtctgcgagatttcctgtccctccttttcaatcccatcaaggcaccctctaccaatgactgatggatacagggatacaaaagcccagacacctatcttccaagaggaaaaaactctgtggtggtgccatttatgttccagagcaactgcgggatcaagctgaggctggactccagctgaaaccacatgcaacagactgaatgcttgtgccctcccaaaattaatatgttgaagctctaatcccaatgtgatgatggtattagggaggcttaagtgaaggtaatggaaatcatttctttaagtgaaaggggattaaatggtacctatgtaaattctatacacttaaaagattaatttccatcaaatgggaaatatttttctgttatactttcttacctgaaataaattcgttcatttctatgtaattttaaaaacggttttactgatagttttatctatagctttacaaattggcaatttcaatagtgaaataattactttttggtgtatccttaatgttgttaaaagtgactttaatttccggcattttcttttgcaagagttgactctggttgtttc

SEQ ID NO: 470153 - DNA, 850 bp, Homo sapiens
gtccagggcgaggctggagtgtagcaggacctggctaatgaacatactccatcctatcatgactagctcaaggatcaacctcattccgagtctcattcctagagcttcttctggagtgacagggctgctctgttgttcctctggggttgctgtgctgaggaatggtcctgagactgtcacaggccactctgcagagaggattggcctgacactgaagccagtgtatgaggaactagagctgagagaaagagagagagagagaagccaaggcctgatagtatctcttagagctttcagcagctggctgcttggcactgctccagctaattggagctggcttctcttactggtgacccaaagaggcctgtatgacatgcccggcactcaggctttgctaacgcaatgggcatcctgtcaccagcaccactgtgctgctccatccagcagttgggtcctcactgataccgccctcaccatcccccgagctgggctgaaccttgcttttactctgacaaaactagagctttctctcaaatcctctgaacaccaaggaggcaaagtcatttctgcctggttctcttgtgctcttgactggccattccctctttttccagcataaattaagtacttttcattcatttacgcaacaaatgttgatttaacactgtgctgggcatagaagatatgacagataagttggtttcacttgtatagggaaaagagttgtgcccatgtctaattagactgtgctttgtaagaaaaaaatgtatacctgtttcacttagtgagggagagagagagagagagtgcctgtgtgtgtgcgtgcacgtgcgtgagacattgaaagtac

SEQ ID NO: 470154 - DNA, 647 bp, Homo sapiens
tcgttggctgggcacagtggctcatgcctctctaaaaacatgactctttcactaccatacaacccatatcagtcctgctgtgatgaaaagatcatagaaagtaaagagcacattttccttcttcattttactggaaagttacttcactcactctttcctgtgtgcaaacgcatcgtctacacagcagcagcagcagaagacagagatacacccacattccctaacctgccattgaagctgagatttttccagatgcagatcctgcgaaaaggattcatgagaggattattgatttgggaagttcagactctaaaagcaggagctgtataccagggactggaaatgtcatatgtttttaaagatattggaagtcttccagtcctacgagccaagcagaataccacagctctgtcatctggaggaggcttccgtgtgtctctgtgccccacctataaatcaaggtatgtagcagaccagtctgcagcttcttctacaaccatttccacccttccccttcttccttgctgacacaagtttggtgcagatgccaggtggagagaccctgttcctagggaatcaggctagattgtatagtgttagtttatgtgcaaattgctttccctccatttccactctgtgttgtgcac

SEQ ID NO: 470155 - DNA, 1381 bp, Homo sapiens
aaggatcctgtgacagtataatttgaagtccggtaactttatgcctccagatttgttctgtttgcttgatattgtccctcagctgcaggtctgttggagtttgctggaggtccactccagaccctgtttgccgggatatcaccagtggagtctgcagaacagcaaatactgctgccttatccttcctctggaagctttgtcccagaggggcacctgccagatgccagccagagctctcctctatgaggtgtctgttggaccttactgggaggtgtctcccagtcaggctacacggggagatgccctgcccacagaggtggaatctagagaggcagttggccttgctgagctgcggtgggctcctcccagttcgaaattcctggcggctttgtttacacttctctcacagcttaccttggctaggaaaaggaaatcccccgaccccttgcacttcccaggtcttctttaatttcagcagtgttttatagttttcagcatacaggtcttgcacatattttgttaaatttattcctaggtattttttgttttttgatgcttttattaaatggtttggtttaaccttaattttttcagttgtttgttgctagtatacagaaatacaatgattcatacatatcgactttatatttcacaaccttgctaaattcatttattagttctagtagtttctttatcttaatgaaggttctttagaattttctatgtcatattatttgcagataaacagttttactttttccttcccaatctatatcccttttatcgccttctcttgccttatatctagggctcccagtatggtgttgaataggagttgtgaaactggatacacttgccttattcccaatcttagagggaaagcagccaggccttttaccataaagtatcattagcagtaagcttttaaaaaaataaaatagatgccctttatcagtttgatccctagtttcttgagaatttttatcataaacggatgttgaactttgataaatgtcttttctgcatccattgatatgatcgtgtgggtttttttccctttattctgttgatatagtgattaagtaatttttaaatgttgagtcagccttgcattcacaggacaaacctcatttggtcagtatatataatctttttaatatattgcttgatttgttaatattttgttgtgaattttttatttacgttcatgagggatataaattcatcatttactcttcttgtaacttctttggtttcacatgaaggtaatgctgacctcataaaatgagttgggaagtgttccttgcttctattttctagaaaagctgtaggtagtactaatatgtttattccttaaatgtttagcaatgaaaccatttgc

SEQ ID NO: 470156 - DNA, 611 bp, Homo sapiens
cccagcagctgcctctacttttgtgcctgacctttcaaggatacacgggggccagggacccacttgaggaggcagtctgaccattagcagagctcgaacgctgtgctgggaggtccgccgccctcttcagagccatcatgcagggacgtttaagtctgctgaagctgtgcccacagccaccccttccctcaggtgctctgtcccagggagatgggggttttatcttgaggcaatgccccaccctgcttcggcttgccctccatgggctgcacctgctgtccgaccagtcccaggatgaagccgacttgattgtgatggataaactttctgatgtgctgctggatttgcagagctcgagcactgtgcttggagaaccctctttgtcaggatccactgctctcttcagagccggcaggcagaaatgtttaagtctggtgaagttgcgcccacagccaccccttcccccaggtactctgtcccagggagatgggagttttatctataagctcctgactggggctgctgcctttctttcagagatgcccttcccagtgaagaggaatctagagaggaagtctggccacagctgctttgctgtgctgtgttgagtt

SEQ ID NO: 470157 - DNA, 674 bp, Homo sapiens
ggcgagagctgaaaaattacctatggggtacagtgttcactgtttggggcaccaagggcccgccctgtggttaggcgtgcagagggtcatgcctggccctgcccccaccctgccctgcccgtctggtggagggcggcaggggcaccgtgtcgggcctctcaggatgaagggcagcagcagttctgagcaggagcaggagcaggaacaggtgacccagacccaagtccgcgaggtggggaggaggcaggaggcaggaccgcacaggagccgagcctccaggccctggggaacaagccccattgtcccggacttcacttacagaacaaaaggaaggataactgtgttgagaatttcaagatggtgtccatggagccttgaagcccaagttggggggcccctaagagcgtggggccctgccggcgtacctcgccacacacctgtccagagggttgaagaagtgccagttgtgtcttacatcacaagccccaacagagatgctcattaataatagctgatgggaagtgaccgtctactgcatatcaggcatgggctgtgctaagtgatttgcacacattttcttatgtgattgtacagtcccccgggacaggtactactttggtcttccatttaaccaattaggaaggtgaggcttagagggttaggcaacttgctga

SEQ ID NO: 470158 - DNA, 622 bp, Homo sapiens
ggcacctacaaggggctttagaatgcatttcatattaggcagtggacacccacagaagagcttcaagaagttgtggggtggtgaggatggtggtggccgctggagcggccggaaggttggtagtggagagctggcagctgccactgtggcgctgaagacacatgagaaggaagagatgacatgtggaaaagatgccatgctgtggacacaaagtatgtggcctaagttcctgctgagccagtgtgctgtattgtatttaggatggcaagagaagcctgccagaaaatcacctaaggtgcttcgaaacgatgaatgggacaaatgcagcttttcatggttggtggaacaggccgtaaggatgggagagcatctccctttggttcatcagggcccactggatggacgcctgtcacaggctgtacacaacagtctgctcgttggtataaggtcctttgaaggttctgatagtacttacctggacaaagaaagagacctgaaggagtacttttatattgtccgcaaactcaagaaatagacaaaaatgtaaatgtcatcctgacattagacagatacattcccctctgtatagggccccatcccagtttttggacagccctgtttt

SEQ ID NO: 470159 - DNA, 954 bp, Homo sapiens
tcagacagctgcagccgtcaactgccaacacccatttacgctgacccctttgattagaaaatgaaaaatgccaccacacttcgggccctgtcagccgtgaggtgtgcctgtaaggctgccatccccctgcagatgcccactgccctcattccagggggtattgtccagccagagctgcaggctggtgagatcagtgttgaagcaaatgttgatgtgatgcgtaatggaggtgcgtacagaggaattgaatgtattagaaaggtgtctaagtttgagacatcaaagaaggcagtagaagaagagacaaatttgaaggatcagttgagtttgcagagtcgaaagggtattgaggtggctcagagaaaaaacagtcaggggcatccaaaagaatctacttgtccctgttcagaaggtgttggagggtggtgcatggaggcacacttggctgttggagttcgattcattgttactgtgttgttccagccctggccttgctgtctcgtagctcaccggtagccaactagcaaaattagagaaagcaaaatgttactacatttcatagattaacttaatagaagataaattcttagttgagaacatataagatttataggaaaactaagttttaaactctggattttcatcatgaactatgtcattgtgaaatatctgaactcatgtatttggttactcttcagttttaaaatgcttttcaagtgtttaaaagcaacaccaaagaatcattttacatacctttcctgtattattgcagaagttcattgtcttcctggaaatataaaagaattaaaaggccatcatctcatacattattaaacataacaaatcctactactggctaaatcaatgaaccattaaccttctcacaacacagtgtgtcgggaatcaatttcataaataatagacttttgcaatgatagtgcaaaatgggatttc

SEQ ID NO: 470160 - DNA, 719 bp, Homo sapiens
aaatcggggacatcatggggtgcagctgcagtgggggcactacccagatgatctgggggaccagggaagctcaagcctccctccttcccactgatggtcccagtcagagggaccatcagaggggcctagcagctgcctttaattttgcatgtctgagcccagactgtcctcggtgggtgggcttcctgtggctgttgtggaggatgggggtgtggttctcaggccaatggagttatgattccagggagattatgcctgcctctgctgggtcacgcaggttgccaggggactgggggaaagctggcagtgacaggccttacccaatgcccatacagccagcaaggccagtctcactcccaccatgtccccccaacagcacgagagggacatgccccaggctacaagcctccctgctgagaaagcaagcgggactttcaggtttcacgcctccccacctgcagcagcttctgtgcgcctatctgtactcccagatcacctcctctccagactctgtccaggaaactgcacaaattgtttcaaagttcagctggaagtttccttctccctgtgatctttccccagttcctctggcacccctccccaagaactcctgagagacaaaagcagaaatggcttccctggggtctgagagtgcccacggaactcttcccactgcttcccctacccctatattttgctcagctctctaaatttgtctt

SEQ ID NO: 470161 - DNA, 1023 bp, Homo sapiens
tccctgagacatcatggtgaaggtgaaggccagagtcgacagatttggtcatgttaggtgtctggtcaccagggctgcttttaactctgctaaagtagatattgtggccatcagtgaccccttcattgacctcaactacatggtctacatgttccagtatggttctacccatggcaaattccatggcactgtcaaggctgagaacaggaagcttgtcatcactggaaatctcatcaccatcttccaggagcgagatccctccaaaatcaaatggggtgatgctggcactgagtacagtgtggagtccaccagcatcttcaccatcatggagaagtctggggctcacttgcagggaggagccaaaagggtcatcctttctgccccctctgccaacaccctgatgttcgtgatgggcgtgacccatgagaattatgacagcagcctcaagatcatcagcaatgcctcctgcaccatgaattgcttagcacccctggccaaagtcatccgtgacaactttggtatcatggaaggactcatgaccacagtccatgctgtccctgccacccagaagactgtggatggaccatccaggagactgtggtgtgatagccatggggctctccagaacatcatccctgcccctagtgacgctgccaaggctgtggccaaggtcatccctgagctgaatgggaagctcactggcatggccttctgtgtccccactgccaacttgtcagttgtggatctgacctgctgtcttgaaaaacctgccaaatatgatgacatcaagaaggtggtaaagcaggtgtcagagggccccctcaagggcatcctgggctacactgagtaccagcttgtctcctctgacttcaacagcgacacccactcttccaccttcgacgctggggctagcattgccctcaacgaccactttttcaagctcatttcctggtatgacaatgaatttggctacagcaacagggtgatggacctcatggcccacatgtcctccaaggagtaaga

SEQ ID NO: 470162 - DNA, 852 bp, Homo sapiens
aggaaacggactctcccctggagagtctagaaggcaccagcctggccgaccccttggcttcagcccagtcacctctgtggacccgctgcatggaaattaattagagtcagaccatgtcccccgtggcttggctccggccccccaccccctgacaggcccgggcttgtgatgttcccctccctgtgctccctgtgtccatatgttcttgttattcagctcccacttatgagcccctctgctgcaggtccactagagtttgctggaggtccactccagaccctgcttgcctgggtatcacgagcggaggctgcagaacagcaaaaattgctgcctgttccttcctctggaagctttgtcccgaaagggcacccgccggacgccagctggagctttcctaattccctgcccagagaggaggaatctagagaggcagtctggctacagcggctttgcagcactgaggtgggctctgcccagttcaaacctcccagcagctttgtttacactgtgaggggaaaaccacctactcaagcctcagtaatggcagatgccccttcccccaccaagctcaagggtcccaggttgacttcagagtgctgtgctggcagcgagaatttcaagccagtggatcttagcttgctgggctctgtggggatgggttctgctgagctagaccacttggctccctggcttcagccccctttccaggggggtgaacagttctctctcactggtgatccagacaccactggcatatgaaaaaaaaaaaactcctgcaactagctctgttctagggcttgtttcacattctcctaacagtacattttgaagaggttatgttcttaattttaa

SEQ ID NO: 470163 - DNA, 1009 bp, Homo sapiens
agtttcaaagttggggtcctacagcagggatgcccttcagatttcggctctggagacgttttgatcactacggacgaaaattccctatgattttgtcttccgttggtgctcttgcaaccagcgtttggctctgtttgctttgctattttgcctttccattccagcttttgattgcatctaccttcattggtgcattttgtggcaattataccacattttggggagcttgctttgcctatatagttgatcagtgtaaagaacacaaacaaaaaacaattcgaatagctatcattgactttctacttggacttgttactggactaacaggactgtcatctggctattttattagagagctaggttttgagaatggctatgaccgcgtttgccagtacaacactgatgatgtttttagatccatcacaaagcgaagtcatgggagagccacacttgatggtggaatataaacttggtttactgtaatagtgtggtgttcatggaaaccgagggctgcatcttgtttatagtcatctttgtactgtaatttgatgtacacaacattaaaagtactgacacctgagaatttctgctcaagtagtatcagtgatcatttaaaatttggaggggtctttggtttacagccacgtgacaattaaaagcactaaagggagatcatgttaaagctcttaatttatattaaaacagtagcctttgtctttaaaaaagttgttgctcatgaatattataaaatgatctacaggtttcaattcaacctgtttctaggttttttttgtccttatgcactcatggattcttcttaaatgctttagagtctatttctacacagtacccttttgatggcctaaacctaaccattttattgagcaggacttcaatttgaaaatgactgatgtcaaaatgttaaatttaattttagcatttttcattgttatttcagagtatcaaatataatttgagatatttttgttatcataatcatagatattac

SEQ ID NO: 470164 - DNA, 512 bp, Homo sapiens
atctgagaagccatcacttctccagagttcatccttgtctcagaatattttctaaaataattcattatgaaatatagagtatacaattattttcctatgtcaccacatgtggtgttcataagaattaccactcaagttcttggtgtgattgcaaaacctgctgcttcttctacgatgttttacaataatagggactgggatgagactgtatcacctgtgaaaggagattcaacacagcagttactgaaaactctaaggcgataccgtagatgtaacgtgtctgtcattgttctgggcaaagattttatggagaaaaactcaaaagaagagataacaaaagcaaaaatagacaaatggaattatatcaaattacaaagcttctgcacagtaaaggaaacaatcaacagagtgaagagacaactgagacaactagaagaatgggagaagatgttttcaaactactcattcaacaagcgattaatatccagattaaaaaaggaactcaaatagct

SEQ ID NO: 470165 - DNA, 597 bp, Homo sapiens
gtgggtaaatgcgacatcggcactcatgagtggtgcctgccaaggttgccaggcctgggggataaaaagatggaagagaaagggagagtgcttgctttctctctccataacactccaagttttcactgaaagagggaagggaaatttcctgtccttcagaataagcaaccaactctcttcaccatccccagcttatacacctctggagcatatcctgaaccacgggaactgctttgaccctcagaatctgaaggaaaaatgccttatagctctctgcacaaaagtttggctaaattatgaaggattggttggcctcaggaaggaaccattcatttcaataaaacctggcagttggaaattttctgtaatgtttgacccatgtcaaccaaggaatacagaggttcctggagcacttcaggaaataaatcgtgtgggagtaagaagattgtgaaagaaggaaagcctctcacaggaactgatgtttacattgcatctgcagtaataaataattttttacctaaagaaagacgtttctgagccttatgagaaatataaaaccaataagacaaaagaaagcattgtctaaattgtacttca

SEQ ID NO: 470166 - DNA, 1175 bp, Homo sapiens
tgtgtcagcttctgcctaagtagatcacccagagacttaaagaatctttagcaggaagaagttggagaatttcatcaaagaggagtccccgggcaagatggccgaataggaacagctctggtctatagttcccagtgagaccaatgcagaaggcaggtgatttccgcatttccaactcagggggttgacgccagggagccaagtggccttgctcagcagatctgaccctcatggagcccagcaagctaagatccactggcttgaaattctcgctgccagcacagcagtctgaaatcgacctggacactcgagcctcctggggagaaggacatctgccattactgaggcttgagtaggcggttttcccctcacagtgtaaacaaagccgcctggaagttaggactgggtggagcccaccgcagctcaccagagcccctgtagccagactgcctttctagattcatcctctctgggcaaggagtctctgagagaaagacagcagccctagtcaggggcttatagttaaaactcccatctccctgggactgagcacccaggggaaggcgtggctgtgggcgcagcttcagcagacttaaacgttccttcctgtctaccctgaagagagcagtggaactcccagcacagtgctcgaactctgctaagggacagactgcctcctcaagtgggtccctgacccccatgcctcctgatggagagacacctcccagcaggggtcgacagacacctcatacaggagagctctagctggcatctggcaggtgcccctctgggaggaagtttccaaaggaaggagcaggcagcaatctgggctattctgcagcctctgctggtgagacccaggcaaacagggtctggagtcaaccgccagcaaactccagcagtcctgcagaagaagggcctgactgttagaaggaaaactaataatcagaaagtgatagcatcagtatcaacagaaatgacgaccatacaaaaactccaccaacatcaaagaccaacgttagataaatccacggagatgaggataaaacagcacaaaaaggctgaaaattccaaaaaccagaatgcctatactaaatatggaaaggaaaaaccggtaccagacactgcaaaaacaaactaaaatgtaaagaccatcaacatcatgaagaaactgc

SEQ ID NO: 470167 - DNA, 702 bp, Homo sapiens
aaagttacctggaaattgtgtttggcaagtagtcctcgctgccagcagctccttttgcagcagctgaagtagaaccaggcggagttgtcgagttcttggcttattggatgccgacaggcctggagcagagaaactcaattgttctaacgttctcactcctcctcaggggactgtggctgtcagtggagtaacgagaaagaggaacaaagatgggaaaagaccagcagctatttgtgaggctgtggccattcctgcctccacccccagaccacctgctgaagggagagatgttaaaaagaaccacgttttccattcctcaaagccaaacaaacacagagagtcggctgagcctctctaaatcagtgactgccaggggagtcctgtccacaggctcagcgcgctatgtcctgccctgcccacgctggggtcaagaaaggaagttttgctcatcttccaaggcccagctcagccgcccccttctccagaggcttcctccttctccaaggacagatctgctacttatttgcctcttcccacaatacttttttgaaaatcttttccacagagagccccagggatccactcgctggcctcaaggatttgtgaattcctaaaatgttgtgtggattttcgtatatgagcatctgtatgtttttatctaaggagaaaacaacggatagctttatcaggttcttaaagagg

SEQ ID NO: 470168 - DNA, 522 bp, Homo sapiens
acgaggcttccataacgtacatgtgtaaaaatcatggcaaaatgcttggcaaaccgctgactgtggtcttactgggcttaagtcaagctgttgtcagggctgtattgctttctggaggctctagagagaatccatttacttttccaacttttagatgctgtccctattccttggatcatgggaccatccctccatctttgaagccagtaatgtgggatgtctatggtgtcttgatgctgcatcttccagagacaaggaacactgtgtcctcacatggtggaaggcaggagagcaagagggatgaactccctccatggagccctttcatgagggctcctaaacccattcctgagcaaaataaatatgttcttgtttctggaattattgaagctttgaaaatggacttatcgacctcaaaccaatgggacatattcctatgtggccttctgccctgttaggttttcccagggaagtttattgatcaacatataccgtgtttatgaaaatccggctaagataata

SEQ ID NO: 470169 - DNA, 539 bp, Homo sapiens
tctggccggccggcagcagccacctggcggcagtgggagagaatggcgcagacagaaaatcttcagataccactcactgatgacacaggccatttagaacataccctccctactgacaaactgcttcagttcttatctcgtactcctgtaattatgcctacaaaagtagttccctcccccatacctaatgctttaacactgtttactgatgctcagctgtcacaaaagcactttgctaaaacctctcaagacataaaacctgcagttttatggaaaggtgtaaacactaatgaatggtgtggtccaaatgatttgctaacatggagaagaggatatgcttttgttcataccccctcaggtcctctttggattccagcacaatgcatcaaaccatattatggtatggctaggacccaacccagtaccagaaatgaagaaaatgaccctataggacccgcagccccagacaatgcggcttctgtggatgacacaggacccagacagaatgctgaagaagacaactcagaaggctaagcaaa

SEQ ID NO: 470170 - DNA, 657 bp, Homo sapiens
gtgtgcttagtccagctgcagcctcacagagagccagctaccatgccagcacctggagctgccttcccggaggcagcagctggcgtgtctgactgtgcggtggccagaccctacaatcattcacacccaccccccccaccccccactgctccacacctgacttgcagtctcccttggaggcgtgggatccaggccagtagtgagacccttgaggttgtccacacgatacttattaagcacgcagcagtgtacaaaccacagaaaacatggcatctgtcacgcaaactacctgagaagacatgtctactcagcaaccggaaccaggcattccaattctgcagaaataactgctctacccttaaagatttacatgccacttttccaacagagctctggctatcaactcattgtcttggttgtgtggtggtgattggggaacaaagattcatcaataactagatttcaaggatgagatagggtgggttaaatcaagacattaacaaccaggagatattgtaaactggaaccagtatctgcttgtacatatagtaatcctattgaagtaacttttgtgaaaaacagcaactctcccctagtttaaataacagatgatagatgattgaaggaggaggaggaggaggaggaggagggagaaat

SEQ ID NO: 470171 - DNA, 1616 bp, Homo sapiens
tccaagattgggcagctgcatctgggatcctgttgcagctctgcctcagccagtctgtgcacagagcatggagcaccagggccatggagcatgtgggctatggaatcgggttgcctattttcatcttgactccatcacttgctgggcaaccttgactcaatgaatgacatcataaaaatggaacattcaaatgagaatgtccaaggacctgctgacttcactgatgaattctaccaaatatttaaagaagaactcatattttccaaaaaaccaaagaggaaggaatacttccaaactctttttacaaggcaagcattaccctgataacaaaactagacaaggacactgcaagaagagaaaattatagtccagtatgcttcaagaacataaatgcaaaaatcttcaacaaagtaccagcaaaccaaattcaatagcacattagaaagaccattcaccgtgattacatgggatttaaccctagggtgcaaggatggctcaacatatgcaaatcaataaatgttatacaccatattaacagaagggataaaaaccatatgatcatctcaatagtttcagaaaaagcatttgacaaaatgcaacattttttcctgattaaaaactctcaacagattcggtatagaagaaatgtacctcaacacaatgaagcccatatactgcaaacccatagctaacatccaactcagtggtgaaaagttcagagatttttcctctaatatcaggttcaagaccaggatgcccactctcatcacttctatttaacatagtactggaatttctagccagagcaattagacaaaggaaggaagtaaaagatgccaagaacacacaatggggagagaagactttgctaagttgtgctcagaaaactggatattcacatgcagaagaataaaattagacccccgactgagatgtcacccaacatcctgcctttctaataggccctctggtgatgctgatggtccaaggatgacacttagtaaaagtgctccccgaggatgtgcctacgctgaagtctcaagaagatcatgcctttcccataagaagcccggggaagaagcttatgactttccagcagggaaaggcagcggcaagctgaatgctcaggtggttttgccttttctccccatcaatggcaagttggaaggtggagctggtggcttgttccactctgttcagctcagctggtgtttattgcctatctgctctgggcccaacactgctaagtatatggatctctgggatccagggttcttctgtcttgttgtttcactggacatggctttcttactcaaagaacttcatcatccaaaatggctacaggaactccagccatcagatccacattccagctagctggaaggaggcaggtgggttggtaaagcaactcctctttttaaggaacttcttggaagttgcattcactgttatgcttaacagatgcattcaatttaaaatattataatcaacttgctttttttttgcataagaacatactttttatgtgaaggtttccagtccaggtgctagactggaaagttttccagacaaaagcatgaataactttggaaaatggctgttaggaacactcatga

SEQ ID NO: 470172 - DNA, 872 bp, Homo sapiens
ctgtaagggtctggcagagggtcctacgcccacggagccttgctcactgctggcacagcagtctgagatctaaatgcaaggcggcacgagtctgggggagggatgtccgccattgctgaggcttgagtagtagcctaactggggagacacctcccagtaggggctgactgacacctcatacagccaggtgcccctctgagatgaagcttccagaggaaagatcaggcagcatcatttgccgttctgcaatatttgctgctctgcaacctccactggtgacacccaggcaaacaggatctggagtggacctccagcaaactccaacagacctgcagctgagggtcctgactgttagaaggaaaactaacaaacagaaaggacatccacagcaaaaccccatcaacaaacggctaaatagaataaatagcgtagagaagaccttaaatgacctgatggagctgaaaaccatggcacaagaactatgtaacgcatgcacaagcttcagtagccgattcgatcaagtggaagaaagggtatcagtgattgaagatcaaatgaatgaaatgaagcgagaagagaagtttagagaaaaaagagtaaaaagaaacaaacaaagcctccaagaaatatgggactatgtgaaaagaccaaatctacgtctgattggtctacctgaaagtgacagggggaagggaatcaagttggaaaacactcttcaggatattatccaggagaatttccccaacctagcaagacaggccaacattcaaattcaggaaatacagagaatgccacaaagatactccttgagaagagcaactccaagacataattgtcagatacaccaaagttgaaatgaaggaaaaaatgtt

SEQ ID NO: 470173 - DNA, 990 bp, Homo sapiens
cctgaaatatgcagcattggcttcaggtgacagcgatggtgatggagccctgagtaggtggaggacatggtgaccctggcatgtagtgaggtagcatttggcctcaggggcaataacttggaagacagtgttcactgtccttctcagaaagacccaggtgcacgttgtcatggttttgaaggtgtcgctaaagtcacctcctccaggaagccctccagggcttctgctgctcatgttggtcttgccctccacagagagaagagcctgacgcccaccaggatggatgagatgcttccttacctgaaccaagccccagctctcgccgctccagcccagcatcctgaggagctgcctgactcgtacctgcctataaaaggttccctgattatggaggctgaaaagtcccatgatgagctgcctgcaagctggaggactggggaggcccggagcatggctcagtccaagcctgaaggccttagacccagggaagctgatgatgttactctcagtccaaggccgcaggcttgagaaactgcggctggttgacatttatttgatttatcaaatgaaaattttaccaaagaatctttcatgctagcagagaaaagcaaatcaagtcatacattctcaataaatggaaaagcccaggtgacaggatgatatttcacaacaacatttgagatgatgccgtggaaagctgcgagtgtatcctttctatagacttgaaaagtgactaacattctgctaaagctggaaggatgttttggggtgagcgaccataacaataatgtaaaatgttatatgattcactttgaaatgaccctttctaaagtaacaacttggattgctaaccagcattgggttcttttaaaaaactgatttggatgtttatgtgtccctctctcaatcaattcataaatttgttgaccgtgaggtttggtgtgatgaagataaatacaccttcgtagtgtagagaaataactagaaaac

SEQ ID NO: 470174 - DNA, 494 bp, Homo sapiens
tgtgatgtgacagcagtgggcattttccatctggtcaacaaaatgaccttgctcatccagatggcaaataaagatgatgaagatgctgttttctatctatatttttttgaagatgccccaaatggctctctgctttgtgagtgctacacctgggtggaatcacccctctcctctttcacagttgagagtcagcagctagagactgtaaacaatgacctaagaactagaaatggcaaaggacagaatgcacaaccccaagagaggagctctgtgcccatgaatgtgattaagaccttaagaagtcttggagtggattcttacattgaattagatgctctacatgactcattacaaaccagatatcatggtcctctgattccagccatggcgactgcagtgttcccgggagaccactggctgctgtccagtgagtgcactctcctgggaatggttccccacggccctggaacacacagagtggccatgccttaatt

SEQ ID NO: 470175 - DNA, 547 bp, Homo sapiens
tccctgactctacgcagtcgcaaaacatgatcactaagaaaaatcctaacaaggcagaaataggggaacaggaggaaatcaatattatacctctgcttttgctgaggcaaaaacagaggcaagaaatgatgactttgacattccagcccccagtatgctgcctgcagggtgctttttggtttgagaatgagtgttctacatactggcctgtaaggcagtgctactccaagtgtggtccacaggctggcagcaacatcataggggagtatgttaacaatgctgattctccagccccagctccggactctgttttaacggtctatccagtgctgcttcttcagcaaagtggtatttatgaagtcccaagatggcctttgcagcccatgaatcactgtgactctatacacttctgtgaatgcctggaccctggcaggaggtgcccactgggtaaagattagttaccagtcttcccagaagggttaatgactcttgcagttcttactgcctgtgacatatgcccaagacaatggagatctagaagggatag

SEQ ID NO: 470176 - DNA, 982 bp, Homo sapiens
ttgatatagagagtgatagaggatgctgccttggtcagcaccctcagctgcaggtctgttgcagtttgctggaggtccactccagaccctgtttgcctgggtattagcagcggaggctgcagaacagcagatattggtgaacagcaaatgttgctgcctgatcgttcctctggaagttttgtctcagaggagtacgcggccatcctcctcaatggtgggtgcccctcctccaacttcgctgccaccttgcagtttgatttcagactgctatgctagcaatgagcgaggctccatgggcataataccctcagaggcatgcacaggatataatctcctggtgtgccgtttgctaagaccgttggaaaagcacagtattagggttggagtgacccgattttccaggtgccatgtgtcacccctttctttgactaggaaagggaattccctgatcccttgtgcttcccagataattcaaggatactgtgaacacctttatgcacacaaactagaaaatctagaggaaatggatacatttcggaaaacatacaaccatcctagattaaatcaggaagaaatagaagccctgaacagaccaatagcaagtagtgagactgaatcactaataaagaaaaattgccaacaaaaaagtccaggaccagatgaattcacagctgaattctacctgacattcaaaaaattggtaccaatcctgctgaaagtattctcaaagattgagaaagaagaatttctctctaaatcattctgtgaagccagcatcaccataataccaaaatcaagaaaggacataaaagaaaataatagatccatatcactgattaacatagatgcaaagatcttcaagaaaatactagataattgaatctaatagtgcatcaaaaagatagtacaatatgatcaagtgggttttatcccagggatgcaaggatggtttaacatacataagtcaataattttgatacat

SEQ ID NO: 470177 - DNA, 722 bp, Homo sapiens
gcacaagtaggatttttcaggcccagaaacactaacccccaatatgatggtctttggagatggggcccgtaagaagctctctatgctgtatgacttggaaagggatttttgcataaatcgttctctacgccaggggcttccaaagcatagaaccggcagcatcaacatcacctgggaatttgttagaaatatacaacctgaggcctcatccaggacctataagattgaaaactctgaaagaggaaccaagaaacctcttcaaggggtacatgtgcaggtttgttacacaggtaaatttcatgtcacaggggtttggtgtacagataattttgttacccagatctactctgcccagaatgcttttcctctggtctttctttcatcatcgcacagactacctggcaagtatctgttcatcctccaagaagaagttcatttatcatctattctgcagcaagcagagcacgtggcttctttctctttgctccttcagcattctgctcctggcctcctttgaagcacagttgcattccatcattgctgtgtatatttgcacaggtctttgccttgtaccacattgtgagctccttaaggacacataatgacaattgatttatttctgcatctacagactgaacccagtgtctaatgcacagtagactcttaataaatgtatattcaacacgtgtgaatgagttctatgagttcaaacctattatgtc

SEQ ID NO: 470178 - DNA, 690 bp, Homo sapiens
taagtgcagagctgcccaagaccatggaaacgcacctcttgcatcagcatgatgtggattatttgtagaggtcgtgatattcacactgtcctgtgctctggatcagtggttctcaaagtctgctccctgaacttgcagcttcattgtcacctgggaaatgttaaaagtgaaaattctcagatccacttcagacctgctgaatcagaaactcaggagtgggatctgggaatctgtgtcttaacaagacctccagatgatcctgatgcaacagaggccagagaagaggttcatattagaagaacaagcctatttgtaagatactgtgaaagcagcagctacatgaaaaaacctcagaggcggaagtttactgtaaactcaggggggaagaggaaggatgagaccctaagagatctgcctttgaccagcagcaggatgcatcacctccatgagtctttgaatatgcaaatagaagcccctgaagggtagcacaatatgccaccccaaaatatgctagccacttttgcctaaggataattttgagctaaaggcatattaacaaaaaataaaattctaagctcctgaataaacttaggctgaatgggccctgccttggccaaggggattccaaaaaaacctgaagaactagttcaggccatgatggggtcgggggaggggaaggatgggggtctg

SEQ ID NO: 470179 - DNA, 564 bp, Homo sapiens
ccttgacgctcactgacatctcagtccttgtgacgttggagcatgggaaatgaaaaccacattttaatcttctctattggtgttcaaattaaaacatgtaagagactaacacaacagtgggaaaaatgggttgggcaagtatgtaagtgggagtgtctccaagcttttggagctggctctgctccagatgagatgctaaaagtcctaaatatgtgttctagttctggaagcatggtggcaataaatccctttataaagaaaaagatatgccccacaaaaacctcagttttaaggatttccagacattggctgcaaatgcctgaaaagaacagaaagataatgcgtgtgggaaacaatcaaggatctaggcaaggttatcacatctctggtgtgcatttgttgagagagttacagggatgcaagcatttcaaagctaaaaatgcagcattcctagacaaactggatatctgagcatcctagatctggcatatttagtgcctataaactttatcttaaactagctatttaaactaaagctttttaaaataaggaggacaagtcaga

SEQ ID NO: 470180 - DNA, 531 bp, Homo sapiens
aatctagagatgcagtctggctacagaggctttggagagctgtggtgggctccgcccagtccgaacttcctgatggctttgtttacactgtaccgggttcatctcactggggcttgtcggacggtgggtgcaggagagtggatgcagccaactgagtgtcagccgaagaagggcaaggcattgcctcatccaggagacgaagctttcagaggaatgatcaggcagcaacatttgctgttcagcaatattcgctgttctgcagcctctgctgctaatacccaggcaaaagggtctggagtggacctccggcaaactccaacagacctgcagctgagggtcctgaatgttagaaggaaaactaataaacagaaaggacatctacaccaaaaccccatctgtacgtcaccatcttcaaagaccaaaggcagataaaaccacaaaagtggggaaaaaacagagcagaaaagctgaaaattctaaaaatcagagtgcctctccccctccaaaggaacgcgactcattgccagcaac

SEQ ID NO: 470181 - DNA, 516 bp, Homo sapiens
cctttctttcagtttatcaccaagaaaatggggaaaatgtctccagggcatgtcagagaccttcacaacagcctctcccatcacagacccagaggcctaggaggaaagactggcttcatggaacagggtctagggctctcctgctgtatgcagcctagggacttggtgccctgcttcccagctgctccagccatggctgaaatgggccaaagtacaactcaggcagtggcttcagagggtgcaagccccaagccttggcagcttccatggggtgttgagcctgcatgtgcacagaagtcaagaattgaggtttgggaacctccatctagatttcagaggatgtacggaaatgcctggatgttcaggcagaagtttgcttcaggggtgtggtcctcatggagaacctgtgctagggcagtgcagaagggaaatgtggagctggagcccccacacagtccccactgggacactgcctagtggaactgtgagaaaagggacactgttctccagaccccc

SEQ ID NO: 470182 - DNA, 444 bp, Homo sapiens
ttcctagaacatgcctgtgcttcctgtatgcattgagcaggcccactttcccgccgaccctgaccctttggacacatccttgttgtcatgcaaggcttcttccctccttgcatcaacatttgttctacctataataagggccacctcctatatgaatctgggtcaagtgtggaagaactctgtgtctaagatgttatccctaccttttaggatatgcactacagagtacatatccaacagttgtcaagatctctcaggatggacacatggcaatgacagttttatctcaggagcatacgctggaccagcaaagagacaaaggagctgttatggaccaaatgtgtgtgtctcccaaagttcatatcctgaaattccaacgcccaatatgatgatgttaggagataatgtgttggggaggtaattagataccacatataagtgaag

SEQ ID NO: 470183 - DNA, 586 bp, Homo sapiens
acatcaaagaccaaggtagataaatgcacaaagatgaggaaaaatgtccaaaaatgctgaaaattccaaaaaccagaatgcctcttctccaaaacctcacaactcctcaccagcaagggaacaaaactggatggagaatggagaagaatataaatgacctgatggagctgaaaaacacagcaggagaacttcatgaagcatgcacaagtatcaatagccaaatcaatcaagtgaaagaaaggatatcagagtttgaagatcaacttaatgaaataaagtgtgaagatgtgattagagaaaaaagaatgaaaaggagtgaacaaatcctccaagaaatatgggactatgtgaaaagatcaaatctatgtttgattggtgtacctgaaagtgacggggagaatggaaccaagttggaaaacactcttcaggatattatccgggaaaacttccccaacctagcaaaacaggccaacattccaattcaggaaatacagtgaacaatacaaacagcaacttcatcaagaagagcaaccctaagacccataaccgtcagattcaccaaggctgaaatgaaggaaaaaatgtt

SEQ ID NO: 470184 - DNA, 753 bp, Homo sapiens
gtgatgttggtgacgtttgagagctcctatcagtcctcttgtgagataaatcgggagagacaggtaagaaagagtgaagcaggaaaggaaacaacgtatgcaagaatgaggttccaggtgaaatctagcttcagccacatcttacaggaagctctggagtataaagtgaatggcagagcccatcttgcatcggacaaaggaccacagagacttcagacatacatggaaaatcatctagagaaagttgtggagatgacccgttacccaaggtatctgtggcaggtgggcattaaaaacaagaaccagactgaggaagaggattcaggagatctgggcaaggcatcaacaatgtccacaaaggtccacctcttgcaccattcaggtccatttgcttttcacgttagtgaacaattcggtggcattaagcacattcccactgttgtgtcacattaccgctatccatttccaaaacttttcatcatccaaacagaaactctgtccccattaaacaataactacccatcatccctctcccagccctagcctacttctattctgctttctgtctttatgaatttgaatattctaggtgcactaggagaaatcacacagttccctacctcaaggctctcacagcaaacaaatctaaaaaaatgattgaactgtatacttaacatttgtgtactttaggtaaattatacctcaataaaaatataaataaaaccaattttgctatatgctatgggcttttat

SEQ ID NO: 470185 - DNA, 1363 bp, Homo sapiens
tgagtcgcctgttgaatttgccatggtgttgccagcctggggcaggggccacattgccatggccaatcctcagatgctaccagtgggcagcagcagcttccagggtggcctgggtggaggctatggcagggccagcagtatcggaggcatcacagctgtcatgatcatccagagcctgctgagcccccttaacctggaggtggaccccaacatccaggccatgcacacccaggagaaggagcacatcaagagcctcaacaacaagtttgcctccttcatcgacaaggtacagttcctggagcagcagaacaagatgctggagaccaagtggagcctcgtgcagcagcagaagaaggctcggagcaacgtggaccaccagttcgagagctacatcaacaacctttggcagcagctggagactctgggccaggacaagctgaagctggaggcagggcttggcaacatgcaggggctggatgatgagatcaatgagcgtgcagagatggagaatgaatttgtcctcctcaagaaggatgtggatgaagcttacataaacaaggtacagctggagtctggcctggaagcgctgactgatgagatcaacttcctcaggcaactgtatgaagaggagatccaggagctgccgtcccagatttcccacacgcctgtggtgctgtccatggacaacagccgctgcctggacacggatagcatcatcactgaggtcaaggcacagtatgaggagatcgccaaccgcagccgggctgaggctgagagcatgcaccagagcaagcatgaggagctgcagacgctggctgggaagcacggcgatgacttgcagtgcacaaagactgagatctcggagatgaactggaacatcagccggctccaggctgagattgagggcctcaaagaccggagggcttccctggaggccgccatggtagatgccgagcagcgcggggagctggctgttaaggacgccaatgccaagttgtccgagctggaggccgccctgcggcaggccaagcaggacatggtgcggcagctgcctgagtaccaggagctgatgaacgtcaggctggtcctggacatggaaatcccacctacaggaagctgctggagggcgaggagagccggctggcctttggctctggctggaggctccagctccttcagccgcaccagctccatggttgtgaagaagatggagacccgcgatgggaagctggtgtcctagtcctcagacgtcctgcccagctagctatgccaaaaaaaaaaaaaaaaaaagaaaaagaaaaagaaagaaaagcaaaaactaaaactactagaagaaaacatagaggaaacacttcaggacatt

SEQ ID NO: 470186 - DNA, 981 bp, Homo sapiens
gcctgggagcagtaggccgtaccatacagcctaggtatgtagtgggcttcgccatctaggtttgtgtaagtgcattctgtgaggttcacacaatgatggactcacctaagggcgcacttctcagaacatagctccgttgttaaatcatgtgtgactgtgtagaagatggtgtgtctttttaccggggctatcatcagcgggagtgggcggcactggatgtactcctgtgcccttgcaggaatccagcctcctgcccccttcctcccctgtcctggtggccctctgcctcctctcagaacctcgtggggacaggagatgggctctgcactccagtctctgtgggtggcgctgcctggtgtgagcagagatggcaggagggccacctgggtgcagtacctgcagcagggaggagggagagcagcctgcgggccctgcagcggccagccaggggcagcagagcagagcacagctcccaggctggggcagagggctgagagtgtgcggattcaggcaaccctttgggggtgcaaccaggctcccttcagggtacaactgggctctctgggcaagaattccgagaagggagcctgctttggggctaagtcaggaatgggagcacagcctctgggtctgagaacagaaaaaatttaaacagctttggaaatcttcatacgtagaagtttttgaagactttgcctacagctgtttgagcatatttccaatttcttggtgtttatgggaacagttagtgttttggtcttttggggaatcaattgtagtaatttagcaagttatctttgtcatcctgggttttgaatttatttgcatagagcccatgctttgtttattatactttttgccagttgacagcatcgcacctcttaatgatgtacattctctacagccctttactatgtcactccttgtataactgaattatataaattaaattgtaaaaactaatttaatgtgttcacatgc

SEQ ID NO: 470187 - DNA, 1416 bp, Homo sapiens
gaggatggttgtgttggcttgcttttctctttttttaaaataactgatgcaaagacccaaagaaggatcagaaaaatcatctcttaactccactgtctgtctcattttgaacctgagcatgaggacccagagggaagcctcattgtccaaaactgacagggtcttagaagctctgccccagacaggcaggcagcagagccttttgccggatgaatcaaatgacgttaggaggaccacacacattggctcaaaacacaacagaggcccgaagcaaattccagcagacaccatttgttctcacatgacaggagtggaccgggacccgggaggaccatgtgatgctgaggaatacggcttgagggacagaagagaatggcaaggagagggcttggtggaagaaggcagccatctgcaaaccaagcagagggccctcaccaggaatcaccagccccttgacgttagacttcccagccttcagaactgtgaggaatgaatgtgtgttctctaaactaatctatgatatttttgttatagcagcctgaactaaggctcacatactcacaagaaagaagaaaaatggtagtgttgaaggaagccaactgatgagaaagacagggtctcactatgtggccccaggctggtctcagactcctgacctcaagcaaccctcctgcctcggcctcccaaagggctgagatgacaagcatgaaccacggtgcctggccagtcatttttattataataattataatatattataaattattatatagtacatatcatacattacatcatacatcactacatgctatataatgtataatatatacgttgtataaatgtatattaacataagttttattttgtaatttagaataacatgatctgtaacagtatataataaaacaatcagcggattcggaaaccacacgtctctgtattcctttcagaaccactggcacacgcacctgcagttgtttcgggctgtggggtgtgtgctgcactatttggtttttgcagcatcatgggaagggtttaacattatcctggtacataaaggaaaacacaagaacagacaagaggccaagctgtccagtctgaaaatcatgtatcaccttgaacaagcagtgaaggctggaatgtgtgtctcaaacatgaatttcaaagccagcaggcagcgaggaggctctgcccgcccggcctggcctgtgagcagctggcagtgccttggcaggctccatgagtaggcgccacgctccctccaattctggcttcggcacctaagtgggaatattccaggaaccaggaaatgattcagacccgaatctgccactcagcccccgcacagaattttgtcagcttttggccccttcaatcctcagtctcctcaccagtcctggcggcaacaggaccctc

SEQ ID NO: 470188 - DNA, 623 bp, Homo sapiens
ttgagctgacctctgtccagtctgtacacattggatcctgaggctgagcttgggtggctgtggcaggaagcacttggtgttgtcagacattttacatttttgtctaatgcgtgaaagtgctgtctacatgaggcgtcaccatggccagagctggagctcagatgtgtctgagaagattggcagatgctgcttcactctggctcccggtctcctgggtggccctgcttccatccctgagctgcctgaacggaaaacgaaatcccatccccgctccagggggtgcctgggaattggaaggcatcaggctcctcacagcaaaaatagaagcctcatttgcttaggagagaacaatgacgaggaggcaagccagcagaggcggccttggcgggctgtgtacaccctctgcttgtctccgcactccctggggtcagacgtagacgtggctaagctgcctgcagaccttctcttccccttcatcctggcctgcagtgggcatcagggtccatcctgggacgtgggctgtcttggcaccaagttccagttcttaatacctcagtgtcacactgttccctgatttctcaaagccaggaaggaattgcagaaaacaaggtcagtttagtatc

SEQ ID NO: 470189 - DNA, 2389 bp, Homo sapiens
acgtgcagcccggggcctgggctcttgctgctggtacccggatgccgtggagccggggccaaggggaccacagcttctgggtcaagttgccagcacattccctagtctaccagcacctctctcttctggggaccttcccaggaagcccagaacctggaccctcctagagtccatgagtggccctgagcagcggggctgatgggggcaccccaccccgtccctgactgcctcatttcgaaggggcagaaggttccagcccagcggcatcaagttgggtacagtttccgtatccacaaaacagagctgccaccagcgcaaacccagagctgggtgaaggtggggtgcaggcatgatggcttctgccaagaacatctgtggcgccaggcgttggtgtccacggtcagaaatgtggctccttcatacctggtccagaacgtcagcgccgaagacggcctcctcctcgaggcgctcctcgttggtgacagccaagcgcatggcacccaccatgtgctgtgcctcggtggggagggcacagtgggtcactgagacctgcagcatccaaggaaagctggccacactctggggacatggggcccttctgctttcctggagccttagaccacctcccccgccccggctctgcacgcgacacccaccctctgtgtctggggatttgacccttgcacacgtgtccttcaatgccctcaaggacatgacttccagcctgcaccctcctgccagccgcccagcccagccaccttcttcagagggaggtgccgtgtggacatttgcccggctgacaccagggcgggggctggggctgcagccttcccacccacacaaagggtgtgagctgcccccacagcgtggggctcgagaggtggttccgagacaaagagaagacggagagctgcccaagtgcgtcctttgatctcactaagatgctttcgcataatacggtccatactatttttcttccttagccctctcattctgctgggagggaatcggtgagggagaattcaccccaccatcagcacccacctgctttttcactgaagtcattatgtgccaataaccagtcctggaaatctctgtccagaaccttccactgaatcacaaagagcgaacaatgtcctaacggtttgtttcatcctgtgtctcccctcccgtatctaaccctctctcggacttgcttttcttttggatcgtagacgggtggttaacttagaactccgctgtctaaaagaaaatcttctggtaataaagaaatataaataaaacaagagaaagaaaatatacagtgggacaaggtcaggaggaaactggattcacttcatgttgtgcagaagcatcattcacttccttctggctcccggtcagatttggtttccagaggaggcagctcctgggagcctatctatcacctctcgcaagcagagtgtcaagagtttaatttaaatgtggcccttccctgatgtcagaagccaccttgccacgctaagccatggggaaaatagcacttcctttcatacagcatttttgatgaactataacagcagtagaaaagggtggggaagaaatatatttgtggcatagaatttaagttgaaatttgagttcagtgaggaagctcataaacacagctccttacagaaggagagcggggagagggctgttgacaggagacgctgtgggaatcacttcacctgggtcttactggtttgcagatgtgctattctgaacagtcatcgtaactggaaaataagttggcttttcaacaaataattcaaattgtatgaagctaagacacttgcatggaaattctgccccattctgtagtttcccactcctgggtgaggccaaccattagaaacagatttatgaagagctcttcgtttggggcaattccagcgattatggaaaatgtgagttaaaattttaggctggtggctcaaggcaaactttgaagacactttgctaacagattttatgtggatcgtaagtgtcaggacctggtgctgctcctggactctgctggtccctctcccttctcacaactccttgtctcgcactcaggttcccttccacctggcatgctgccaccaaattaaactcctaaagcatcactgggtcgcacccaagacgccaaactcctcaagggcacttctacagtttgacatccaaagccataaaatatctgcccaaatgatttcagccctggggtgctgaagctcccacagccaggctccaggctgtcctgccatgcgccttagctggtgctgtgaccttcacctgcaccacctccccctccttcacacaccccagcccccatcacctccccctccacacacaccccagcccccatcacctgaccgttgggattaaaa

SEQ ID NO: 470190 - DNA, 949 bp, Homo sapiens
ccttcgtggtgagtgttacagctctcaaatcggcgcgtctggagttgttcgttcctcccggtgggttcgtggtctcactggcttcaggagtgaagctgcagaccttcgcagatgctgattggtgcatttacaatccctgagctagacacaaaagttctccacctcctcactagattagctagatacagagtgtccactggtgtatttacaaaccctgagctagacacagggtgttgattggtgtatttacaatcccttagctagacataaaggttctccaagtccccaccagactcaggagcccagctggcttcacccagtggatccggcaccgggccgcaggtggagctgcctgccagtcccctgctgggcacccacactccttagcccttgggtggtccatgggactgggcaccgtggagcagggggcggtgcacactggggaggctcccgcagcacaggagcccacggaagttggggaggctcaggcatggcgggctgcaggtccggagccctgccccgcgggaaggcagctaaggcctggtgagaaactgagcacagcagctactggcccacatgctaagcccctcactgcccgggccggcgggctggccggccgctctgagtgcggggccgctgagcccatgcccacccagaactcacgctggcccgcaagcaccaggcacagccccggttcctgctcacgcctctccctccacacctccctgcaagctaagggaacaggctccagccttggccagcccagaaaggggctcccacagtgcagcagcgggctgaagggctcctcaagcacagccagagtgggcaccaaggccgaggaggcgcccagagccagagagggctgtgagggctgccagcatgctgtcacctctcagaagcaggagaagtcccgcccaagagaaaacaaaaactatacacactgactttc

SEQ ID NO: 470191 - DNA, 1477 bp, Homo sapiens
gacactgcgcgcgcctccaggcaccggcgttagcgggtcgccgacccgcaatccccgccgcggctgcttgcctaccggagtgtgcgccggcacctgccgccggagacatgttgcaaaaaccgaggaaccggggccgctctggcggccaggccgagagggacagagactggagccatagcggaaaccccggggcttcgcgggccggggaagacgcccgggttctcagagacggctttgccgaggaggccccgagcacgtcccgcgggccgggcggctcgcaggggtcgcagggcccctcgcctcagggcgcccgccgggcccaggccgcccccgccgtggggcccaggagccagaagcagctggagctgaaagtgtccgagctggtgcagttcttgctgattaaagaccagaagaagattccgatcaagcgggccgacatactgaagcacgtcatcggggactacaaggacatcttccccgacctcttcaaacgggccgccgagcgcctccagtacgtcttcgggtataagctggtggaacttgaacccaagagcaacacttacatcctcatcaacaccctggagcctgtggaggaggatgccgagatgaggggtgaccaaggcacgcccactacgggcctcctgatgatcgtcttagggctcatctttatgaagggcaacaccatcaaggaaactgaagcctgggactttctgcggcgcttaggggtctaccccaccaagaagcatttaattttcggagatccaaagaaactcattactgaggactttgtgcgacagcgttacctggaataccggcggataccccacaccgaccccgtcgactacgaattccagtggggcccgcgaaccaacctggaaaccagcaagatgaaagttcttaagtttgtggccaaggtccataatcaagaccccaaggactggccagcgcagtactgtgaggctttggcagatgaggagaacagggccagacctcagcctagtggcccagctccatcctcttgaaaggtggattcagagggacccccgggacaagggtctgagacccaaaggcacagtttagaggattgggggaagggagaacgaacccagggagcatattgctgtaaacgcttcaatgtgtgtagctttaggatgtgtttgcaaagttttgtttttttaatgttgtgttattttgctccagattttcatctataaacaaaggagcatttgttttgattttactctttttggtataaaaaattttgctagcttagtaaaacgaattggaaaacttgactatgatctggaacagataatgcaagaaggaacacataatattgctttagctgcactccacatattttgatatgttttgtgtccattcagttctcttgattttttctttgaggctttctctttgatccatgaattatttagaactgtggtgtttaattttcacatgtttagagactctcttt

SEQ ID NO: 470192 - DNA, 2483 bp, Homo sapiens
ttgtgacccttattagtggaagttgatgtcgcacttgcacagcattcgggcccacaccttccctcaggcagcccatgtcaacttctgaagctctgagtctgagaagtttcccaaactgcctgactccctgtagcgtacaccctgggactaggctggtagtcgaggctgcctggacacaggcttttcccttcctcatagcggcctttcagaagacaatgtccccgcttcacctaacacccaccacaacaaagccccagtgccacacgccattcaggagacatggttgcttcttcatcatccatcctgccgcccgctcgacattccctgccacccgacagtccagggctgcggctactgtcagacacccttcacaggagcagatggtgctcacagttgggaccctgtcagtgcccaaggacacccagggccctgctgggttcccacctgcaagctcccttcctagacagtgcacctgtgctcgagcttctggggccaccagcatctgccaagaacagatcatgttcccttgtgagtgcctcctttccattactcaaatcagaccaccctgcaaggacaaccactggtcgatttatcaccttagctttcctgttccaaaatataagagttccagttgctgacatgaccacatccttgctgacattcgccttaccaagtatttagtttgagccattctggttgatgtctagtggtttctcattgggattttaatttacatttccctgatgatgaatgatattggcttattggccatttgtatacattatgtgtgaagtgtctgttcaaatcgttgaacgttgttgatttgtaggagttctttatatattctgggcaccagtcctttgtcagatatatgtaatgaaaatattttcccattccattacttgccttttcattttcttaacaatgtttttgtaaagagcagatgtatttaattttgattaagtactttttaattaatttttcgggtgtttttaatagtgttttctctgtcctgcacaagaaaactttgcttaccctaaggttgcacacatatcctcccacattttcttccagaaactttatggttctaacttttacaactaggtatatgatccttcttgcattatattgtttgtgtgaagtgaagtagggattaaggatcattcttttccatgtggatgtactgttatgttaaatgggggcagccctaaaccaatgactaatggaaactgtcatataaatacccaagttcccttactcctcagttgggacagctctgagatgtgtgtaataccctgttccctaagttttccagtggaattaagttccacttacccacgatgctaacttgtttagtaatgattcattttgggctaacttccctaccctgtctccctctgctatcagtgtttcctgggatcgcctctcaaataaattgcttgcactcgagggtctgcttatcccagggtctgcttctgtggaaactcaaaccaagacagtaacaaacaagacagaccgtccctaccctcatgtatttagctttaatatagttgcatataggaagatgctacaaccagcattcagaggagggagaagtcattctcaaatgaaagtagaccctccaatgcctcgctgactagaagcagcagaatgacagcatttgaaggcagaactaataaatgacaggttactatgagttaaaacatccccttctttttttttttctgtagagatggggtcccgctttgttgcccaagttggtctcaaactcctggcttcaagcaattctcctgcctcagcctctggggttactcgcatgagccactggatccctacatccccctcttagaagactattaccagttagaaaaacctagcccctgaagttttaaaaaaagagaaaaagtcatttatttcactgaacagtgttttcattccaaattcttttactgtgtaactctattttgcaggtggcataaatagcacagagagatgctgtgtgagtaagtcagcatcactgttggaggcaggctgaaggactggttttggaaccctagcatgtgtctttcagagcagaccagggaccccatacatccgttttgcccaggatattgagtcagcaaaggaaatgatggcttcagtctccttgggtcccctagatgacaagacgacaggaaaagctgcacctctgctctgcctgctgtgtccctcagcaacagctctggggacacacaaagtgattgagaactgcagaacaatgttgatggctgtgagatttcccagaaaagccctgtttgcatcagtcaagccagatgaactgtctacattatgacagacctgtgtatactgtgtgagaaggggatgttcccatggtactttacactcactgctaaaaagcaattattttcaagttgctactctgtatcttccacaagcaaaaatcaactcctccatcgcaggtcattgaaagtatttcaatgtga

SEQ ID NO: 470193 - DNA, 698 bp, Homo sapiens
tgttccagcatgggaaacttcaggccagttttgagaagggtgatcaagttgaccacagcaaatcattcatgtgggagtgtaaggtttgatcagtttgtttcactgccctttcagttacagcattctgcagggcttgtcatcaaacttgtgaagctattttgtggcccatggctcttcctcatcacagtggaggctcctgcagggcaggcctatgcctcccctatggggctcagccagagcgccatgctctgcagctttgccaaatccccttctgaccatcaggctatcagcagtgttcctcccgtgaccatctgggttccaggtgatgcttctcccagacgttctggtttgcattttttacaggttgaagaatgtgaatatacttaacactactgaagtggatactcaataatggctaagatggtgaatttagtgttatgtgtttttttaccgcacaggaaaaaagagaaacaaagagttcttaatggtgaggagaaatgcttatggtagaatgctagagagaagggggacacaaaattgtatagaccatcttatccatcttatctcatctgtgaacaattacatataatagtaattatatattttatatataatatattatatatatacatatatatgtatatataactacagtggagggaaaaggtttaagaaaatattttaaaatactaataaaa

SEQ ID NO: 470194 - DNA, 2359 bp, Homo sapiens
cctgctattacatgagccttctgctggatgccttccagaaagagacactccactgtgtaatgagagctgtgccccaggccaccctgcaggatccagagaagaggcagagccagggagagggcaatggagactgccacataatctatgacagatgtggtgacaggggctgtcatggaggctgtgacagagactgcggtgtggactgtgatacacaccgtgacaaggtctgtgatacagactgtgacagggactatgacagaggccaggctgtgatagagactgtgatagagactgtgacagagactgtgacagaggctgtgatagaggctgtgacagaggctgtgacagaggctgtgacagagactgtgatagaggctgtgacagaggctgtgacagagactgtgatagaggctgtgacagaggctgtgacagaggctgtgacagaggctgtggtagaggctgtgacagagactgtgacagaggctgtgacagaggctgtgatagatactgtgacagaggctgtgatagagactgtaatgcagactgtgatagaggctgtgatagaggctgtgatagagactgtgatagaggctgtgacagaggctgtgatagaggctgtgagagaggctgtgacagaggctgtgatagagactgtgatagaggctgtgacagaggctgtgatagagactgtgacaggggctgtgacagaggctgtgatagagactgtgatagaggctgtgacagatgctgtgacagaggctgtgatagaggctgtgatagaggctgtgacagaggctgtgacagagactgtgatagaggctgtggtagaggctgtggtagaggctgtgacagaggctgtgacagagactgtgacagaggctgtgacagaggctgtgatagatactgtgacagaggctgtgatagagactgtaatacagactgtgatagaggctgtgatagaggctgtgatagagactgtgatagaggctgtgatacagactgtgacagaggctgtgatagaggctgtgacagagactgtgacagaggccgtgacagaggctgtgatagaggctgtgacagagactgtgatagaggctgtgacagaggctgtgacagaggttgtgatagaggctgtgacagaggctgtgacagaggctgtgatagaggctgtgacagaggctgtgacagaggctgtgacagagactgtgatagaggctgtgacagaggctgtgatagaggctgtgacagaggctgtgacagaggctgtgacagaggctgtgatagagactgtgacaggggctgcgacagaggctgtgatagaggctgcgacagaggccgtgatagaggctgtgatagaggctgtgacagaggctgtgatagaggctgtgacagaggctgtgacagaggctgtgatagaggctgtgacagaggctgtgatagaggctgtgacagaggctgtgacagagactgtgacagggactgtgacagaggctgtgagagaggctgtgacagaggctgtgacagaggctgtgatagagactgtgacaggggctgtgacagaggctgtgacagaggctgtgacagaggctgtgatagaggctgtgacagaggctgtgacagagactgcaacagagactgtgagagaggctgtgacagaggctgtgatagaggctgtgacaggggctgtgacagagactgtgatagaggctgtgacaggggctgtgatagaggctgtgacagaggctgtgacaagggctgtgacaagggctgtgacagagactctgacagcgactgtaacaggaattgtgacaggggctgtgacagaggctgtggacagggacaggcactgcgatggggactgggacagaaatgtgactaaatctggaaccacaatcagagttgggacaacagttcctggagcccgggcccacactcccacggtcgacagagcagttggcggtgacagcagcaacacagcaaacacagaggcccagccaggcccaggcatttgtggggacgccagcaggctgaagctgccgcgggaagacagcgagagggagatccctgaatcagatatcaccacctgccccatgggaagcctgttagccagccggatctctctgcttagcacacagggctgtctctctcccaggagcaaggcctttgccaaacagcaggagggtgaagcgccatccctggtacctaccactctcttgaagattcccacaatgatggtgaaggaaacgcagtttatctctgactcataacaggcattccataaatatttgttgaatgaacaaaaaaatgggagaatttctttgaggaacattcacacaagcagaagactctcatctgggag

SEQ ID NO: 470195 - DNA, 754 bp, Homo sapiens
cttcatcaaagaaagaaaactatccaagaagcctacttccagcaaaaccgagcatgggtctcacagctggaagagttagcccaataagagaacatttgtatagagcagcatttttatcacaagatgccagtgctcagcaaggtttttattatacaaaatcaaaggacttaaaatactcaactagaactacagttatcaagaccaagagtttttcaaagtacaacattaatcccccaggatttttagtaggggttagacagaaaatgaaggcggtcggggcattctcagagaaaataaatctggaaagtgtcaagggaagtcgtgggggaaggagcctgaggaactgtgtgctccagcccagatactgcacttttcccatggtcttcacaacccacagaccagcagattccctccagtgcctgccccaccagggccctgagtttcaagcacaaaactgggcagacaccaaactagctgcagaagttttttttccaaaccccagtggtacctcgaatgtcagcgagacggaaccgttcactccccttgaaaggggtgctgaagccagggacccaagtggtctggctctgtgggccccatgccatggagcccagcaaactaagatccactggcttgaaattcttgctgccagcacagcagcagtctgagatggacctgggatgcttgagcttggtggggggagggacatccactattgctgaggcttgtgtaggcagttttaccctcagagtgtaaa

SEQ ID NO: 470196 - DNA, 685 bp, Homo sapiens
atctcccttcgctgactctctttttgcactcagcctgcctgcatccaggtgaaataaacagccatgttgctcacacaaagcctgtttgcaatgaagcatatcaatgaagcatatcaatccaagttagtggaagaaattttgctaaatgcccaggtccaagctttgccctaccgcagaagcacctgggacactggtgtgaatggtcatcggagtggaggtgacacaaaacagagacctgagcaacaggaagagagaggtgctcggaacatgcaacccagatccctcaaatgcacagttcacaatagggttcatgctccaagagaatctaatgctgccactgatctgacaggaggtggagctcaggcggtaatgctggctcacccaccactcaccttctgctgtgtggcccagttcctaacaggccacagactggacaagtgtagtggcagtgaaaataaagaaattggacagacttgagatatatttgtagttggacagaatttgctgataaattcaatgtataagtaaaggaaaaaggtgaatttaggtattcaacttgaggaggtgagtgtatggtagtgccattcatggaaatgagaagattcaaggcagaacaacaaaccaggcttgggagggaaagttaagaattctattcgaccatattttaaaggttgaaatgtttgcc

SEQ ID NO: 470197 - DNA, 566 bp, Homo sapiens
ggctttgaggccagcagttcagggtcccagggatggataggagatgattttggaaagtcaaggaaatttggcccttatgttatttaataagataaatgcaaaagggtggaggaatgagggctggggtacagccagaggaaaggtgctgatgtatgacaaaacatggtgcctcttgagtggcaaagagtctgtttcttataacacattcaatggtctccctctggggttccactcaacacaaaggttttctaactccatggatgatgaacagttgagcaaagacatttctctggtgcatcactgggagaacttgtccaaggtcctgaagatagaggatcccagcaactatgacttgaaaactgtgcttcctggttgcctgacacgaggtaatgcagccatgctggctgacctgggcatgagtgttcacagtgagaatggggctctgggaggaggaggagccaatgaacatagtattccctggattgtaaactgcactgaaggtttataaaaacttttggagaaaaccttgactaaagttagctggggaatagcaagaacttggggag

SEQ ID NO: 470198 - DNA, 545 bp, Homo sapiens
gggttgcttcttccctgcctccccgacgaagaatgggaacaccaggtttgatctacaatagtcaggatccactcatggagctggaacaagatggacacccgaacacaactgaagttctattagaaaggcgaggacataacaactgctcctcctgtaaagttgaacttttatattcactaagtggttcaaagaaaggatcacctgaggagcagtatagtttcctctccccactttcccacctcatcccttcacattggtctactggaagacaagagcaatccctggaggaaaaacaagaagtggatgaatccagatggcagcaatcaaggttctcctcccgaaagcacacccatgaccccctaaactcactcaaaggaacccagactaagacccaggttctggtgctcctcacaggagaacgtcaccaatcaagtgaggtgatatcccaagaggataaaaatgagctaaaattgaaacattacaaaaatccaagaagcgtgagaaacatgaaagagtgataacctaaggatggattaacttgtact

SEQ ID NO: 470199 - DNA, 748 bp, Homo sapiens
attgtgaaaatgacagtgaagaccagaagtgaccttctggtgtgtaaaatctcaagccttggatattcatggatgtcagatccatggattaataaagaaacaaggtctttggtggtctgtgtcccaaactttctgaagttgatatctctgaagcaactattgtctgctgctattcagaaacaaattccaatttgttaccatgaatattggggaggagatgaaaatatgggaagatatttggaggataaaatcatagagttttctgaactgaatatagatctaaattatgtgaatggcctgaaaaagaaatactggcttaaagcaatgatgtttatctggggtcgcaaaatttttggatatgggagactcctgccatctctagatgagaaaggaactgaaatgtttcctagctgatctgattatcacagtcaacttaatgacctggtcgggctgccacatgatcagtccagttgattgctgcaaaaccagtcttcaagctctgagattcgttcctctgcttagtctattttgctattaatacttgtgattgcattatgaaattcttgtagtgtgtttttcagctctgtcaggtcagtgacatttttctctatactgactattttgtctgtcagctcctgcaatgttttatcatgatttttagcttccttgctttgggttacaacatactcttgtagctcaatggactttgtacctattcgtattctgaattatacttttatcatttcag

SEQ ID NO: 470200 - DNA, 737 bp, Homo sapiens
ttgtgagcgccagacccggctttagttttcatggataaacaaccagcactggattaattccttattggcaaacaatgactgtactgtctgtcttctggaaccatgtcaacgatggcagcatcaccagacttcaagaatttagggccatcttccagctttttaccagaatggcgatcaatcttttcttcagctcagcaaacttgcatgcaagcaaagttgccacgacaaagatccttgacagacacattcttgacattgaagcccacattgtccccaggaagagcttcactcaaatcttcatggtgccttttgacagattttacttcagttgtaatgttgactggagcaaagatgaccaccataccaggtttgagaacaccagtctccacttggccaataggaacagtaccaataccatcaattttgtagacatcctggagaagcagggcttgtcagttggacgagttggtggtaggatgcagtccagagcctcaagcagcgtaggtccaatggcgctgcagtagttacaggtgaatttccatcccttgaaccaaggcatgttagcacttggctccagcatgttgccaccattccaatcagaaattggcacaaatgctactgtgccagggttgtagccaattttcttagtacagggtctcactccgtttctttctttgtgaagtgctacaggttgtaaaacattccctgaagtctctcaagtctattttaggtttagc

SEQ ID NO: 470201 - DNA, 793 bp, Homo sapiens
ctccagaatccactgacagcttgcaccatgcacctggaaaagctgcagacactcaatgccaactgtgaaagtagccaggagggcctgctggagggagaatgtggagcagaactgagtcagcccagccaacctccagacctgtgcagccccaaccaacagccaactatcccccagtcccgtgagatcccatctccaggaagcaatgcaggcagcaggaggggcgttctgcacttcccaacagaatatggtgtcgctttgatggtcaaagtctccattgcctcgggagaaatgccctgtgggcaccatcagtctgtgcccaacagaagggagaggaggccagtaggagaggcgatgccagaagaagtgatgtgcaagggtataacggaattaggagtactagagccaggtgaagggaagacagtggctactgccatgttgcaactggcccaatttttccctgagcatgtgttacctgatttaggtgatcagtctggcttccgggcatttgttacaaaagtcagtgatcagcagtgcctttccaagtgacttgggtgaacacttaagtgtgcagtgaggtacagcaatctgatttcaaactctgcctctgccacaacagggttacgtcttttcattgcacttcacaggtatagtgatttttagaaaggtttgtaaactcttcgaaggtttgcggtaaccgtttttatcggcgttattttttcaacagcatgtgctttctgtctctgtcacactttggtaattcttacaatatattaaactttttcattatcatatc

SEQ ID NO: 470202 - DNA, 1423 bp, Homo sapiens
gttaagtggggtgtagatgtgcttctgcaggaaatgccctggaccaaggttatcgaagctgttaatggattggacagggactttaactgggataaaaataaagctcgatctccttcctggggagcttttctccttgagaggctaccgaaggcaagctggtatgagcagcagaaccccaagcttgaggccttgtgtgggatgaggacaacagattgctatcactgggaattgttaaatcaagatgttttggaggttgcccaaccagtatcttggtgtaactgggatctgaaaggcacactcacatattctttgtctctaaacagctctggaatgcagaccaattcccagtttttcactctgatgtcaaagctgttagctgatctgtatcaagcccttggacttttcagaggagagtcagatagcagtacccagtgttcactgggatttagaggaaatgtataactcccattatgtaaaggttagtttgcttgatggtgtcccataattcctgaattcatcattcttttcccttgtttttcttattactcctctaactggagaactttaaatgtcctgtcttcaagctcactgagtcttctgcttgatgaagtctgctattgaagtttttaattgaatttttcagttcagttatcatgttctttatctttagaattaatgtttttattgtttctatttctttgtcaaacttttatttttttcataaattattacctaaattttatttaattttctattaatattttctggtagttccctgaacttgtttaaaatgattattctaaattctaaacagtttttcaaatagacttatttacactcaagtccttgtctcagtgtttttcacattcatcttttgttttacgcttttctaatttcataattaaaatattccaatagcaattagtgtgtcaactttagtgcttacagaaagtgttataatagcagtcatgtagaaaaacaataatacatcatttcatattctataagttaaaagattcatttccctctgattaagagtttattttgaaaattctgggaagttgctgttgacttctactccctgctttgcatcctgataccttgcagttttaacacttatatgacgtagtttaaaatattcagtggcatctcatgtaagtttttttctccctttggaaatagaatattggagtagataactctgtgtgacctgtttgattttctgccccacattcatacagctgcagattcagctctgtgccaagctctatcattcatcatggggagtctaattaaggtagaatccagtcagcttgtgctagggactgaatgtttgtgtcccctaaaattcatatgttgaatctctaacccccagtgtgatggtatttggaggtgagacctttgggagctgattaggttagac

SEQ ID NO: 470203 - DNA, 783 bp, Homo sapiens
tattccatagcacagccaagtttgagacagtggggtctaagaaccatgtagaactaatgagaatcctgaagtgtctccttagtgggtatccacctttctctgagcacaggactcaagtgtcactgaaggaccagatcaccagtggaaaacacaacttcattcctaaagtctgggcagaagtctcagagaaagaagttgttggtagtggatccaaaggcatgttttacaacagaagaagccttaagacactgtggcttcaggggttggggctgccattattaaatgctgacctcatttggaactgccaagagttggaagatgaagacatgaagagaaagtttcaagatcttctgtgtgagaaaaatgaatccacagctctactccaggttctagcccagggccccttggaaagttccagggaaaggagcatagcaaggttgggggtggagtttgtagagactggctggctggctgctgacatcttcatgagaacagcaggtaccttggtgcataataacaggccaggttatattctcatccttgccctcataaagatacaggtctacagtctctgaaacctttgggctagataagttgtgaaatttaattacccaattttaggaaggtgatacatttcagtaagctaaggttaatttattgaagaaaagctttaaaaaattttggtgtagcctaagcatatggtgtttataaagtctacagtagtgtacagtaaggtcctatgccttcacactcactgactcaccacagcatcttccagtcctg

SEQ ID NO: 470204 - DNA, 2889 bp, Homo sapiens
accctttcacagctggggagtggagcctgggcctgcgcctctccgcgccagcgccggcactgtgcgcctctccgccgctgtccgcctctccgccgcgccgccgctgtccgcctctccgccgctgtccgcccctccgccgcgccgccgctgtccgcccctccgccgctgtccgcccctccgccgtgccgccgctgtccgcctctgcgccgctgtccgcctctccgtcgctgtccgcctctccgccgctgtccgcctctccgccgcgccgccgctgtccgcctctccgccgctgtccgcctctccgccgcgccgccgctgtccgcctctccgccgctgtccgcccctccgccgtgccgccgctgtccgcctctgcgccgctgtccgcctctccgtcgctgtctgcctctccgccgtgccgctgctgtccgcctctccgccacgcccgcgccggcgctgtgtgcctttgcgagggcggagctgcgttctcctcagcacagacttcggagatacagcgaaggcggagcagtgttcacctcagcacagacccgggcgggcgggcgggccggtggcaccgcgagggcggagctgcgttctgctctgcacagaccttggggcactgcctcgctttgggacaactcggggccgcatcgacggtgaataaaatacttcctgtttgcagccctgtttgtggttggtggcagcgatggacactgcagccagccagagcgtagaaaggcatcggggcgtcactgcccgtcttgggtggctggttgggtgtgctatctggggctgtgctgcctgcaccggggggtggtttgggggcccaaaccggggctgcactgcctttggcggggagccggttgggggcactatcccagactgtattgctggcaacagtgagaagatggccacagagacagacagcagcgtggtcagagtggtaggagccggccatcagcgagagctgctccatgcctggctgctgggtgctagagtctgcggcccactggcttgcctcactgtggttggtggtggcggtatacgctactggcggcattgggggacagaggtggggggtgctattgagggcaggactagccgtggagtgggggacgagttcggtgctatcaggctgcactgctggtggcggtcaacagagttggcatccaaggaaggagtggttctcctctccctgactccacactccagagggcgacccactcttggtcatactggaatgcggcagggcacgcagcgcttttctggctttgcccgcccagctgctccatgccaggaggaggaggagacacctagagcctgcaacaccacggctcgcctcgctacaggccctgcccctgctgctgccctggccctggcctggaacctggtcctgtcaaggacctgccctgactctgccatggccctggccctgctctgccttgttcctggccctgacccagacccagaccctttcctggctctgcactggcctttccctggccctgagctggcagtgatgaacatgggcctgcccctgcccttgccctgccatggcaatggcattggacagtccgtggtcctaaccctggccctgccgtggaggtgccactctctgggccctgccctggctctggccctgccccggccccagccatagacctgccctgctctgcctcgactctggacctgccctgactctgctcagccctggatctaccctgactctgccttggtgttgccctcccatatctatggcctggctctggccatgccttgcacaggccatgctctgccctgcatgtcccagcctgggcccagccctcatcctaccatattcctgaccccagccatacccttgttctggccgtgaccctgccgtggccctctcctggcccttccttggtcctgccctgcccttccatgccctggccttgccctcaccctgcattggccctgcactggtcctgccctgccctggtactgccttgccccggccctgccttctccctggccttgccctgccctggccttggctttgccttatcctggtcctggttctgccctgaccctggccttgctctggatcctctctggttctgccttctccctggccctgtccttgctctggccctgtccctggcccagccttgaccctgaccctggccctgacaatccccaggtctgacactggctatgcttggccctggcccctccttttggccctgccctggccctgccttggccctgtgctatcttagtcctgccctggccctgaactcgccctggccctaccctcaccctacactggccctggcctaccctggctttgccctgccctggccctgcctttggcctgctctggctctggttctgccctggccttgcccttaccctggaccctccctggccgtgttttttccatggtccttctctggccttgcccttgccctgtcccctttcttgtcctgccatgtttctggccctgccctgtccatgtcctggacctgactctggccctggacctccctgtccctgccctgccatactctggcccattcttgctctacactgaccctgtcctgccttggccctgtgctaccctagccctgccctggccttctgctgaccctgatcctgccatggccctggccctgccatgtccctgccctggccctggttctgccctgcttctggccctggccttggtcctctcatgtccctggctatgaccctgcccctggtttttctctggccatgaccctgccccagttctgtcctatccctggccctgtctcagttctctcctagccctggcctttcacagtactttatgcttagtaagggctccatagtgtctgtgagttgaatgttgtgttcatagtatctgcc

SEQ ID NO: 470205 - DNA, 4442 bp, Homo sapiens
tgttttctcccccaatccaaggcactaggttttggctaggttgcaggttccaagctgctctcctgctgtgtcggggagggctgtgcatctgcaatgactctcagggggctcccggtggtggcaattggtgaatctgcacggcagtgtttcaatattgtcacagccctgctgtctctcatgctctcaaaaagcatttctcttacctgtgacagacttcctatacctaacagcttgcaaaaatgttccagacctgatctggggcttgcaccctgggtgcagcatgacaggggtgggcagggtctggctctgggccagaggaccctttctgatggacttcagctgttggccttccaggggagactgatcaacctcacaagagtcatacggtgggagtaccaggttgaaaccaaggacaccttcctggaggagctgctgtttgagccagctctgagaacaggtggggacaggactggagaggagaagggtgtcccctatgagcaaagactggccaccacccaatctaacacccccacagggcccctgtggcatccctgtccagtccctgtcaccacccagtttttccctctggacccaggaattcaaagtaagcaaggaggtccgctgctccagttggctgcatataattacaaccttgagcccaagcagcactttgggtcctggtttgggaccatgaagcggctcgatcctgtggtctggcaatgcctggggtacccagacctcactctggacaggccctgggagggggccctggaacctatagatttcaggatcgaacactgggattccctcagcactaaaggaggaaaattgcaaacagagctgaaagtgcaatgtgcaaagaagaacataaaggacaaatctacaactaagatcatactgagtgtggaaaaggtgaaagattttactgtgaacaagaaaaagattttactggaacaagaaaaggatgcctattctcaccaatcatatttcacatagtgaaagtcttaaccaggacaattagattaaggaacacaaagacatctttttcatatttcgaatgtaaaactgttttggaaactgttatttttagaaacagttaaaaacattttttcattagtttttcatgtaaaattatgacaaccagcatgaaataactgtcatcacagaagcatggtatattcgattccaaaacatattctttgtaagttttaatatatttatgtattatttatacttagattgtaacccataatgttacaatttatgttacaatattatttttccttcaactcttaagaatattcttaaataataaaattaaaattaatgaattataatttttgttgcttgggaaaaagagtagacacacacgtgacagtgcatcacttcaccccatcatttcatctcatcatttcatctcatttcatctcatcattttatcccatcatttcatctcattccatctcacctcatcattttatatcatctcatcatttcatctcaccatttcatcaaatctcatctcatctcatttccatttcattttcattatttcatttcactatttcatttcatctaatttcatttatttcattttgtcatttcatataatctcatttcgtttcatctcatatttttgatatcatttttcatatcatttttcatctcatcatttcatctcaattcatttcatctcatcatttcatctcctcatctcatcatttcctcctttcattacatttcatctcatttcttctcatctcatttcaatttcatttcattatttcatctcatttcattatttcacctaatttcattatttcatctcatctcatctcaattcatctcatctcatttcatctcatcatttcatctcatcatttctcatctcatcatttttcatctcatcattgaatctcatttcatttcatttcatcatttcagctcatcatttcatgtcacatctattcatttcatcatttcatttcaacatttcatctcatcatttcatctcatctttcaatttcatttcaatatcatcatttcatcatttcatttcatctcatttcattatttcattatttcatttcatttcaaattcatctcatcatttcatctcatctcatcatttttcatctcatcatttcatctcatcatttttcatctcatcatttttcatctcatcatctcatctcatcatttcatctcatttcttctcatttcatctcatcattttatctcatttcatctcatctcatttcaatttcattatttcatttcatttcactacatttcatctcatcattttatctcatctcatttcatctcatcatttcttctcgtctcatctcatcatttcatcatttcatctcgtttcatctcatttcatctcatctcatctcatctcatcatttcatctcatcctttcatttcatctcatcgtttcatctcatttcatctcatctcacctcagcatttcatcatttcatctcatcatttcttatttcatctcattttatctcatttcatctcatatctcaattcaatttcctttcattatttcatctcattcatctcatttcattacatctcatcatttcctctcatcattacatctcatctcatctcatcatttcatcatttcatctcatcattgcatctcatcatttcatctcatttcatctcatcattcatctcatcatttcatctcatctcatcatttccatttcattatttcatcatttaatttcatcatctcatttaatttcacctcatttcatttcattttttcatttcattatgtcatttcatttcatctcattacatttcatctaatttcatttcatctcatttcatctcatcatttcatttcatctcatcatttcatctcatcttttcatctcatcatttcatctcatcatctcatcaactattttcatcttatctcatcatttcatcatttcatctcatcatttcatctcatctcgtatcttctcatctcatttcaatttcatttcattatttcatttcattattgcatgtcatctcatctcatcatttcatctcatcacatctcatcattttatcattttatttcatcatctcatcttatcatttcatctcatctcatttcaattttatttatttatttcaatttcatttcattatttcatttcatttcatctcatcagttcatctcatcatttcatctcatcatctcatctcatcatttcatctcatcattcatctcatcatttcatattttatctcatctcatcatttcatctcatttcatctcatctcatttcatcattacatctcatttcatctcattttatgtcatcatttcatgtcatcatttcatcacatctcatctcatcatttcatcatttcatctcatttcaactcattgcatctcatctcatcatttccatttcattattccatttcatcatttcatttaattatgtcatttcatctcatcatatttcatctcatttcatctcatctcatcatttcatttcatctcatcatttcatctcattttatctcatctcatcatttcatcatttcatctcatcatttcttctcatctcatcatttccatttcattttcattatttcatcgtttcattatttcatttcatctcatttcattatttcgtttcattatgtcattacatttcatctcatttcatctcatcatttcatccatcatttcatttcatttcatcatttcatctcatgatttcatcttatctcatcatctcatttcatctcattatttcatctcatttcatctcatctcatttcatcatttcatttcatcattacatctcatcatttcaactcatcttatttcaatttcattacatttcataatttcctttcattatttcatttcatctcatttcattatttcatttcattatttcatttcatttcatctcatttttcatctcatcatttttcatctcatttcatctcatcattcatctcatttcatctcatcattttatctcattatttcatctcatctcatctcatttcaatttcattatttcatatcatttcattatttcatttcatttcatctcatcatttcatctcatttcatctcatcatttcatctatcatctcatcatttcatctcatttcatctcatctcatctcctttcaatttcttttcaactttgtcatttcgtctcatcatttcatctcatcatttctactcaccatttcatctcaaaatttcatctcatcatctcatctcatctcatcactttgtcatttcatctcatctcaagtcatcttatcatttcatctaagtgaaatgatggaatcatgaaatgaaatggataggatgccctcagtgatgttaaatttaaaaattgtttcttttcatgtatgcatttttatatttatatgtatttatatttata

SEQ ID NO: 470206 - DNA, 5057 bp, Homo sapiens
caggtaatgcaggcctgttctacctgtgtgagtgagcgcgtgggtgccgtgtgggagtgtgtgtgttgatgtgggtgtgggtgtgtgcttgtgtggctgtgtgtgcctgtttatgtgatgatgagtgtttcttgtgtggttgcatttgtgtcagtgattctggagcagccagccagccaagccagccaagccagccagccagccagaaaaaccagccaagccagccagccaggaaagccagccaagccagccaacccagccaagcttccagccagccaagccagccaagccaaccagccagccaagcctgccagccagccaagccagcaaagccagccagccagccaagccagccagcaggcccagccgccccagccagccaaccagcccaaccagccaagaaagcccagccagccagccaagacaggaaaaccagccagcaaagccagccaagccagtcagccaagccagccaagccactcagccaggcaggtcagccaagccagccaagccagcccagccagccagccagcaaagcgagccagccagccagccaagccagccaagccaatcaagcaagccaagccagccagccagccaggccagccaagccacctagccagccaagccagccaagccacccagccagccaagccagccaagccacacagccagccaagacacccagccagccaagcctgccagccacccagtcagccaagccagccatgccagccagccagccaagacagccagccagccaagccaaccaagccacccagccagccaagccagccagccagccagccagccagtcaggcagccaagccagtggaccgcccagccagccaagccagccaagccacccagccagcaaagccagccaagccactcagccagccaagctggccaagccacccaaacagtcaagccagcgaagccaaccatgccagtcagccagccaagccagccagccagccaagccagccaagcaacccagccaagccaaccagccagccaagcaagccaagccagccagccatccaagccaccaagccacccaagccagccaagccagccaagccacccagccagcaaagccagacagccacccagccagccaagccagtcaagccacccagccagccaagccagccaaggcagccagccagccaagccagccaagccacccagacagccaagccagccaagccacctagccagccaagccagcgaagccacccagccagccaagccagccaagccacccagccagccaagccagccagccacccagccagccaagcctgccaagccacgcagccagccaagccacccagccagccaagccagccagccacccagccagccaagccagccaaaccacccagacagccaagcccgccagccacccagtcagccaagccagccatgccagccagccacacaagacagccagccagccaagccagccaagccagccagccgtgtaagccagcccagccggccagccaatccagccaagccacccagccacccaagccagccaagccagccaagccacctagccagccaagccagcgaagccacccagccagccaagccagccaagccacccagacagccaagccagccaagccacctagccagccaagccagcgaagccacccagccagccaagccagccaagccacccagccagccaagccagccagccacccagccagccaagcctgccaagccacgcagccagccaagccacccagccagccaagccagccagccacccagccagccaagccagccaaaccacccagacagccaagcccgccagccacccagtcagccaagccagccatgccagccagccacacaagacagccagccagccaagccagccaagccagccagccgtgtaaaccagcccagccggccagccaatccagccaagccacccagccacccaagccagccaagccagccaagccacccagccagccaagccagccaggcacccagtcagccaagccagccatgccagctagaaagccaagacagccagccagccaaggcagccaacccactcagccaaccaagccagccagccaagctaggcaaaccagccagccagccaagccacccagccagccaagccagccaagccggcccagccagccagccagcaaagccagccaagccagccagccagccaagccagccaaggcagccaagccagcccagccagccagccagccaagccgggcaagccagccagcgagcccagccagcccagccagcccagccgggcaagccagccagcgagcccagccagcccagccagtcagccagccaaaccagaccaccagccaagccagccagccacccagcaaagccagccacccagccaagccagccaagagagcaaagccagccaagccgccagacagcccagccagccagccagcacaggcagctaagccagacaagccagccaaccagccagacagcccagccagccagccagcacaggcagccaagcaagccatgccagccagccagccaagccggccaagacagccagccagccaacccagccaagccagccaagcctgccagccagccaagccagccaagccacccaagccagccagccaagccgaccaagccagccaagccagtaagccagccaagccagccaagccagccagccagccaagccagccaagccacccagccaggcaagccagccaagccacccagccggccaagccacccaaacagtcaagccagcgaagccaaccatgccagtcagccagccaagccagccagccagcccagccggccaagccagccagccaagccacccagccacccaagccagccaagccagccaagccacccagccagccaagccagccaggcacccagtcagccaagccagccatgccagctagaaagccaagacagccagccagccaaggcagccaacccacccagccagccaagccagccagccaagctaggcaaaccagccagccagccaagccacccagccagccaagccagccaagccagcccagccagccagccagcaaagccgggcaagccagccagcgagcccagccagcccagccagccaagccgggcaagccagccagcgagcccagccagcccagccagtcagccagccaaaccagaccaccagccaagccagccagccacccagcaaagccagcctcccagccaagccagccaagagagcaaagccagccaagccggtcagtcaagccagccaagccagccaagccagccaaccagccagacagcccagccagccagccagcacaggcagctaagccagacaagccagccaaccagccagacagcccagccagccagccagcacaggcagccaagcaagccaagccggccaagacagccagccagccaacccagccaagccagccaagcctgccagccagccaagccagccaagccacccaagccagccagccaagccgaccaagccagccaagccagtaagccagaaaagccaggcaagcctgccagccggccaagccagccaagccagccaagccagccaagccagccagccaagccagacaagccagccagccagccaagccagccaagccagccagccaagccagcgaagccaaccatgccagtcagccagccaagccagccagccagccaagccagccaagccagccagccaagccaaccagccagccaagcaagccaagccagccagccatccaagccagccaagccagccaagccagccagccagccaagccagccaagccagccagccacccagccagcaaagccagccaagccagccagccccccaagccagccaagccagccagccaccctagccagcaaagccacccaagccagccaagccagccaagccacccagccacccagcctagccagccaagccagccaagccagccaagccagccagccccctaagccacccagccagccaccctagccagccaagccacccaagccagccaagccagccaagccacccagccagccaccctagccagccaagccacccaagccacccaagccagccaagccacccagccacccagcctagccagccaagccacccaagccagccaagccagccaagccacccagccacccagcctagccagccaagccagccaagccagccagccccccaagccagccaagccagccagccaccctagccagccaagccacccaagccagccaagccagccaagccaacctgccagccaagccagacagccacccagcctagccagccaagccacccaagccagccaagccagccaggcacccagtcagccagccaagccagccatgccagctagaaagccaagacagccagccagccaagccagtcaagccacccagccagccaagccagccagccacccagccagccaagccagccagccaccgaggcagccaagccagccagccaaccaagccggccaagccacccagccatccaagccggccaagccacccaaacagtcaagccagcgaagccagccaagccagtcagccagcgaagccaaccaagccagccagccagccaagccacccagacagccaagcaagccaagccagccagccatccaagccagccaagccagccaagccagccagcccaccaacccagccaagccacccatccagccaagccagctagccagccaagccacccaaaccagccaagccagccagccatccaagccagccaagccagccagccagcctagccagccaagacacccaagccagccaagccagccaagacacccagctggccaagccagccagccacccagccagccaagccagccaagccagccaagccaggcaagctagccaagccagccaagccagccagccagccaagccagcctagccacccatcctgccaagccagccaagccacccagccagccaagccacccaagccacccagccagccaagccagtcaagccacccagcc

SEQ ID NO: 470207 - DNA, 486 bp, Homo sapiens
atgcctggtccacttattgtttttgatggtagccaacctaatgggtatgagtctcaagcctgggtctgggttccttcggggaggcagttctctccaacctctgagcttgcggtgggtggggtggggagcggtcactgtagtccccagtggggcgcctgaatttgggactttgaagcgacagtgccctaattacctccaaggaccaataaggatgctggaagctgattcaatcagacgtataataacccctccttctggagcggggccaggacacatagaagacgtcctctatgaggaacaggccctcattgacacccaatctactgacgccttgttcgtggatttctcggcctctagaactatgagcaacatatttctgttgtttatatattactgagtctgaggctggtgttttgttttgtttttttttttttggagatggactctcgctctactgcccaggctggatggagtgcttcttttttt

SEQ ID NO: 470208 - DNA, 3129 bp, Homo sapiens
tgctcctggtccggagactacatgtttgagagccacccttacatactaactgtaaattgtagaactctagaaaaaagcgtagtttggactgggagaagaagcacacaggtgatggagcaaatcatgaaaaagtcaacccttgatcccagtcacacagcgacgtagaggtgactggaggtatatacttgtcctcacctggatcatgctgatgtggccccaaccccacctccctacccatccccacctccctacccatccccacctccctacccatccccacctccctacccatccccacctccctacccatcctatgatgtccaaagaaaccagacagagcaaattggccgaggccaaggaacagttgacagaccatcatccccagaccaaccctagtgttggtacagcagcaagcgacaccaaaaagaagaaaataaataatggcactaaccctgagacaaccacttctggtggttgccactcgcctgaggatgaacagaaggcaagccaccaacatcaggaagccctaaggagggagctagaggcccaggttcaaaccatacgaatccttacatgtcagaaaactgagcttcagatggcactttactacagccagcatgctgtcaagcagttggaaggagaggccagggatctgatcagccgcctgcatgattcatggaagtttgcaggagagttagagcaggctctctctgctgtcgctacacagaagaagaaggcggataggctactgctgtgcctgctctatcctgacttaacctttctctatttgcagtacattgaggagttaacaaaggagagggacgccctgagtctggaactgtacaggaacaccataactgatgaggagctgaaggagaaaaatgccaaactacaagaaaaacttcaacttgtagaatctgaaaagtctgagatccagctcaacgtaaaggagctaaaaaggaaactggagagggccaagctcctgctgccacagcagcagctgcaggcggaggctgaccacctgggtaaggagctgcagagtgtgtcagcaaagctccaagcccaggtggaagagaacgagttgtggaaccgcctgaaccagcaacaggaggagaagatgtggaggcaggaggagaagatacaggagcgggaggagaagatacaggagcaggaggagaagatacgggagcaggaggagaagatgcggaggcaggaggagatgatgtgggagaaggaggagaagatgcggaggcaggaggagatgatgtgggagaaggaggagaagatacgggagctggaagagaagatgcacgagcaggagaagatacgggagcaggaagagaagaggcaggaggaggagaagatacgcgagcaggagaagaggcaggagcaggaggcgaagatgtggaggcaggaggagaagatacgggagcaggaagagaagatacgggagcaggagaaaaagatgtggaggcaggaggagaagattcacgagcaggagaagatacgggaggaggagaagaggcaggagcaggaggagatgtggaggcaggaggagaagataagggagcaggaggagatatggaggcaaaaggagaagatgcacgagcaggaggagaagatacggaagcaggaggagaaggtgtggaggcaggaggagaagatgcacgaccaggaggagaagatacgggagcaggaggagaaggtgtggaggcaggaggagaagatacgggagcaggaggagaagatgtggaggcaggaggagaagatacgggagcaggaggagatgtggagggaggaagagaagatgcatgagcaggagaagatatgggaggaggagaagaggcaggagcaggaggataagatgtggaggcaggaggagaagatacgggagcaggaggagaaggtgtggaggcaggaggagaagatacgggagcaggaggaaaagaggcaggagcaggaggagaagatgtggaagcaggaggagaagataagggagcaggaggagaagacacgggagcaggagaagatacgggagcaggaggagaagatacgagagcaggaggagatgatgcaggaacaggaagagaagatgggggagcaggaagagaagatgcaagaacaggagaagatgcggaggcaggaggagaagataagggagcaggaggagaagatacgggagcagaaggagaagatacgggagcaggaggagaagatatgggagcaggaggagaagatacgagagcaggaggagatgatgcaggaacaggaagagaagatgggggagcaggaggagaagatgtgggagcaggaagaggagatgcaagaacaggaggagaagatgcggaggcaggaggagaagataagggagcaggagaagaagatacgggagcaggaggagaagatacgagagcaggaggagatgatgcaggaacaggaagagaagatgggggagcaggaggggaagatgtgtgagcaggaagcgaagatgcaagaacaggaggagaagatgcggaggcaggaggagaagataagggagcaggagaagaagatacgggagcaggaggagaagatacgagagcaggaggagatgatgcaggaacaggaagagaagatgtgggagcaggaggagaagatgtgtgagcaggaagagaagatgcaagaacaggaggagaagatgcggaggcaggaggagaagatgcgggagcaggaagtgaggctgcggcagcaggaggagaagatgcaggaacactaggtgaggctgcaggagctggaggagaggctggggaagctggggcagaaggccgagctcttggggggagcaggcggaggtgtgtgcaaaccctggagatcatacagaacgacctcaccacaacttagcagatggtggttggctccctctgcttttccaccagtctgtggcctacagtttaaatggtgggaagaagggtgtgagatttgaggctggggagggaggcatgggcctctaggcaagggaggcagtcatttaggcctggaggaaggggccagggccaggggcctgggtaggcgacagagccccgcagtgccctcactaccctgtttatgggcccagaatctggaagccagccactacctaccctgacgcct

SEQ ID NO: 470209 - DNA, 2186 bp, Homo sapiens
aagaagcttagtggggtagacagacaagtgacaagtttgtgctttcaataaagtatgatggcagctccacaatttgccaggggtctgcaacccgtgtccacgtgcgaccgcagtcgcacccgagcccgggatctgtgcacttacgtgaggatgcactcgggccagccagtggctttgcccacctccctcagacaccgctccggggtccgtcagcgccaggcccatgggccatggctgtctgcaactcccgacacaagctgcaaggcaagagagccgctgggaaaccgcaccgcaaggatgctggcattggaacaggaattaaaagaaatgaaaaaatgtggtaaagcagtcaaagggatatgcaaatttacacagaaatccaaccgatataaatccttgaaagatactacatacagatatttcatcagttctcacatgccaaacccagcaaagccaaactttggagcctcccctgcgagcagacctgccacaggaggagaggcagcacaaacctccctttgcagtgaaaatgccacattgtgtgtgcttcttaccccatcacctctttggaagtggccccactcagtgctagctgagaatcgcttccctcataccactctcagtagttcaccccaagacacactggacaactctgtacctggtaagtcattgtgaatccaattaataatggcattcagaaagttaggaatctttgaattattagattcatagtgatattcaaaagaaagaaaacgacatcatttctgttccacgcatgttgcccacattcactgcgtaaaaggcaaagggaactgtgagtactcacaaagaacctgatattgacggcacatacatttcttcattaggaagaataaatttagactgtaacaatttaaaaaaccagaaaatacaactgtacattttagctcttattaaaatccaagaggtttaacttatttgctccttgtttaggtaattagtgtctaaaacatttcaaagataacatatatagtggctacgatttctagtactttttaaaaattcaagcccagtctcttctaattaaatgtataaatgatttatctctgtctttcttaaaaagaaccaagagccccaattaaaaagtaaaacttaaatttcctcttaaaaaattgttacgtcaaaattatcgaataaaccatagttcagaaaataatttctgaattaagaaaatatgaataataaaaccaacagtttatgtgctgaatttcaaatttttattttttattatttttaaaattttgttttaagttctagggtacatgtgcaggagtgttacgtagggaaacgtgtgccatggtggtttggtccacctatcaactcatcacctcagtgttaagcccagcacgcattagctatttttcctgatgctcctcccccacccgccctgacaggccccagtatgtgttgtttcccttcctgtgtccatgtgttctcactgaacctcacatttttaaatacagcatatgccaggtgtcatttcagtacccatgattatacatagtataagtatatgtgtaaatatatgtatatgtgtacatatatgtatgtaatatgtgtatgtaaatattatgtaaatatgtatgtatgtaagtatatatgtaaatatgtatgtgaatgtatgtaaatatatacacatgtaaatatgtatggaaaaatatgtatgtaaatatatgtatgtaaatatatgtatatatatataaatgtaaaatatgtaaatatttgtaaatgtaaaatatgtaaatgtaaaataaatgtagaatgtcaaatgtaaatgtaaaatgtaaaataaatgtaaaatgtaaaataaatgtaaaatgtaaaataaatgtaaaatgtaaatgtaaaatatgtaaatatatgtatatgtgtaaatatatgtgtgtaaatatatatgtatatgtgtaatatatatgtatatgtgtaaatatatatgtatatataacacagcatacagcatatgccaggtgtcatttcagtacccataattatacatagtataattatacatagtataattagactactatgttagctaaaaaatgttgattagatacaaatgtataaatttatcttctctaaaagtggaaattctctagaggctatttccagcttctgtgtggattgtagagcaggctgctacctgt

SEQ ID NO: 470210 - DNA, 1657 bp, Homo sapiens
aagaagcttagtggggtagacagacaagtgacaagtttgtgctttcaataaagtatgatggcagctccacaatttgccaggggtctgcaacccgtgtccacgtgcgaccgcagtcgcacccgagcccgggatctgtgcacttacgtgaggatgcactcgggccagccagtggctttgcccacctccctcagacaccgctccagggtccgtcagcgccaggcccatgggccatggctgtctgcaactcccgacacaagctgcaaggcaagagagccgctgggaaaccgcaccgcaaggatgctggcattggaacaggaattaaaagaaatgaaaaaatggatatgcaaatttacacagaaatccaaccgatataaatccttgaaagatactacatacagatatttcatcagttctcacatgccaaacccagcaaagccaaactttggagcctcccctgcgagcagacctgccacaggaggagaggcagcacaaacctccctttgcagtgaaaatgccacattgtgaagaataaatttagactgtaacaatttaaaaaaccagaaaatacaactgtacattttagttcttattaaaatccaagaggtttaacttatttgctccttgtttaggtaattagtgtctaaaacatttcaaagataacatatatagtggctacgatttctagtactttttaaaaattcaagcccagtctcttctaattaaatgtataaatgatttatctctgtctttcttaaaaagaaccaagagccccaattaaaaagtaaaacttaaatttcctcttaaaaaattgttacgtcaaaattatctaataaaccatagttcagaaaataatttctgaattaggaaaatatgaataataaaaccaacagtttatgtgctgaatttcacatttttattttttattatttttaaaattttgttttaagttctagggtacatgtgcaggagtgttacgtagggaaacgtgtgccatggtggtttggtccacctatcaactcatcacctcagtgttaagcccagcacgcattagctatttttcctgatgctcctcccccacccgccctgacaggccccagtatgtgttgtttcccttcctgtgtccatgtgttctcactgaacctcacatttttaaatacagcatatgccaggtgtcatttcagtacccataattatacatagtatatgtatatgtgtaaatatatgtatatgtgtacatatatgtatgtaatatgtgtatgtaaatattatgtaaatatgtatgtaaatatatatgtaaatatgtatgtgaatgtatgtaaatatatacacatgtaaatatgtatgtaaaaatatgtacgtaaatatatgtatgtaaatatatgtatatataaatgtaaaatatgtaaatatttgtaaatgtaaaatatgtaaatgtaaaataaatgtagaatgtcaaatgtaaatgtaaaatgtaaaataaatgtaaaatgtaaaataaatgtaaaatgtaaatgtaaaatatgtaaatatatgtatatgtgtaaatatatatgtgtaaatatatatgtatatgtgtaaatatatatgtgtaaatatatatgtatatgtgtaatatatatgtatatgtgtaaatatatatgtatatataacacagcat

SEQ ID NO: 470211 - DNA, 2459 bp, Homo sapiens
gcctcctctggctcagtcgcacagctacctggtaggtgactggaggtgttgatcagtgcttggtgggattttgctgatgtggccccaagcccgcctccctccccaccctgcgatggcagaagaaactcgacaaagtaaattggcagcagccaagagaaagttaaaagaatattggcagagaaacagccctggtgttccagcaggagccaagaggaacaggaaaacaaatggcagcatccatgagacagccacttctggtggttgccactcacctggagattcagcaacaggtatccacggggagagccctacatcatctgctaccctgaaggatctggagagcccgtgccaagaactagcagtagtcccagactcgaggtccgtaaaagtcagtcaactgaagaacaccatcaaatctttgaaacaacagaataaacaagtggaacatcagctggaagaagtaacatgatttctttgtttgctcgcgacatgactgctcggtttgggggacactcagatgtagaggccccgagtctcgtctcacccactcccagcctggggaagaaggctcaccccccagagtccaccccatcccccacagggtccctgataacccggtcccatgggtgggcctgtcccggggcaggggcagtggtggcattctggggacatgtctcttgcagtaccatctctgcctctgcctggttagatctctgtcttcctcttcctacaggaaaagaaagcaaacaacgagaaacagaaagccgaaagggagctagagcacttgcttggcttttctcccaaaggttcaaatccagagattgaacatacagaaagggaaactaaatacggacctgtaccacacgaaacgttctctcagatactttgaagaagagtccaaggatctggccgtccgtctgcaacattcattgcagcgtaaaggagagttagagcgggctctctctgctgtcaccgccacacagaagaagaaggcggagaggcagttctccagccgcagtaaagcacgtatggagtggaagttagagcagtccatgcgggagcaggcactgctgaaagcgcagctgacacagggccctttccccctgtgctttgggcaggtttgctcgttgaagaaggagaagaagcatgataaatatcgggtagagaagctggagaggagcttgtccaaactcaaacaccagatggctgaacctctgcccccggagcccccagcagtgccctctgaggtggagctgcagcacctgaggaaggaactagagagagtggcaggagagctccaggcccaggtggagtacaatcagcgcataagtctcctgaatgaggggcaaaaggagaggcttcgggagcaggaggagaggcttcaggagcagcaggagaggcttccagagcaggaggagaggcttcagcagctggccgagccacagaacagcttcaaggagctgaacaatgagaacaagagcgtactacagttggagcagcaagtaaaggagctgcaggagaagctaggcaaggtgaaggagacggtaacctccaccccatccaagaaggtctgggaggtggagctgaagagccaagaggctcagagtctgcagcagcagccagaccattacctgggtcacctgcagcagtacgtggccacctatcagcagcaggagcgtctggaagctgcgagccagcagaaacagcagctaacggcccagttgagcctcatggctctccctggggaaggagatggaggaggacatctggacagtgagggggaggaggcacctcggcccattcctagcatcccacaggacctggagagcagggaggccatggtggcatttttcaagtccgctggagctagtgcccaggagaagcaggcacagttacaagagcaggtgaaagagcagagggtgtgctgccagcgcctggctcacccggtggcctcggcccagaaggagccagaggcagccagaggccctggagccccagggcctgggggcgagtctgtgagtggggagacccaccgggccctgcaggaaagcggctttatggaccacctggaggagaaggcagacctgagtgagctggtggagaaagaagaacttggattcttccagtactacagagagagatgccatcagaaagtttatcaccctataacaaagccagggggcagtgccaaagatgcagcaccgggaggaggacaccatcaggctggccctggacagggaggagatgaaggtagagtgtgcaacatctctgcgggggtgggggtggctgtgacggtgagcgctggcagcagcgtgacagctgagcacccctccctccaggtgaagctgctggagctgcaggagatggtgttgcagctggtggcgactacaagggacacagcaaattcttggtgactgcccagaaccctgctcatgagcccagtccaggagccccagccc

SEQ ID NO: 470212 - DNA, 931 bp, Homo sapiens
taaataaataaaatcaagatgaaaacggggacattttcattgatactgtagaaattctaaggatcattagaggctaggcaattatatcatttattatatataatatatatattatttttctcaacttttttttacatctgaaactttctattgaacacatggacatgtcccttgataactggggctgcttccccattattctctcagcagcccttctgattttcactccatcttcattcttagagattctggattttattttttttttttttgggaagttcaagtatgtctttgcaaggattatcgagcatgtctacctactcaatcatattatcagaaacagaaaaagtgtccagattcttgtcttgtcctgttcagattttttaaattccaagaacagtcaccttctaccagacactctgatgttggaagacaaagcatatttgaaatttaaggactcagctctggtcaaggtggcaaagggtctgtttgtctttcctcgttagacagaggtcttgtcctgctaccctaattgtaaaggggtgactgggaaggggagatagggacagtgtggtggtggagaccccagccccacttctccaggctttgctgacaggggcctgcttttaattttaatttttatttttatcccatgcctttttttttaaatcccataacttctttttcataactttttttggtaacttttcataaaactttcttctactttttggtcacaagatttttttgccacaacttttttacattttttatcccataactttttcaccccataacttttgttaatcccataacttttttattttgtgttcttttaataaacccttgcatagttatattacaattttgtaaaaatgaaacattatctcatgccaagcatgctcagcatttgcacagtatcaataccttt

SEQ ID NO: 470213 - DNA, 387 bp, Homo sapiens
gcggcagattcatgctgctgtcatttgtcgttaaaacgatgggctccctgtcttcagcgtatgtgtttacttgcaggcctgagacctgggaggaagctggagaaaagatgccctctgaatctttgtgtttggctgcccaggctcgcctcgactccaaatggttgaaaacagatatacagctgatatttttaccaaaagtcatatgttttggttccaagtatgtttatggcagttatcctgttagtgatgtgaacagaaaaaataacagtgctgagggaaagctgttccttctacaaaaactgaaggatgctggcttggtttctgtcgctacagaacaagttaccaaacacaaatttggcagcttgtaacaacaagcatttacactct

SEQ ID NO: 470214 - DNA, 815 bp, Homo sapiens
tgccctgagagcatcacccaacaaccacatccctcctcagaagaagcccccagagcacagctcctcaccatggactggacctggaggatcctctttttggtggcagcagccacagtgaaggtctcctgcaaggcttctggatacaccttcaccgactactttatgaactggatgcgccaggcccctggacaaaggcttgagtggatgggatggatcaacgctggcaatggtaacacaaaatattcacagaagctccagggcagagtcaccattaccagggacacatcttcgagcacagcctacatgcagctgagcagcctgagatctgaggacacggccgtgtattactataaatgcaccgttactcatgtggattctttcctcagacaaacacacatgtccccacgtggactctttcctcagactaccacatatgttctgacatttactctttcctcagaaaacagacatttcctcatgtggactcttgtctcagacaagcaaacatgtctccatgtgaactcaattcagataagtacacatatgtccacattgactgtttccttacacaaacacatatatccaatgtcgaattgttctgtggcaaaatgatctcaagataatgataattataaaccccctccctgacaaggcgtagatatgtatttttttcattgtaacctaactttgccttattgtcaagaacagtagtttgcagctctaaatgtaccaattagagacaggtgtccattttctctggaaacatatttttatgttcttactggacatatttgttgataatgtttgctattatg

SEQ ID NO: 470215 - DNA, 645 bp, Homo sapiens
cggcttcattcttgaagtcaaccattagtatgaatacataccacagacctaatcagccatctccacagaagcaaggtacttcaagacaagagaaaaatgattcttccctctcacataattcagaggtcatcagggctgccactcccaccacaggcccagagtgtaagggctccaaggaaatcactatttcagagaggccaccagcaccttcaggaccttggagagctatgggcccaggcagagagccactgtggtggcagggctgcccagagcccttaggacaaaccctccaagagccttctgagctcaactcctacccagcaaggctgcagaggcaggatcaccacctcagctcaaacacagtgaagatcaagctcagccattcattttctccttgtactcatgggagccagggagataaaaggcccttgtgaaagctgattactctggcagaggccacgagatctatggggccaagctttcagcttttcactcaagagctctcacgctggtatctggtgctttttctctgtcctggatgctcacagaatccaaagccttcctggaacccgacatccaactatctgtaaggcccaggagccatttgtctctggaaaggcaggaatgatgaggaggctggcaagc

SEQ ID NO: 470216 - DNA, 688 bp, Homo sapiens
ccccagcaccattcactagtgcagttggaccaaaccaattctaaaaaatatgacagcaggtggaaatggctccaccctcgagggttctctcgctcagatggatggtttctagtgtgcttccaaaccccacctcggctgagtgttgggcagcacttctacatgatcctatgactcttgatatggacgcagtcctgtcagactttgttcggtccacgggggcagaacctggtctggccagagacctgctggaagaagataatcaccccaaatgggttcagaccacaaattccaagttcctgcaagacttgtgtggattgtggttgctgagctgcattgactccacactggggagactggaggaagggaagtgtcttgctcacctccagctctgtggtacttccaactgtggtctcctttctgcatcggcacctccaactgtgatccaccttcctgagcccggtcgctgctgcctgcacgctgtccaggggtcccgactgcacccagtgggacagagggtggcagtggtgagtgctcactcacctcacccactgctgggtcctgcccttggctttcacaggtaagaggactgtggttccattgtgtatgatggattatttaaggtgtcaaagttatttgggtgaagatttctctaaagccagtgtttcaaagaatgaaatatttttgttgt

SEQ ID NO: 470217 - DNA, 775 bp, Homo sapiens
cgggcggcgtcggagcccaccgaggggagagggggtcatcaccccccaacccagccacagatcccctctgatgacaagaccgctgccagagtccataccactcctgaggcacaccggactgcctctgggctccacccaccaaagtcttgtcagtcagccctgccccttcagcaagcagcccagtccctgccctctccaatcaccccatggtgactttgggtgggtgactcttggggattcccactccattactgggccctcacctcctaccgccccaaactcaacctccctgggctctttgggctcacatctccaaggaccttggtcccccagccccaggccccgccctcgccagtcatccctgggtgactttgggctggtgactcctgaggctccctgctgcagactctgccctcccctcctgctgcctcaaggtcgacctccctgggctctttgcgctggcgtctccaaggagctgggtcccaaccctgtgtttccctcccccatcatggagcagcaactcagacatcgtgctgatgtccctccccatgaccagaagggtggaatgtagtgatccatgatatcaatccctctcagtcactaaatgattgtgacaacaccttgtacagttgttggtgtcgttaaatcagatggtgtataagagtattttgtaaaaactgtaaaggaggatgtggctgtaggggctgacagttcttatgagtattactgctcttctttcccacagttaaaagaatattggcagaaaaacagccct

SEQ ID NO: 470218 - DNA, 1862 bp, Homo sapiens
ggaagacagctcagctagtcggggctctttacatgatgggatcattgaggctttatttgtgcctttggttgttgctgcacttcctcactgacctttatgaccggacagcagctcccagccacgaactgtgggctgatcctgtggccggctccctgtcctgtggcccagagagtgtcttcggctggggatcctgctgtcggggccctgctgtgcctgctgccagggcctcaccagcctgctctgagcagctgggccacactgagcacctgccctgccctgcttggcagaaacgtgcacttagcaggctgaggcctaaactcagctatgggcttaggatccagaggaggagccctggagagcagcacgcagaaccttttggctttgagaaggagggggatgaggggcagggggcaggggcgactgcctcacatgaaccgtacctccccagcacctcccatgatccccatctccccaccctggactaagcactgggagggggctgccgggaggaaaggccccactgtgggagataggggagtagggagtatcaaaggggcacagagagaaggcatttcaggaagcaccttcaccaggactggccacaaataatccccaggcagagtccattccagtggttctcacctgcagacctgtccctgcctcctgcctttccctgtgcatgctctgagccagaaaggacaactaagagacggtgacagaggggcttcaggacgccgcctctgtggggagctggtgggctgtggcatcccttagggggtaaccccactgcccagactgctgggctccagggagtggagggggcagagggcacccgcccccacctctgcactcggtggtcctagggcccccggtctgcagggtccattggggcagcagctagaaaaatgtctggctacaagggacaggggcccaccccagaggcttagggcagcagctcgttttctgccacagagagaggtctggggcaggcagctgtgcacgttcagctctgctattcgagggccttccggggggcctccctcctggtgtggtgctctagacactgggccgccagcaaggggtgaggaaggcaaaggccttgcctgctgcggcattgctgatatcagggaagcaatagattttcccagccgaccttgtttagggtctcaggccacccaagctgtgagctaggctaggagagtgaacggggctgtcgaaatggactttgaccgcagccgccgaacagcactcaggagtgggcgggatattaggatattggagggttctccacatcgtgggacactgctatattgccgaagggatctcagggtacactgggacctgctccgagcagctccctcaggcgtcagagcagaactgggcagtgagctctgcagggcacacaaacccatgtttctacaccatgtaagaagtcatattgccttggggccaccaggctgtgaggaatcccaagctaaccacatagaaaggtgatgtggaggaccactaaggcactaagcagtggttctgcctctgccacgtggaggccttcagctcccaacaggggtggaggacctcagctgcccatctctgcctccccagccccagcccagtgtctggcagtgagtgatgaatgcaggcatgctgatccctgtttgcaaagcttggtcaggaggcccaagtggaatctgggccagcctggtacaaaaggacatgatggacacctcaggggatcctaggccaccggaaaggctctgcgtggcccaaggtttcagtcccagagccagcctttttgtctttggcttcgaaaacctcaatcgtaaaatggagctaataaaaacaccaagcccagattggaggac

SEQ ID NO: 470219 - DNA, 538 bp, Homo sapiens
gagcaggggacaggtgacagacctcatttaacttggcacccaaggccatgacagcatgtctgggccaggacagagcagcggcacagcggtgtcagtgccaacctggtcaccataggcgctacagaagccgggcctacgggcaggatgtggcttgtgttccctgcaagttttcccaaatcagtcatatatgcaatctcggaaaatcacagaaatctttgctgttctgggagctcaggaaatgccccttcctgtggggcccctggctggagccctgcctgaagaaaggagcagtgcttttgcctctggcccacgagggtgctcagaaagggcctcacatgctcaaggctgggcctgagaggcagttcctggccccacggaagctccggatggcagcctggtcaaccgcatggcatctgggggatacgactcatgtccaaatccctgttccactgcctgctggcctcatcctctgagaggatcgggtcacttctgtaaatggaagtttccagatttataagatgggagtaaaatcacacct

SEQ ID NO: 470220 - DNA, 907 bp, Homo sapiens
gggtatttattctgcttgatattttctgagcttcacgggtcccacctacgagtgggaacctgcagtatttttgtctttctgttctgacttagttcacgtaatgccctccagttccatctgcattgctgcacattatgcatctggaacagggaaatatccacaagatggattcaaggacccactggaccaactgcccatctacctagtgactaaaaacgctgctagttttgagtggggcccagagcaggagaaggctatgcaacaggcgcaggctgctgcgcaagctgctctgccacttggaccacatggtctagtgaatccgatggtacttgaggtgtcagtggcagatgttgaggctgtctggagcctttggaaggccagtaaagcgagcagctgtggcaccatgcccctttctgggacagccattaaggacagtagtgaagggaaatcttctcaatgggaagaaatggccagatgtgcaattgtataccagatcctgggctgtagcctgtgggttggctggatggtcagggacttagaataagattgaactattggtgacgaagttttatcaaggacttattaattttattcattttctcaaagtacaagccaattgtgtttacatgtttagtttctatttggttaatttgttcttttacttacaatttcccttttttccatcgtatgtgaaaaaaatggaaagatataccatgctcatagattggagacaatattgcaataccatcccaatcaaaactccagcagacttctttattttgtgaaagttgatgacctgattatatactttatgtgttgtgtatgaacaaagcaagagaaatgacacactggggaaaagtatttgcctttatatagcagacaagtaatttgttttcttaatcatttc

SEQ ID NO: 470221 - DNA, 673 bp, Homo sapiens
ctctctcatccccttcagtccatcacgatgcatcatgacacagcacaacaagggctcttcaatcaactctcagttctactttggatggaacgcaagctggttggatgtgggcacccagcagccctccatcaatctccagtctcttgtgctgtacaggaagtgtggtgctggcatcttcttggtttctggtgaggcctcaggaagcttacagtcatggcacaaggcaaaggggaagctggtgtttcacatggcaagggcagcagctagagagggaggggagatgctacactcttttggatcctgcaagaattcactcactattgtgaagacagcatcaagccatgagggttttgcccgcaggacccaaacacctctcaccaggcaccacctccaacactggggattacatttcaacatgagatctagaggggacatacattcaaaccacatcaatgggctttaggaaatgtgttgttcttttttgttaatgtaaacaaaactgtaataaatattttaacatatatcttaaatgtatatattactcactgtattctgtaggctaatttataaaattattgtgttaaataggatgcaaattcaaattttcatgtatattctcaattcctctcctaacaaccgtgcatgtgagtgcaccttttcttaggcccctcag

SEQ ID NO: 470222 - DNA, 690 bp, Homo sapiens
acgcagtatattgcccttgccatgaagtgtcttaaatgtattactgttaatgtacacatgtttaaacaaagggtcagcataggctttcataactgcggtaagagcctagaagaaggattagctgtttttggagagtggttaatagaagaggtgacagctgaactggattcacctcaaaggatagcagtcattctgccaggagaaagggacgccaggggtccctggagagcagacaggcgtgcccttagcttcatctggctcttgagtccccctaccacttctagcagtccggacatcacagagcaggcacttgatgaattaattatctacaggggattagttgttggtaaagggagaattagaagaagggaaataaaacccagtagcagaatagagaaagcccatgaagcatcagtgaaaagattctcagtggcacatcccctgcactggtcatgggactgtaacaacactcttctacgagcgctgaaagtacctaagagccctgtcttcccttctagaagagcatgagcccatggggccaagggaatttattgattttttctggagtatggctatcaggatcacattcctgaaaccagaactgcttctttaccgccattgcaccccataatatcagaaacctagaaataaaccattttcagaattcccttcactgtatttttttggctc

SEQ ID NO: 470223 - DNA, 542 bp, Homo sapiens
tgtgagtttgatactcttgtttttccccactgtccagctacgtaaaactgttagaaggaatgcccaggctacaagctataagcaggcaggagggtggggcccgtggagcccagctctctcccacacgaggccctgggagttcagtcaaccatcctgggtcgcaaaagtcattacccaagaaggcgggagtaaaactcgtgcttctgccctcttgccctgtacgaggtgggttggaactgagaaggccaggaccttcaaaatgctgcattctccctgagaagttggaattgaaaaaaataaaatctaccatccagtgcaagacgatgaaaaagaagcatgactgttttaggctgtgctcagtcagggctcagagtcttccatgggaattcacaacagatgagggaaggggtgcctcctggtgctggtttgatatgtccagcagaacccaggaaattccagcaccaattgtagtggcatgcaaagtggtctgatctgtcctgtttcaaatgctttacatatattaacaaccttctgaggaaagc

SEQ ID NO: 470224 - DNA, 658 bp, Homo sapiens
gcagccattgacctgttatgttttgttttgttttgttttgttttgttttgttttgtttgagatggttttccgaagaaatggtaccggctcctctgtacctctggcagaattcggctgtgaatttgtctggtcctggacttttttgggttgcttccttgcaatgggttcgaacatgctcctttagcttggagaagtttcttattgccgaccttctgaaacctacttctgtcaactcgtcaaagtcattctccatccagttttgttccattgctggcaaggagctgcgatcctttggagaagaaggggtgctctgtaaggcccctcagctgcaggtctgttggagtttgctggaggtccactccagaccctgtttgcctgagtatcaccagcagaggctgcagaacagcaaacattgctgcctgatccttcttcttgaagctttgtcccagaggagcacccacctgtatgaggtgtctgttggcccctactgggagatgtctcccagtcaggctacacgggggtcagggacccacttgaggaggcagtctatccattctcagagcttgaacgccgtgctgggagaaccagtgctctcttcagaggtgtcagacagagatgtttaagtctgcagaagttgtctgctgccttttgttcagct

SEQ ID NO: 470225 - DNA, 721 bp, Homo sapiens
gtgtggggagctcggtgcatgttcacgccagttgtttttctctgtgcctcaatgttccagctggagcggcaaatggaaaccacccagaaccttgtggactcctacatggccattgtcaacaagaccgtgtgggacctcatggttggtgtcatgcccaagaccatcatgcacgtcatgatcaacaacaccaaggagttcatcttctcggagctgctgtccaacctgtactcacgtggggaccagaaaacgctgatggaagagtcggcagagcaggcacagtggcgcgacgagatgctgcgcatgtaccacgtgctgaaggaggcactcggcatcatcggcgacatcaacacgaccaccatcagcacgcacatgggggcccgtggacaactcctgcctgcaggtgcagagcgtccttgccggatgcaggaaccttgccacacccgcacgtgcaccctttactccttggccctcccacagctgctgtggcacacctgcaagtccatcccatcctgagagccccaggcccccctttgacctctaaacagattcctcctcttctcagagacttccctttccaagcctgcctgggcggctgttctgtgacttggcagtggctcccccagccccaaaggcagcccccttcatctgtgacttcgtctattgttgcggtgagctgacacatccaggtgtgaccgttgctgaaaacttgtgcccccctctg

SEQ ID NO: 470226 - DNA, 793 bp, Homo sapiens
actgactgtcccttctccaagatgagtcatattgagaagaacggcctgggcccatggagaacaactgccatcaaacaatcaattggcagcatccatcaaatacctgatggagggaaaaaaggaaagacagaggcacatcggggcagatatcacgaaagacagttttcaaggacacagagagggattctcaccaacagtgcttcattctgcacaaagattctatgcagcaggcagcattttctgcacctgaaacgagaacttgaagaacaatacaagaaatgtgataaaccccacaatgggtatacgaccatctttgatcaattttacaactgctactgctcacccctcaatgcccatcagtctctcacaggaatgcaccaagagaagagaatctccagcaggaggcccagaggtggaagaggcagggatgcgaagaagcagaggaggctggaaggaaccggcgagaagtggggacagcgggagtgtgtctgttcataactccacactgcacttacctctcacggctccttaggctctcttggtggtgacagattctctgagttttcttgtttttgatgacactgataaatttgaggagtaatggtcatacttgatactttaaaatttctcttttgatttcttatttgagccattgatttcaggagtatgctgtttaatttgtacatatttgtgaatttcccaaaatctcttgtgttattgatttctaatttcatacaactgtggtcagaaaagatacttgatatgatttcaacactcttaaatttgctaagaa

SEQ ID NO: 470227 - DNA, 740 bp, Homo sapiens
gcacacctctacaaccctttcagggacaatggaagatgctggtgagagcccctccaagccagtggaacccaaggaagcagagttccctatcagttccagacatcagtttttcttcccaaaagcgttgttctggattgcaggcctaggtcaggacggaagtcatattgaattaggacccaggcatatgacctcgtttaaccttaattgcctttttaaacactctagctccaaatccagtcacgttctgaattttgaggcaccaaaggggtggttagaacttcaacatctgaatttgggggggatgcaattcatcttacaacacccaagatggttcttacatccgttctcagcctcagatgtcctcagtcctggtgctgcctatgtggcgtgcctgagggcagagctcactgccagcctggtgctccacagctgaatttctgactgtccagcaaagtatcctttgtccaatttgtacccacaggtaggctttagctttcaggccaatgttagattcttctcctggctttagaacaacttggtggtctcctccagtttctagggacatctctatgcctctcaactcctgattccatttggacccatctctgtatgacctctcacaatgcgagcttgggtatctttcccttcttattgtgactcaccactaatagcagtacaaaatcctgtttcataaagtgggttcctcagaacattagttatgttggatataaatagatttc

SEQ ID NO: 470228 - DNA, 561 bp, Homo sapiens
ttcagcaggtaatggtccaggccaagcacgtgcaggcctgccctgccgcaagaggcctaggagtcagcccagccgagtgccctgaagaactgagaatcccaccaacagcactgatgatgaccatggagggctatgcctgctgtagccctgttcatggtgctgtatctaaatctgcaattgcacaaatctatgcaatgtggaaactcccctccaaacaccccctgccaggacgtttgtgctgctgtagccatagcagcaattacatacagacctctgattttagcagagaaagcaacatgcccaagtggacactgaatcagagggctcccagcagaatgacactgctgcagaaaccagagccactgtcaactcctcagtcccaaagggcgctaggctatgaagtggtggcggcaggatggagccaggctggggggcctctcccaccacgggccatcttcctacccaaagcatagcattggaatcccacgggggttgttttgaaagttgtgtcgtgacacataaatgtacgcattcggtaacaataatgaatagaaaacttct

SEQ ID NO: 470229 - DNA, 655 bp, Homo sapiens
gggcagcattggatttccacagttctacctctgcccctcccaacaccagtgtctgaaaaatgatcgttttcagttattctttcaaaccctgcaagtatgctttgatgaatagaagaagtggcatctttaatactgagataatcagaaaatttgaagtcatgtttgacaccttactctctctctgtacccccaagccaatcagtcatgaagtcacgagaagttattcaccaaattactttctttccatcatcattactgatctgctgcttcctctcctgggtcccagcgcctctggccagtactgctgccgccacccttcaccaggcctgcagggtcacccacatcatctcccctaccctgccaggttcccctgcagtgtgagcccatgccagcagtgcctgcctgttcacagcagcatagaggggttgtgtcactgtgcgtcacgtctgaggacacccctacagagcacctaccagtctgttagaaaaacccattcccttacgtgactgaagtactgggataaacagttcataaaagaaaaataaaagtgagcaacaagctttataactgtgttcaattctcactagcaattgatttcaggaaaaccacttggcagtatcaccaagatcctgaaatctaatactcagtctcccac

SEQ ID NO: 470230 - DNA, 717 bp, Homo sapiens
actgactgtcccttctccaagatgagtcatattgagaagaacggcctgggcccatggagaacaactgccatcaaacaatcaattggcagcatccatcaaatacctgatggagggaaaaaaggaaagacagaggcacatcggggcagatatcacgaaagacagttttcaaggacacagagagggattctcaccaacagtgcttcattctgcacaaagattctatgcagcaggcagcattttctgcacctgaaacgagaacttgaagaacaatacaagaaatgtgataaaccccacaatgggtatatgaccatctttgatcaattttacaactgctactgctcacccctcaatgcccatcagtctctcacaggaatgcaccaagagaagagaatctccagcaggaggcccagaggtggaagaggcagggatgcgaagaagcagaggaggctggaaggaaccgggcgagaagtggggacagcgggagtttttcttgtttttgatgacactgataaatttgaggagtaacggtcatacttgatactttaaaatttctcttttgatttcttatttgagccattgatttcaggagtatgctgtttaatttgtacatatttgtgaatttcccaaaatcttttgtgttattgatttctaatttcatacaactgtggtcagaaaagatacttgatatgatttcaacactcttaaatttgctaagaa

SEQ ID NO: 470231 - DNA, 646 bp, Homo sapiens
gcacacctctacaaccctttcagggacaatggaagatgctggtgagagcccctccaagccacccgacttcagagctaaagtctggtttaacttcagagatccagaagttgtggctgttccctatcagttccagacatcagtttttcttcccaaaagcgttgttctggattgcaggcctaggtcagatctccctttgaaaaccccagtcacctttgtcttatttggaattaaactgattcatactggagcctctctgccctactgcagtagtctgagtgaaatctgtcttgctgcctctaacagtgtccagtgctctttctctgacaaggggaggtgcctcaccaaccctgagatatctgttaggaaaatgctgctctggcattatgctccaagtgaaccaattccaagatattctgcagaaactatggcccaaagacactgagaacacacagaaatatgcttgtgctttctataagttttccactttgtattaagtgaaaaaaattctataataaaacaaacagtgaatttgtgtcacatgtcaggtatatatgagtgagggccacatggcctcacagtacattacacgaatgatgacgccatgataacctgaatgatgaaaggactgagccttccagggaacatt

SEQ ID NO: 470232 - DNA, 623 bp, Homo sapiens
tgaatttcgccatgaggtccgggttcctggggcttcgctgttgttctgtttattttacccgaaccctcctataccatctgtatgagaaaatattctcaaatattgaatcatctggtgctggaagacccgtggcttacagaagagagaagggacctctgaagttctgcacagttgttgaaaagccagatgcaaaatctgtacctaagactggtgcgctgaagaaaatggctgctgacttcacaacctgtttcagccaaattgcaaagccccaaagggtcagtaaaattcttgctgggcttcatcagacattacatttcataggggcacgggaggagtgtgctcttctgtctaatgaaatgtgggccttcagcctcacttccactgtgattcttgaaaaacatttatttcctcactaacggttcagtgttcagcaacctgggaggtttgccctagtactattctacaaggtcacaggtatactttgcaaggttctgcctctctttctctcggagagcttattctctcttgtggcctaaacctcacctctgtctgcacatgacactcaaatcagtttttttctgctttatgcttgtgtctccagagctgtttcaatgactgtattc

SEQ ID NO: 470233 - DNA, 724 bp, Homo sapiens
acttcttccagaaatgaagagatgtaagagccagggagagccaggcagaagttacaggtccactagacaacctacaagattagaaattaaaacaacaggatgtctgctcttaccattgttattcaacatgatactggaggtgctagtctgtgcactgaggcaagagatagccagaaaagcgtgtatcattttcaagtgccagaataatgaaaatgctcaaaaaagcaaaaaggatggggcatatcagagagatataaaagatgtggatcaaaatgcaaatctgctacacaaaattagtagccagagggttcttggtgagtctggaagcaaagcacagcattgctttttattactcagccgtcatggcccagttgcctttggcagagcttccctgaaagtccgaggaggcctggagcatgcagggagaggacaagcagcctcggagagaaagaggggaggtacaagtgacctggatgcaacacggcctggcccaggaggaattggatactcttaagggatatttcacacaagtcatatgaatctggaagactaccccagatccatataggtatctccagggtctttctttaactatttttgctcaagtaaaagtgaatagcaaaaatggagtattttaaacctgaaaaaaaaaaaaaaaacagaaaggaagtgaggtggcttgacttcctcctaagtttataggtacatgtgcacattgtgcagg

SEQ ID NO: 470234 - DNA, 559 bp, Homo sapiens
cgcccaggttggagtgaaacataatgtcaagtggaaactatcagcagtcagaggctcttagcaaacccactttcagtgaggaacaagcctctgcgttagtggagtcagtgtttgggttgaaagtttccaaggtccggccacttcctagctatgatgaccaaaactttcatgtctacgtttcaaaaaccaaagatggcccaactgaatatgtcctcaaaataagcaacaccaaggctagcaaaaatccagacctgattgaagtgcagaatcacatcatcatgtttctgaaagccgctggatttccaacagcctctgtgtgtcacactaaaggagacaacacagcttctctcgtgtctgtaggaagacccatcgctgagcttcccgtcagcccccagctattgtatgaaattggaaaactagctgccaaattggataagacactgcagggatcactgtttttcattgcctaacgtctaataacttgaaaaccagtgtttaacgtattttgtccactgtttttgctttttctggcaggagggtaagccccgcgttacacccc

SEQ ID NO: 470235 - DNA, 2101 bp, Homo sapiens
gtgcacacaccctgcgatgagatggtgtcctgtccaggctggcaccagggaatgtggcagcacccggaagtttggagatgccaggaaccacagggcctcaaggagggagtcacagccctggctgacggaccaggtctggactccctgaagggccacagctctttgcccacaacgtggcaagcaagggctggtagtccagtcatccctgtgtcctcagctctgctctgctccggctgagcccacggcttttatgggcctcagagggaaggaagtgagcaccaattggtccgtgggcagacacaggcgggccagaaaagacacaagtctccactctggtccataggattggcagcccagtccccagccttcagaccttccttggcctgaaagtggagcctcaccagggacctgcccccctccacccaggagcccatctgcctgctgtgctgaccaaggcacccaggctgcttgtaccaatgggcacctgcaggccagcaccaagccaccctcagcccctcactccccgacccctcattgtccaaagtccagaggggaaaaaggcagcagggcgcaagcatgtgcacaccctgcctgggctcagtcccaaccccactctggggttggagcaggtgccagcagtggggagagaccaggcagtggaaagaggcacttccgagcctgcaagggcagtgcagggccttcccaggcccccaagagcacacggaagtctgggtccacaaacccaacttgggcggctgcagctgcacccaggagggctgggctgctgcctgttgcccgctcctcctggctctgtggagcatgcagccccggcggtatcccctcacagcctgagggaggggctccacgtcctctctgggccccgggtgagcatccagggcagaggttacatcaccacaagctccccgatgttccccgggtgctcaggggcggccgggccgtcaggagtgtcaggctcagcggtcaccctgaccccagggtggcagcgccgctcccacttccagccccggcggggctgtggtggcaaaacggggccccagctctgtgctccctccccagttcctgcattccttgtacaagtgcagcgccaccccgggcccagctccgcgtccaggctctctctgccagacggcgctgctcccccaccagctggtgactcgacctggccccatcacccaccagggcagcaggctgcagtggtggtgggggttggtgggggtggctgtctgcctcctccccataccctccctgcagtggctggcatgatggcagtggctgctcctgacgacccgccaccgccatcggggcaccaggcagctgtcagggccctggcatgcaaggctgtgcccaagggaagcggacatcatggagctaattaaaccaacgtggacccaagtgcctggaattcaggaggctgtcctctcccacccaccccaacagagccccgcagacgctggaggtaggttctggaccctcctcaatccctgctcttggtgaatgctgaaaacaaggacatagttcctccaaccctaggccacgcttccgtgatcccgtctccatcgcggaattcctaagcccttgacttctaaaccgtgctgttatggtgtctgtgtttttcctctttctcatccaagagctgcttcctgacatcttgttgtaccattccttccttaatgccttccataaagagggactgaacacctcctacaacccagaacagttaccaggaagtggacaaagaagcagcaaaggggcagttcctccatgtcgtctgcacatcccagaagtgatggccgcggtcattactgacaaagatgtacccatgttggtgggtctggacaggaggaagtggaaaacgtcaaagtgctccatgtgcacattaacatttgagaagagtttctctggagcacagccaagaacaaaggagcagcaagtaaaaaataacaagaagaagaagaaaaaaaaagtctggtggattggagaacagctatcacaaattctctgtacctttctcatataattccctccacactcatttagggtatactaatgcttactttggacacaattgcaacatctttgg

SEQ ID NO: 470236 - DNA, 679 bp, Homo sapiens
ggtttgtagaggcaagcccagagagagggcatagaaggagaaagagagctccaaggaaaagcgttggggagcgcctgtctttaggaagtggaaggagcaacagccatcggagaagcaagaggagaacccagaaagcagagaggaccaaaatcatgcaaggccagagcagcgaggggaccgaggaacagctgaatcaataagggaatcatgggtccctgtacagtggagagaaagaatgccccatgttcacctgctgcaggcctcacagagcaggccatcaggaccagctgggactgggtgacaggtgtccccaccttgggtggtccagcatccaggaagaaacagtcaatcctcctacacacccaggaaccagagggcagacctggggagccaggcctgggacagagcagccgcctcaccctgcgatccctccccaacccccactctctgggcctcatgggcaggggcaggcctgaggccccccttggtgagctacagttccagcattctgctgaatttctgcaaaaatcatataacccacatatacaccctcccaattcatggatagaggaaactgagacccaaaaaggggccacaacttgcccagtgtgcacagcatcataatctaggcacgttaaggctggaacctgggccttctaactctaagccaatgcctcct

SEQ ID NO: 470237 - DNA, 1642 bp, Homo sapiens
cttcaaagagcataggaatcacctggaaatcttgttaaatgcaaatttgcttcagctgggctgggtgagattgccagtccgtatgtctaacaaactcccagccacagcctatcattggcagagccaggaagccttccagatacagcagccctgcacctgcccccggtcacaccctgggcctgggcacatgctaggtcctctgtctggacaccctcaccccctggtggcctccatgtcagtacccaccagcacctcctgtgggcgagggccgcccctgcatccagccctggaggactggaatgcaaaacaagtgccccctgccttctggctgcgggacatcctctgcttccaagcccagacatacacctgctgccacaagcccctgaggctcttcagaggaccaatgggcagccacacccatgctgggccagcctgctgggcccacctgcaccctggtgattccagcctcatttctccatgggccaaatatcctaaacaaaggcctggacagggggtctttatccgagtgcccaaaaagcacatgcagaaaggctctgcatgccccctgtggcctgccagagccaggagtcatccacgggcccccgtgggcgtgctgacagtggtcgtgttgatgttcaccgatgttgctgggtgcctccgtcagcacgtggcgcttgcgcagcatctcgccgccccactgtgccttctctgccaactcctccatcagcgtgttctggtccccatgcgagtacagatgcggcttctacactgcttcaacttgaagatctgcgtccccactgccttttctcactcagatggggacactgaagtccagaggaaaagccacctgtccaaggaaccctccctggccacacggtcattgcctgttctgggccaccctcatccgtatatcccctggaccgcagctgttggctgctctgaccctgagagccgatttggacaatgggagctgaggtgctggctgaggccatgccaggcttcctggaggcgctgccaggaggagccgaggcgagtgggcgtggctctggcgagtgcccgccccttccctggcaccgcaggccgacctggcccctcccacactgctgggccttgcatggtcctgcagcgcctccttgtgagcggctcgcgcctctggatgagagttaagcatgtccaggtagtagtgggtgttttgaaacataaaaggttgcaccctcgtgtgtgcctgtgttaaaaggagcccacgcagccgacagcagcaggagcaaatggcctgctctgatggggacaggcaggaagtccttcggggcatttctgtttcatcacagcttttcctggggctggaagctgatcagtatctcctttggggacctgaaccctttccccgtacgccagatccggaaccgacgtgcctaccacttggagaaagtccggctggagctgaccgagctggaggccatccgtgaggacttcctgcatgagcgggacaccagccctgacaagggtgagctggtcagtgacgaggaggaggatacctgagtgggctccgggacgctgctcttcctgccttcacaaccaaagtgtgcccaaagggtgaaagtgcacttaaaagccagaatgtaacgtgtgtggcctctgggga

SEQ ID NO: 470238 - DNA, 581 bp, Homo sapiens
cctgggaactcttggaggaaaatgaagcatgactgagtgcaatttgtctgataaacaaaatctgtcaggacgtgggaccttattggtcctgggtagtgaagaccttttagctgaagttggttatgagagaggatggggagggggaaaagggttggggcgagcactcttggagcttgcactgtttcttgccggtgcccaggcacaatgcgaatatgtcagtctaaatggagagctccatgcatgttcctctctaatccgtttgtcaccaataccagttcccaaggcagagccccaggagggctggactgaaggacctggaggtaatagaaaacaacttggctttgggtttcaggtcaagctgtgccatgacttgctgtgtaacatcagacaatataattgataaataaaaattgtgtatgtttacagtgttcaatgtgatgttttgatatgtgcatacattatgaaatgattaaatcaagttaacattttcatcacctcacatacttttattattatttttgtggtaagaatatttaagatctatttgcttagagtagtgtttactagaggtgaggaagggt

SEQ ID NO: 470239 - DNA, 942 bp, Homo sapiens
cacaggaatgttcagaggcacagggaccagggacatcaacagatactttcttgtaattctgacagctgctataaggagaggagtctggggcatctggccgcgtttccaaatctgctcggcccttttcttccaaggatgatctggttctgctctttgatccagggcactgctttaaagagcctgtttgtttgtggcaggcaccagactagtattgtcactggttcatggactctgaaagcacctagaagatccactgttcctgtggcagtggatgatggcagctggtacaccctgggtgcagctggtgtctttgatttagtacaagcacctttcaaagatttcattacacttgaaagcctcacctccggaaggcagtggccctccaaactgttctaccctctgcctgatacccagtttcaaagttacttccacatttttgggtatcttttcagcaacaccccactatactcataccaacttactgtattagtctgctttcacatggctgataaagacatacccaagcctgggaagaaaaagaggtttaattggactttcagttccacatggctgcagaggcctcagaatcatggagaatatccatattgcccaggaaaagataaaaattcaaaatttgaagtacagtttctactgaatgcatattgctttcacaccatcattaaggttgaaaaatcagagaagtcagggaccatctgtataaataaaccataaatgaaaataaaaccataagctccttgagggcaggtgtttaagcttgttcaatagtatatttagtgccttgcacagtgcctgacttatgataggcattccacaaagacctgttaaatgaatgaatgaataatcatacctcacatttaaatagtgctacaaatatggttacaaagtactttcttatgttatttgactcccatgatactctcc

SEQ ID NO: 470240 - DNA, 961 bp, Homo sapiens
gggctcctgctgtatgcttggcactgttctagatgctgggttggaacagagcaggacagacacagaccctgtcctaaaggggtccacgttctctaagccctgggaaaccaggactccatcatgcccatatctcctcctggccctcttctcatccagaagcccttgggaagcacagggccaggcagtgggcagaggggggcctttgaggatgcacaatcctttgaggatgactttgaggaccagcagccagaagccaggcacccatgcgcctcccagacaggggcccagtccctgtggcctctgctagcagacgactgcggcccccagcagtggtttaaacacaggagaaagcatcacgttgatgctggaggctctcagcgaggggcctctcagctggctgtcttcctcccacccctccgagagggcctgctgggagaggatattcctgttcctaaggagcccgagctgggagcgcacctgtggatattcagcttgcccatagatgagctgcttcccctggccacgtgagatatggatgaggaccgacacagccagtcctggaggtcgatgttgggtccgctggggccagccccacccagcctgtggacacagtgccatgttactctttgtcctggtctgcattcactggccatccacacacatttttctgagggatgcttggtaactaaggccaccaggtggcgctgcaagggctgggaccttgactgctggatctaaggctcagtaggttcttagcgatcttccatgacaggccaggattcccctgagagattcctaggaaacttttaaaaaaatatatgggcccagagtgtctggtttgatattttggattggattctgggaaactgttattattttaaaatagtgttaattttctgcattggtaaaatattcacatggctcaaaaaatttaaagtataaaaaggtatataagcctagg

SEQ ID NO: 470241 - DNA, 869 bp, Homo sapiens
aggcagcagaaacttctgcagacttaaacgtccctgcctgacagctttgaagagagcagtggctctcccaggacggagtttgagatctgagaacagacagactgactcctcaagtgggtccctgacccccgagtagcctaactgggagacacctcccagtaggagctaactgacacctcatacagccgggtgcccctctgagacaaagctttggggatcaggcagcaacatttgctgttctgcaatatttgctgttctgcagcctccggtggtgatactcaggcaaaaagagtctggagtggacctccagaaaactccaacagacctgcagctaagggtcctgactgttagaaggaaaactaacaaacagaaaggaatagcgtcaacatcaacaaaaaggacatccacaccaaaaccccatctgtaggtcaccaacatcaaacaccaaaggtagataaaaccacaaagatggggagaaaccagagcagaaaagctgaaatttccaaaaaacagagcacctcttctcctccaaaggatcgcagctcctcaccagcaacggaacaaagctggatggagaatgactttgatgagttgtcagaagtaggcttcagaagatcggtaataacaaacttctctgagctaaaggaggatgttcaaacccatcgcaaggaagctaaaaactttgaaaaaagattagaagaatggctaactagaataaacagcgtacagaagaccttaaatgaccagatggaactgaaaaccatggcaggagaactacgtgaggcatgcataagcttcagtagccaattcgatcaactggaagaaagggtatcagtgagtggagatcaaatgaatgaaatgaagtgaga

SEQ ID NO: 470242 - DNA, 1414 bp, Homo sapiens
cagaacattttatggcatcatgaacaggattcgaaaacaaaagtatgccgctttttggctggaaggacaggaatggaagctcagggacttcccatatcccaggatgggaactcccccagttttcccccttggcaattgaatggtccaggggaactggcctttgtgagaactgggaatctaaattagtgcaatttgaacctttggctgtgcgtgaagtgctgcaggggattccagtgggcaaaggagattccaaggagatctggcatggatggtgcttgcttactgcttataagttaatgtgtcaagataggatccctatcttggttgctacaataaaaaagctggctttggcccaatgccaggcctatgtcctgactgatcaagcccaaagctaccaggctattgctgacaaaacagctgtctgggtggcctggtacaagtataagaacaggcaaggcaaggtggataggcagaaggtacagatggtctggagagacgctgtagaagactttacccagcaggaaataacagacattttacaaacctttcgacaaaagggaggggaaagtgtaattacttggttggttcgaattaatgaacagggtgccaatggcattagagtggactcagggaatgttttaaagtttgttaccctctcatgggtacccaaaattcagctggctcttcgaaattgggctactgcaccccaccctactaatgatgagggaaatgttttagatgaaatatctttgtggcaattggccatcaatgtggccagacagaaatattccacagaggatgcctggccagatgggggaaagccctggcatacacttaaggagtatgctatgcggttaaaggaggaggccatggaaacagctgtggtactgggaatggctgataacatagaggcaacacctttaagtcctacaatccgcaataagattttaaagattgctccacctgcttatagaatggtgttaacatctttattattttcccatacagatactcccacacgggaggtactggaacaactaggtcagctacaggacttgggggatcggatgccctgtggggaggagaggattaaggagtggggcagacaaacccgggaccaatctcaggttagtcagaaggatatgtttgcagatttattgaaggcaggggttcccagagaacaaattgatggcaaggaagctaaagagttatggaaactataccaacaaaaagtgaggaatgtgcgccaaataacaacaggtgggccctctagtttggggccgggagtcacccctggcgtgcctccattgagtacccctgtaacccagccatcgggaggctcttaccaagaattattggattctttagcaggactatgacaggaaggctaggcccctttgcaaataaagtgcat

SEQ ID NO: 470243 - DNA, 531 bp, Homo sapiens
gaaaccaatagagcttccagaatgagaaagttcagtcgtcttgaaaagcaaagaacccatgtcctcagctgttcggatcttcaggctgttcgccggtttcgaggagtggtgtcagagggcagttttgaaatgggagaaaaggtttataaaaggaaagacatgttccagggacgttccatgctcaaaaaaagaattcagcgatatttctcccatttgcttttgaaagaagagaaatatgactctgttctgcgcggctcaccggcgccacaacagctgggaatgtgctgggtcacatctcaagccaacctgtctctgagtcttacccaaggcccacaaaggaactatgaaagtagacgtgggaaggaggaagcaacagaatcccaggaacagtgcccagcaacccagagaggaaagagaatacagaggttcggcaggacccaggtcctggtgggaattatagccatagcaggcttttataatactgattagggccagtgtttttgccaatttccagttaagaagctgacttga

SEQ ID NO: 470244 - DNA, 799 bp, Homo sapiens
ggcgggaagggagggaggatgtggtttcaggtctcttaccctgtttgaattttcatttttctctctcggcaccagtcttctccaatctacgtagccctcaagggtagggaccacatcctattgttcatcacgagtggtccatggtaatgcaggggtctcaggcttggcagtgcaacagaatcactgggaagctccagaaatctgcagagatctgggcctcatccaagaatcactgggagggccagagaaaagaacttgaggctaagcttctaggaaaaatgccccaaaccacactgcaggcctggctggatgaactaaactccaccctgctcctgcgccatgaaacatcagtgccaggagcctgccctcactttagccgctgctgccgtcagcacggggcccactatgccactgggagctcgaccctgcaaccactacccccaaagccagccacttctgccactgacacttcaacattctcatggggacaatggcatccagctccatccaccattcctgttggtcaatctgagctcagtcctaccacctctgccgcacccagtgctaggtcaaggatgggcaggatgtagcaaacagctgtcgtacctgtagcctatctgtattgagatgtccatgctgcaaaggacatgatctcattctttttcatggctgcatagtattccatggtgtataggcacttttccgtatgcttcacatatattaagttggttaattttccctactcatgttcttatgttagatgagaacactgaggcactggccacccggaggagaacat

SEQ ID NO: 470245 - DNA, 1128 bp, Homo sapiens
tgaagagcaggtcctattcacatgactctggtgttgtccattgggttttactgtgagtcgaacggccgcagagcagtgaaccgaggctacgtcaccagcctgctcgggctgcaccaggactggcacagccatgacacagccaacgcctacgtgcagatccgacggggcttgctgctctgcctcaggcacattgctgccctccgaaggcatgggagtcactggatggccaacttaggggccttggatttggtgatgttatttcagttgccatttgcaaattatgctgctgttgctgctgctgctgctattgctactgccagtgatagtgatgacaatgttaatgaagcagcagcagcagagggaggaggaggaagaggaagagaagaagtaggagaaggagaagacagttactttgaactcttactattaatacatcccttggctgtcttagcaatttatgcagactctccaatattgataatttcaaaagcttttgagaactgcctggatgacaagagcatggagcccgtcatctctgtggtgcttcagatcctgaggcagtgctaccctacgagtccacttcccttggtcacagccagcagtgcctatgccttcccggtccccgggtgcatcaccactgaacctccacatgatctacctgaagaggattttgaagatgatggcgatgatgaagtggacaaagactctgatactgaagatgggaaagtggaagtaggtacaccagcccatgcttctaatgatgtccatagtcacatcatgcacagaaaaatattacttcctgtgtttgcccaagcccagtgtaaattttaagaactgactttagtactgccactccagtggtcgtgatgcgcagtaaatgatagctactgttattgatttccaagttgtcattttcatcttggtaggtccggtacaatgtctcattataaagtcagaggctatcctatacattattatgacaccaatactttattcagatgacctttaggcacacatttaacacttggagttggtatatttgataagaccatttaagaccctagaaagattttccaggaagctttctgcctttgtgctttattgggtatgatccgtatgcaacatgct

SEQ ID NO: 470246 - DNA, 978 bp, Homo sapiens
tgtagacagactgggtgcagatggctggtgtagacagacggtgcagatggctggtgtagacagactgggtgcagatggctggtgtagacagactgggtgcagatggctgggtgtagacagactgggtgcagatggctggtgtagacagactgggtgcagatggctggtgtagacagactgggtgcagatggctgggtgtagacagactgggtgcagatggctggtgtagactgagtgcagatggctggtgtagacagactgggtgcagatggctgggtgtagacagactgggtgcagatggctggtgtagacagactgggtgcagatggctggtgtagacagaccgacctgcacaccaagccctgtttgggacgaggcttcctagacaggttttgattcaatggtggtttctgactgcacagacaggaaaccagagatgggcacgggtacctgggccagacgccaggagccatcactgggtcctgatgggcctgaatggctgtgaccaggtggcagcccagagcgagcctcctgggggtgtgggtttcacacctggctttctcattcaccaccctgctgtgctaagaaagtggccattgatgggaactggggcagagcagggacagtgtgggtcccccgctgtccccagggccctgcttgaaggagccacgggtgtctgctgcccacggatgtcttgctttttgcagggaaatcaggaggtgccacaccctgggctacagcattgtgggtatcaccatgtgttggtgccagagggacacgctaacccacgggtgacacagaagctgggctgggctgggctgtgtcccctgtgggcgtggagctgcgagccagggagtgcagatagggtgagaaacaagcatcttaactttaaaatgttaccctcgtttcaataaaattttaaagttaattgggaaaataaatccttcattgaagagtgaagctttaaaatgggttttc

SEQ ID NO: 470247 - DNA, 4241 bp, Homo sapiens
agtggcacccccaaaggtgctccccagaatcgggatgctgcagacacatcaggccaggagacagcacacactccgccctcaaaggacacaggactcaggagcattcgaaggctgctatgaataaacctggttcatggctcacttgggttactcagcacctcaacctacccaattgtcagtatgcaggcagcttccctggggcagctctggcctggcccaggccctgagtggccccagtgggagtcatcctggggaggtggtgcaggtgggacccactgagtggagcatggggcctgccccagtcaccatggaatcaggcagagtgtcggcatttcagctcctgcagaatacgtctctcccggggatggcccagtgtcggcatttcatctcctgcagaacaggcctcttccggagatggcccagtgtcgacatttcagctcgtgcagaacaggccattcgagatgcctctcctagatcatgttcctcttccttcctgcccatttctcctgtgtcaattgagcatttgccccaaatcctaaagcacagccatcctggtgcccgatgtgcaggggatgaaacttaccctaaatctaggcttggttgtgcctcagtgacagggccacgggtctgcctaatgcacctgcccctctgctgtgtgacagcacaaggagaaccaccaggagctcgccctgcaccatggattcgcctgcacattttgtctttctcagttaactcacatcatgccagacacaggacaagggacttccgtgtggatccttcagatctggaatctcttgatgcctgtatccagaggacgctctctgccttgtacccaccgtttgaagccacggcagccacggtgctctggcagctgttcagcgtggccgagaggtgccacggtggggacgggctgcactgcctcaccagcttcctcctcccagccaagagggccctgcagcacctgcagcaggaagcctgttgtacatgtagcttactaggattgaccattgtccgtaaagtgtcaacaaataccaaagaatttatatctaaaggccacagtgcaataaaactagaaatcaacaacaagaaacccttacatttggaaaatgtttttacccatttatgtttaatgttccattattggaacactaagcttgtgggagttatttatatcctactgctgaatgtcatcgccaagagccaaagaacagatgtgtccagttacaatgtggaggaacatgaagacctttaccaccaaaacaataagaaacccctagaggagcctacacaattgcatcgtccttcaaagccacccaagaggtatggatatggaagacacctaaaaggaccaaactgtggagagacagaagctcgtcatcacctgacagaggaaggaggcaaactgcatgcatcagggaacagtaagaatgaccgatgacttcctcagaagcactgggcttcagaagacaatggaaaaacatcttttaagtgttgaaagaaaaaaattctatatccagcaaaaataaatgtctacatccagcaaaaatatctttcaaacatgaaggcaaaataatgacacttttaggttaataaaagagtagaccagcagaggtgaataaaagaaatgccaaagggtggtctttaggttgaagggaaatgatactagataggtgaagggtacaagaaaggctaaatacgtgagtaaatatgaatgtctttaaaagattattaactacttagatcagtgtatcatggggtttttaatcaatgtaaaagtaaaatatatgacaacaaaagcacaaaatgttggggaaagtaaatgaaattatactactgaaaggttattacattgtttcgaattttaaaatattaattgaagttaggctgtacaattcatagaacaattggaaaaaaaatcgttaagaatatcaaaaacctgaacaacgttaataataaacttgacctatttgacatttatagaacattgcacacaacaaatgcagaatacacattcttttgaaggaattaatctagattatccaatttattgatgtacagctaataataatttttcataatcctttttatttctgtagaatcagtactttgggtttagtttttttcttctttttctagttccttaagttgtaaagttaggttgttgatttgcgatctttactttttaaaaatgtaagcatttatagctataaatttcccccttaatgctgcttttgctgcctcccgtaagttgtaatatgttgtgtttttgttttcatttcacttcaaacattttctcatttttcttgtgatttcctttttgatccattgttgattaatttccacaattttgtgaatttttcagtcttatttctgttattgacttccaacttcatccctttgtgatcggcgaagataatttgtatgatatctatctttttaagtttaccgagacttaatttgtggcctaacatatgttctaccctggaagttgtctcatgtgtgcacttgagaagcatgtgtatgtccagcaaaaatacctttcaaacatgaaggcagaataatgacactgctggctagagtgttctgcatatgtctgttagatggagttgatttatggtgttgttaaagtcctccatttttaaaaatacatcttctgtctggttcttctgtccattgacagtgaaacagtgaggtattgaagtctccaacaattattgtagagctgtctgtgtctgtcttcagttctgttagtttttgctgcatacattttgatggtctgtcatttggtctgtaaatgtctataattgttatatcttcttgctgtatttaaccttttcttaatatataaggttcttcatggtatctggtaacattttatgatttaatgtctattttatctgacattagtatagtcattcctgctgtctcttggttactatttgtgtggatatatttttccgtcttttcagtttggatctgtttatgtctttgaatctcaatgtttagttgattttttgtagtaaaagtcttaaattctttccttgtttccttttgtgtacattctatagctattttccttttgattaccatggggattacacttattatcctaaagttataacactaatttgaatttatacaagtttaacattaataacataaaaaaattctgttcctttacagctctgtctcaccccttttggttgctgatgtcagaaaattacatctttatactttattagtatgaagtattactaattattactagtagtatgaagtattaaacataatctaataattcttataaatatattagtgtcttaaatcatgtagaaaacaaaaaggcagttacaagccattgttacaataatactagctttcataatttgcatatatttacctgtattgaaatctttatttcttcatagtccttcaagttactgtctaatgttctttgagttcaccttgctggactccgttgtttctgcagggtgggtctagtggtaacaaatccccccagcttttgtttatctgggaatgtcttaatttcactctcacttttgaagcatagttttgctagatatgagtccttgtcaacaggatttttttcttttatcattttgaatgttttgtcccactgccttctggacttgaaagattctgatgcaaaatatgccgacaatcttattaaggttgttgcatgtgatgagtcacttctatcttgctgctttcaggattctttgtctttgtcattcaaaagctggattataatgtgttttggtgtgggtctctttgacttcctcttacttggagcttatcaggcttcttggatgtttgtattcatgtctttcctcaaatttgggaagttttcacacattatttcttcaaatattctatgcctttttactctccttctggaactcccattttacatatgctggctgctcgatggtatcccacaggtcttttaggctttgttcacttttctttcttctgcctgctcaaatccacctttgaacccctttagtgaatttttcatttcagttattatacttttcagctccagaatttgtttggcttctttttaggatttttaatatctttgttgatattttcactttttcatacatcactttattttcttcacatctttctttagttttttgagcatctttaagactgttgttttaaagtcttttcctagtaggtctactatcaagtcttttccagggacagtttct

SEQ ID NO: 470248 - DNA, 678 bp, Homo sapiens
ttaccctcacctctacctagaaaactcctcctcatgcttcaagaatgagctcaaatatcccccagacagcacagaaagccctctgcctctgtggccttggaggaagctcctctacaggaggagggaataaagtccatgagaaaccagaagaggtgacagctgggcagcagaagcgccaacagcaccaggcctccagctcctttctagaagtttccattctagagcttccattctgtgaacttcccacacaacatcctggacaggatactctaactaccttaggtattctttgccaaaatgaggtaggtgttcattgccaaaaggtaggtattctttgccaaaatgagaataaggaacaaaatggtagagaaattgcccaaggtcaaacagagaaaaagaagcattttagaaaagtatatgtgtcctccctggagccgaaaacagcatggggcagcagaagtgactgcttttccatgccaaacctcacactgatgagaaagatttgcatgtccgatgacgcaccaaagaagctttctgagggctccccagaagcagatgccactatgcttcctggacagcctgcagaactgtgagccaattaaacatttttaatataaattacatagtctcaggtatttctctataacaacgcaagaatggcctaataaaaatgggttt

SEQ ID NO: 470249 - DNA, 701 bp, Homo sapiens
actgataacacctggtaccgtggcatgcctgggcatctaacaaagatctttatctcagaggtggcaccaccacctgctctcagccaagccagggacccagaagtctcctgggtcagcacaatgcttcacttcccaccttcctcccctgttgttgacttctttctgcttgctggctctatatcttcacagcctgtaaaagcagggaatggaatgagcctctatgtgtccggcatgaagatgaaggctattggacttccaagtgagtgtgggggccattatggtgcttttcatccagggacagaaaggaattgggatgtgatcaccaggctacctgggaagcaactgggatgtgatcgggtggccaccacagccacccgagccacggaaggagtttcagcaagtggtaggaatctgaggcttcaagataaagccaaaagcttcaagatggctccttcaaagaggttctttggcctggacctagggaactttgagaagatgtgtttgattggaaggcatgtgaatattcctggagcttctaatcaaagaccatgaaataccattgcaatgacatgaagtcagaatacatacagtacggtctaaccaccaggaagtaggaagggaaatttacctttctggttctgaaggtgttcttcctgttaatttagccgtcaaacacatcagtttactatggcagtgctggc

SEQ ID NO: 470250 - DNA, 567 bp, Homo sapiens
cacagcacacgtttcagagagcatggggttgggggtgaaggctgttggaaggcaaagagtattttcaacagacattcttggtaaaatatctcatcttcttcctgaaaactccagagagcccaccagagcatataatagtcgctgctccaagaaggctgagattctaggatgcacgcacagcccactctcaactcatgacctcctctgtgcccagggagcagaacctgctaatgagaggaacagaaaaacccacacagagagaatgcacattttttctacccacggtaaaattgacaacggaaacactgtcttctccaattcccaatgcactgcaccactgctgcagacaaacagtgagtctgaagtgaagcgggagggagttggtagaaataaggccccacccagcgtgaagcttccagatgatctgggggccacgcgatgcaggtgctatcagcaagtagcaggctgcatggctggcttgtgagttattgctgtggtcacaagatctccttgctgtagcattctgcgtgtgtaggtgataaatcttagggacacgagggaacacat

SEQ ID NO: 470251 - DNA, 844 bp, Homo sapiens
gtatctgctacctactgggtacaatgtacactattcagatcatggatacacgaaaagccagacttcaccactgtgcagtatatccaaaattgatgtgttcccagaaaatatctttgggtaaatccattctctcatcaacttccactaagaaattgaagaggaattcccaaatggagatggagaaaccttcaaaagacaaagttgaaaactttcataaaggaggggtttctaataatgggcaactttgtggcacggagctccttcctttactccaggatggttctgagctggctccaccatgtgaagatgtgctggcttccccttcaccttctgccatgattacttattcactatcacaagaacagcatgggaaagacccacacccccatgattcaattacctcccgctgggtccctaccatgacatgtgggaattacgggagctgcaattcaagatgagatttggatgcagtgcctctgagggtcatatttaatgatcatacatccctgtgtgaggtgaccccaggagaacaagaaaaggctttataaattgtactctaactaatttgctcataagctggcatttcctcttcaccttgcactttatatcaagagccgttcataaagtttcctatatttatacaatattttgtactaatcaaaatgtttctcagctacataatatctattctttgttaatggaaattcgggttgcttataattttttaacatttattttaagttcaagggtacatgtgcaggcttcttatgtagtcttcccccacactagttcctgaataaccaacacaatgatctttctgcaacgcgagacctgatcatagaac

SEQ ID NO: 470252 - DNA, 582 bp, Homo sapiens
ttcctgttgtaatgcagggcaggcaagcccccacatggggcgtagccgacgaaggttcttcgctttgccaggaaagaattcaagggtgctcaaatcctattgaaacaagagagttccctgaccccactgaaggatgtgtgacaggggtgtggcttgtcttttcgctcactgctgatgctcaaatcccttacgggagaaagagcacacagacggacagatgtaggagcccaagtgggcgtgtgttacagcgcggccttttagccttgctgtccgtggatggcttaagtgttaaccagctcagtggaccctccaactttctgaaaggacagagggccagtctgcaggtatccaggcttgagagtgaggcctttgctggggaactgccctcttctacccagtattttcctgtctcctgtccatatcactatggtagaaagtcttgtttatccccattctttgattttcccatgtgttggctgtgggctcctgagtgatattcatggaccctgattggctgggtttgagtcatgtgcctactcttaaaccaatcatcatgtgggagggaatgcagtggtgacactc

SEQ ID NO: 470253 - DNA, 721 bp, Homo sapiens
ttgcctgtgctgtggatgagtcaccactgccttcgcggcaccgttgagaaatgcaagaaactgacggtcagacattagcaccaggtcttataaggacaaacctaaggcccgttggaggagggacaaagggacttttcctgggtgctctgactttgcataccttagcacagacacaacgtgaggcagaaccacttcatgtaaggttcacagagaagcatggaagagcacggggcctgggcaggctgttgccaggatcttccccgcactctgcagtcagtcagcctcctgagaggccaaatcataatgagaatgttgctgtggttggtgaagataaaaatcaccaaggattgagtgggtcttatgaagatgttcaggggctggaggtggagggctgtgaattaaagcaacatcggacaggtgaacagaagaaaaggcctactaacttattactgctaaattttatgtgcataggggcatcatggaaagaagtgaatacgcaaaggagaggaggacagatgggccatgtggtggcttgtgacgatgtctgggtgtggcgctgacttctctgctctcttgtgataacagtcaatcttccctggttataaaatgcctggagatgggatttatgacagttgaggtctttttgaagggtcccttttctgggcaaaaatgagaatttagagaaagtttcttcctgcgttccttgattctcaaatgtctt

SEQ ID NO: 470254 - DNA, 627 bp, Homo sapiens
tcccacaggtcctgctgcaaatccatagagccagaaagtggcttaggggttgcttggggtgatggagtgtgaagggagagtcactgcaaatgggcactgggttcatttctggggctatggacaaatcatcaggaaggccctgttgttcggcagcttaaatttctccccaacacagccatgtctgactgtcactgtcaccactcctcatgggctgcagcagtgtatccgtctgctagggctgccatggcaatgtaccacagaccgtggtcttcaacaacagaagttcattccctcacagttccggaggctggaagccccagatcaaggtgccagcaggatgggacagatgggaaagacttgtgagatggtgaaaacagaggagggccgtgtgaggagagtagcagggaagccccgagggactgagacagactggcaataccggtgtagtagcgaaatcaacccccaagctgtggactgagtccatgacatatttcttttataaacttggtgaggcaaatgtaatgaataaattaatagaaaatgatgaatggataaacacaataactgagttcataaataaatgaattcatttaataaatgttcatctgttgagtgataatctttctc

SEQ ID NO: 470255 - DNA, 733 bp, Homo sapiens
tgctctgcaaggggccaggggatcccacagcgggatgtggggcaatgcggggtggttcagggtgatgtcgcacactcggtgggtctgtgccacagctaaaataccaggcaggacaaataccttaggaaaaccacaccagggaatattgtcatatgaaaaccagagaaaagcaaagagaaaagtcttgaaagatgccacggggaaaaaaaatcacttacatatagaagaacaagaattagaattacaacaaatgtatcatcagaaaccaagcaaacaagaggaaagtggagtgaaacttgatattgaaggaataaaaagaccaatttataactatatccagagaaatggttcttcagaagtgaaggagaaacaggcttttttaatacaaaacctaagggaattcatcaccagcagacctcctcttgtctggtcacaggttgtttttaagctcctggaaactttagggctcaaagttttttttgttgagggatctgtgaatggcttgaggtgatttttttaagccattaccacactgtgctttgattttccagagtgggtacaagatagtgcctgtgcacactcttatggcccctcaaggatgagggagtctccaggatgagtcttcttggctgtccctttccttgttttcttctaataaacctcaaactcagtgtttgccaacaggggtttttagacttccttaagggctctttgtctgtttgtatactggtct

SEQ ID NO: 470256 - DNA, 849 bp, Homo sapiens
gaccaattattattttggagaaacagcttaataactgcctgcccatcacctgattgttgcctgacattcctgaatgttgatattgacccccaatctcttctggcttgtggggtttctgctgagagtttgtgaatccactgcactagggggccgaggtgcttctggaccattggtcactactctggtgggtggtgtcagccaaaatgtttatagtggggagacagctggatctgtccttgtttgcatgtgccagcagcaacagcagtggcaacacggcagggtgcacactcattaactgcagcagggtgctagcgtgggccggggtgcctgcctccatgtgggtgttcaccacagtggtggaagaagcacagctccggggtgaggggcccctgatggtgactgcacatgtggtcatgttggtagtggtactagcagcaggggactggctgtgggtccatgggaagcttcagtgtggggagggggcatgcaggatagtgtgtggccataagggctgccccgatggagctctccactggatgggcatagtctaccagggcgcaggaggcatgatgcgggtccgcagggtatccaaggctgctctgccagtacagctaggagagccacattcaaaaccaagaagagaaaggagtcatagagccacagccagaatgtttaggatccaagtacacccaatgccaaccgaaagtttgggcatgaaaggaagtgtggactcccaacccagttaaatgaagatttctttaattttgagctcaaatatagacatataggagtggaggatatgatatataacaccttttaagatttgaatttttgttactaaaacaccag

SEQ ID NO: 470257 - DNA, 644 bp, Homo sapiens
ggacatcgccccctcagtatgagtggtctattggacatggaaatctttgggggctgctattctgccaaacacaagtgtcttctgggaataaacagagagaaatccagaaaagaagctgtcccaatgtcccttggaagctcctggatttgcaacccagaccttaggggcaggccccattcagaaggctcaggtggtggggaagactccctcttcccagctcacttcacatccaagcagaccagactgctgggtgagacctcatggacgtctgccagagacactgggttgtgcgaaaagagagcccctttagcagaaatatctgacaacactgttcctgattctgaggagtggggaatgatgtcatgtcttttactattaagcatgatgttagatgaagaaaagaacagcctcaggaagtgtgagagtccactgtgggcaagcggctgtccaggtccactgtacctgccagctagctgtgttatttctatcatcaccagattagaacttcagagtcaggatttgtctgtgtgtgtcctggagggaatcccagggatgatctaatttactcccataatttttcagatgagaaaattgagaccccaaaagtttaggccatttttattgtactttgtacctttctaagc

SEQ ID NO: 470258 - DNA, 697 bp, Homo sapiens
gtgaagaccacagggtttggaggcagaccaccggcacagcccagaccgcaggggcctgtgagcggacgaacctctgaagttatgtggctgctgtcccgagtggtgtacacgtttctcaccgcattcatccctaagaatatctcatggagacaatctttcctgggagacaggtcacgcagcggttgcaataggtgtgacaagcttccaagctataatctgatgggctttgtggttctatggaccaatgaaaggcaccaggctgcagagaacaggttccagcttgaatggtgcatggacgtttctcctgtctgtatctctcaccaagtgaactcacatgacagctgcaatggctgtgggaggagatccaagaatgccataaatgtaccgtctgttgaccaaggcagggaagccgtcactcaagtggatttcaatctattctcatttgtcccttcccaaactgctctccataagcttgcagcagttgctgtgtagccttagaagtatctcctcatctgtaaaatggcagtaaaaatgcctacttcacagggttgttgatagctattatcatgacatgagagagaatatttaacatggaagggcagggcagggatagagagaggatgaaagctggatctacctctggaagtgatgatttttgaagaacggcattgccactcagtaaagcactttgcctagt

SEQ ID NO: 470259 - DNA, 540 bp, Homo sapiens
cagccagtcgcatttgcacatggcgctaagccatgccctgggtagtgcttttcagctggtgtgggctgtatggtattcctctgacagacaggacattcgttcagagcccacgaagcagcacacctttcagagaggatagcaacctaaatcttctgccttcctcaaggcacacgaaaagatgtgccagcaagattgtttgcacaaacaatgtgatttatgccgaacacctgcttagttctgggaatctagaagagcggtacttgctagtcagagggtgcttctgtgaccataccccaataaaaaccctggatgctgactccataatgggatccccaggcagagacattgcacacagtactgtactttcagttgctggagaaaggaacatgctcagttgtgtcccatcacaggagggaatgggtataaggaagcctggcattgatttctctgcctgtgtctttcccttatgatccagctgtgtattcttactatgtggctataataaactccagctttgagtacaactgtttgctgagtccc

SEQ ID NO: 470260 - DNA, 1128 bp, Homo sapiens
tttttttttttttctttttgagatggaattctctgcagatgcagatctcccccacaaaagacagctttgcaggctttctgaacagtcatctcaaaatacatcaaattcagaatgaaaatttttggtgctcttcaagagcaataaatactatgaaaacccaactacagggcccctcaccaaactattatgatggcctttctgcaggcagtctgagaaggggcaacccagttgtaaagaataacgttgagaaattgatcatctctggtagcatctgtcactcccttgaaaatatccaccaggctagacaggtttctcctccacctgacccctgtatctgtatcagtcaccattacctgggagtactggagacaatgacatatcaatggaattctggattattggataccattaatcttctgttggaagggggaaccagacagaagccagaagttacttctgtctagactccctcccaacctcccatgttttatagcctcaaagaaggcagtcagcattctcagcattcttttcttctttttcttcttctcttcctccttcacctcctcctccccttcttcctcctcctttcccttctcctcctccccttccccctccctcttcttccttcttccttctttcttctcctcctcctcttcatcccctccctcctcctttccccctcctccttttcctcctcttctcctcatcctccctctcctcccctcctctccttcctcacttcccttctcctcctccccctccccctccctcctcttcttccttcttccgtcttttcttcttctcctcctcctcctctccatcccctctctcctttctctcctcctccttttcctcctcttctcctcctcatcctccctctcctcccctcctcctcttcctcctcctcatcctccctctcctcccctcctcccctcctcctcttcctcttctccccttcccttcctcctccttctcttcccccacttcctacctctcctactcctcttcccccatctcctcttccttctccttctccccctctcctccccctcccatctccttctcctccccccacctccttctcctcctccttcttcttttaaatagaggcagggtcttgctttgttc

SEQ ID NO: 470261 - DNA, 1096 bp, Homo sapiens
ggcgagtttagaccctgtgggaaaggcctctacccatccagtcaaagtgtctacccagaccaaaaggtattttagtttcctgactcagggcatggggcttccaaggcaattgggcagcgtcagtcttcagctgctaagccgagaagatctgggaaggagtcagtcagagagccttatgccagagttccaggggctctgggagtggctgccagcacagaccctcacgctcgacactcctccaccagtccaaacttggtgccagctccccatgaatgatgatatcttcacacttgcagtgacaatgccccccagggacgacatggagatctggaaccacaccttctacaacaagctgcacatggctcctgaggaacatcccatgctgctgactgaggctcttctgaaccccaaggccaactgcgagaagatgacccagatcattgccatcctatgtctggacctggctggctgggacctgactgactacttcacgaagatcctcaccgagcgtggctacagcttcaccaccacggcccagcaggaaatcatgcgtgacatcaagaagaagctgcgctacattgccctggacttcaaagccaggtcatcgccatctgcaacaagtagttccactgccctggcctctcctccagccttccttcctgggcatggaacccgtgacatccatgaaactaccttcaactccatcatgaagtgtgacgtggacatccataaaggcctgtacgccaatgcagtgctgtccagcggcaccaccatgtaccctggcatcgcccaacaggatgcaaaaggagatcactgccctggctcccagcatgatgaagatcaagattattgctcctgctgagtgcaaatactccatgtgtatcattggctccatcctggcctcgctgtccaccttccagcagatgtggatcagcaggcaggaatacgagtcccacttctctcgcccccatcttctactgcaaatgcttctaagcagactgttacttagttgtgttataccctttcttaacaaaaacctaacttgcatagaaaacaagatgagattggcatggctttatttgttttttggggagtg

SEQ ID NO: 470262 - DNA, 638 bp, Homo sapiens
tgggaaagccacttgcatcacgagactgaatcaggggagtctggggtcctgagaggcagaggcctgaaaccgtctagagccatgtggggagctgggtgtgtattcaggccagttgcttttctctgtgcctcaatgttccaggacagcaaggccgaggagaatggctccgacagcttcatgcactccatggacccacagctggagcggcaaatggaaaccacgcagaacctggtggactcctacgcggccattgtcaacaagaccgtgtgggacctcatggttggtgtcacgcccaagaccatcatgcactgtccctatctgagtgagaaaagggcggtggggcggcagatctttgagtctaagcggtgtagaagccgcgtgtgcaaagccatactcagggctccaagtccagcacactgtcccagcacaggcatcaggccagcacatgcatcaggtcccaacctccttccctctttgccccctctcagaccaaggagttcatattatcagagttgctgtccaacctgtacttgcatgggaaccagaacacgctgatggaggagttggcagagcaggcacagtggcgagatgagatgctgcgcatgtaccacgtgctgaaggaggtgctcagcatcatc

SEQ ID NO: 470263 - DNA, 1559 bp, Homo sapiens
cagtgctgtgggagaacgtggttggaggtgctgtggcggtggagtggccccacacgtggccaggctttgtggggttctgactctgtccttgccaatgttcctccacacagtggctgcctctggggaatgatggctgtgtgagcgcccgccatgccccaccagaagagtctaccatggcccaccggaagcgtctaccatggcccaccagaagcgtcagagcgcggggagcagcatgttggaccacagggcaaggccgggtcctgtcccccaccaccaggagcccgagagcgaggacgtggagctgcccttggaggactatgtgcccgagggcctggagctggtcaccctgcggccagagagccccacgcccaagaagcaggagtgccacaaccacagccccgatggggactccagttccgactacgtgaacgacacctctgaggaggacgactatgatgagggcctccctgaggaggaggagggcatcccctactacatccgctactgccctgaggaccaaagctacctggagggcatggactgcaatgggcaggtgtacctggcccacggcgcgcatcctatggacactgacgggtgccaggatgcagtggactggacggcctgggcgggcctgcacccccatggtcacggggctaaaggtagccaggactaccctgatggccaactgcccatcacggaggatgtgtcctccgtcctggaggcccacgaccaggaagaagacggtcactactgtcccagcaaagagggctaccaggactactaccctgtggaggctaacgggaacaccagcgcttctgcctaccccctgaggtgcggggacggggacctggaggaccaggaggaggacatcgaccagatcgtggcagagatcaagataagcttgagtatgaccagcatcaccagcaccagtgaggccatccccgagcatggacctgagccagggcctgcggactctgcagagggctgcccacccatcaaggccagctgcagccccagcaggcaagaggcgaggcccaagtcgctgaacctccttcccgaggccaagcaccccggagacccccagagaggcttcaagtccaagaccagaccccagaagagaggctgaagtggcctcacgagcaggctctgaagctttccatttaaatgcaaatttcggaacaaagatctgtgtctctgcactgaccaaatagaagtttgcatcctctgcgcccggcaccaggcccgtctgctcaatgcaggataagcaggtagcttcgggctgtccacccagcccttgcagagggtggagctacagagagcatgagtggccaagatgaagccctcattggattctttgactctttctactatgtgagatattcttgatgtctgagggatgaacggcaaacaaagtgtggcctacccatacaatggggacagtagttagccctaagaaggaaggaagttctgacgcacgctacaacacaggtgggccttgagaacgtcacgctaagtcaaagaagccagttggaaaaagacaaatgattgtatgatttcac

SEQ ID NO: 470264 - DNA, 489 bp, Homo sapiens
ccgtaacagtcatggcaagggtccgcagcttcattcttgaagtcagtgagaccaagaacacaccaattccggacacaatggtacaaaggatacagatgaagagatgcataggacaagctgtccagaaggtttctgaacccagtcctcttgggttctcacggaagctctattatgtacgcatgggtgatgaaatcattggccattgtggagatggtggtaacttggattatcgtggtgctggtggggataatgacaagtggtcactaccagaccattcgaggtatgatttggatttagaacccacagaactttctgatggattcacagctcagtggagcaccttccccacaacagtagaggtctatctagccgtaattatcagcagcaacactacttttctggccgtttgctaaaaggaaggaatttaccttttaccctgaactacttgtcctatctttctgtaatttttaacatctcttgtaaggttga

SEQ ID NO: 470265 - DNA, 681 bp, Homo sapiens
tctcacattggttaccctttcctatgtcttcaggcatcatcttctccacaatgacatcaccagtcctcaaagcctgctcagagaccctttcctgcccagtggcgtggcttgagactggatccacaaaacggattagagattgcaaagtgagcagagtggttagcagaaggcaggttgtcatcatggagcttcaccaggaccaagctggggtccagaaacatcctagtactgacttggtcatgatagacagtgcatctagacaagctctggctcccagcgccaggcaggatcccaagtgttgggcgaagccaggaggaccccctcctcctgaacaccagagctgtcttcaagtgcagttcttctctggggaagagccttgggctccccctggaggtcacgaagcgcaacaggccttgtgttgggcagagcatcgctgtccttcacctcctacggagaaagaggggtttcagggagtaatgaccagcacccccacccccgccctgcaatgactgctaaagaggtctccaaatagtccaagtgagaaaacagccagggtggggcagggcgagcatgggttgtttacggccgtttccacgctgactggtcatcgctttgtggatactcgtgctcatgtccctggttaaattgttatatactacccctggttataaaagctcgcgc

SEQ ID NO: 470266 - DNA, 581 bp, Homo sapiens
tcccagagggctacacatgggggaccacactcatgtcccctctgcactgagagccattccaccatttaataaaattattctctgccctcctcacccttcagttgtcagcgtaacctcattcttcttgaatgctggcaagaactcaggacccactgaacgtgaacgccggtaccagctcaagtgtggggtccacactggcacacaagtcaggctgcagaagtccctggctgacaaaaactctgactgccttggccgccttgcgctcccaattccatcatctcaactcagggagaccacaggatgtggtctgggcttccctgccctgcactgccacctgcaagcattctccaggcagcatgctgagaagttaaatccactccagttactccaccttgatcagaaatggaagccaataattcatttaatgtagaaaataatgtgtgtattttaataatacatttaacattgataattaactgggatttaaaataggccaaatgtccagaaataataaccagttagtgccatcctataccgagattttattcctaggcatctaagataatttctaggtgattttt

SEQ ID NO: 470267 - DNA, 713 bp, Homo sapiens
attatgtggcttttgtttgtgtcactccaatcttcaagaaaggcagatcttctttccccactatgggaccttgggttgatgtgtctgtggttcccatgacaactctcagatttgatgatttactggaaggactcacaggactcaggagagttatagtttgtgactgtgaaaggacacagattaaaatcagcaaagagaaaaggcacacagggaaagttgcagtgagcgagactgtgaacccaccaggaggaaccgactctgaactcgatgttacagacacctctaccgtggtcagatgggatggtgtcgtgaaaaatcaggacttccatcactgcccaagggtaataatcacagaacatctcctgctccatggtgccactggctgccacgtgggtagcagtaaaggcactcttgggtccagccagggtgctatcagcagcctactctacccaaccattagtaacaaggatggtgtgcttccatcaaaaaccaatgaaggttgagtaaagaggaaggtgctgaaaaatgttgcaaaaagcaattactgacgatatcttcagttaagcaaaaactataaacactataatttctcctatattcccccaaatatcataatctagcaacctgctagattcaagtcagaaatttcatttctggagtttttcaaaggtccatagaatttcaaaatgctgtatttgtattcatttctaagt

SEQ ID NO: 470268 - DNA, 556 bp, Homo sapiens
aaatcgggagaagatggttagaacgcaggcaaaagtggcatcatcatcacaccaaccactttgggttactggctttgaggaagccaggatctctgaaactgggaaagagtattaccgaggagcactcctatgcccctataaactcatgtgctgcaaattggtcaccagtgaagatgcgggtgaggggtgtctgcggctgcttcagccccctcctctaccattagacacaagcagcctcgtccatccagcccagcgtgctgcacaaatgcatctcctgctggacgtaagagggttccatgtgcaaataagttacggaacctttggcagaatgctgcacgctacatcttctgttcacctttggggatttataatgcagcagcttaccagtgactcagaagaggccctcaatcctactgtggcttgtgtctctttttcctggatgtgtcctcaacctcggcaaagtaaacctctaaattgattgagacctgtttccgatactttttttttggtttactgccgctacactggaaaatagtttcatcaacgaaatagcatc

SEQ ID NO: 470269 - DNA, 589 bp, Homo sapiens
agagctgacacttgcgctgccctataatgccctggacaaggatggattctttaaggagacccagctttaaggagaagactggatggcttaaacagcaaaatttatttcttgcagttcaggagtctggaattccaagatcaaggtgccagcagattcggtgtctggggatgaggaaaagcttcatggaagaggtttgcttggtgcaggattcaaagactgagaagggttctggcagcctgaaaagagaaggtaggaaatcccagaaaaagagtgtatcaatgaaaacacagatgcgagaaggaccaggctcctgggaggatattaaaggtccacctactcagatctgccagcttgagaaatgcttcctagggacagctaagctgacactcaaggatgtcaggaaacaggtggagttcatagcaattggtctgggcatgagagggaaaaaacaattaaaaccaggtgcaaagggtcctgcctttgcaatgggataaatggcaatgctgtggcccgacttaggggccaaggcaaaggtatgtttatctgggggcatgtgatctgtttagctcttggcacacagagcttgaag

SEQ ID NO: 470270 - DNA, 959 bp, Homo sapiens
ccgtgcttaggcctggatactcttaaccataatgtaagcctgtacattccctgatggctgccagcaactatgcaatccagtggcactgaacattctgacagggattgtcatcagctaagagccactagcagtggcagtagtgggcagccgtgggctccacgagccaggaagcttcagcagagcataagtggatttgacagtggtgtggtcccagtggcaatggtgtgcccagcagaggtcttgcatggcaaactcctacctgcagtagaccaagtctccccttcctccagtggaactttggactgtgagctgactcagttcttggtactggatgacacaaaacatctccattccaagtctgcagataatactactggaactacccaggctgctgatgttgcagtcaatcagctgcttgtgatggccaccgtgagagcaggccactcactacacaccatctcagcttctggaaatgctgaatctcataggcagctctggcaaattctgctggaaatgccaaagttaccagaacctggagtcaatcactactctagaaaagagaaggaaaaaaattgtctcttcctcctaccttccaacctcccatcaatgatcccaaaggcgaaattgacagtgcctgcaattgacaaggtccagatagatggtgagaatctcagtgaacatgttctgttctctcagtttaatatacccagagatgattatcaattacaatggagctaaatgttcacagtaatgcttattgtaggtaagaccaagagctcatccaagaagcatggaatgactgtattctaattgttcagcactatcagtatgtgaacagcccaaagaaatgacccaattcttactctccaggatgtttttgcaaagtgtagttattagaggaaagaaaagttaaaatattaataatgcatacattcattttgtatttcacccacacccac

SEQ ID NO: 470271 - DNA, 638 bp, Homo sapiens
cgggagtgcaaaatgcccggagaatttagagctcctctgatcaatctctggggacaaatgtcctcaggcgaatttcatgctcatccaggatcccacagttctgcctcaccggcaccacactgcaggtccgggagttccgcagccctctggatgggcacgagaggacagcaagcgtgttcctgcactgcctggagaaatgcaatactgaggctaagagccaaggtcctggaaagcctcgcagcccagaccagaccaggggctgaccaggccctgcagaagggcttagcaaacacccaggtgaggtggagaggctctcaggctgtaacactcaccgtgaagctccacggcttcattcttgaaggcagggagaccgagagcccactggaaggaaccaattctggacctaatgtgatgtatttgttggcacacgccctggtcagttgtgttccaaattgtattaccaatcagaaaaatgcataggcatattttattgtggtaaaaccagataaaaattagtgtattttacttttaacttgaaagagcaatatatgaatcttaagttaactatagtttgctgtttttttttttaagcaacttccagaacattattgaggttaatagaaactcaaactagtgtg

SEQ ID NO: 470272 - DNA, 746 bp, Homo sapiens
cccatatgatccagcaattctacacagcagcagtactcatcatagctcaaagataggcaatgtgccgacatggtaacaaggctggagggaggcgcacgtcacatgtgtgcgtcaacatccgggcatcagacttacacactacagagtatcagttatggaaaatcccaataaactgccacctcttccagcgatacactctgggatacgtgaaacactcaaattcttggggatctaaggaactccttcctgtgtgttatgtcggtgaactcgtacccatggtgggcttatgggaattaaaaggaagctcccagtatgtctacccctgtgcagtaacaggttataaaagtcagccaggggcatctattgctacgaccaactctgtaacttttgagaacacattttcacctcttgtagcctattttcttcctcataaagctgttaatgaatctataatcatactgatcagtatgcacactcaccaattgggaactgacaggtcttaagaatcttaatcttttataattgagaatcttaatatatatgtaatattcctgaagaatttcagaaatttcagtttatttaactataataatgctgggatcttagtagatgccaataaaaatttttaatcatcccaagctgaaagtctacacccattaaacattaactccccttcccccttcccccacataccctgataaccattccactttctgtttctatgaatgttactactttaaatacct

SEQ ID NO: 470273 - DNA, 1273 bp, Homo sapiens
gaccaaaaacgtctcaagacattgccaaatgtcccctgtggggtggagggcaaaatggcccctagtggagaaccactggggtaaactaaatctgcaatttgggcagggcttagtagggacagctgtctctcttccacttgacatcaactggggcagcttaaggcctaggggctggaatcatgagaaggctccctcactcccgtgtctggtggctgatgctggctggaccctagctggagctgtcagctggaccacctccatgtgtcctctctacatggctctatacttcctcacaattgatggctggactccaaagggaaacattcagaaccttgaccttccattttcctccctttcctggttgttctgcctgtgccctcctggcacatcagcagtcactgcaggcacatcgacaaaagacaccccaccgccacctgccttgattcacaaggagcacaacctcgtctgaaggactccaatccacagagttaggaaccctcatgggaccctgctcatcctgagcccccaactagcatgtgagttccctggggctctttatggcacttccctcaagtggttccatctacttaatgagcctcatgtcaccttatgaaccactgcctttaatataccctaccctacacacacacacacaaactccatatcttccatctctccctacccctaccacaacccctttccttccttgcagaattctgctgataatttactagatgccatccttggggcttggctcaattcaatccacatgaagttcacaaacatgtattaagacaatctatttttgaggtatagaaggtaccccaggtgactaacacaaagttcttgtagccaaggagctcagagaacctgaagataccttcactgtccttcacagttatctcaaccttcagcattcccccagagaaatgctgccctctaggaagttctctccaaggaatcccacccctgtcctgagtatttctttaatctacaactttcctgaggctgtgtattgcacagggggcgtgccaatgggttctgcacttgtgtccaacacccttggtaaatcgacctttccagaggactttggagcccttcgaggattctcagcatctgcatctcccaggagctcccagcatgcagttggcacttgatgactgtttgtagctaaggtacttaggctgattttatttaatctttagtatcaggctgatattttaaaaattccaatttaaataaaacagttttaattctagtttttcattttatg

SEQ ID NO: 470274 - DNA, 637 bp, Homo sapiens
ttgtttgaaagtgtgtggcacttccccccttgctcactctctcctgctccaccgtggtaagacgtgcttccttccccttccgccatgattgcctctgttctgttccattggtctatgtatctgttttggtaccagtaccacgctgtttttgttactacgacttatgtctatggccataccaccgtgaacatgccagatctcatcttcgatcatatttttaattctgaacagatggaagtatgtgggcctgaagaggtggatacaccagagttgggtgtgaggctgagaagtggggtctcttacctaaaaccatcctgtctaaatcagcccaattctacagtgccatcatattataacgcaggtcctggaattgggggtcatgtcgagttagaggtcattcttgaagatagttgcagagctgaactgtcagtgctcttatccaaagcccagtcatccctctttacttgtgctacatcctattcctgctgcttatgcaagaattctgctccacgaatctcttctattggacaattcctataaatgtgctattgttttttctcatcttaagaaaaccttctctggacctcacttcccctcccctgtttcattgttccccttgtcaaaaaattccttatac

SEQ ID NO: 470275 - DNA, 676 bp, Homo sapiens
tcaagtcgtttccttcattagtcccaatgttaggacccagtggcagcaggttgagtctgcctgaattggtgggagagtttctggaggcaggggcagctgaaatttctgtggtttcattgactcagtataccagcctgctggttctggggagtccaggcagtccagaaaaggagggtcctcccccaacacagaacacctgctttgccagatttggcccagacttatttttaaagtgggtccccagacaattcctcctcactgggtggggcctccctgcagggggccttcagtcactccggccaggcttacatggacagaacttgccctgggaagcagctcctgggggagggatggctgccatctctgtggttcagttgactcgactgttccagccttctggctctggagaatctgggctgtccagacaaggaagggttcccccaaatgcagcacacatgttctaccaaaaaacagccagacagcttctgtaagtgggtccctgatcccgttccttcagactgggtgacatatcccaacaggggtgtttccagacaccacccaaaggagtgttcagaccagcaacaggtcagtatccactggaacagagcttccagaggaaggagtagactgtcatctttgctgtttcacagccttcactggtgatacctccaggtac

SEQ ID NO: 470276 - DNA, 954 bp, Homo sapiens
caaattcacaacagaaactttgtaggtatgttattttctggggaacacgattataaagcttgggaccttcgtaaaagtgaactttataagccagaacgaacttaccacccccctactgtgaaatttggaaattcaactacattccaggatgactttgttcctcaggagataaagcctaggcaaagctttaaacccttctctgtggtcaaacgttctacagccccttttaatggtattacaagtaatcgccttgattatatacctcatcagcttgaactcaagtttgaaaggccaaaagaagtttacaaaccaactgaccaacgctttgaggatttcacaactcaccgagtgacccagaatgctcggtttgaaggaagcactgaattccgtgaaagttttcaaccatgggaaatcccacgaccggaggtcaagaaagtaccagagtatgtgcctcctacaggtagcatgctgttaaacagcacaagccatcttgactatgttccgtatcaggccaaccgtgttgttcccatcaggccagtttctcgtagaagaagtaacagttttcctttccaaggaaaaagcaccatgaaagattttccagcatgggaaagttgtcgtcaaggacttattaagaagcagcagcagattcccaacccatctggaaaatttgatgaggaagaaccagccccagcagggggcataatcacctggttcacctcttccggtgtgaagataagtgataaggtaaagaatgatgccagacatcagtcacattgtattaaggcccatcctgataacctcaccttaacttgatcttttgcaatgaccccattttccaataagattatattcataggtagtgagggttagaatttcatttttggaggagacacaattcaaccagaaaagacagtgaagaagcacatgaaaagatgcttaacatcaatagtcatt

SEQ ID NO: 470277 - DNA, 1329 bp, Homo sapiens
tagccagacagtgtccacctggatctttttaaataaaaatgatacttacacggcgtgtgctacaacaaggaggacctgtaactggggtcccccaagaaatcaaatcagagatgaagacaaaacttggtgagcagggtccgcagatcctcagtgtccagagagtctacattcagacaagggaagagaagcgtattaacctgaccattggtagcagagcctatttgctgcccaacacatccgtgattattaagtgccccgtgcgacgattccagaaatctctgatccagtgggagaaggatggccgttgcctgcagaactccaaacggcttggcatcaccaagtcaggctcactaaaaatccatggtcttgctgcccccgacatcggcgtgtaccggtgcattgcaggctctgcacaggaaacagttgtgctcaagctcattggtactgacaaccggctcatcgcacgcccagccctcagggagcctatgagggaatatcctgggatggaccacagcgaagccaatagtttgggagtcacatggcacaaaatgaggcaaatgtggaataacaaaaatgacctttatctggatgatgaccacattagtaaccagcctttcttgagagctctgttaggccactgcagcaattctgcaggaagcaccaactcctgggagttgaagaataagcagtttgaagcagcagttaaacaaggagcatatagcatggatacagcccagtttgatgagctgataagaaacatgagtcagctcatggaaaccggagaggtcagcgatgatcttgcgtcccagctgatatatcagctggtggccgaattagccaaggcacagccaacacacatgcagtggcggggcatccaggaagagacacctcctgctgctcagctcagaggggaaacagggagtgtgtcccaaagctcgcatgcaaaaaactcaggcaagctgacattcaagccgaaaggacctgttctcatgaggcaaagccaacctccctcaatttcatttaataaaacaataaattccaggattggaaatacagtatacattacaaaaaggacagaggtcatcaatatactgtgtgaccttattacccccagtgaggccacatatacatggaccaaggatggaaccttgttacagccctcagtaaaagatcgttaagagacacaaataacacagcagatgtgaaactgttttgcatatcacaaggtactttcaaaatgcaagttttacttttatcatgtcctttgtgcattgagcctcgtatgtgaaacatcagaaaaaacttagattgaaatgagtttatttaagt

SEQ ID NO: 470278 - DNA, 598 bp, Homo sapiens
attggttttgaaatgtgaaatgcacatgagatttgcgagaggggatgaaatgatatggtggcatgtgggctcttgggggccctgctcagctacctgtggagttggaattcagacccgagatgtgtactgcctgcacccaggggagacccctgcccctcctgaggagtgccgagatgaaaagccccatgctttacaagcatgcaatcagtttgactgccctcctggctggcacattgaagaatggcagcagtgttccaggacttgtggcgggggaactcagaacagaagagtcacctgtcggcagctgctaacggatggcagctttttgaatctctcagatgaattgtgccaaggacccaaggcatcgtctcacaagtcctgtgccaggacagactgtcctccacatttagctgtgggagactggtcgaagcttctaaatatttccacaagatcaggctggaactactatggagcgagatggtgagagatttcatcacactactcagaacgtcatgcaaactaaaacttacaaattgtttatttctggaatgttctatttaatatttttggaccacagttaactgtggaaagcgaaacc

SEQ ID NO: 470279 - DNA, 1118 bp, Homo sapiens
ggaggtggagccaagatggccgaataggaatagctccagtctacagctcccagcatgagtgacgtagaagacgggtgatttctgcatttccaactgaggtaccgggttcctctctctggggagtgtcggagagtgggtgcaggacagtaggtgcagcacactgagcctgagccaaagcagggcaaggcatcgcgtcacccgggaagcgcaatgggtcagggaattccctttcctagtcaaagaaaggggtgacagacggcacctggaaaatcgggtcactcccaccctaatactgtgcttttccaatggtcttagcaaatggcacaccaggagattatatcccacgtctggctcagagggtcctatgcccacggagccttgctcattgctagcacagcagtctgagatcaaactgcaaggtggcagcgaggctgggggaggggcacccaccattgctgaggcttgcctctgtagactccacctactccacctaggggtgcctgcctgcctctgtagactccacttctgggggcagggcacagccaaacaaaaggcagcagaatcctctgcagacttaaatgtccctgtctgacagctttgaagagagtagtggttctcccagcacgcagcttgagatctgagaatggacagactgcctcctcaagaacacagctcctcaccagcaacggaacaaagctggatggagaatgactttgacgagttgagagaagaaggcttcagacaatcaaactactccgagctaaaggaggaagtccgaacccatggcaaagaagttaaaaaccttgaaaacaaattagacgaatggctaactagaataaccaatgcagagaagtccttaaagaacctgatggagctgaaaaccaaggcacgagaacgtgacgaatgcacaagcctcagtagccaattcgatcaactggaagaaaggaaactctacaagccagaagagagtgggggccaatattcaaaattcttaaagaaaagaattttcaacctagaatttcatatccagccaaactaagcttcataagtgaaggagaaataaaatcctttacagataagcaaatgctgagagattttgtcaccaccaggcctgccct

SEQ ID NO: 470280 - DNA, 595 bp, Homo sapiens
acagactaaaaatagcagaagaagaggacgcaacaaaaggatgcgtgattcagagaagcaacgtaagacagaggaacgcggacaaaggacaccagtgaaacaaataaatggtgctcctttaattcaggtgtcaactctgcagggcaaagtccaggagacagtgtctcagccacacccaggtccctgggaaagtgacaaatcacccttagcttatgccacagacaaagacagtgagccattggttgagagcaggacttgccatactggccagccagcggagacaattcaggcaaagaaaagagactgtgcaatggagcagacacaaaaacgccagctgcggtttctcttcaacagaatgaatattcacggaggttctccaaagggcaagaaggtgttctgggagcagcatgacattgcaaagatgcaaagtctcatttttgccctgacaaaggtgcaatggaaaacaactttcatccataatggcctcagtttccctttactctctcattcagccaacctgcaaggcatcgtcagaataacttttcctatttcctaacccccatatcactcataactccattctgagaagtttttc

SEQ ID NO: 470281 - DNA, 565 bp, Homo sapiens
agacatccctaggaaacagctctgattctagggctatcatatggtattgggaataatttcacgttctttcagaaatgcagagccatcattacctagggttgacattaccaccaagcagttccagagctggatctgtgccctggtccagaaggggagccaggccaccatgccgagcaccttagttacagtcagtgttggaggggaaaagcccacagaacaagtagatcctgaaaatccactaatcacttggaatgaaatggacaggcgcaaggatcacggctgttccccaggtgaggagacccatgaggaggacatccgagtcctgccctctgacctcaatcctgccactgaagaccctgaaggaggattttcccttggaccagtgtggaaggcagtgctgcgtgctggccccaagctgggttccacttttgcctatgcccgctgatcttgaaaaacattctgggctttgctggcccgaggtattcactctctaaactaacatggttgggtgagagctgctcccacgttgcttgtagcgtctgtgctgtgacttgcatgctcttcc

SEQ ID NO: 470282 - DNA, 1611 bp, Homo sapiens
tgggaggtggaggacagagccgaggctggggcctggggacaagccactcctgctgtgacatgtccttggcatgtaccagctggcagtctcctcccaggtgtgtctccaggcccctgtgctgtgctggtccttgcaggggcctctccctgagcagtggcctctgcctttccggagatccagcagaggggacaggctctggctctgcccacgggcctggttccggttctcccctcctccaccatcccccgtggctgtccaggctatgcttctccaccagggcccaagggagagaaaggacgcaggtggcagcagccctccctggcgggtggctcgtggtgtgggatggctgtggcaccaggaggacagcgtattcacttatactccctgtctgatgagcctcctgtccaagcctgtgattcccaatgcccgaacttcccgatccatctcctgtttgcgcttgtggttttctgtgaagacggagccatcgcatttgaggggcaggaagcagcagcaacacccatgtccccagcagtgcccagcagtcggtgacggggctctttgtgcccccaagagtgaggtggtcccagcctggcctccaccggcaggaactggaatggaccagagccaccatgtgtgggaggtgggggtctctagcctggattctctccagcatgtgtgggaggaagagaccttcacggtcacctttcttcagacttaaagagcagggcctttctcttcctttcactggagcggaacatcaacccgtgccttcatcatgttaataaattagcgccaaagaggaggacgatggatatttacatctttatatcaatcatgtgaccttttcagaatcagttttctcagcaagaatccatcccaaagacccagcatgtgcattgcgatgccaaatctgagctcgttttctttggaaaacaagtttcactaagtctgtcagagactccccatgcagaggtccctcgttactcctgccacgcctgagcctctggggcctaggatccagccatgagcatggctgactttggggagagttgttaatgcagccatcattgccagtttgtggcaaccagttgaatactgggcctgtaacttaaaacgcttcatacctgagttttaccacttttatgtaattggcagttctcaataatttgaatgtattaagtattcaataaaggagaaataaatgaaaatgagacattatgcattttaagattggaaactggtaatccaagatttactttatgagaaacaaaatgtttatggaagtgacagtcaccttgggcctccgatgagcccaaggagaatccccatactgcgggtcattatcttagggattttcttctgttcatggaatgtttggcacacctgaaagcaacagtttctgtgaaaatttttttgacttgtgtgaattccttgggggcatcaaatttgagtgaaataatacaccaggtccagtctacaagacagtgctctgttgctctgatgacgctgaagtcggcacccaagctgcatgcaacgggatagagaaggacctcctgagaacgctggcatttgctgccctgcggccactgcccttggcacccaaagacactg

SEQ ID NO: 470283 - DNA, 560 bp, Homo sapiens
agtgggttttctgtccctgacaatgtatgcgatcctgttgggtgctgagttggaagaaaagacacatgactgtgaatattcctcagcatggcccccaggagcccggaggctgcaggcgcagcggccctgccacggaccagtcctgctgaacatgggctgcaaagaggtagagagggcaggacgggggaagaggaagaaggaagagcagatggaaccagcagctgccatgttctgcatccacagctacaccgctgcccaccctcatctgtctaatacctacccacccgtgctgttcagacaaggaaaccgctacctcggtggagtaacttaccaagatccattgcacagagagcagcactgggctcaatgtaggcaggtctatttccatgccccatccatgatattccacctgcagggagaacgaggatggagcttgcttaaatttgtcatgaaatggacagtttaagtgaaaccatttgactgtttttgctgcataagccttagtgtttcttttcagtctgcaagatgagcaccattggagaaaaaataacttccagaca

SEQ ID NO: 470284 - DNA, 550 bp, Homo sapiens
cttcctctgtggtggcggcgatggtggctgcagtggcggcggtgatggtggttaataggcatgccagttgcaatgatatgcagagagagcaatggagagctcagagaaatatggaagggcagcccctgcagtcatgccccctcctgggtatgatgctcctgaagcacgaggggctgctgccgatggccccagagccttgggcacatgggaggtcacggtggcaattggagagaagacctcctccccggatccgaggacctcagtggaaagaggccacctccttcctgccctgcaggcctgaaggtgtggaccttcaggttgaagcccctcaagcccagaggcccgggaatggtgcaaggtgctcagccgagaactgttccccctgggaggactgtgcaggtgtccaccaggtggagtcatgtccctgtgaagaagcgggccctttataagtgggcagtgtttctatggtggtagatcccttgccaggtgggttcttgtccctataaaggtggtgaagatgagggcccttgctgggtggggtcgtgtgcct

SEQ ID NO: 470285 - DNA, 860 bp, Homo sapiens
ctcttcctggagggaggtgcctctgtggactgacggaagcatccctgtgcactcgctgcttctaccctgtcctgcttctgtaaccacccaatgggttcacttttcctgctgcctaatgatggcaacggtttactgctacttgaattaagcatctgcccactgtggataaagacacaccacatccactttctatcagcttccatgggctggaagagtggagttgggctgtgttcttggtggggctggcttgctgagcaccatgcctcagccctcggctgcagagatggcagcagccattgtggccctgtggctcctgaggactcatttaccctcaaggattctcttcactgcccacactggggacagctgtggctaaacccaccaaagtcagttcaggtgaaggctctagaggacgaagaggccaatgtggataatgtcatttctaatgttcctactacttccaacatccaatgtgatgtgagaacatggcatatgtttaatggctacattccattaaaggtaacagaaggtaataaaagttgaaggaaacatgtactgttttatccctgtggctgaatattttttccttgtactcagttactcttgtcacatgaatggtccatcatgtctgtgataatatttgtgggtttaaaagcgctctcagtgaggtcagagcaagaagcagaagcagtgcattggcacagaacccttaaaaggaaaatacaaaagaaacattccctttgtatcttggtgttttactagtgagttatttcccctaagtacttccagtagatgtaactgtaactctgccatacagtccagcagttaatataagcttatctttttcaatgcacagggat

SEQ ID NO: 470286 - DNA, 688 bp, Homo sapiens
cagtaaaataaagggataaagcatgaagtcactggtttgggtggtcagagaatgcatctttgaaagggagacatttgagctcatacctgcatattgtgacacagcccccgttaaatgtatggggataaaacttttcaagaaaagggaacagcagcaagtatttgagccctttgctaggtaccaagaagaggaggaaagctggtgctggtgttgctacccaaacaactttagatgtgaaaggaaagaagtgatagattttaggattacaccttcaagaacagaaattcttctgaagattactgggcgccttcatgaccacctccttttccgagtgtttgaaggcttaaaagcctcagtaactgtctacagatttgacttacagatgaaatttagttctttactggggagctatgactatttgatttacctgacatggaaattgactctagatagaggtgtctattttatctaatataaaactgtaacgtttcaggaagttagatgattattttctcctttatctctggagaaggtgctgtctctgtgccaaggataagcctgaagtataagcataagttcttctcagtacttttctgagcctacatctttccctaggtatgcatggtcatttttattgttttccagtagatgcaactactttcgactatcctagtctttaatgtctctc

SEQ ID NO: 470287 - DNA, 718 bp, Homo sapiens
ctgtgggcacagcttcagcagacttaaacattactgcctgccggctcttaagagagcagcggatctcccagcacagcgcttgagctctgctaagggacagactgcctcctcaattgggtccctgaccactttgcctcctgactgggagatacctcccagcaaggggcgacagacaccttatgcaacaggagagctccggctggcatctgatgggtgcccgtctgggacgaagcttccagaggaaggcaaacagggtctggagaggacctccagcagacctgcaccggaggggcctgactgttagaaggaaaactaacaaacagaaaggaatggcatcaacatcaacaaaaaaggacatccatgcaaaaaccccatctgaagagcactggcgtcaaagaccaaaggtagcaagggaacaaaactggatggagaatgagtttgacaaattgacagaagtaggcttcagaaggtggataataacgaactcctccaagctaaaggagcatgttctaacccaatgcaaggaagctaagaaccttgaaaaaaggttagaggaattgctagccagaataaccagtttagagaagaacataaatgacctgatggagctgaaaaacagcatgagaacttcgtgaagcatacacaagtatcaatagtcaaatctatcaagcagaagaaaggatatcagagattgaagatcaacttaatgaaataaagc

SEQ ID NO: 470288 - DNA, 848 bp, Homo sapiens
ggactgtcaaaatctacacaagatggtctctcttccttccctgccattaggcagaagaggcacaggagcctcaccctgtggccatcaccaccacaggcccacgaggagtactgccagactactgcgggtattctcttatggtacaagggctcttcagtcatcttgtggtgaaaactacctggcctggggctcatcattcagagcagaggtagaataccctcagccccaacctttcaagttgaaaggatcctctcttcacttcctggttgataaaggagcaaatagaattggttattcctatccaggacttggagccatcaaggagaaaaaatatcaaccccccaggcacaggaatggtggtgctgacagccatgcagaaacagtgtctattgcacagtgtgtacagcaccagcagcagtgccctgtccagtctcactgtgatatcactgtggctatgacttcctgcccagccttccttagagtctgcccatattccgagtttagtagtttaaccttcataccttctgtaagctacttgataaaccaccactaccaccaccaccaccaccaccaccaccaccaacaaaacctttctgcttaagttagctagaattgcttcatatgccttggagccaaaaatattgactgatacacacagaactcaggattataactcaagacattctttaccaggtaatgtactaatgaggagacggacatacagggagaaaacaaactaatgctagattcattactactgcctagaactgggatttatattaaattaccaactaacataaaataagtctatatagtgtggtagctcatgtttccaaatagggctgcaa

SEQ ID NO: 470289 - DNA, 593 bp, Homo sapiens
atctgctcgagaatcaacagcttagttatgggttcaggaaaagtaaaagaatccctggagggaaaggagataggttgttcccactgggtgtttttgaaagataattttgctggatatagaatcctaggtggacatttttgtttccttcacaacttaattatcacttcattgtctttcacttctatagtttctgatgagaagtttgctatcgtttttatctttgttcttctaactttcagcttttttttccctgacagcttcctcccccaaccccctgactttattgatgacttgcagcaatttgattatgatgtgtcttcctgtgattttcttcataattcatctgcatgggatttgttgagattctgggaactgcgggtttatcactttcatcaaatttggctattctccaaatttatttttctgttcatcctaccccttatcttggattcctactacatggtagtcacagcagcatttaatgggataatttatctccactactgaggcattacctttctgaggacattgctcactgcctcttggattaggtttttatattctgactgctgattggaacatgaactatttat

SEQ ID NO: 470290 - DNA, 492 bp, Homo sapiens
tggatgacatattgagatgccaaaaacacatcttcctgcagtttacacaggtgtctggctccttggaccagtgtggtctgtttcccccagtcctcgcaggcgcctctggcatgcatcgcctcctccagcccatgcattttgtgtctgtcttccctctatcccacaggacaggaatgccaaaggctgggccagacagattatttggagtcctgataatgggtgtacccatggggagaaacctagaagagtccatggcactttccactataggggcaggcagaggaaacctaaaggagttagagaaggaagatctctcaatggaaatgctaagaagagacacaaggaaagacacatcactaaggagagacccaaggaaaatggctctatgactacagtccatttaaagaatgagggcgttccttctaccaaggagcaataggctataccgtatggcctaggtgtgtaataggcaacactaaatttgtgattgct

SEQ ID NO: 470291 - DNA, 582 bp, Homo sapiens
agttccctggagaagccagctgctttctgcctcagagactatgcccttttctttggaactttccttctcatcctgtgaatggctggctcagccgctcagccccgcaatgggaacacaaggtgagacatacatgcgtgcaaacactggagagcaagtgaagacagacacaatcagagaaatgacaaagctagcttatgacaaaaacagtcaagaactttcctcgcttcctctccttcttccccctgtttgggccctacatagcaatctgaaagagaaggagaaatactacacagccagactaataaaaaagcagaagatccaaataaacacaatcagaaatgacaaaggggacactaccacggacccgaaagaaatacaaaaacccctcagagactactgtgaacagctgtatgcacacaagctagaaaacctaaaagaaatggataaattcctgcaaacatacagtcttccaagactgaaccacaaagaaattgaatcctcaaacagaccaataatgagttctaaaactgaaccagtaataaaaagcctaccaaccagtggttcaggcctccaatcctagca

SEQ ID NO: 470292 - DNA, 706 bp, Homo sapiens
gaaaggttcctggaacgcaagttaaggaaaaaagaaccacagcaacatttcaggaaagaaagtagttaatgggatcaaatgttgagacaggtcaaataagatcaggactaacaattactagtggatttggctacaaggaagtcattggagtggactcaaaaggaacaagaggaagtaaattggaaatagaccttcgatgtaggatctgggtatcactgctggttattcagggcccaagggcttttcatttagcaggtgatgaatgctgccaggattgggtcctttccttcaagagcctccttcagcaatatgaaattaaaaccagatggtttaaactcaaacaatacactagtagaactgactgtgtctggcaatggagatgctgtaaacgtcaagccaaatcagaagttggtggtggaaatagaaacatcctgagtattttcagaaagcacacatcacaatcagtaacaataagaacaataaaacagccatgtcattaattgagcatgtgctaagcaatcacattgtttcattattttatttaatcctcacaataatcacgtgtgaagtaggtgccatttttctcatttttgtaaatacaaaagttaaagcattgtaagccaccatgcccagtcaaattatttaatatgcttttaaaattattttcaaaggatattaaattatttaaaagcatattaaataattt

SEQ ID NO: 470293 - DNA, 548 bp, Homo sapiens
tgcccagcagctcactgagaacgggccatgatgacaatggcggttttgtggagtagaaaggggggaaaggtggggaaaggattgagaaatcggatggttgccatgtctgtgcggagagagagagcatgtggggatcaacccggagaatccagtccaacccaagatcaaggggctggctccaagccaagaacaggaaaagcagccaggagagtgaaagaaggaaaggaggaaagactggcccaaagtcagagagttagagagcttattgtatacaagatcaggtgcctgaagggctctcatattgggctccagccacacagagagtctggagactactggagcttttccatgtgtccctgtgaggatcacagcattgccatccctccgcaggcttcctctgcagtctgtgcctctgacctctgtgctcatctgtttcccatgattcctactgggccccagggtggagcagtataacatagtaccgcataattcactttcctagagcatccttcatgcaagctatcacagggagctaatcaaacgctgac

SEQ ID NO: 470294 - DNA, 1811 bp, Homo sapiens
cgttggcatgctagctttatctgttcgggcaatacgatgcccattgtacttgttgactggtctgatattcagcaatgttcaaagaaagctcatgaccaatttctagccgaccttgcgagcattctaccgagtaacaccacaccgctcattgtcagtgatgctggctttaaagtgccatggtataaatccgttgagaagctgggttggtactggttaagtcgagtaagaggaaaagtacaatatgcagacctaggagcggaaaactggaaacctatcagcaacttacatgatatgtcatctagtcactcaaagactttaggctataagaggctgactaaaagcaatccaatctcatgccaaattctattgtataaatctcgctctaaaggccgaaaaaatcagcgctcgacacggactcattgtcaccacccgtcacctaaaatctactcagcgtcggcaaaggagccatgggttctagcaactaacttacctgttgaaattcgaacacccaaacaacttgttaatatctattcgaagcgaatgcagattgaagaaaccttccgagacttgaaaagtcctgcctacggactaggcctacgccatagccgaacgagcagctcagagcgttttgatatcatgctgctaatcgccctgatgcttcaactaacatgttggcttgcgggcgttcatgctcagaaacaaggttgggacaagcacttccaggctaacacagtcagaaatcgaaacgtactctcaacagttcgcttaggcatggaagttttgcggcattctggctacacaataacaagggaagacttactcgtggctgcaaccctactagctcaaaatttattcacacatggttacgctttggggaaattatgaggggatctctcagtgattagggtcattctctaagacaaatttacttttctgcacactctaaatctgtttagtcactttaaaggtgtcaattattggaacaggctaagactatgaatttcttagtaatagctttaataacattttgaaatgaaaagcagataccttgaagtcagcctactttgaaaggacatatgagcagctctggttttaatttgtgtagcattctacatctggaatcccttataattaaaactaaaaactgaactactacttccacctgtcaaatgatgaaaagatgaatgcactaataagttactaaatagcccaacatgatagagtttacattctcattctatacagtaaaacagaattttggacaggaggctaaaggtctttggtcattactaataacactctttcagtattaacctgtatgtcctgctgcaactactgacggggtcttttttacattaagagctaattttggctaagtctttgttttaaaagcaaatatagattttggaaagaatatgtaaagcacataaactgagacgtacttttcatcccacactttgttttcatcgttttcaaaacccttctaatggcttccaataacaattgcatagagttgttaagtgcagtatttacaaatatttaccaagcacccacagtatgcaagcatgtgtttagcactgcggatacagttctgatcacgataaatctttgtaggtaatttaaagttgggaaaatttgtaattttttcccattccttcagaataacaaaaatcacatttttgcctagattctgataagaaaaaagagttttctaaagcttttgctttcactccaattaaaacaacaatggtcattaaaatgctctcagactgtcactggtgatcagaaggttaattattttaaaatgtaaa

SEQ ID NO: 470295 - DNA, 1007 bp, Homo sapiens
tttggcttcccctcatgatactctctcagagggtttgagttcaagacatcgggaaagagaatgagtagaagaacagcagcagaatggaagacagacacaggaaaaacgagcagaaagcacaagggaaagagagtagagggatttctcactgatgccagagtgagaaagtggatccaggtgatgagagaagcagccgagatcagcagaatcatctgggtgagcagctcccactgccggcctaggatcagggaccctgatggaggcagagcacagcaagtggcagggaaggtgaagagcatctcagtcccactggaagctgtggtacttgtccaggaactccaaaagcaggactgcaaggagcccaagcaacacacagcacacacacatttccaacgctccagccctggaaaatgtcactcacttcagagtcctggccccaggattgagttgaatctcaggccaagacgaagcaagcaatttagactgaagaatttgttctctaaggcctcactactgagagtgagggctacgggcccgcagtatgggcatcactggatgcctgttggaagtgcaggatctcagccccgcccaagacctagtgaatctgcatctggattttacaagactcacaggtgatacacatggacttacacttctaagatgctctgctcttatgagtcctggagggctttggaacaaaggatggtggtaggggagaaaagaagggccagacagtccctgattttaccctctgtccaaacctgactggccagtatatttttcagccttgtgtttaatgatctcaggatgtatccatctctgcactgtggggttggtatttttgaatgcccatttaacaataaaagcaggaattattttttttccttatgaattgctttattgaacctcctatatgtgtctcatcttttcttcttggctgcattgtgtgtttttatgtgtggaaaaaagcagggcttaaatgtcagaaggaagggatcagattccct

SEQ ID NO: 470296 - DNA, 684 bp, Homo sapiens
acacatactattagtttcttatttttccttctagagatatttatgcatagatacacaaataagtatatatcctccctcttcccgatttctacacagctgtcagcatattggacccactgtgctcattgcacttattttaaaaaacggattattgaaacccagaagtatgggaactgctgctttttaaaactggcatgtggtcctgttatttcttcctattttgatggctacacttactcaaggtcattgtgggctcatttggaccctgagtatctccagaagggtcagattggaagccaactgcatgctggtttcttcaccactcagagttttaggaaaccaggctcctgtttggacatctcgcccttgtctgaaaccactcacacgtgctatatttcacatttgggtattcagactgacactgagagaagaaaatacttggaatccaatagcattgccaattgtgagaagttagttgtggccttttgtgtcaaaattatgtgcctgtgtaagccctgggtactatggtgatgggtcctgtgtaaacaccaagacaaataacgctttacattagtctgccacctgtgcctgtcaggttacccaatcgccagttcataagctgacttctccttgaatgaatgtagcagacagtataattagttgtttcccctttgagcattggga

SEQ ID NO: 470297 - DNA, 961 bp, Homo sapiens
atgccacatactcagaagagaagcctttcccaggattctcttttttttttttttttttttgagaaaaggttatgaaggcttgccaaactcatagcgtcttctgaggaaaaccgaccatgcaaccatcctgtgacagctgattggacccaggctatgcctgggcctgccaatcaagccaccagctcccccaggagcaaggacacagcagcagtggtggaggccacctccgtgatgctctgcctcagcagatgcatctgccatacaacaccccagagccgaacacacagatcctttgtctcttggggagtttgactggggcggtacgctgtggccccaatagccagaagccattaccactcaggcctaaaagtattaaagagaatttatattccaagaaaggcaatgaggcaggaggactaaaatggactgtgagtgaagggaaagcagcgccggcccatgaaagcagccgggagggtgctgtatcctgcaaggccacaggggtggagctgcccaagaccatgggagcccaccctttgcatcgtcctgacctggatgtgagacatggagtcaaaggagactattttggagctttaagattgaatgactgccctgttggattttgggcttgcacagaacctgtggcccctttgttttggccaatttctcccttttggaataagagcatttactcaatgcctgtacccccattgtaacttggcaaacaagttagaaattgttcaccccagacattaggcaatgacaattttccgaggtaaattaggatgactaacatccttgaataacaggcttaaaaaaacagtctaagatcggaaaatatgatgggtgggtaaagtatcaccttaatgttgagggatctgacatattaccagaaatcaatactggatttaaaaaagcaacatctggctgggcatggtgctcccacgtgtaatcccaacatttc

SEQ ID NO: 470298 - DNA, 580 bp, Homo sapiens
acctggagaggtttgcattgccacccagagtatgccagcgtctcagaagatggaacacggagcaaggccagcagaaatgattttgagcacaggttttgctatgaaattaacccaaaaacctactgtcataagtcaaatgctttcacttatctgtgtccttgctgacccattagcacagctagtgggcaatctcctagcactgcccagctttgatgttgaatcacatcaggacggaaacatatcctctcttccatcttgcacctgctcctttagtaatgttcccacattggctgacctgggaggtctgatttggaatgtcaatttcagggagcccagtgctcaacagcaggcctgctctgtgctctctgctccctacttttgcataacggcaccaaattgcctaaaatatccacaatggagatttgtcctaagaagtgaggactggtcagctgtatgactatctggctaggttggtgtttaaactgtgataatcatggaaagacactttgtcccaagtctacagcactaagaggatgaagcatattcacttgcttattgattggtttttattatttaatga

SEQ ID NO: 470299 - DNA, 799 bp, Homo sapiens
gcagcaacatttgctgttctgcaatatttgctgttctgcagcctccgctggtgataccccagcagacagggtctggagtggacctccagcaaattccagcagacctgcagctgagggtcctgactgttagaaggaaaactaacaaagagcaaggacatccacaccaaaaccccatctgtacgtcaccatcatcaaagaccaaagcctccaaaggaaggcagctcctcgccagcaatggaacaaagctggatggagaatgactttgacgagctaaaggaggatgttcaaacccatcacaaagaagctaaaaaccttgaaaaaagattagatgaatggctaactagaataaacagcatagagaacaccttaaaggacctgatggagctgaaaaccagggcacgagaactacgtgacgcatgcagaagcttcagtagccaattcgatcaagtggaagaaagagtatcagtgattgaagatcaaatgaatgaaatgaagaaagaagagaagtttagagaaaaaagagtaaaaagaaatgaacaaagcctccaagaaatatgggactatgtgaaaagaccaaatctgcatctgattggtgtacctgaaagtgacggggagaatggcatcaagttggaaaacactctttaggatattatccaggagaacttccccaacctagcaaggcaggccaacattcaaattcaggatatacagataataccacaaagatactcctcgagaaaagcaactccaagatataattgtcagattcaccaaagttgaaatgaaggaaaaaaatatt

SEQ ID NO: 470300 - DNA, 1087 bp, Homo sapiens
tgctgttttggtccttcttggtggagggtctggtgcctgtctgtatataatcatgtgctcccatcgggtgactttgacaacttcccactccattagcccaccccctagtctaagctaccaccatctctcacctggactgcaacagcttcccacctgttctacccaaatccactctcttccctgtagcaagacatgttcccatgcctcctctccaccccctccctaccccacaaccaccatcgtcacagggcctttactcatggtctactgtatgcccagagactccccacctccaatccacacacatacacagccatctagttacctcctactcatccttcagacctacatcactttcccagacccaggtcatgttccttcattagaaacttgtctccagtcatgttctggacatgtgtatctcagatttgtaattacactccttcactcacttaacagctctttactaagcacctactttgtgccaggtactgtcctaggcaactgaataattagtcaagcaattgaaaaataaatgcttgagtattttctgttactctcaagtactaggaaactgaaaaaatacaatataattaccacaggtaattacattctatgaataattaattacaagttcatttctttatttatctttttaatatcattcccactctaggccctatgttcaatgagagctggaactgtgtatattctggtcgacaagtatcatcagctctcagtgtagtgctaatgcctagcaggtactaaaacatttgggaaattaatgaatatttacatttgtaaattaacaagtgaatgaataaatataatttgaatattataacctggcttacattgaacttgtgatattttaatgtttaataaatattgtgatatacaattcgaaaacaatttcatgtgtaggcggcaagacaacctttccccaacttgcccattaacctgtaaaagatgtgaatagttactcccttctcccctcacttttgagaagtggtttccgaagagctagctgaactttgctgccatcttttgaccaaagttaatactgcagagataaaagctacattcc

SEQ ID NO: 470301 - DNA, 627 bp, Homo sapiens
agatcaggttcatttccagaaccgccgctgcctgcattgaggtgatattagaagccaccatgacagcaaagtagttttatgcatagcggcttagtggacactttgagaactacaccatgggatgcaatccagagtcaaaaaggaggaaaaaagtctctttgcttagagacattactacgttgcaagatctgggtagctgaagcctttagccccagtgaggaatgtttgtggaaggaagatgttttctggctgactggcctcatcactccttctgtctccgaaaggacctgcccaagcacctttgatgaccttttgtccattgactcaggccaccgtgagctcctgctgttgctgcagcagcctcctgtgcagttggagcctgacatcccttcctcggctgtccttcctttctcctgcccccactcccaggcttctgtctccacagccctggtgcatgcacacaaaacccaggaaataaaaaagaagaatgacaaatccagttacctgtgttagatcttacctaaacacactaccactctccacctgaaaagtcccttctgcctaaacaatttgaatttggagacacaagtgtttcatacaatttcagggttcattttatttgcacat

SEQ ID NO: 470302 - DNA, 595 bp, Homo sapiens
gagctgtgatttacacccccagtaactggacaagacaggagtcccagggcagctctggagcctgaccgtcggagcagctgcgtgggtcctgctcgctctccacgggccatctaagaaactgatgtctctaggagccctggtcaactggaattggggacttggtgctgctggtttggttgagctgccgctgctaggccatctgaacccacagcaagctgatgatagactgcaggaaaagctccattcagatagcaagggtccttcaccagccccattccatgacgcactcaacgaccctgcctccaaggctttgaggaagtaccctgaagaaggaccaccctttggaatttataccagcagccctgacagctgttttgtatttatttctacggttgggccatttcaatttggggcttttattcattatataagcaaatatttgttaaaggatcaggcacgggatgagaacttggaagtctccttctccagtccggcccatgcgcctggctctgattctattttacctctagctctttctagatgtctgtgcctggaaaaagcctcatctccttaagttccatatggccccaaataa

SEQ ID NO: 470303 - DNA, 771 bp, Homo sapiens
ctactttcctcctcctccttctcctcctcctgctcctcctcccccctattttcctttcccctcttttttttcttctcttttttcttataaacgtgactgatgttctggcgtctgggagcatgtttactggctataacagtgttccagaggctgctgctgagcaactgctacaagccttgccactgagaaagcaagcaggcctttcaggccccacccttccctgcctgctgcagctcctgtgcttgtatctacttcccattctttcctgggcagaatctccccccaccccagaattctgcccagggaagactgtgtttggttccccagtgaggatgtgtgtttggaggcagaccttcccccctcacgctgtgggccctcagttttttgtctgtctcgtggagcttgcaggagcaagccacttttttcaaagggtctgtggattcttttggttttcttggtatgttcctgtggtagttcttggagcagaagttcatgatatgagcctccacacactattccatctgtctgagtgggagctacaagttagtagctgcctcctagtaaccattttccttggaaatcctcaactttcttgtatgtgcattagtcagggaattgggcagcatggcccacatattcaaaaggggtgactaaagacagtgtgatgaagggactgttcacacaggggtgggcagggttaaccactctaacaacagcaggaagccattactaattctaggcctgaagggtcagaggaaagacctctcctat

SEQ ID NO: 470304 - DNA, 664 bp, Homo sapiens
cggaatcccgccagtttggattaactcctgatgcaccacattctgccactccattatgttcaccatacactggttttgccaactttgacctctctgagccttgtttttctcatcaccactcaggacaagactccagttactgccccctctgcttttcattgttctgtagacagtgagctcctcttgagagctggatccactgctaatgcagctttactctccaagtcctacctcgacgttgcctcacccagaaagccttctcctgcttctccagagcagactcaggcatccttctgctctactagcaccctacagccatcctttgccaattacaggatgatatcacaccttggtgcttctaccccagctctttctagagcctttgcacagattgcaaggcacaatgcagtgggaactgaggagaagaagccagagggtgtttgggagcaagcatctgttgattcaacttctgccacctccagcagctacagtctgaattctcgttcttctgccctgtacccatactcttcatccagaacagtggggcttcagcgtattgtagaccttgtcatcacttaatagtagaaagcaaccttctcacctgccataatcaggctttccaattccatagacgtagatctgaaataaaaactatcactcattc

SEQ ID NO: 470305 - DNA, 1436 bp, Homo sapiens
agcagcacccatctccctgtgttgctatagtgtgcttgcatactaagggtatggagtccagctgggaggacctgcctttagccctcgccactggtgtgtattcaggcactggatgtggtaggcaggggcagggcagtctgcaggtcactggtgaaatgcttaggggttgggttgaagttgcctgtggcagctcagccttcatcctggcagtggcagcagttggcagtggtagcagcatggttgagttgcttttgcctctgggcattcctgtgttcaactggggcttttgccaaaaaagccagaacgcccttaatctcctctttcctcatgaaactcacagctttggttcgtcacagatcttgcagatcttggcggtgctctcctactccccagttttgtctcagcaccatatggcttttgacaaagtcaggccacagcttcaacctaaacagcttaacattatcgaaagcccagcccactgaggaaataacagttctcgtttatttctaaatatcaagtggactattttcacccagaaatagagtctgaaattgaattatgaaggaaggtatattcacatgtggccacttctcatctgttatctctatacatgacccagaaaatcagctccatccaatgatttccatatttaattgatcaagtcccattgattatatctctaggtgacccttatattaatctttcgtttccattaacaggacaactaccccagttctcacttatgaagaaaattaaactgaaacataggcctagagtttatgtgttcttgaacattgcaccagtggtattttgggaaattggaattggctctttcatatagtaaagctcagaaaccttcatcctccctgaatgatacctgtttatcacactgcttttggaaggagatgaaagagttgtggacttagcaaaatgtagagtcattaaggattttccagacatatttaagcatgctaatattctaagaatgatattttagcagaaacatctaatgttttgccactaggttatttacaatactagatgaagttcaaggagtctttggctttgcttttcatttccctacaaattattttccagcctctgtggattttctgaattttgtctcctagaattgaccacaagagaagactccctttcaaactcttcattctctggttcagaggtttgatgtaatggttgtctcatcgtacatggtcagccacaggatatacttcatccatttcagagctgtactgtgagttccagaataatcaatctttgaatctttgaaccagggtcttctgttgtcccatatatgtgaacattctaagagtacaattatatccagacacatttttaaaactttgatttttgtttagattacaccaatagacaaaaggctagaaaatatgatcaagaaaatgtgctaatctttt

SEQ ID NO: 470306 - DNA, 1501 bp, Homo sapiens
aatatctgaggttcgtcgtctcatggccatggaaaactaggacgcagacacaccagagtgaggttaagagtggaagtttaataagtgaaagaaagaagagctctctgtgcagaaaggggtcctggagaaaaaatgggttgccaggaaaatgtggccgtcactgccaggacagcaagtccaaaggaagctagctcattcatcaaggggactcaggcaacgctgggaagggagaagagtcttcactgtgcagatgagtcatctggactccagcaatgcagcagaaatgagagcaaagggacggtgcatgagctggagaagagtagaactgtagaactcagcaccgccaaacagctgggaagtgtcctggacgtgcatgcagaactggaaactggcctgagggagaatagttgtggcgataaagaggttgctattttggctttctcacagcaacaattcactgatggcccagagagagcatttatgtccactcccattgcagatacattccagctgttttctgctgaactgcccttattccccacccttggatagcacaaatatttctccaaggtatatcttttctccttgaaaaggagaagaaaagaagaaggaaaggaaaggtgcttttattctagttacctcccaaaaagcacatgagaaataattcaccagtcattcacatttccattttctctctttttctctccctatacctcaaagctctggaagacatgtggcaaatgtaccctgatagccatagacttgtcccatagccatttttccttgtgacacttcacaaaaatgctgcacaatagttcctgtgtgaatatgagacaatgtcaagaaaaccaagaaaaaggcagctggctccacgggtgggtctgcaatggatcccactggacagagcttttgctctatcaactatagagattgatgataccatagaaaagaagtcagttgctattattgtggttttcttgtacatgaatcacctttttctcactgttttcatgattttatctttgtctttggcctttaatagtctgtctaggatataactagcactgagaccaatgtctgttagactctgcaaacactttttaattgataacaaatgattgaaagcctgattagatcacaggccagaaaaccttttctgtaaaggtccccagtagtaaatattttaggctttgcggaccacaaaaatcccattataagtatttcacttctgctattaaagtataaatgcagccatagaaaatatgtaaatgaataagcatggctttgttccagtaagactttatttataaaagccaacatctggcctgcaggctgtagtctgcaaatacctggattaaatgaatgaaggaaacaatgataggtgattttaaaatgtttgaattaattgaaataaactctggcttgtagttcttctgtaaataatgaaaacctattttctttacctttggtctaatcaagaaaaaagtcattagcattttct

SEQ ID NO: 470307 - DNA, 963 bp, Homo sapiens
gcattctctctctcttctctctctctcttctctctctctcttctctctctcttctctctctctctctctctctctctctctctcctctctctctctctctctctctctctctctctctctctctctctaggcttatggtttggtactgtgtgctgctgaacatgctggcacagaatgttccaacgcatattcatttgtcgtacaaaagcagcccacacagactgcagcttgtctctccatcaaatgcagcactgagaagagctggagtctgcattaacatcagcctccgcatttgccagttccaattacatcgaatcgtgtgcttacaggggccctgtcaacattgcttagatttgaagatcaagtccaaggaaggtacgagtatgcagttgatccacaaggcaggccttaacttcaggcaaagtagttacccagtgttactggctgaattgaagctcccctccaaaatttgtgttaaagtcctcaccttcagtaccccagaatgtgactgtgtttttgtggaaaccggtcctttaaagagatacttaagattaaatgagatgactggggtcactgctaactagcatagctcctcatctcatggtaatcctggatatcattttgaattgcttttgaaaaatagcaactttattaagatatagttcccatcccatctaatttactcatttaaaatgtacaattcgatggcttttagtacattcacaaaactgtgccaccatcaccacaatcaattttagagcatttgcatcaactccaaaaagaatacccattagcagtcactcctcaatttccccattccccttccctccagccctagacaaccaccaatctacttctgtgtctatggatttgtctattctggacacttcatgtaaatgaaataatatgtcatttttttgtgactagcttctttcccttagcatgttttcacagtgtaccgac

SEQ ID NO: 470308 - DNA, 934 bp, Homo sapiens
aagtcacttaagcttaagtgtgtgcaacttctccaggccatggtcctgcagcatccagcagtccacagtgcccagcagcttccaccagtaccccttgagtagcttcagccaccaatgaggcacctctgcatgaagagcttctctggcacccccttgggtagttttgtagtgagttctgaagcatggcacctctctgtgggcagatggacaccgcccgcaatggatgtgtgaggttaatgactcctattgagctcagagttggctacagctgggagaaggagctgtgcttctcactctgtgagcaattctttcctcccagggagaagcaggaagagctagcaaggaagcatgcaaggtttgtcctgtcactcaaccaaactatggagaaaaaagccaccaccactgtttacataaatgagacttataccaaaataaacttgaagagagaagacatagcattgcaaaaaaaatgtattcaagaggcagaggagctaatggaaaaagaaagggcagaatatctaataagaaaacaagagttgactgcacagctgatgatcaagagaaaaaattaaagatgctgtcagcttggggaaaggaaaggactctttggaatgtctatattattctcatttcagttccgaactccctataaacaaaaatgcccatgagggacggcattagtgggacatatcataggctacaacccatctacccatgctgttagagttgttcttactcaaaggatacttgccaaacttcctaagaaaatacagggaagcctcagggcaaaaactgctacacgtgggactggaaccagaaactgaaggaggtcttccatccatccaaagcctcagtctgtgcttcattttgtggaagtgttttactcctctctttatctgcacacagtattctcttcttggtgagcacatggcaa

SEQ ID NO: 470309 - DNA, 585 bp, Homo sapiens
gcggtaatgctgttaggaacacgacatggcagacaatgtgaatgttgaatgcatcctggctcttgatctggtcgttgctaccacagagccctggattgtgtgtagaaggctaaacgtcctctgcaccttcactccccactccagtttctaccctatcaatgactcaggaataaatcctgagaactatgttggaaaccctgaaggagcaaacgctgctccttgtaaaaccagacccacagcagaagaatctgagaaatctacccaattcctgacaacatcaactcaccttgattgcaaggtgagtaaggcagtctgctgccctccaggagtttacagtacattgtcgacagctgtgatgaaagacaatgaacaaaagatacaggaaggagaaagtgctgtgagaatacaagtgagggagtgtcttttcttacttgtgggacaaggaagaatttcccagaggaactggtgttttatggatggatagaatggcaaaaggagataaggaaccctacctttcccaggcagagaacatggaatgagcaaagccatgggaagtctgactctgaagaaaaccaggactgtcac

SEQ ID NO: 470310 - DNA, 831 bp, Homo sapiens
tgggcctgaaaatagtggagaaaggtgggcgcagacggtaccgcacacactgtgagactgtgggactcttggccaccatgcgcatcttgaggatttcatacctgtccattggtatattcaaaggccaacttcaggaccattcagacttgaagtcagcacagtactgtctcttgcccaaggcccgcagttaccaccacttggctaccaccaatgttcactcaaggaccaatggctctacaatcagcaggtggcaaatccagccaggcttgtgtccttcccttcagggcagtgagttcccccagccctgggaaggtccagagatgtcatctgagagccagggcctggagttgggatccttaggaatctacccagtgctctactctactgcatataagatggctcccaagctgcaagaaaaagccctttccactcttccttcgcctttcctcaatcagaggcttggtgtcatatctaaaaaaaatgcctaatctcaccaatgtttaggatttacactaacgttttcttctaagagttttgtagttttagatctacatttaggcctttgatccattttaaattaatttgtgtatatcatgtgggtaatttgtctttctctttttgcgagttgccttttgtgttctgtgcttattgtcccaaacaagtgttatttttctcttatattttaaaggttctttgtattgaatattgtcatttatgttgcaaatatttttcatcttttattgctcagggataagaaaacctagattcttatcagaaaaattcagagacttctccaaagtcacatgcttaatatacctgttactaaagtct

SEQ ID NO: 470311 - DNA, 603 bp, Homo sapiens
cctgacactgctcatctagagagtgtagggggtttatttggaccatcagtgggagaggaaacagcccatgccaaagtacagaaacatccattcagttccagagaactatagttgtggcctgaacctagggtcctctgtggaggttgtggctgatgagcatatggttggacaagaaggatcagatacatcaaagttggagatgtttttcttagggtatcctcgtatagttggattatcattatttcctaatttaacgagtcttaccattgttgctcaagatataaaagaaatttcagggttagagccttgtttacaacttaaagaactttggattgctgagtgctgcatagaggacttaaatgtaaaacccaatataaaaaccctggaacaccacctaggcaatatcattctggacataagaacaggcaaagatttcatgacgaagacaccaaaagcaattgcaacaaaagcaaaaatggacaaatgggatctaattaaactaaagagcttctgcagagcaaaagaaactatcaacagggtaaacagacaatctacagaatgggagaaaatttttgcaaactatgctctgacaaaggtctaata

SEQ ID NO: 470312 - DNA, 812 bp, Homo sapiens
ggtagtagatcaggaattaccttcgcgatactttcattcccacctcctgggcctgggcactcagatgtgacaatctaagattgtgtgtcttttgctagtcatgccgagaaactggaagacaacagaactctttctggctgcagcagcaacatccagtttccaggagctgccagggcagagctgccagcgtggtgtatggtgtccagtgtccaataaccaggcccagtgccagcagtggcaggctctcattaggcctcagtggcaatggcagaggaaagatttagaagtacaagtggtttttggttacatggatgaattgtatcgtggtgaagtctgggcttttagtagctctcatgaaactacagtcaaggtgttggccatggcttgcagtcatctcaaagctcgactggggatgggtccatttccaagctcattcaggtggttgttggcaggcttccgtttctcccatgttgttgcaccaagggcctcagttcctcattggctgttagccagaagcaacccttagttcttgccaaatggacctctccataggacagttcacaccatgctggcttgtttcatcagtgcaaacaagctagagggtagagagtttcagcaacacagaaaccacaatcttttggctattctgggtttaccttgaagatgaccaatatagactgtgatggttaatactgtcaacttgattggattgaaggatacaaagtattgatcctgggtgtgtctgtgagggtgttgccaaaggagattaacatttgagtcagtgggctgtgaaaggcagacccatccttaat

SEQ ID NO: 470313 - DNA, 1088 bp, Homo sapiens
actaggaaacggaaggatgttatagagcaaagacttgttgaattgttatgactgaaatgctggtagtgatatggacaatgaagcccaggctgaggaggcttcagatgcagatgaagaacttattgggaactacagtaaagatcacttttgttatgcattagcaaagaacttggaggcattgtgcccctggcctaaggatctgtggaactttggacttgtgagtcgtgatttagggtacctggctaaagaaatgtctaaccagcaaagcattcaagatgtagccttgctgcttttaacagcctatgctgtcatatgtccatggctaaaaggggcccaggtacagctcaggccactgcttcagagggtgcaagccataagccttggtggcttccacatggtgttaaccctgcaggtgcacagaatgcaagagttgaggcttgagagcctccacctagatttcagaggatgtatgggaaagccttgatatcagcttcttccacatgggagggaaaatggctgctgacggctcccaagcctcaatcccttcacccttgccactggcaaactgcggtttaggttgctgccttggcagtcctggctgtcctcacggaagagcatgtgaaccacggacctggctgtctttttcattgggttggctctgcggtgcaggctggcagatgagcatgtgatgagcccgcccttgctggccgtgcaattcggctcctgtcatgctcttggccattgaatcggcctaatgcagcccctcagcagccagcctggtgttccctggggctgaggatctaatgtcagcagggcatgattcgattcacattaaagatggatattaagtctttttactcggggtcttgtcattgtaactaatgcacaaggtgagaacttgtgctcaagagacattctttcttcttcctccacttatttctacaattgcttttctcttaaagtaaaaatctcaagctacagtcaaagttcatttcatgtccattttatagataatgccacacaatgtgaagattcattctgaatttaaaaaataacctttacaaatatcttctgaacctttgccaagg

SEQ ID NO: 470314 - DNA, 790 bp, Homo sapiens
gcttgccctgtggtttgctctgcctggaacgccgccccctacctcaactgctaccctgtcattccacaaagcctaccccacctccactaagttttccgtgtaaatcgacctccacacttggtgcctgcatgcatcccttcctgcctttttctgtagcagcacacttggagaactgctctttcccaattcagtgtgttttggttgaggctgtcaaacagtacctcccactccctcaacccacagcaagggatgaagccgacttgattgtggtggataagctttttgatatgctgctggatttgtcaggcccctcagctgcagatctgttggaggtttctggaggtccactccagaccctgtttgcctgggtatcaccagcggaggctgcagaacaacaaatattgctgcctgatccttcctctggaagctttgtcccagaggggcacccacctgtttgcggtgtctgtcggcccctactgagaggtgtttcccagtcaggctacatgggggtcagggacccgcttaaggaggcagtgtgtccgttcttagagctcgaacgccgtgctgaaagaaccactgctctcttcagcactgtcagacagggatgtttaagtctgcagaagctgtctggtgcagtccgcagaagctgtctgctgccttttgttctactatgccctgcccccagaggtggaatctattgaggcagtaggccttgctgagctgtggtgggctctgccaagttcatgcttcccagactctgtttacgctgtgagctactcaagcctcagca

SEQ ID NO: 470315 - DNA, 703 bp, Homo sapiens
ggaactgagaacttcagccaacaagaaccaaggcccctcaaggatgaccccgcctctaggacctgaaacggacccccagtcaattgccagcaaaaagtcagtgccctcagtcatacagtcacaaggaaatgaagtctaccaacaactggaagagctgggaaatggattcttccccaaaaatgctgctattatgacacaactctttctggaaaagcaccatcaggaaccacatgcattcccagcctggtttttgttaccagatctgctttccacgtatgcttctcacaggaaatcagtgacggtgaacatgatgaagtcagtgacggggaacatgatgaagaagagatcttccttgcctcactgtgagtccttcaccaacaagcggccatccatttctgtctggttcctgccctgggtgattgaacaaaaggaggtttttttgaaagcatgcactggcccataaagatggagttgttatgaacacagttggaaatctgggtttgagtcctgagttatgtgtgagcctttttgcgtaatgtacttaagctttcttaatctcagtttctttacctgtgaaggtgagcctcagacattctcttcattctgaaatattctctccacttggcttgtgtgataccatacctttcagatttttctccttttcctccagctatttattctctcctttccatagttccttttc

SEQ ID NO: 470316 - DNA, 725 bp, Homo sapiens
tctgaaaaagtgattaagtgacacagaaagactagaggaggttggaggtggagaatttcccttccctcacgtcagataaggctctggtacccttttctgttgctgagtaggcctctgttatggggaacactctgggtgtatttcagcatgtttgcttttcccttctgcctgccagaaacatgaagaatttgcttggctttttactgtctgcagtaaaagataaaaagcaggagaaagagaactggagggctcagaagaaggcaggaagatgtgggaaagtttggaacttcctagagacttgtgaatggcttgaccaaagtgctgatagtgatatggacaataaagtccagactgaggtggtctcagatgtaaatgaggaacttgttgggaactggagtaagggtcactcttgcaatgcaaagagactagtggcattttgcccctgctccagagatctgtggaactttgaacttgagagagatgatttaaggtatctggcagaagaaatttctaagtggcaaagggttcaagaggaagcagagcataaaagtttggagaatctgcagcctgatgatgtgataaaaaagaaaaacccatttctggagagaaatttaagctggcttcagaaatttgcataagtaatgaggagccaaatgttaacaccaagacaatgaggaaaatgtctctccagagcatgtcagagaccttcacagcagcccctccca

SEQ ID NO: 470317 - DNA, 1347 bp, Homo sapiens
cttacatcagttctcttgagtggattgtggaggggctgctatggaccagagtgcccacagcgatgtgaaacctatttgtcctggaggaggagggaggagggaaagggaaaaaaaacaactggctcactctggctccataaatcactggaagggagagcccttgcctggtgaagttggagattctacctggaagctccctgatggtgcactgagccggggtgtcgtaaatcaccagggctccgccaatggcagccctgcccactggcccattgaaaaggggctggttgttttgctggcagctgatgcagtgcactgtcccagaaagccggggacagggcagggctgcgtcgcatcctgtgtgcatccttgcccattcgatgagtcacaagtagacaagctgcctattgggccctgaatacctgagtaggtttcatacctgcctggcctatcccctctccctcccttccaaagactaattatagtatcagccccctaccttacctaagctgatctgactccatttccagacccctcattgtcctgttaccctcctttgaattgactctaaattttacgtaatgaggaggcatacagatagcttctgtatgaactctacagtcagggataaccggagtatgtggattcagttccacttgctgcatccccaaaggcactgatggaggcagaggtgactccaggataccttagcgggtgggagagatgggagctacctggggaagggtttggagctggcaagatgtaattcagaggagcagataatgagaaaaggatggagagaaaggcgtaaaggcattcaggacttgcctttcataggattccaataaagacaaaggaagggtctgctttgctttcaagcctgtggtcctcacccagactcccctgcaggggctcccctttgtctctttcatgaaagccagtaggtctccttcaccctttttctctgctctgattacaacacagagccttctctttgggagcaatagccatctggattatcttctcttcgtctggccacctcatcaactcatcatctttttaataatctcatctgaaaacatatcctttctcatttgcttcttaatttccccattgtccagtgacttttctctctctccctttctctgaaaccttattcttattactttatagaacactgggggatagattgcccagaaaatatgtactataaagtaaatgcatatggtgatatctatgaattgcccagatccagtccatctgtgcaatgtcacaggcccagctgtttacttgtgcacagtgcaattgcaatggctttatgacatgggcactggcttacaagctactctg

SEQ ID NO: 470318 - DNA, 1517 bp, Homo sapiens
cccagggcagaactccccaacacccttgggccacacaccctctctggccatctgcctgctgtcttgaccctaccttctggaccacccttcaaggctctgtcctcccaactgacctcccaggaactgctacacagcaattcatccaggacagcagtaaggacgcctttagcagtaagtgtacctggtaagtgctcagtgagtggcatcatgattatgaggcaagcactgacccctgctccaatcctgctggcgttcaaggctttgactcaagtcacctctctgctggttgtggtggtgatgttattggtagtggttggtgttggtggtggtagtggtgaaggtagtgatgatagtggtggtagtggtggtggtggtggaggtagtggtgatagtggcagtagtggtggtggtggtggtggtgacattgagcatacagtagaggcctgcaaaccgaggaaggctggcccgcggctctcaggcagttctggctccggctctggctccggctccggctccggcactgggatcgaaagacgatctgctccttcggaagaaaacacagggtgcggcggtgactcgcagagctcccagcgccccagcgcccccgcgaggcccgggcagcgtccgcgctccctacagggggaagcccgccggtgtttgggaatcccagcggggtccccagcttgccgatctcccagccctgaccttactgagatttctcactagcacaaggacttgttcaatttcatcttcatcaattgctagctttgtgaccttggataaatcatttagccattctatgcctccacttctttatctgcaaaacagagttaataatgtccaacctatagggtcattgggctgataaaatatattacatatcataatgtactctccacatagaatacactcaatggggactgttataataataagttatggtgctgctcttctgaataaaacaatttttctcatcctcaccacccacctctgcccccaaccctttaagaaaagtttggttaatgggttccaggctctgggatcttaggttagtcaggtcttcacagtccttcgacttaaatattcatatcattgtccccaaaagagagaccagtagttgcttcccacccgaacatctgtatcaaccttctagtctctctgcctctactcatgccctatttagtccattctctaaacagcagtcagtatggtcttttaaaagcaaaaattcaagagaaaacaagcaaacaaaaaccccaggaattccagattatgtcattccctttctggaaatccttcagtggtttttctcttgtacttaatgtgaaatctaaaccgtgttctccaagacgaaggcttgcccgtgtggtcccactccagcctgtctcccaccaccctgcctcttgctgtgtttccactctaggaccactctcccacctttctattctcttgaaggcaggacgctccccgctctgaggctctgcactcactgttcctggcctgaaactctcttcccc

SEQ ID NO: 470319 - DNA, 571 bp, Homo sapiens
agccagaagagccagcagcagcagtaaggacgcctttagcagtaagtgtacctggtaagtgctcagtgagtggcatcatgattatgaggcaagcactgacccctgctccaatcctgctggcgttcaaggctttgactcaagtcacctctcagaaattatgtttccttatttggggtggtggtagtggtggtaacggtagtaatggtagtactggtgatagtagaaatggtagtgatgatggaggtagtggtggtggtaataacggcaataataatggtagtgatgttgctggtgttggtggcagtggtgtttttgttggtagtgctggttgtggtggtgatgttattggtagtggagagcatctgatagcttctcttcttttttttctccttctccacccccacttccttctcctctttgtcatcctcctctttttccttcttcttccctgtctccaaattaatcttagcagggagtcctgaagcaaattatcatgttacaagcctaaatgtgatagcttgtcatctttcattatttttgacataaacaaaactgtcagaattctctgaga

SEQ ID NO: 470320 - DNA, 726 bp, Homo sapiens
tttgaccttttttttttcctctctcatcactcgcactctgccaaaatgattaactaatttctaaaatcaaaacaatgaaaaagattattattaataagaaatctgattctgtggcctgtggtcaggacttgggtgaatataattctgcacaaaagagagaaaatctgacttctctcagcctgaagaaggtggaaaaattttctccaagcagcttccgtgaaagtcagggtgatagcactctcatgagtgggattaacgctcttataaaagagacccctggagagatcctgcacccgttctaccatgtgaagacacagcaagaaggtatcatctataagccagaaagcaggccctcaccagacaccaaatttgccttcatcttggacatcccaatctctagaactgagttgttgaagacccacgtgtcagttaagagtttggtgaggggttgcttcctggcttgtagatggccaccttcttactatgttgtcacatggacttccctcagtggacatggaggagagagagagagcaaacttctggtgtctcttcttataaggacactaatcctataggatcaaggccccacccttacgaccatatttaatcttaattacttctgtagaagcaccctgggggttagggcttcggcatataaattttggggggcatggaaacattcagtcctttatagatagatgggttttatgaaaaagacagaaaagc

SEQ ID NO: 470321 - DNA, 641 bp, Homo sapiens
ttcagacacagtaaggctgggatgagatcctcgaagctgtgttttaacaaactccactggagagtcccatattccctcaaatttgggaatcacgaccctgaaccaggtggactactgcccagtgcactccattttagtggaaagttcaaaagaacacaggagcccctgcagaaacacactcccagaccatacaaggaagtcttacagctgcaccactgtgaaatgacactggatgattacatctccaagttgatggagtatcctgtatttgaaagccattttagaattatagaaaataaggcccatggggacatggaggtcagcctaccaatgccagtatttccagatgatctctactgttgtcttcaggaaaaggttgactaccagatgcccgttactgtggctccagagtccactaaacctctgagttattccaggaccagcggtgtgttttggcagttacctctgccattcaaatcacctggaggtcaggacatgcccagttgatttaggagcactagagaggggcatttgctggaaacctctcatctgttatttagcagccacatggctaattacttctgatacagtgatttcctaagatgatagagcaggaagccttcccaaaatcgggtctaggt

SEQ ID NO: 470322 - DNA, 1478 bp, Homo sapiens
tctgaaggactcctctgttttctagttctagagctatgccagttggagatcctattcccagagctctgccagaaaaagttaacgacccctctctgctaactttatagagctagttgcgatggtgaggactagaatgcaagtaagaccaaatactccaggccctcaccaaacatacgctgctgccttgatcttggacttcccagcctcaagaactgtgaaaaatgtctgtcattcacaagttactcagtctaaggtgttttgttatagcagcccaaatggactaagaaaaataccagacacaacccaaggtgtggcagctaacaaagaccaaagccacctacaagagtatgatgaggcttggcagatgagcacccatgtttgtgcacccctgcagctgttcctgcaccaaaccttctgggctccgagctgctcaggaccaggaattagttctggtgctcagcaagcccatgcagaaatcccagcttcttctcaggatctgagtcctcctcctgtccactctcagtaccttctttccaagatctctttgaagtgtgctggtttacttgatgtggacattattgcctgatcttagaaaacattcagtatttcaccattgagaatgatgttagctctaggtttttgcagatgccttttatgccttgtttaaaggttcttaatcataaatggatgttgaattttgtcaaatgctctttttttctacaccagttgatagaatcattctatgtttatttagaatttaatgtaatggattatattaattgagtttgtacattgaaccagccttgtatttctagaataaataccacttgatcctgtatattattccctttatatattgctagagtaaaattacttctttttttgagaatttttacatgtatgtttatgaggggtctactgttttctttctgtaacattgtctttgtcagtttcagtagcaggaataacttggcctcataatattcattggaaagtattactttctttatattatttggaagagtatatgcagaatttgtgttaattctttcttaaatgtttggtaaattcttaagtaaaatcatagggcatggaggtgactgttttggggagattttaaattatagattcaatttatttaatagttgtagaacttttcagattatgtttagcttgaataagttttggtagtttgtggttcttgaggaattgtcaattgcaaattctcttattgaccttttaatatctctgggctttgtaatgatatctcttttattcctgatattggttgtgccttttctctcactctttaaaatctgttagtcttgctaaaggtttattaagaaataaaagtcatctgtataggaaaggatgaagtaaaagtttctctgctgatgacatgatcacatatatagacaactctgaagacttcaccaaaaattattagaatgggtaaacaaattaaagttgctggttac

SEQ ID NO: 470323 - DNA, 620 bp, Homo sapiens
tgcctgtagccctattgtatctaggaaaatcacccatggcacctcactgacatcagatttagcaaataaaaattcaggatgccagttaaacttgaatttcagagggtgcaaagcctgaagccttggcatcttccacgtggtgttgaacctctgggtgcacagaaatcaagaattgaggtttgggaacttccacctagatttcagaagatgtatggaaaggcctggaggcccaagcagaagtttactgcaggggcagggcccacatggagaacctctgctagtgcagtatggaagggaaatgtggggtcaaagcccccacacagagtccctactggggcaccacctagtggagttgtgagaagaaggccaccgtcctccagatcccagaatggtagatccactgacagcttgcactgtgcacctggaaaagccagggacactcaacaacagcccatgaaagcagccaggagtaggactataccctgcaaagccacaggggaggagctgcccaaggctgtaggaacccacctcttgcatcagtatgacctggatgtgagacatggagtcaaagacatcattttggagctttaagattgactgccccactggatttcaaactt

SEQ ID NO: 470324 - DNA, 1170 bp, Homo sapiens
agtggttccctgagggtctgtggcatcatgtgggtgttcatgggcagcagcatcacaccacatccctctgacatgcactcttctttgtaccactgtgagctcctcatctcatctactcttcatggctatcatatctggcgtctgttgctaggaagtgatttggcttctggaaatggcaaggatgatgcagcagagggaggcagctctggagggtggaagtccaagatcaaggtgtcagaaggtttggtttcttctgaggcctctcttgttggcttgcggatggcaaacgtgcatgtgtgcatatcaccctggtgtctcttcctcatttatgaggacaccagtcatgctggagtagaccccctccatctaatgaccgcatttagctttaattatcttcttgaaagacctatttccaaatacagtcacatcctaagatgattcagtgcttattgcaaaaaacataattgagaggataccagatttatttcagcaattctatggataaagtcctttcgaactctagatagtagtctctaagttgcatatgtatagtaagataatgtaagcaatatacttgaatcttagtattgaggctttgctattcatgaaatatataacctgaatttttttaaaaaatcaatgaatttgatcatatcttggaacctcatttcactctctctggtgttgtcatggcaacaggaaagccagggtgctatggggagctgtgatttgagacttctgctacagttattcctgtgtgtggtccagagagaaaaaaataaagtgatggtgcttgatttttaaaaattatatttaatatgcattatgctaatatagcagtcatggaggattcacactcttaaaaatgcccagttttgtcttttgtctttttacccattaagttggatgggaagggaaaaaaagcatatcccagatgctttatttgggatatttattgcattaaatgtacttgctgctctgtactgtccagctgcaggctgcttttactcttctaaggtctgctatttttactgtttctatatccccttgagtctttcataattttatatataaagtgctaagcattttttaagtaccatttcagtaagttcctgaaagataagtacagattactttcttaactacttactgtgtgacctttctaggatc

SEQ ID NO: 470325 - DNA, 1174 bp, Homo sapiens
atatacccccctcagagctgctgcctatattttcccctgaagctggcttcctgttgcaaaatgccaatgatttgtcttgtcttcctagtcctctccatctgtcccaaggacatgagagctgatatctgtgttcatctaaaccggaaggtttttaatgaacatcctgcttttcgattggccagcgatgggtgtctgcgcgccttggcggtagagttccaaaccattcactgtgctcccggggacctcatttaccatgctggagaaagtgtggatgccctctgctttgtggtgtcaggatccttggaagtcatccaggatgatgaggtggtggctattttagggaagggtgatgtatttggagacatcttctggaaggaaaccacccttgcccatgcatgtgcgaacgtccgggcactgacgtactgtgacctacacatcatcaagcgggaagccttgctcaaagtcctggacttttatacagcttttgcaaactccttctcaaggaatctcactcttacttgcaatctgaggaaacgggactttgaagagaaaacgattgctctgaaaaccctgcatgccacatttgaatctgagcagagtgtagatataactctcattacctcaattgatcatcaggactgcaaattcactccaacctactggccctgctggcagtagctctgcttacatgttatggtttgtagaaatttcacttccaaagtgatgctactcatcacttcacagtttacacgccacaggcgtgatggcgtttgagcttgaaatcaacactgtaagacaagtgagttaagggaggatgggagagaggagctaaaagccgagatgcataggtttatttcaggactctcagttgtattccactgatatttatgtctattcttatgccagtaccaaatcctttaattactgtagttttgttataaattttaaaagtgttaagtgcatccctgatgttttatctttttatttgttatatttgtacattcttttaaacttaaaataaaacaaagaactatcatactttgcgtacaagatatggatcagctggtggtagcaccttgtgaattagtgtttaaagtccataagcatgattaaatcaccttttcattttcatttgtttttaatgaagctttccatttcaaaatcagtgcctata

SEQ ID NO: 470326 - DNA, 962 bp, Homo sapiens
accccctcagagacacttctcctaactatccccaaccctgaaaaaaaacaggactaacaggacatgatggacatgaaaatggaaatggagatggagatatggagatggagatatggaaatggaggtgcagatggagatggatacagggatggggatggaaatggagatggggatgctgatggagatggagatgcagatgcagatggagatggagatggagatgcagatagagatggagatggagatgcagatggagatgcagatgcagatgcaaatgcagaaggagatggagatggagatgatgcagatggagatggagatggagatggagatgcagatggagatgcagatggagttacagatggagacggagatgcagatagagatgcagatgcagatggagatgcagatggagatggagatgcagatgcagatgcagatggagacggagatggagagcagatagagatggaaatggagatggagatggacgtgcagatggagatggatacagggacagggatggagatgaagatggagatggagatgagaaggcacccagccatcctgaatcttctatgaaaatgaaaatgttgaggttgtatttttaccttcaaatacaacctccttgtttcagccctttgaccaggacatcatttggtttatcagtgccacacgcacctgcctgatatttgattgcatttgatcagcaattaatgcagaccctaatccagatataaaaaaatgctggaaatcattcactatctctgatgcaacagcgttcatcaaaactgcaatggattaattaaaaccagaaattgcaaatacctgctggaagaacttatggattgaagtcatgaatgattttaaaggcttcctggggatcaatggagaagctaagaaaataattcacacagcaagacaagttagtgaagaagaatatgccaacatacttgatgaag

SEQ ID NO: 470327 - DNA, 622 bp, Homo sapiens
ggggtggcaatgagatggtgggggaaagttagttgcatccccttcctaccagacagactcaccccctcccacctgtccagagcccagaactggaggaaagaaaggggttggatagggtatcaatttgcagaaaatagaacactttttgatgtggaacaaaagaccaagaaagaatcaagtttcttactgggaaatgcccagattgtggattggcctgtagtttatagtaatgacggtttttgtaaactctctggatatcatcgagctgacgtcatgcagaaaagcagcacttgcagttttatgtatggggaattgactgacaagaagaccattgagaaagtcaggcaaacttttgacaactacgaatcaaactgctttgaagttcttctgtacaagaaaaacagtagtttctggttaacatcaaatagcgagaggataatttttacagtgtgcaaaccattcaaagtatgacagcaatttatttgtgctttgaagatcgaataaagtattcaatttggacccatattccctgttcctttacacatagactcagtgcctgggaaatttaagataactataaatactacttttaaattgaacagtcttctaataatatttaggg

SEQ ID NO: 470328 - DNA, 606 bp, Homo sapiens
atacaccatttctcctaccctttcaatgtggatttttactcacttctatggaacatgcaggtgacttaggcttatttctatgtttcaggattttcaccaaggtgccccacggcccaggcattctatctccagagtccatggttttaactaccacattcctctgtcttttaataggaggtggaactgatgggattaataagaaaccaggcatgagaagccatgcagatgtaaatttggaaatcaacatattgatagttggagtcactggagtagaagatgctactggagagaaggagaacactcagagagagtgggcttcacaagccgagggaggagtttcacaaacaaggacagtggacagtgtcaaggctagcagaagcctcaaggtaagtgcaaagcaaaaacctatgatagatataacaagaataaaaagcaatggattcaaacatactatgggagaaaaatcatgtaaccacaaaggaagacagtaagaaaagaagaaaggagttacaaaacacatagaaaacaagtaacaaaatagcagtaataagtccatacctatcaataatattgagtgtaaatagatcacaccctataactaaaaga

SEQ ID NO: 470329 - DNA, 616 bp, Homo sapiens
cactcctccatccctgcaacatatctactttaaattcttggttatgttaatttgtaggtctcaaggcattacatcaagacatcataaattacattgggagctaagtagacacccattggctacatctcagggctactgctcctactcttctccccactacctccaagtgaagaatcatccagcccaaaatgtcaagctccttctcctctttttctcctccaatgcacatggaaacagcagaaagcctccaacactcattttgtgcagtgagtctcatatcctgaccacatttgattggaccaggaactttgaattaacactaacggatcctcgcctatgttctggctgctctattaaatggagacaatgcaaaaatgagagcttgacctgccattttgcccaacctagcctgcccctcagaaaaagtgagaggagaatgaccgaagcacaatcacagcaaggacagagacagaaaggcctgagtgcttttccatcctacggctagtccctgcttgctgaggctaagtgcatccctgcccaaaatcctaatagcaattatcctcctttgcgcgtgccaactccagactcatagagtcatttgtctgttttatgaggg

SEQ ID NO: 470330 - DNA, 448 bp, Homo sapiens
tcagagagtgaaggctagtgatgttatctataggagcaattggggaagtcacaaatcttgtgacctctggccacgtgactcctgagcagcagggggttggaaactacgcctacattttagcagagttcaagcatagcagagttcaagcccctcccatgatcctattcttgtggcctttcattagtcttacaaagaaggggccgccgggcagaggggcccccccacctcccggacggggcggcggccgggcagaggcgggccccccacctccctcccggacggggcggctggccgggcggggactgacccccacctccctcccggacggggcggctggccgggcgggggctgaccccccacctccctcccggacggagcggctggccgggcggggcctgaccccccacctccctcccggacggggcggctggccgggcgggggctgacc

SEQ ID NO: 470331 - DNA, 1519 bp, Homo sapiens
atttgaatcagtcttaaataaatacgcaaaacacacaaatgttccaaaggaaaaaaaaaaaaaaagaagaagaagaagaagaaaatacatgtatgtaaaaaatgcttaaagaaaaataacttttgtcgacttacaaaatggccgcccggagcgtgttccgcgcggttccccccagcggtctccggctgaaccggcgctctcgcctccccgccgaacacagcgtgaggagccccctggggacatggtgtttgagtctctgggcttgccgagcaccaagtcctctgaggaccgcagggcagcaccggaagcggccgagcgcgctcagcccggcgaccaccagccgctccagacccctgcgccgcctcgcgccaggtttcgccgcacccaagacccagcgagtgcagcggcggccgccgaggaggttcgaaaacatggccaaaagaaatgccgagaaggaactgacagataggaattgggatcaagaagatgaagctgaagaggtgggaacattctccgtggccagtgaggaagtcttgaagaatagagccataaagaaagcaaagcgcagaaatggtggattcgaatctgacagtagaggagactttaaaggttttaaaggtttggtggtaccttttggaggaggacggtttcctggatttggtagtggcgctggagggaagcctttggaaggactgtcgaatggaaacaacataaccagtgcccctcccttcaccagtgcaaaggcagtggcagagcccaaggtagcctttggttctcttgctgcaaatggccctaccgccttggttgataaaaatgtttcaaatcccaaaactaatggggacagtcagcagccctcctcctctggccttgcttccagtaaagcttgtgtcggaaatgcctatcacaagcagttggccgccttggactgctccgtgcgggattggatggtgaagcacgcgaatacaaactccctctgtgatctgacacctatctttaaagactatgagaaatatttagcaaacattgaacagcaacaagggaacaatggcaggaattctgaaagtgaatctaacaaagcggcggctgaaacacagtctccttccctttttagctcaacaaaattacagcaagagtcaacgtttttgtttcatggcagcaaaactgaagatacacctgacaagaaggtggaggtggcatctgaaaagaaaacggacccatcatcactaggagcgacaagtgcctcatttaatttcggcgagaaagttgatagctctgttttgggctcattaagctctgtcccccgactggattttcattctcccctggaaactctagtttatttggcaaagatattatccagagtaaaccagtctcttcaccatttcccactaaaccattggagggccaagcggaaggtgacagtggtgaatgcaaaggtggagattaagaagagaatgatgagccacccaaagtagtagttaccgaagtaaaagaagatgctttttactccaaaaagtgt

SEQ ID NO: 470332 - DNA, 616 bp, Homo sapiens
ttctgtattttctctccttcttttttttttttcttttttgagacggaaaaacatcccaggagaacagcaaggatatgggatctggggagtcggaggtcttggttctggtcccggttctgccatatattagcagtgtgaccttgggcaagtcattcatctggcaaacatttattgagggctttatccatgagaatcatggaaatgaaagcaaagtccctctcaagttgacctatgaaaaggaagaggtaccaggggtccctcctcagatgattgatggtgcatccagctgcaccccaaaaagcccaactgtctacaggatccagggagagaagaggacctggatacctgcacctttcttgagttttacctgccaacaccaattagcttttgtgattaatctgaggtttcctaaccacgtggatttcaacaaaccaccagatcctacctgcgatgggagcaaaaattcctcccagtttctccctaggcatccgggctgacagcttgagaaaaaccaaattggtggttggctggttgggttttttttcaacctaacaacaagcctggcttagagctattcattcttcagctcctgatactgtgtgtctatagataaacc

SEQ ID NO: 470333 - DNA, 480 bp, Homo sapiens
cctcttttttggagagggtagtaaacagaagagcagaaaaccagaacagagatgggaccaacagaggaggaagaaaaaagtaacatggtagtggaaatgatggcaccagcggcccatctggagccactgctgcaaagactctggctgcagggggcaaggtgtgtgtgtgcttgggacagcactgtcacaccagccttctgccacctcagccccctctggactttgggtgctgatgagcatgggagggaggccgaggtggagccgaagatagcccagtgcaggcctgcaggcacccctcagcacaaacatcctcggtactgtggaaggcatgttgatggtggcaggaggaagtcatgctcctggacagaaaagggcaggtccctggtgaaacccctaccttcaagccagggatggcctgaagcctgggggccaggctgccagttctggggtgagtccgtggcccagagtgagaactgatga

SEQ ID NO: 470334 - DNA, 600 bp, Homo sapiens
ttgatatggccatgaatggcgttggatgccgggcaacagcccgcattatgggcgttggcctcaacacgattttacgtcacttaaaaaactcaggccgcagtcggtaacctcgcgcatacagccgggcagtgacgtcatcgtctgcgcggaaatggacgaacagtggggctatgtcggggctaaatcgcgccagcgctggctgttttacgcgtatgacagtctccggaagacggttgttgcgcacgtattcggtgaacgcactatggcgacgctggggcgtcttatgagcctgctgtcaccctttgacgtggtgatatggatgacggatggctggccgctgtatgaatcccgcctgaagggaaagctgcacgtaatcagcaagcgatatacgcagcgaattgagcggcataacctgaatctgaggcagcacctggcacggctgggacggaaaataagtgccatgagcactgagaagaatgtacattctgttgatttggggtagagagttctgtagacgtctaccagtaaggtggtcttcaaactctgatatcctttcttctacttggtcaattcagctgttgttacttgtgtatgcttcac

SEQ ID NO: 470335 - DNA, 1242 bp, Homo sapiens
tttctgttgctggctttgctttccgaggagacctgtggtctggttcttggacttccttagccacatggcccccaaacacctgtctccactcccacctcaagtgaagaaaccaagaccacctcctgccctgagaccagagaagacattgacttctgcaggcttactgaagaagggagaagaagagcaagaagcaattgaacacattgataaagtacgaaatgaaatagacagacttaatgaacaagccagagaggtcatcaaagatgatatttggccaaacctattacagtactacttggtttccgatatggatgatgaagaaggagaaggagaagatgatgatgaagatgaagaaggagaaggagaagatgatgatgaagatgaagaaggagaaggagaagatgatgatgaagaagaggagaaaggattagaaggtattgatgaagaaggggatgaggatgaaggtgaagaagaagaagatgatgatgaaggggagggagaggaggatgaaggagaagatgactaacagaacactgatggattccaaccttcttttttaaattattatacttaagttctgggatacatgtgcacaacgtgcaagtttgttacatagtaggtacgtcagtctttattctgagccttttctttcttaattcatgtaaaactctgtcaaggttggctttgggtttttagttcagaagagagtaatactgcatcagactattaggaaggcaggtccacagttttaaattccatcccttgatgaataattttaaagtaatttagtgaatgtccatcatgtagccactagtactccagaccttgtgaatattggcaatgatcaataagaaatggtctttgccctcaaggtactcttgtgcatcactagtgaagtttacagtgcagtgaaataaaacctgtgattggggtgagggcaggtactttgccaaatcctgaccatattaaaatgattagggtgcagtcatttaaggggaagactgaagctcttttccttggagaagacagacataggaagaaatgagagttgacatcttggagaggagatccatcatgacgacctaggctgtgagcctctaggtcctgggagagcttgggcaggatggggatgggctttggtcacagatgttgtacaggaaattccacaatggctgtgaggaagtactgaatgacctcaaagattcttggagacttcaatactttataatactctgtcccgat

SEQ ID NO: 470336 - DNA, 629 bp, Homo sapiens
cgtcttcattcttgaagtcagagccagatgccaaggaagagattttgggaggatcccaaggacccctcagttgcagccatgttgagactgatgcaggaggaccccaactgtcacaagcaacacctgtcaaacacagccacctacttggggacagatcaagaagctgtcacagatggcagaagaaaacctgaggaaagcgggacaaccagtcacaatgacatttatcataatgaatctgctcctacaattaaggcaaactgccctcaaaaacctatttgtaaacaggattggacctggccagaaaaaatgaatgtacttgttaaggaagattgcattgcagaacaggcagaggtgctgcgcaatgattcctatggaatcattattgattggccccctaaggggatgtttagcttgaattgcacctctcagtcggcatgccacagccacaccgtgttcagctggtctgaacaaaatggtcagatggtagaaatggctagaccttcacctgacactgaaaatgctgtcctcaaggccacctgaatgctggctctgtggagtactctatggtactccagactctagtgctccctctgttctacaatcagagcatgcagggctgaaagtatata

SEQ ID NO: 470337 - DNA, 813 bp, Homo sapiens
agccacttccccgacagcttcaacagaaagtctctctgaaggattcgattggcttggcgtgggtccagtgcccagccctggggtattcaccatgccaatggactcccaatactggatcttacctgttaccttcccattctactcagcccttcctcgggcagggcttgctgcggctgctgtcggggatgggggtgtggtgcccagtccaataagagttatattcccgggagaatatggcgcctctgctgagtcatacaagtcgccagggaagtggaggaaagccagcagtcacaggcctcaccccactcacacacagcccacagtccgaaagtctgctctcactactaccgtgctccccatcaacagcaccgagtctatttccagagagctgcatttcagggaacctgcagcagtgacccagttccttcaaagggtctttggattctctcggcttttctggtatgttcctgtggtggttcttggagcaaaagttcacaatggagatgcagattggtgctgtgaaaaatggatcctaagatcaagtaattttgaatagacttgcatactatgaggcctcttttaggaattaatgataaccactaatggtctaataaggaataaggaactgcaattacctttgacttagggctttacaaatgtatttaagcatgaaacactctttgtgacacaactagtaaatgcaaatatttattgcatgcctgctaaatagggatttaaagttaagatatagtagtccttatcctcaaaagctgacaaccaaaagggaattatagtctaataaggaccatttta

SEQ ID NO: 470338 - DNA, 587 bp, Homo sapiens
agccgcgtagccagctcacttggtgggagacactcaagagagcaagatgttcttgtgctgcatccccacatctccaggctctggcttcaggaatggcagaagctcatacctcaccccagatgcctctggccatttggcagaagccccccccccccaggtaccacaggacaggagtcaccagggagccatcaggcctcagatagacaccaaggtcccagatgtacagcaggccccaactgaaccccagactcatgtggacatcaggccacaggtggacacccagtccccaggtggacaatcaggccccaggcacacatcaggccttaagtggacacccaggccccaagttgatatctggctcccaggtgatcaccaagccccaggtagacaccaggccataggtgagcaacaggatgcagtagatcaaaaggccacagctggataccagtccctggtgatcacaaggccccagtgggacatagatctaaggcaggcatcaggccccaggtggacgtacaggcctgaggtggaattcaccctgagggggacattcggccccaggtgcgcatcaggcctcaggtgaataa

SEQ ID NO: 470339 - DNA, 674 bp, Homo sapiens
tgaggtttaagatttaacgactgccctggtagatttcaaactcatgtggggcatgtaacctctttcttttggccaagttacccctttggggatgggaatgcctggccagggcaccactgccctgtaccacccccaggagggagttccttgcatcctggcccttctagctccagccttggttcaaagggctccagatgagctcaggccatggcctcagagggtgcaaactataagccttggtggcttccatgtggtgttaagcctgcaggacagtgccaagtggaaatgtggggttggaggccccacacggggtcctgactgggggggcgggggctgcctagtggagctgtgggaggggggctgctgccctccagatcccagaatgatagagccaccagcagctcatgtcttcagtgtagaaaagctgtgggagcagagctgcccaaggccttgggagcccaccctgtgcatcctgggaatgctctatgttcccaggatgtgggacatggtttcaaaggagattattttggaacttcgagatttaatgactgccttgctgggatttgaacttgtgtggggcctgtagcccctttcttttggccaatttctctcttttgtagtgggaatgtttacccaatgcctgtacccaaattttatcttagaagtaaataact

SEQ ID NO: 470340 - DNA, 530 bp, Homo sapiens
gctgctccatgcatgatgtttcctgcacaagcttcctttagagggaagcttccagaagaatggatccatccagaagagcaaggcgggaggggaaatgagcccattgccagaattttgcgtcttttgaagacatttgccagaattctacttttgaaggctgccccttttgacagtcagttactgaagaagctgtgggacattttcaaagccttttatattaaaaaaagacacaacatactgctgtgggtctgtgtgcagggaccaggaagggcacagctgccacggttctgtgcagaagtgacaaagtgccaaaagcaccctgtccccatgtgtactagtcttcagcaggggcagagctgctggagaaacctaagaagcagcctctttcagcccacgttccttgggccccaacaggatgaccactgctgggctttggtgtgcccctttcagcagctgatgtcatgatcatgtttcctttgactcaagggctgtgactggtcctcaccaaagtttaggtctcctggggaaac

SEQ ID NO: 470341 - DNA, 705 bp, Homo sapiens
ggcagaagccccccccgaccccccccaccaggtaccacaggacaggagtcaccaggtagacatcaggccccagatggagctagcaggccaggcctcaccagtgatcccaccagggccacatctgcacattgtccttttccagccggagcctctggagctcattgagacacaggcacatgctgctgcttcaggtgcagaaatacagctatttccagtgccagctgttgagccagtgccagcaccaggggcagattcccctccagggacagcgctggagctagaggaagctccagagccctccttctgctgccctgggactgcccaggaccagcccagtgaggagctgcctgacttcatggcacctcctgtagagccacgggcctcagccctggagctgaaagtgtggctggagctagaggtggtagagaggggtgaccagcacagctccagccagaagctcccacactgctcccagtcctgggcacaagcagcagccctgctgctgaagagcctgctgctactgctgctgggggtatttgcatgcctgcaggaggtgctggagagcaagaaaaggagcctctttgcggaaagagggatcatgtaggttcatttctcaggcagatcagtcaccttttgccatcaaagttttagcatccatttccaaaatttggtgtacaagttggtattttggtgtttttagctaat

SEQ ID NO: 470342 - DNA, 587 bp, Homo sapiens
agtgggggtcctctggtgccagagtccatggagccatggaacggggagaggcggagatcctcctttgccctagtccaaggcattgtgaggccccgctcctgcacagaggcggtctgttcctctaccgccgtggggaaaaactgcaccatctctggcaagcctaacccagcagctgtccttaaaagattcccagttgaatccccacagggtggactccctctcatcctcacaatctcagctcaggccttattcatcaccgcattcctggcaccaggcctggcccatgagaaatgggtcagattaagagctaaatgtgttttcatggtcacttgttttcttcaggcctcctttctttgtgccaacatctttgggtttctggttaaagttttcagcagctgcatgcggttccatttttcttaccagatgtttgtaatattttacctgtggtttaaagagttaccagcccttcctcgatgacccatggtaagacccatgagcctttgaatataattatagaaaacatttgaagagggatagagaaagacgagatcatggctcctttgataacgtcaaattttcagtgcact

SEQ ID NO: 470343 - DNA, 1249 bp, Homo sapiens
gaaagcaggaatgtgaccatgctggtgagagggcaggcacagctaagctcatggggtgctcccctctagaagtcagggagaagaggagcttcacttaaaagcactgtggtttatgaggattacaaggcacttcaaaagagcgctgatcttccgtcgcagggtttcaccatggcctggggccctaaggagcacttgaagcgtgctgcagtgccgaagcattggatgctcgacaaactaaagggtatatttgcacctcgtccatcgacaggtccccacaagctgagggaatgtcttccgctgatcgtcttcctcaggaatagactcaagtatgcattgaccggagatgacgtaaaggagatatgtatgcaatgcttcattaaaattgatggcaaggttcgagtggctatcacataccctgctggattcacggatgtcatcggcatcaagacagtcgaagaggcaaagtacaacctgtgcaaagtgaggaaggtgactatggggatgaagggaatccaacgcctggtgactcatgatactggaactatccactacccagatcctgtcatcaaggtgaacaatactgtgcagattgatttagggactggcaagataatcaactttatcaaattccacacaggcaatgcgtgtatggtgattggcggagccagcctccgtcatgttggtgtgaccaacagggaaggacatcctggttctttaaatgtggggcatgtgagggatgccaatggcaacagctttgccctgaggctttccaacatttttgtcactggcaatggcagtaaaccttggatttccctgcccagggaaaagggcacccgacttactattgctgaaaagagagagaagaggctggccaccaaacagcagaactggttccaggacctcctgcagataccaaaatccaaaagctaaagtccctgatataaaatggtatagtatttgtgatctatgcacaccctctagtataccttaaatcatccctactgcttacaatacctaatacaatttaaatgctctatagtcattatatttagggaataatgacaaaaggtctatgtgtgttcaatacacatgcaaccatccatttttttctttgttccctgaatattcaacccaaggttggctgaatcctcagatgcagaatccatggatacagaaagccaactgtctgtgtgtgtatacatacatttttggcaacttgcttttaaaactctatcaaacatttttccag

SEQ ID NO: 470344 - DNA, 1493 bp, Homo sapiens
ccatttcttcagattaaaacattttaatgatctatttatgaggcccccagcagtcagcatgtggctgccgcgcgtctccagcacagcagtgaccgcgctcctcctggcgcagaccttcctcctcctctttctggtttcccggccagggccctcgtccccagcaggcggcgaggcgcgcgtgcatgtgctggtgctgtcctcgtggcgctcgggctcgtccttcgtgggccaactcttcaaccagcaccccgacgtcttctacctaatggagcccgcgtggcacgtgtggaccaccctgtcgcagggcagcgccgcaacgctgcacatggctgtgcgcgacctggtgcgctccgtcttcctgtgcgacatggacgtgtttgatgcctatctgccttggcgccgcaacctgtccgacctcttccagtgggccgtgagccgtgcactgtgctcgccgcccgcctgcagtgcctttccccgaggcgccatcagcaagcaggacgtgtgcaagacactgtgcgcgcggcagccattcagcctggcccgggaggcctgccgctcctacagccacgtggtgctcaaggaggtgcgcttcttcaacctgcaggtgctctacccgctgctcagcgaccccgcgctcaacctgcgcatcgtgcacctggtgcgcgacccgcgggccgtgctgcgctcccgggaggcggcgggcccgatactggcacgcgacaacggcatcgtgctgggcaccaacggcaagtgggtggaggccgaccctcacctgcgcctgattcgcgaggtgtgccgcagccacgtgcgcatcgccgaggccgccacactcaagccgccacccttcctgcgcggccgctaccgcctggtgcgcttcgaggacctggcgcgggagccgctggcagagatccgcgcactctacgccttcaccggcctgaccctcacgccacagctcgaggcctggatccacaacatcacccacggtcggggatcggcaagccaatcgaagccttccatacttcgtctaggaatgcgcgcaacgtctcccaggcctggcgccacgcgttgcccttcactaagatcctgcgcgtgcaggaggtgtgcgccggcgcgctgcagctgctgggctaccggcctgtgtactctgcggaccagcagcgtgacctcaccctggatctggtgctgccacgaggcccagaccacttcagctgggcatcgcctgactgagaactctgggccttagagcaggccccgaactgtggtcgccaggcccaggaggcgactgcatggtggagagggagctggggcgcatggggaagcaggtccctactatcaaccgggagtttggggtcctcccctgaagtaggcaaggactgcacgtttctttctctcctgattctcggttttcctttgagtcttctggagctgccttctcatcaggtgcactcttcatggaaagcaactcttgcccctacctcttctgggcgcaggga

SEQ ID NO: 470345 - DNA, 1034 bp, Homo sapiens
gacacaacccccatggagccgccgtagaggccagttggcaatgtctagcaaatttacaagtctgtgtgcccttgatcaatccatttaccctatagggtcagtggtgcccagccgtggctggacatgggaatcaccaaggtcccctgatcccacacccagacattctgatataattggtctgagatatgccctgggaataacgttcatcttgctcatcattgaatgccagttcccggcacagcaccagtcccagacagacacacaacttgttgttgaatggaaggatgcagagcaacagggagtgcagagccaaggaaggtgcaaggtagttgtcattctgaagcaggtgtcttacacgaaatggctatttatagaaaatgatatttatgcaatctgtgctgatctcactgactgtcaaatctctgaaaaggggctcgcaggaacagtggaagatgcagatgtggagcccctgaatgagggagtaccacaaccgtaacccttctgctacaatttcccacttcctattctttacacaaagacactttcaaaatcatatatgtgcagaatcattccagggttcacaattccctccacccagccttccccagtttctgcaattaattcggtatcagttgtcttagttacatcttgaagtcatccaaagtttcatctgagttttatagcgattatattccttctgtttatcctcatgttcccacaacttaagtcacatttaattaaatcaattaatgaccataatcaacacaactgccacgaacagttttgggagcaaacgcggctagttctagataagcacagagcccgggtggttagggaagatgctcaggaggaggcttcagcacactgtgtgcagctgctggcatgtttcacaggagaaatgggacaagtctgttaatctagagactcggacttggaaacacccagcagggaaaattgctgcagcagcaggtagcagttattatgggacctggaccgccccttccaggcccagctgttctctgggaaagcctggc

SEQ ID NO: 470346 - DNA, 2299 bp, Homo sapiens
atccaggcaggggggttaagtactaccccacccctcaactgccctgttagggaaaataaggcagttgcattttcagacacgcaagtgggacccgccgagattaaaaatgcaagaagcagcggttcacaggatgccgaggatgactggacttcctgtccaccccctgggcctggccagagcttctgcaggcacttcaggctcccctgatggtggcggtgatgccgtgggtgctcggggacagtgggaatgcagtgacaccactcgggctagagaaccccccggaggctcttgcattggtcgtcctgggccatgcacagcctggaactggccgctatccaattttgcatctgggaagtgttcatcgattgctagaaaaataatcaggtcgaacgcaggccatttccggtaaagaggctctagggaagcaccttcaggccagatgactcaggactgtgcggagtgtgtgtggtctgggagccggctgcctgccgggcccgggtgctctgcagggaaacagttggctgcctgagggctcattcatggctgtttcccctggaagggcggcgcaggagcccggttctgcagccctgccgacgccgtgtcacagacacagctcttcatggatgcatctggtttcccatggctgcggtaacaagtgaccacaaggttggcggctggaaacagcttaagtatcccatcttacggttctggaggtcagaagtctgagatcggcatcactgggctaaagtcaaggtgtgggcggggctggttgctcctggaacctccaggggagaatctgcctgatgtcttcataagaagaggaaagtttggacacagatgcaccgggaaggtggccatgtgaagaggaagtcggagattggaatggccacagacgggacatcaggcattgccggccaccagaagctgagacatgaagagctggagagtggagagggcacctggaagggtgtcagagtggcgtggctctgcagaacggggcctgtcacagggcaggtgctcaagcccatgtggataagattatgtgaccctggcagggagcatgtcacgcaggctagccagtcacaaggtccctatcccctggccacagccatgggcttggtggactatggagtcagccgccagtgggggcccctggagctcaatcccacaggggactctgggagccactgtggagcacacctcagggtcccccagagaggtgagaaagctgggaccctgccacaagttcccgtgcacagcgaaagtgctcatgccgaggaacacatgtactggcggtaggaggtgagggtgcgaggaccaggatggggcatgatgtcatctgccagagaggtcatgtgacccaagccagccaatcagtgcctttccctgggatttttgtttctcgatttgcagcaaagttgggtggtgccagtcctgctggtcgcagggctggagaggttgagttgatagctgccagagaccatcgtctcttcctcccagagtaacaggagggaatatggccatggctaggtagaaccaggaggagaggggagctgaggagagggcaggagacaatggctgttgtgattgaggtcctgggctgaacctgaagcccatccctccccctggatacttctgtgactgcatttagcccgaaagacagtgtctgccggtcacccagggtccctccatcaaaatctctgtgtcacatctgccttactcatctcttttccctcgtaatgcccggtccaaagaaagtcctccatgaaggtcatcaaaaagaagaaaaaaatgaactcgcatttcacagccctcatcattaatttatttttaaaaatctatttacattttctgcctgtattacttcttgtggggtaacacgagttggataaatttgttgtcggctgttggatgaataatttcctttaatttgccctaaattacctaaacagtaagggggtgcccatcatattctggaatttggtgttcacttttcctacgtgactcatagttttttatagttaactaatactgaccagctaacttgagtggatttctgttacttgcaactccaattgattaagacctcgcccccagagctccccactgtagggtctccactgcccccagagagtggcctgccggtgtaagatgtacaaggtgtcacccttgccccctcctctccaacaaggcagacaagtgggtcccatggagagccttggaagatcatgattggcacctgttaatacagaggtggcaccatttttccaagtcttctggaaaagagttagaaaaatgg

SEQ ID NO: 470347 - DNA, 621 bp, Homo sapiens
ctcatcctccatggagcagcggtttacagctacacacaccctgacctgcagcctggagctgctgaaatcagaaaacgagaccagtgtccacactcgctcctccaggtccccaccagaagattctgtggccataaagagagcaggactccctcagctcaaatctgccgtcttaacagacactgtcttgctgtcactgtgtggacagatctgccagatgcctcagccaagccatcagagtcagcagctgcaggaacaggacaaacagatgcggcttctgatacgagccacggagaaggacacagtgtctcccctgcggtatctgccaaaagttgctacgtgggtgacgcgttttgctgcgctaagaacttggtgtgccccttcttccctggagaatgtggcctcaccccttatcggaccccgtctgcgagctcctgaccctcacgactggacttccatacacatgcaaacctgccagtgggacggaccctttgggagctctggctgtggccggctgcaccctcggcatcttctcccaaagctgggagctccagctgtgacagcactgggaacctaaggaaaaaacatctttgtgtagcaataaactgtgtgatttgtgaaatc

SEQ ID NO: 470348 - DNA, 1167 bp, Homo sapiens
tcgcgagggcgtgaagcatgcacggggcttacaagcagaccataacggaagacagctgctttgtgtctggctgctctgggaattccagggcccgggaagcgaccggagctgacatcccaggaccagctggtggggtgggccgcggggccatctggaagtttccggacctcagggaacacttatgtaactggtttagaggggaggtttggacaatggattcgctgaaggaccaagaacaaactgagcctttcccagggcaggcaggtcctctcccgccaacaggcatcttatctactccccaaggcccctctcagccccagagggtccctgctgtcaaagccagaagagcagacgatgggactgaagctctccaagggcaaggacttcactattactactactacctccactactacggttgctgtcacgactgccattgttatcagtacagttactattattactacgatacttctactgatttggaaggtcagcaccgggatgatgatgagcagaatggtcatgaggatgcccacagtcagggcccagatgttcacatgcttggcggtggaggcataggcctgggccctgttcaggtcgtcaaccatcttcctgtccctagacttcacggagtaggcaaatgctatgaagcccaggcagcaggagttcatgaagagggtgttaaacagggaccagatgacatggtcggtcacagaggtctcgctgtggatgtggatcacgtggacttcatggtgtccagtgaagaccagctgtggctgggttgctgggatggttctcctctgatgaccattatgatcaccactgctgttcctaccattattatcagttccattattactattattaatattactattattactaggattattaccactgatatcggtattactactacaaccaccacttaccactattactgttactgccgctatcgttattactaccgttactattattactactgatgttactactacttctactattgctatctgtttagtcgaggcagaagagcttggccttccatgcatggacagccacctcccatgcctaatgacagctctgggctctgggagcaagaactcaactaaagccctacacttggtggctgagtcccagcctggtgcagttggaggactcaaa

SEQ ID NO: 470349 - DNA, 1166 bp, Homo sapiens
ctgtgtgcacacttgtgtaggctgggtgttggggacccagggctggtgctgaccattggccaaactcaactggaagccacaggcagaagtgtctgggcaccgggctcggggacaggggaggacacttctctgaaggaggcagggattactcggcgtacctgatcctggcttcactggtctcctcttggttcccagcactgtctcttcggtctctcctcctccccttttccctcctactcatgcatcgcggcatggcaggccttcctgctgctactggtgcataccagcctcacctctgtggctgcgtctttgcattcctcgatgtcacctgtcataacctacagaccatatagggactcgtttctttattgtctgtctcccgctgccagaacacgagggccaccaggctggggactttgcctttttcacagccgtttcccggggcccagaacaatgccaggcactgcagttgctcagggagtgattgttaggggctcttctccacggaaacgatgtccagactctcccttgagggataaaaaagctatcaagggaaaaggggaagggtggggagaagaaaaagggtgccatggggaaaatcacggaaatgtaagatttcgtttgagaattgccgctggctacagtcgagtgaaatcaagagcaagaaaagaaagctgccaagaaacttacaaccatggccaaaggggaaacaagtaccttcttcaaatggcagcaggagagacagagaaagcccgggggaaactgccacctttaaaccatcagatctcctgagaactccctcactataacgagaacagcacgggggaaactgcccccatgatccaatcacctcccaccaggttccccccttgacacgtggggatcacagtttgagatgacatttgggtggggtcacagacccaaacaataccaccttaccacagtttctcagactttccttgtttttgatgaccttggtagttttgaggcatactggttgggtattttgtagaatgttctttgttgggctttgtttgatgattttcctcataagactggggttgtgagttttggggtcaaagactttacagaggtaaaatgtccttcttatcacattatatcaagggtgcctccaatgaatggaatgtcattgctgatgttgtcct

SEQ ID NO: 470350 - DNA, 698 bp, Homo sapiens
tcttcccgggagcatggatttgtagacaccttgattttggacttctgccctccagaactatgaaagggtgtgtctgtgcccaggaacacctcaccatcttgtcccaggaacctgcagcccttttcatcctccgactcacctccagattctacttcatgaaagcaccccttaaaatggtcagtccaagccagatcctccttggaagatgggagagcagagaagccaatggcagtgcccgcctctggcagggcagaggtccggccaagggggtggcaccgcagagccaggagggcaatcccagttcacggtcaccaggctcaaccgcaggcaacgggctggttgcattcgtgtggcaggtcctggctcccctgttgtgtagacaggagcgcgcgccctatgaaatgtctgtaattattatccgcacactttacagccgaggaaactgtggcccagagaggaagaacaggaacggatgctgagcaggtcccagtgctgcccctcctctctccactcctccctcctccccttgtgctcttactcctctccctttgccacctccctggggaggtgcttgcataaactgggaaacttaaaatccaataactgctcctctcccacctgcgaccctcatcatccggtctgcccttgaccttcgctttccacttctcagacttccatttgcataataaaatgacttt

SEQ ID NO: 470351 - DNA, 2116 bp, Homo sapiens
tgtgtgtgcggcgtctgcacgctcccgtgtctgcgtgggttttctaggggcactccgctttcctcctacatcaaagatgggatgtgaaggaaatggcacgtctgcgtggtgccagcctgagtggctgtgagtgtgggtgagtgggtgtgggtgtgtgggtgtggtgagtgggtgtgggtgtgggtgagtgggtgtgggtgtgagtggtgtgggagtgggtgagtgggtgtgagtgagtgtatgggtgtgagtgggtgtgggtgagtgggtgtgtgtgggtgtgagtgtgggtgagtgggtgtgggtgtcagtgggggtgtgggtgtggataaatgggcgtgggtgagtggctgtgagtgtgggtgagtgggtgtgggtgagtgggtgtgggtgtggatgaatgggtatgggtgtgggtgagtggatgtgggtgaatgggtatgggtgagtaggtgtgggtgacagtgtgagtggctgtgaatgggtgtgggagtgggtgtgggtgagtggctgtggatgtgggtgagtgggtgtagttcagtgggtgtgagtgggtgtgggtgtgagtgggtaggggtgtgggtgagtgggtgtgagtgggtgtgggtgagtgggcgtgggtgagcgggtgtgggtgtgagtgggtaggggtgtgggtgtgggtgagtgggtgtgggtgagtgggcatgggtgtgagtgggtgtgggctgtgtcttagtgccggagatagacaattaacacataagacagatggtgcgtcagtggacacacctgctccagggaaaaaaggggaaggggagcttcctggaagaggaagaaagtggaaggccccacgggtacaattacactgagcagcagagaaagagcattgaaagtcccacgtcccagacaacccctcagtgccaggcaatctgggacagctggtcaccctacgaggagctgatgtccccagagcagccctccagcaaggaaggtcaagaacagaaacagtggacactggagcacaactccccacacaccaagcagacgggtcctcgaggtgtctgtgagtcacgactcacagctgcagctacctccccgcattcacggcaaaactcaagcctccctccagccagcccagaccctggtccttgctgctgggagctgcaggaaaacctgtcctcgttcagttccaactctaacgagcgcaaagccatcaagaccccgggccgcatgggccagctgcgtcccgtgtccccaaccttaccctcgggcctcagtgctgggcgctcctgccgttgccggccctggtgctgcccgtgcgccgcctgcggtgtcccggagcccacgcatccctgcacctttgagcacagtccttttcctgagcgctccctaaattatcccaactcaagtgtgacttcggggcctgctcttcccaacccccttccccaccctggttccaaaccggagctgcagcagttgctgagcgcggctccttcacgccttcctgccgtgagcgttcctcaccgccgaggcttcctcctcctgctcccaaaccgtgacccggacctctctggatctgcatcctccccctagtaaaatgggagacacaccgctatccagacaactgggattcctggaccagacttttcttttgagaagcttctggagcccattgtgctttagattcatccacccttcctccagacgctgggcatctctctcctctcctctcctgctgaccccaccattcggatggcgcctgtcaccctaactgtctgcacaccccaggttcctccccaccccacccctctgccctcctttttgtctgatttgccaactggtcctcctggttctgccttgtccactgtggtgttttgtttttagggttttaaaactaatttatttagccatgtaaagaaggtgcttgcttctgctttaccttctgccatgattgtaagcttcctgaggcctcccagccatgcttcctattaagcctgcagaaccaactagggtctaagcccgagtcctgaggctctccaccaacctgtgcctctgagaaaggaagcgcgaatcctccaccgcggggcctgcgtatcccttagtttgtatttgatacttgccaaaagagctctgc

SEQ ID NO: 470352 - DNA, 1075 bp, Homo sapiens
tgttcagctctaggcactgaggaatcactagtgtacaaggatggtcatcggagagctcagtgtgctctactgtcccatggatcactccaagctgtcactgacctccaggaaggaagaacgaagggttccatgcggcgtctccatgcaggtcgtgacagtggggcctgtggttgaatggcatccagttgagttcctgatctctcttgggtgggctcctggctctggatggctgcggatcatcaggcagggcagctctgtcactgttctccggaaagcaggttggccaggtcccctcgcctaccaggacccctacccgtcatcaccagggcccgccatggggcatccccagaaacacaggtggagctgcaatcccacatggcagaatgaagcatgggaggccacgctgaccagagcccaggggtcagtttctgggtggtctggccctggatgggttgccctgtgggggcgggagaaggagaagagcaggctttttggagtgcgagaaagcggccgggagtcccctgactgggagaacagtccactgtgtgggaagggggagaggaccataagtgaagaagcctttggcgggcagcagaggtcaaaccccagagcagaggagatgagaggcccggccagttccgaggccttcccagaggaaacctcgcccacagatctgcaggaagttgaactaatgagttggatactctccccatctcaagatctttgctttaatcccttctgcaaagtcccttttgtcagagaaagcttcggagatggacaacgctcagccctgtcctcaaaaatttatggtcaagtgaggacagaggaacatgtacaaccgtcttctacatactactcattcaacactcacgacaaccctgtgagacagagcaggtgtctgtgcccgagcaagctggctgcagagtccgtgttcttcttttattaaatttcaacttttattgtagattaaagggtatatgtgcagatttgtgacacgggtaaattacatgctgctgagccttggggtcccagtgatcccatcacccatgtgataagcatagcacccaacgggtgg

SEQ ID NO: 470353 - DNA, 709 bp, Homo sapiens
aggttgcagtgaactgagatcatgccactgcactccagcctggacttagtcacaggccatacctcaccgcagaggtggctgggaaatgagtctaactgcagctcggtatgtttcattactaacaggacggtgcggggtgttggggaatggtgttggcaggggcctggaaccgtgtctggcacagtgaagactcggagtgaacgaatgcagaatatgtttgggagcaacgccagccggcagttccgggaatgctgcagcccagtggccacagcctggcaccccagccactttctgcagcctcacccatgcccagtatcctcttcccaatctggagtcctcttgccagctagtcctgacactctcccagggaccctggagctggctcattcattttccaaagatcccagggtctccaacacaaacacaggtatccagcacgcaagagtgtgtgtgaggcttcctaggcaggatggagccagtgaccattaaggtccttttagctctaagaatgtgtgaggcaggtcgtgcctaagctggccagggtccggagggacaacggagggtcccctccttgtcacagctggagagagatgatgtatgctctgagccttggggacttgttcatctgcaagggggacatgctgtcatgctgtcctcctcagagatggtctggatggctggcacatacctggcctgctgtcacattcta

SEQ ID NO: 470354 - DNA, 1094 bp, Homo sapiens
gcgtccggtcgcccgggcaacgcgccaccgcgtcgcagccggagtgacgcgtggccgccggcacccggagctcctgggcacacggcattggcaggggccgcttcggcagagtgatgactgatgatgagtccgagagcgtcctctccgactcccatgaagggtcggagctggagctgcctgttatccagctgtgcgggctggtggaggagctcagctatgtaaactctgctctcaaaactgagactgagatgtttgagaaatattacgctaaactggagcccagggatcagcgacctccacgattatcagaaattaaaatatcagcagcagattatgcacagtttcgaggcaggcgtagatccaaatcccggacaggtatggaccgtggggtaggcctgactgccgaccaaaaacttgagctggtacaaaaagaggttgcggacatgaaggatgacttacgacacacaagggcaaatgcggaacgcgacctgcagcatcacgaggtacaccttcctgccagcgcagcctgtcctgcccaggctccccacctctaccccactgagaggtatctagagtgggttcatgtgattgttggggctttggaagaaacacaggctgtgaaaagagagaagccggtagtggctcagtccaagtctgaaagcttcaaaaccagggaagccaatggtgcagccttcggtccgtggccgaaggccctagagcccccaggaagctgctggtacaagtccgagggtctaaaggcaaagaacctggagtctgatgcgatcattgaggaggctgaaattcgatggagtgaagtttcgagagaagtgcatgagtttgaaaaagatattctaaaagccatatccaagaagaaagggagtattttggccactcagaaagtgatgaaatacattgaggacatgaaccgccggagggagatggaccttgggctgttatgagaaaaaaggagaatttggggggtaaccttcatttccagagatttttacaacacgtcaagctttagatcctggagacaaggtagggttattactaatcctaatatgttaacagtaataaaaattatgtaaactacc

SEQ ID NO: 470355 - DNA, 1389 bp, Homo sapiens
agtggggagtctgctttctcctccgtcctgtgtcttgggctcaggcatgtgcctgctgcccctttgtggccacaagtatgtatcgggcccagggtggcactcgggaccctcccctgttgggcttagagacatggacggcccttgctggctggaagctgcggggggcaccgacttggagaagcaccgggacctgctgatggtggagaatgagcgactgaggcaggagatgcggcgctgtgaggccgagctgcaagagctgcgcacaaagccagcaggtccctgcccaggttgtgagcacagccaggagagcgcccagctccgtgacaagctgtcccagctgcagctggagatggcggaaagcaaaggcatgctgtcagagctgaacctagaggtgcagcagaagaccgaccggctggctgaggtggagctgcgactcaaggactgcctggctgagaaggcacaggaggaggagcggcttagtcggcgcctgcgtgacagccacgagaccattgccagcctgcgggcccagtccccacctgtcaagtatgtcatcaagacagtggaggtggagtcgtccaagaccaagcaggccctcagcgagtcccaggcccggaaccagcacctgcaggagcaggtggctatgcagaggcaggtgctgaaggagatggaacagcagctgcagagctcacaccagctgaccgcgcggctccgggcgcagattgccatgtacgagtcagagctggagcgggcccatgggcagatgctggaggagatgcagtccctggaagaggacaagaaccgggccattgaggaggcctttgccagagcccaggtggagatgaaggctgtgcacgagaatctagcaggcgtccggaccaacttgctgaccttgcagccggcactgcggaccctcaccaacgactacaatgggctcaagcggcaggtgcgcggcttcccactgctgctgcaggaggccctcaggagtgtcaaggccgaggtttaacttaattctttcaagctgtacttgtacatatgagaataaccagtgcctcttaagtgcctcctacatgtcgagctgtttatagccgttagctccttgaatttgtatgatagctttgcaaagactaatatattttgggaacagaatatagttcttctcctttaaaagactatatcagtaatacatggacgtggtgaaaagtcaaactccatagcagggcatcaggtgaataggaaaggcctctctgccacccacccaactcttccaatgtggcctctcagcatttcccccgactgttctgagcatgcttaagccaattgtgcgtgtgtgtgtgtgtgtgtgtgtgtgtgagaatatatggtaggcccttcccccatccacaggttctg

SEQ ID NO: 470356 - DNA, 690 bp, Homo sapiens
cctgtctgtaactaagatggggaacccaacggagggaagagaattggtgatgtgtgtggctcgtgcctattcaaatgcttttccagcttcttattgggtcatttggctctatagcagacacatctggggccagcatcactctgatttcagcctccatgtcatggagcctcccactgccagaaagccagtctttccacattctacccagggactcatccaaccatgtgggaaagcctggaatggtggagaaatgccccagcctcctgaccttcatggaaacaaccctggaactctcaggggtcttggaggtcccaaaggaacccagtcttcagtacctacagcagtgaccttgacaatgcccatgaactgggtttctacctccctcccccaccaactctgctgctggcatgaccttctagatatactgcctgtacccaagtccttgtctcaggctcactcttcatttcttccttgtcgatttgtaggagctatttatgtattctgaatagtattcctttgtcagttatattattgtcaatatattctcccattctatgagttttctttttcacttttttttccctgccgtcttttgacaaacagacattctttagtttaatatattctaattgattaaactcttacttctgtatttttaccttattactttaaactttattcttatgcttt

SEQ ID NO: 470357 - DNA, 2686 bp, Homo sapiens
ggacacaatgtcatgctgaggcaggagaaaagggtttagagacagggaaatgtgccctaactgtaaaatagggctggcaacaggacccggcccttgcccttgtgaaaacgaagccagctgatacccaaggcctgccacagaatcagcccccatcctgagcctgcatcagccaagaaggaaaaaggttccacagccaactgcaagtgagtgatgggcgcgcgggggttccttaggctagtctatgtctggctattagaaatgttgcataataataaaaagcttaacgtcctcgcctgcagggaggggctattaaaaaaaaagcagcagcgtgtcccccggcccctaaaggcccacctcgctgcctctctttgtctcccccaagcccagcccccacagcactcttgtccgactaggaggacttgagaggcctggcagtgcccagggcaggtcgggaggagttggagcctgggtaggtgcagcaaggtggtctgcaggggaacagagtcaagtgcaggctgagccagaccctcagggcctgggcactggagggcagggcaggacagaggaggcgggaggcccggctgccctggcaggttggcgagcagacgctggcttcgtagacttcaccagcatagaacacaaggctgcctctgcaggagacctggatccatggaagggatgtggtggagccccctgcaaactcccctgtctaagccccagctccctctctgccccacagccagtgctttgcctacaggatattccatttggagccccaggcccatgtggcccttctgccagagccagggagcccactgcagccctgagggcactcacatggacatgttctggaagcctgtgccattctcccagctgtcgaagacggggattgtgcagggtccgtataccgagctcttgacagagagggaaagcagcaccaggagggctggggcccctgaggggtgggacaaaggctcaggagatgtgggagagggctgaccctcggtccctggggcggtccctggggctgctgacacagaatttcactggtcaagggacaactgagaggagactgttgtgagcccccaacttcagagcaatgagcctggtggtttggaggaagctctcctccaagatgatgttagtgacggctctacgatggaacagtggtggagggaggagtggtcacactgggaaggtggtggtggggagcaaatgggagggaggactggggaactgctgaggaaatagaaataagcaagaaaggggcaaggacggtgatgaaggtaccagtgatggtgctgctggagatagagaaggtggaggaagtgatgatggtggagatggaggtggagtaggtggtgatggtggtgaaggaggtagagaaaatgaaggcggtaatggaggtagaggaggtgatgatggtgctgatggaggtggaggagatggaggtgatgatggtgatagtgcaggtggaggagatgatggtgatgacagaggtggagaagatggaggaggtgacggtgatgatagacgtggaggaggtaatgatgatgatagaggtggaggagatggaggaggtgatggtgatgatggaggtggaggaggtgacgatggtgatgacagaggtggaggagatggaggatgtgatgacgatggtgatagaggtggaggaggtgatgatggtggtgacagaggtggaggagatggaggaggtgatgatggtgatgatgaaggtggaggaggtgatgatggcgatgatagaggtggaggagatggaggaggcgatggtgatgatggaggtagaggagggtgataatggtgatgatagaggtggaggagatggaggcagtgatggtgatgatggaggtggaagaggtgatgatggtggtgatagaggtggaggagatggagcaggtgatgatagtgatgacggaagtggagcaggtgatcatggaggtgatagaggtggaggaggtggtgatggagttgatggaggtggaggaggtggtgatggaggtgatggaggtggaggtggtggtgatggagatgatggaggtggaggtgatgatgatggaggtggaggaggtgatgatggaggtgatggaggtggaggaggtggtggtggaggtgaaggagatgatggtggtggtgaagaaagtggaggaggtggtggaggtggaggaggtgatgatgatggtgatgaaggtggaggaggtggtgatggaggtggaggaggtgatcatggtggtgaagaaggtggtgatgtacgtggaggaggtgatgatggtggtgatgaaggtggaggaggtgatggcgataacggaggtggaggagatggtgatggtggtgatggaggtggaggaggtgatggtgatgatgaaggtggaggaggtgatgatggtggtgatagaggtggaggagatggagcaggtgatgatggtgatgacggaggtggaggaggtgatcacggaggtgatagaggtggaggaggtggtgatggaggtgatgatggtggaggaggtggtgatggaggtgatcccgttgtatgatgtggtgatggaggtgatggagaaggattaggtagagttgtagttgacagaggtttatgtgttgtctattttggtcaggttgacctaaaaaaaataagtataagacgattggcaatcgtatcaaaggggagggc

SEQ ID NO: 470358 - DNA, 682 bp, Homo sapiens
tgagaagtaggagtgggagagacttgtatgctggctcagtccagagcaattccccagggatcctggagtgtatgggggatccaggaggtagaggggatggtaggaaacaagagagctgacccaagcctgctctatctcaaatggcagctgctgcctggacctgcccactgtcaccctgggggaatgcttggaggtcaccctcagcacggcccactgtctatggtgtctgtggatttatctggaattctcactgagtggagttggaaagaggaaaggctttacagtttctctgaaatacgttggtatgtctgtgagggtgttgccaaaggagagcaacagttgactcagtggactggaagaggcagacccaccctcaatctgggtgggcacaatctaatcagctgccagcacggctagaataaaagcaggcagaagaacatggaaagactagactggctttgcctcccagcctacatctttctcccatgctggatgcttcttgccctccaacatcggactccaagttcttcagctttgggactcaggctggcttccttgctccttggcttgcagatggcctgttgtggaatgtcaccttgtgatcatgtcataccatgagggagtgtcttatcatcacacccatttcacagatgagaaaactgaagttcataaaatcgctgtt

SEQ ID NO: 470359 - DNA, 1041 bp, Homo sapiens
attgcccgcggcggcagggctggcagggccggctgcgctgccggctgttccgagtgtggagcccaccaagcccatgcctacctggaactccagctggcccagaagcgccgggtgcagccccggttcccgctcgcgcctctccctccacacctccctgcaagctgagggagccggctctggccttggccagcctagaaaggggctcccacagtgcagtggtgggctgaagggctcctcaagtgctgccaaaatgggagcccaggcagaggaggcgccgagagcaagcgaaggctgtgaggactgccagcacgctgttctgctttcaggggagcccacatcaagacgctggttaatcaccctgccagtcacatcaagatcaaactccatagggcatcttaaaggaacaccaggaaaaagcaaggaggaaataaaggcaactgtgtgtgctccaactttgaaaaatggattttggattgctgagcgggtcatgactgttagtggacacgagggggcagcctcatcccgggctctgagggaagagctacggcttcttttttcctcctgtgcacacactgtcaaagaactgctgtgtgtgagagaaaaaagcacagagctcctcctggaaaggagcggggtggactgttcctttgcaaacattcctcctcttgcccggtgacctcatccaattccatgactttttaataacagctctaaggtgggaattgaacaatgagatcacatggacacaggaaggggaatatcacactctggggactgtggtggggtcgggggaggggggagggatagcattgggagatatacctaatgctagatgacacgttagtgggtgcagcgcaccagcatggcacatgtatacatatgtaactaacctgcacaatgtgcacatgtaccctaaaacttagagtataataaaaaaaaaaaaattaaaaaaaaaaaaaaaaagtaatttggaatttccaatctgagaaagcagcagtgcagatttttagctttttctcctttttttccccccagcatatt

SEQ ID NO: 470360 - DNA, 1977 bp, Homo sapiens
ctcgtcacccccttgaggaggcagatgtgaagcttttggaaatcagaacacatttgctggtatagtttcagaatgtcaagtactgtgtcctactggatcttaaattctacaaggaacagcattgccacattgcaagggggtagacgcttatactccagccctgagcagataaatgaagtgcttcgagctggcgagacaacccacaagattcttgaccttgaaagcagagtcccaaattcagtgttgcggtttgagagcaaccagctggctgccaattccccagtggaggaccggcgaggtgtagcctcctgcctgcaaaccaatggactgatgtttggcatcttcgatggacatggtggtcatgcatgtgcccaagcagtgagcgagaggctcttctactatgtggcagtgtccctgatgtcccaccagaccctggagcacatggagggagctatggaaagcatgaaacccttgctgcccatcctgcattggctcaagcacccaggggacagtatctacaaggatgtcacatctgtgcatcttgaccacctccgtgtctattggcaggaactgcttgatttgcacatggaaatgggactaagcattgaagaagcattaatgtactccttccagagactggattctgacatctcgctggaaatccaggcccccctggaagatgaggtgacaaggaacctgtcactccaggttgctttctctggggcaacagcttgcatggcccatgttgatggaattcacttgcacgtggcaaatgctggtgactgccgagccatccttggtgtccaagaggacaatggcatgtggtcttgtctgccccttacacgtgaccacaatgcctggaaccaggccgagctgtcccggctaaagagggagcaccctgagtcagaggacaggacgatcatcatggaggacaggctactgggcgtcctcatcccctgcagggcctttggggatgttcagctgaagtggagtaaagagttgcagcgcagcattctggagaggggcttcaataccgaggccctcaacatttaccagttcacacccccacactactacactccaccctacctgactgctgagcctgaggtcacataccacaggctgaggccccaggataagttccttgtgctggcctcagatggcctgtgggacatgctgagcaatgaggacgtggtaaggctggtggtggggcacctggctgaggcagattggcacaagacagacctggcccagagacccgccaacttggggctcatgcagagcctgctgctgcagaggaaagccagcgggctccacgaggctgaccaaaatgcagccacgcggctgatcagacatgccatcgggaacaatgagtatggggagatggaggcagagcggctggcggcgatgctgacattgccagaggacttggcgaggatgtacagggatgatatcactgtcactgtggtgtattttaactcagaatcaatcggtgcatattacaaggggggttaagaatctcccatcctattgtcaaggttaacataaatgctcttctaaaatgtttcacttactcctaaactagctatccaaaccttactattaaaagcgcaggcagatttaatttgctaaatagactaacaggaggaaaaaaacaaacagcctagctttaaaaaacagtgaaatagcagtgatttcatgtccctgtatgttctgattaagtcttatatgcagagaggacagagcataaagtctataggaattggcttgggcttgtgtagccccagtcatttgataaagatgttgttaaactgtgtcagcctgagccttcaaagggtaaatttaatcatgattctgagaataaagaacttcgggagcttcttaggtcttgccacaaaatctgcaatttgatattctcctgattcacatctgggggatccttagtcactcagcatcattggcgcccttgggaacttg

SEQ ID NO: 470361 - DNA, 637 bp, Homo sapiens
caaaaagaacacgaaaagatgctcgacatcattagccatcagggaaatgcaaatcaaaccaatattagacactactacttcacacctactaggatggctagaattaaagatcagcccactagaccccaactccagcacctggaaggccaccctagacacaagggcacattctggaggggaaggacttgcagtttgaaggccagtaaacttgggtgtgagtcctgcctttgttctcactgtgtggcctcaggcacggtactgcccctctctgattctaatttcctcatctgtaaggtggggtcctctcggaaccccagaggacggcccagaggcctgcgggagaggccgggtggcctgctggtgttggcgatacccaacctggtaacacccccccgctacactcccatggctgccctgtgggggccaccatcaggcccagaggaagaggcctctttgtacatccagtgtggcccacaccagacccctgatttccgggtccactcctgcttgccttaaggctgccctatcggggcttcttttccccaacctctgtgtctgccaccctcctccatacaacagggcttccatgagcgtcaagtccatgccgacccctgtcgcagcccacaagtcctctcac

SEQ ID NO: 470362 - DNA, 1703 bp, Homo sapiens
gctgcgagatccgccgctctgtgtgtggcaccagcgtcgctgtcctggtggctgccagtcccccggggcctaaggccccaaccccgtccatgtgcccaggatgttctctccgatgctttctgcatcttctccatgtccatgccggcccggcccggcccgccccatcatcaccgtgtcctccttacagttccggagattccaggaggtgacctggacacacctgcagaacatcgccagcaactacaacgtgtcctacaacgttgacgtccggttccggagcctggcggaagagagccaggctgtggctcaggcagtcaaccggtcacaggcctcggtgcagggggagctggcgcagctcaaggcctgggtgaggaagctgcagcgccgaggccggaaagtagacacgcggctgcgggccttggacctcaccctgggcgagaggagccagcagcgggcccgggaaaggaaggcacacaaggcccagagggacgccctgcaggactcactggcacgcctggagggcctcgtccacagccagggcgccaggctggctgctctggaggggcggctgcccgtggcccaccctggcactgcagccctcgggccggccctggaccccgccactcccgagtacggccctcatgttcagtcttcccgcctgtggaactggggtgatcccatcaagagagtgaaggagacgctgcaggggagccatcggcagggccagcgcagagtcatttgcggcgtgggccccaccctcgttttcccaaacgcctccaccaggaacgtggtcttcctcagccctggtttcgtcactgccctgcgagccctgtccttctgcagctgggtccgcacggcctccggccgcctgggcaccctcctgtcctacgccaccgaggacaatgacaacaagctggtgctgcacggccgagactccctgctgcccggatccatccacttcgtgatcggggacccggccttcagggagctgcccttgcagctgctgctggacggccagtggcaccacatctgtgtcatctggacgtccacccagggcaggtactggctccacgtggatcgcaggctggtggccaccggctcccgcttcagggagggctatgagatcccccccggagggtccctcgtgctgggccaggaacaagacagcgtggggggcggattcgacagctccgaggccttcgtggggagcatgtctggcttggctatctgggatcgggcgctggttcccggggaagttgcaaaccttgccatcgggaaagagttcccgacaggtgccatcctgacgctggccaatgctgcactagcaggcggatttgtgcagggggccaactgcacctgcctggaacgctgtccctgaggccgagccgcacgggggctgaggccagcaagggcagcatgcccccatccacattccgccaccgccctccccgccagcacattctacaaaggccacccccacccgtcctggctttgcacacctgcgccctcacataggggcctcagtgtctgtttttttccctttgtgtccatgtgttctcatcgtttagctccaacttatgtgagaacatgcggtatttgcttttctgttcctgggtcagtttactaagggtaatggcctccagctctatccatgtgcctgcaaaggacacgatctcattcttttttatggctgcatagtattt

SEQ ID NO: 470363 - DNA, 672 bp, Homo sapiens
tctggcagagagcaggtactcaataaaaatatgttgtgtgaatgatatgtctgattccacctcctgcattcttggaaatgcagtgttggcagggtggtcacaggagaataaaaattccagacagcagtttcacatgtctagaggctatgggccgagaagagcctgaaaaactacatgtggaccaagctggctatgaccgacttgaccccacatggtgctggattccacctaggtttctccccggacctcgttatatgctcattaatatcctaaatcacacagccgtcagcgtcagcacagttccaagaataccctatttggtggaagtggtaaattaccagagatgggacgactggctaagagttagccagatgaaggaagggaatcatcttccaggatggtacaacagcagatgtgaagatctggaggcaggacaaaacagaaggctagtgtgactggaagagagcaaatgaaacgagagaaaggacactatagtctgagtcgaaagactcatgactgtcccaaaaggcattagtccatatagagtagtttggcggtcttcagaggcttagggcataggtggttgtcctcctgctagatgattgggagatctccaggtaacctttcctcggagcctctcatggacagaagtgggaattgctcactggggtt

SEQ ID NO: 470364 - DNA, 821 bp, Homo sapiens
aagtgttctacagtcctatgattaagtctcagtcttttagtgagcctgtgtctctgggctttgaacttcataagcgcttctcagttctctctttctctcttagtgcccctggattccgtgaaggccccctcaattctcatgtgttctggattgtggctcaattattgcagagagggatggctctcaacctgaaaaacaaagagaaacgaggtgaagtattagtgtctctaaagataattagacccagagagataagtttaaagtctacctttaaaaaaaagcagacaaagctgaatgcatttccagtcatcaaaagtgttcttcataatctaagcatcggagcagaggagagagcaggagagaaaggagcacgcatatttacgcttcatcaagaaagctgcaagctcaggaacttctgcatggtggaaaggatcagccacttctctctgctctcttgggtgtggatggcatgtcaaaattgctgaaactcattgttcaattcccacctatgagtgagaatatgcggtgtttggttttttgttcttgcgatagtttactgagaatgatgatttccaatttcatccatgtccctacaaaggacatgaactcatcatttatatcacactctggggactgtggtggggtggggggaggggggagggatagcattgggagatatacctaatgctagatgacgagttagtgggtgcagcgcaccagcatggcacatgtatacatatgtaactaacctgcacaatgtgcacatgtaccctaaaacttaaagtataataaaaaaaaaaaagggaaaaaaaagaaacctt

SEQ ID NO: 470365 - DNA, 1998 bp, Homo sapiens
gctcagagctgggagccgagtcaccatcgcggatggtggcgtcccaggcctacaacctgacctctgccctcatgcgcatcctcacgcgctcccgcgtgctcaacgaggagcccctgacactggcgggcgaggagatcgtggcccagggcaagcgctcggacccgcggagcctgctggccccggctaacctcagtgacgtggtgcagctcatctttctggtggactccaatccctttccctttggctatatcagcaactacaccgtctccaccaaggtggcctcgatggcgttccagacacaggccggcgcccagatccccatcgagcggctggcctcagagcgcgccatcaccgtgaaggtgcccaacaactcggactgggctgcccggggccaccgcagctctgccaactccgttgtggtccagccccaggcctccgtcggtgctgtggtcaccctggacagcagcaaccctgcggccgtgctgcatctgcagctcaactatacgctgctggacggccgctacctgtctgaggaacccgagccctacctggcagtctacctgcactcggagccccggcccaatgagcacaactgctcggctagcagaaggttccgcccagagtccctccagggtgccgaccaccggccctacaccttcttcatttccccggggaccagagacccagtggggagttaccgtctgaacctctccagccacttccgcctgtcggcgctggaggtgtccgtgggcctgtacacgtccctgtgccagtacttcagcgaggaggacgtggtgtggcggacagaggggctgctgcccctggaggagacctcgccccgccaggccgtctgcctcacccgccacctcaccgccttcggcgccagcctcttcgtgcccccaagccatgtacgctttgtgtttcctgagccgacagcggatgtaaactacatcgtcatgctgacatgtgctgtgtgcctggtgacctacatggtcatggccgccatcctgcacaagctggaccagttggatgccagccggggccgcgccatccccttctgtgggcagcggggccgcttcaagtacgagatcctcgtcaagacaggctggggccggggctcaggtaccacggcccacgtgggcatcatgctgtatggggtggacagccggagcggccaccggcacctggatggcgacagagccttccaccgcaacagcctggacatcttccggatcgccaccccgcacagcctgggtagcgtgtggaagatccgagtgtggcacgacaaagggctcagccctgcctggttcctgcagcacgtcatcatcagggacctgcagacggcacacagcaccttcttcctggtcaatgactggctttcggtggagacggaggccaacgggggcctggtggagaaggaggtgctggccgcgagtcacgcagccctgttgcgcttccggcgcctgctggtggctgagctgcagtgcggcttctttgacaagcacatctggctctccatatgggaccggccgcctcgtagctgtttcactcgcatccagagggccacctgctgcgttctcctcatctgcctcttcctgggcgccaacgccgtgtggtacggggctgttggtgactctgcctacagcacggggcatgtgtccaggctgagcccgctgagcgtcgacacagtcgctgttggcctggtgtccagcgtggttgtctatcccgtctacctggccatcctctttctcttctggatgtcccggagcaaggtggctgggagcccgagccccacacctgccgggcagcaggtgctggacatcgacagctgcctggactcgtccgtgctggacagctccttcctcacgttctcaggcctccacgctgagggtgtccgtgcgtgactggacgggggtgggctgtgtgtgtgacacatcccctggtaccttgctgacccgcgccacctgcagtctggtgtgctggccctccagcgaggga

SEQ ID NO: 470366 - DNA, 537 bp, Homo sapiens
tctgatgtgctgattctacagcatggttatgaatcttaaaaaaccaggtttcgtcttgccgggcatggtggctcatgccctctctcacaccctaaatgtactcacagattttcagaaagacatttctttggagaaggattccatcattaatccccggattacatgcagcaaacaggaaagtgaaaattcagagggcaaaagcaccattttctcttggcccgcagagttttggtgctatcagcagagtaaccaatactgctctgctcttctggaagccacagttaaaggaatacaggacttgactagcaggcaaagagatatcatgaagctcaatgcaaaagagaccagagaaaaaccttcccatgagtcttgggactccataaagaaggcagaagtccccttgaaaaggttcatggcagctttttctgtgttcctcaaggagtcatagggactttacaatttcatgtaacattttcaagtcactgagttactaaacttcatgtaaaaactttttactatttttgaattatctctaaa

SEQ ID NO: 470367 - DNA, 1128 bp, Homo sapiens
caaggacagcttggaggtacacaatggggaatataacaaaatcgacagacctgaaccctgagttcaaaaaggttttgttttggggctctgaagtagtagtcgttcaggccagtaagggcaaaggtgtgatcctggaagaggcaaaagactgtgtgattctttggatgtggaaactacttgatgtttttgaggaactgaaagaaagccggtgtagactgaacttaatgatgattaatcagggattccagagaggagacttattaatagagcatataattgagctatttcgatttatcagaactataatctctgaaggtgggatgaaagaatctgcatttgaacaggtagcatttgagaaccactaccatggactatactgttatggaagaaaaaatgtactttgtgaaactctaaatttccatttaaaatcaaaattgggagaggtaagaaatggcaaaacaggacatgatacttgctaaagcaagaaggtccctccttgcatctgtttttaaaacctctcaggtccatattgctgagtcttcactggccataaacacttccaggaacttcaggctgattgaattgggcaccagattttatcattgggcagcatttgctgtggctatgacttgggcattggagttgctgcttgtataataacttgagtgtgtgtgacatcaaaagtctattttcagcatttgcatattgcatatttaaacatattgggattttcttagtctttgtttatagtttaatctttatattctaagaaaatgtcatttttagctccagtccaaatactgtataatcacagcactctgatgtaaactgcagagctgaacttgagaaaacttaatacattccacttcgtaatgtaataaccaagttgaaatccaactgcactaggaaatgaccaagaatgtaagggcagtttaaagcctaatgatcatatttgctgctgctgatggtgatgatgatgcccattgcctaaaatgactgtagccaaggaaagaaaagcaattgattctgagctcgtaaaaaaaatttttttttaaagaaaattgtttcattcaggaaatgttcttgtgctttcccaaaatgccaaaaataaataaataaataattttc

SEQ ID NO: 470368 - DNA, 581 bp, Homo sapiens
ccgagcacccatttctagtcagcatgtgcttgaatcttggaactggaacccaaagctacaggaaggagccagggattggtgctcttttcctctccttgagaggatgcacagaggctcgacagcaacgtgtctgtaaacctgagagcatgtgtatggcacttcacacccaatctgccaccctgatcatccccaagattgttcttgttatcctggttcctaggatctcaaagaaatgcaatggctgctttggccttgttttgctgttagatgcccttctgcaaaagccagaaaaagtgattactggaagtatgggatccatccggccacagtttgtggatactaagggaggaatgcagtttggaggaaatctgagatggtggatgatggatggcttgttgatgatcggagcagtcgggtaccaggatcatgagacttacaagtccgaggtcaaacagactggccttgtagcacccttgaccctgtggggaccgtaggcaaattatggagctcttttgaacctcagtttctgcattcgttgaaaaaggactgaggttcattcttatagcagggttgcatgaaga

SEQ ID NO: 470369 - DNA, 853 bp, Homo sapiens
ttccaacacttgtttctaggagcatgaccttgagaaccagttttgtggaagacaatttttccacgggcagaggggaggaacagaaggatggtttcgggatgaaactgctccacctcaggtcatcaggcattagtgagattctcataaggagcgtgcaaactggatccttcgcgtgtgcagttcacaataggaaggtaactgtgatggttaatattgagtgtcaacttgattggattgaaggatatgaagtactgttcttgggtgtatctactccaagtttttcagcttttggactcttggacttacaccagtggtttgccaggggctctcgggcctttggccacagactgaaggctgcactacttttgaggtttggggactctgactggcttcctcgcttctcagcttgcagacagtctattgcgggacttcactttgtgatcgtgcaggcgatggtgagtttgaaccagattgatgacagatggagtaatgacaagtggtcaaaatctggatatactctgaaggaaaatgtggcaagatttgtaatagactggatggtcaaggtgagaggaaaacatcagcgtagagtgactccaagatttttggaagatcaggttctgaagtagaggggagatttttttttcaattccctttctctgtaatagcaatgggttcattttattagcaaatggcaaataagtgtagtttaaaaggatcagtaaaatcttggtctttttattatgttctttatgattgtttcttttttgatggcattattcttattttactatttatatcagaatgcttccataaagaatctttggatcacaggttttagaatctttatttaaaa

SEQ ID NO: 470370 - DNA, 741 bp, Homo sapiens
gacctgggcctccaggacaacgatcctgcccctgcctgaacacttcagtcacaccgtcctcttggcactgttctcacgatgatgagttcttgtgcaatctggttgtttaaaaatgtgtggcagttctcccttcattctcttggtccccgctctggccatgtgacagattataagtttcttgagggctccccaaaagccgagtggatgcctccatgcttcctgcactgcctgcggaaacataagccaattaaacctcttttctctataaattacccagtgaagagaaagctcagagacctaagggagatcaacgccctgtgctctgtggccaaaggcccgagagcccctggtaaactactggtagaagctgaggtgggcctggactgctgtggaacagcacttcaatgtggagtgctggcaatagtgctttgttgggacagtggcagcacaatatggtttttgtgtatgggtgcactggtggtggcagggtggccgtatggtgctatcctcacacatgtgttctgggagtaaagcaggtagattaatttttacatctttgtaaatttttcaatactccatttgttattgatatctagtttcataccattgtgatgagaaatagttctagatatgatgtccatcgtcttaaatttttaaagactcattttgggtcttaacatttggtctctgctggagaatgtttcatatgcactaaagaaaaatgaatattctgctgctgtt

SEQ ID NO: 470371 - DNA, 724 bp, Homo sapiens
gacactagtgtgtcatctcgtcgtcagctagtagcagacgactcgtgtcgcagtacagcacatgtcacagcgcatctcatcatctgaccgtcagcagcacatcagctgcatcattacatctgtatcgtcgcagtctcagcatacgcgtcatcatcatcgtgatcgtcagcgctatatcagcgtctcagcgtcatcacagcagcatcgtcgtagtgtgcagcatctcatcatgatcatcatctgcatcagtagcgatctgaatcagcgtcagctatcatcagcatcagtgatcgtcgtcatcagcaacagcatgtgcatcatcatcatcagcatcagcgtcatccagcatcgtcatcatcgtgtgatcagcactatcatcatcatcagcatcgtctgcatctcagctctcatcgacatcgctagtcactatcacatcaatgatcagtcagcatccagtagcatcagcagcagcatcatcagcatcatcatcgtcgtcagcatgagcatcgtaatcatgaatagcgtcatcatcgtgtgcatctacggcgtcgtcatcgtcgtgatgatcgacatcatggtctcgtcatcagctgatcgtcgtcagcagcatgtagtctcatcgacgcgtcacagcagcagctcagcacagcagcacgtaacgacatcacacaggacatcatgagatgtcaagtgacgcaaagagtatcaatacagcagtcatgtc

SEQ ID NO: 470372 - DNA, 609 bp, Homo sapiens
cagtgtattcatacgttgaatcggttcgttccccagtttgtgcgatgaattcaatgatcaagcggtccattcgccatgtgaagggtccaaccgtcccttctgttgtacgattagaagagggacaccgtgaccagcagaactgctcacagaacaaaaccaaccatgatactggcccgtcttccatgtccacaacgctgcaggagatcttccaggccgagaacaccatcatgctgctggaaaggtccatcatggccaaggagggcccgctgaaggtggcccagacaaggctggagtgccggacccggcgccccaacatggagctgtgcagggacatcccgcagttgaagctggtgaacgaggtgttcaccatcgacgacaccctgcagaccctcaagctgcggctgcgggagacacaggacacgctgcagctgctggtcatgaccaagtgccggctggagcacgagctcgccatcaaggccaacaccctctgcatcgacaaggagaagtgcatgggcatgcgtaagaccttcccctgcaccccgcgcctgcaatttcactcctagatgtttacccaagagaagtgaaaacgatcctcaaatactcatacac

SEQ ID NO: 470373 - DNA, 661 bp, Homo sapiens
ctgccgccttctgtcaccacccaaatgcttgtggaaaaaatgaatgaatactactcaggctgtatccaattcaatggttctgaaatgagaaactgtgtcattcccagacttgatatcctgcaatggcccttgctagatacaccctcacatctcatggaagaacctgttgcatatcagactgaaatctatgtgaattatgccttgggcattcctcttttctaccagttgagtaacactattgaaaactacaatgctcatactccattctacactttttgtggtactcaggggacgtttactgtgattaaaggaactgcggagctcgccaaggtcataccagggacgtggcagagcttgggccggtgcccaggtgttttggcttggactccatcctccatcgcctctgagatgaagcccaaagtcaaaatcaagccatatcagacccctaggaaagctgcgccactaacagaagagatgctgccctggccctgcactttaagtgacaaaggaaaacgaatggaaagcaggaacagttgtccaggtgtccacccactccgccaatgccactgacatataggattctgaagagggataaattgcaaagctcaaggttcttagagatctagggattgacggataccagaaagcctttgaggaaaac

SEQ ID NO: 470374 - DNA, 720 bp, Homo sapiens
ctaaatgattgaatgagtaagtgatgacttccatactgggaaaggcagacagttcagcccacgcggcaggaatcccgggatgccaggacagcaaggtggtagaatcatctcttatctggaattccttgcgggaacaatggcaagcctttagcccagtcgggagtggcaatgggagcctcgctggatcaggagcacagtggacaccctgctggatccagaggggtggaagtcagccacgggtctgcgacggcagcaaacaacagtggtggatggagcgtgcccacaatgcctgtccagtgaggagatgctctgtggacaggctggtcagtcatagaaactgctattgggacctgagacatgaaggctctcaaaatctgaacacaggacctaggaactcttggagcaagaagaaattattcagacctgtggacttcacactgtgtaaaaatagcagcacagccctgtttatgaaataagcaattgcttgacactcccttgattaaaacaaaacaaaaaagtaggttgctcttgtagaaacaggtgtgtcctgcccaatggacctcccatttgtttctatccttgtgcagcccagaatggcctttgaaaatatttctcttgctcagctccctcattataaaactggaaaacaattgaatccctgaatggcgaagtgtcgtttcaaagccacaccactaagtctagacagttgttcttgtcatc

SEQ ID NO: 470375 - DNA, 1867 bp, Homo sapiens
aggaacagaccttgcaacaaggattcaagtgtgcggggttgatgtggaaggtgatgggagcactacatgagaataagagaacaggaatgagagtgacagtgagaataggaaatgagataaggcagggaaagcagccaacaaaacggctgttatcaaatcagctgtcaatgtggataactagaactgaatcctgctggatcacggatgtagctggaaaccaacattctcagcaaactaacacaagaacagaaaaccaaataccacatgttctcattcctgagtgggaggtgaacgataagaacacaaggaaacagggagggaaacaccacactgtcgatgggaagacgtttcctggagagaagagtttgctagccatcttgtttttggctgtggcagtccattccttcacctggaaggctcttgaagaactaaagaaaaatttaaaaatatattgtgcacggactagcctgattctcctcaaccaggggtaattttacgattcccctgcttattcttatggacaaaagactgtgaattgctgataaagacagtaggggcttcataatagtttgttcaattgcaggaagttcatttcaactctttcacaaatcatctggggccttcattttattatgtatggagaagatttacccagtggaaagaagcctaaagaaaagaagaacaacatattacttcctctctcgtctccatttccccagaaccataggtgaacccaatgcaatcacaagggtcctgaaaattagagatggaggtcgaaaagagtgcaaaggagatgtaactactcagaaaatggctggagagatccaacttttgtggctttgaaaatgaaggaaggggctgtgagcctctagaaactgggagagggaagaaagtggattctgcccttgggcctccagaaaggaaccaaagccattcagacatccatgggttgctttaagccacaaattttgtcataaatttttacagaagaaatagaaaactaatacaggaggcaaaacatcatttgccagccccctcccctgccaaaaatcaccatgcaggtttgagtgaaatgaatgtcctttaattatattgccataaccaacgctttcctgtgtctgtcatctttttaaacaaaacatgaatttgaaatgtagaaaagattcaggaaggacaattgttaagtaggtattcaagttattctcatttttagaagcagaggttggtgctaagagaggtcaagaatcttttccaagatctgacagccaggaatgggtagaattgggattttaggttaggtatggcacacagcagactctgagtacttagttaggaatctgtgagtttactaagagaaagacagagctgtggtgcctcacccacctctgccatctctcagacaagtgtggataccttagaccaagtacattaagaagaaagtgaagaggcgtcttccacaggactccttttgtcttgccttatgaagaaataaacactggcaaaattatgagtgcacattttccagctatcatgtctccaaaagaagcaataactggtcatagcagaaaaagtttaagagatattcattatagttatactagagatcatttcttaagtgctaatcattggccagatatttcctaggtaatttctagatattatcccatttaatgcatataacatccttgtgggaaaataaagctcagaaaacttagggaatttgtaaatatcacaataataagtgattatgcatccagacctttctgagtccaaagctggtgttcttaatcactaaagtatactgccctgcatgtttgttcagcacagagggtggattcagaagatagcaggggggcgtgtacatgtt

SEQ ID NO: 470376 - DNA, 725 bp, Homo sapiens
cgcagcatcgaacgtttccctctctcacttcagacctgctacctgccctttggaaaaaataggtttccatggtgatggcgggatgggatggctgaagagacggcaggggcggccgtggaattagagccgtgggagctggggctctgagggctgcacacggaagagctggttagacagtggctgaatcgtgggtcacaagcacatgaggttcaggagaggagtcagcaagtgccgggtggttcaacaaggtgtgggaggtccagagcactgggtgcgtctaaggctccaggaagccagtaggagcaggtgccctcagctcaaaacagccactcacggggcttttggggaatttggtggtaaaagccaggattccaggacaggagcctggggcataggtgataggctctattaccatccccattttacagatggagacacagagttagagaagaggaaggatttaaccaggacagtacagcaggcaggaggcaacatcaagattccgtatgtagcccctgcagagttccctctaggtcactttttcctaaacagggaaagacaaagaggctttggatgtcacagggagcctttgcagttttgtgatgaggggagaggcatgatgaaaaggaagtgctaaatcaagtggttatactcagctgaactgataaactattccttgatgttgccataaactctgaatctgactcttttgcagaagtttcttt

SEQ ID NO: 470377 - DNA, 731 bp, Homo sapiens
tctgggagtctgtgttttggcaagagttctgagtgattctgatgtacactaaagtttgggaatgactgtcgtaggagtgttcagtaacttgggcctcctggaatgctctaagttgtgtcacagcccagctgagtacctgggacagaacagggaaaagcaaggagtgacgatgtcagagaggggctgtgagcccctggctttggagccagacctgtaccttcctggacttcagcaagttccagaatttctgtgcatatccaaggacaagccctttagatgcctagtatatggctctgccctggcatttaacgcccaggagattatattaccctatcaagcttatagaaaatggacgcaggtacaatatatcttatctactgccacattgataaagtctacagagaaaatagtgggtcttttaggacttacccattgagccttttattttaagtgacacattctagtacggacttaattgtaattctgataacattacttgtaatactgtctccagtccttggaattaatttgactggaaaaaatccagaaggacttaaatgtttctcattaaaagcattatagataacttattagacattgtgactaattgtagtatggcccaatgtaaagccatcccaattaagatgctgtttcttctcttgtgattagttggcaaaccttttccatacaactgtgccctctagaatgtagatcaattaagcatatataat

SEQ ID NO: 470378 - DNA, 708 bp, Homo sapiens
gagggagatgcggtccgcctgcagtcacctctgcacctcagagatttcgggaagtttgagtgcaggaaagcagcgctccgaggccaggcctggggtgctggccgctgcggggggcacgccctgcgctgctcaggggcctgtggtttcggagagcaccccgatccagtcccccatcgcctctctggcaggcgttgggacttggagtgagctggcagcctgcaagtgggtggataagagccagggcagggcagggccgggcagagtaaggagggaaagagacagggagtgcctcagggtgctaggaatgagtgttgagttcctggccggggtagaggctcagcatgaccaaggggactgcagcccctccctgagcacattactggcagtacttttggacaggcacccagagagacatagcacccagatcattgcttcaggtgtaagagtcatgcagagaagtgacacgctgcagctctgagtcagacactgtcacatcctagcaccgtcctggagcttgtgtgatgtttttatatctgttttaacagttaacacccacggccgttctacatacagtgttaatgctacaattaatgctctctggctctgtaaatactagactaatctgtctgcctcatcccataccagcaggtgagcctcagatgattcttgttttccatagctacagaccccaaagatcagagtaaatat

SEQ ID NO: 470379 - DNA, 1010 bp, Homo sapiens
ttaccccttcgctcaattttcattcttttctctccttctacgttttgaaggatgcgtttgcttccccttctgccatgagcggctcagaagatgacaggaaaatgtgggaaatttgggaacttcctagagtcttggagggctcagaagacaggaatatgtgggaaagtttggaacttcctagagacttgttgaatggctttggccaaaatgcttatagtgatacggacaacgaagtccaggctgaggtggtctcagataaagataaagaacttgttgggaactggagtaaaggtcactcttgttatgcaaagagactggcagcattctgcccctgccttagagacctgtggaactttgaacttgagagagatgatttagggtacctggtggaagaaatttctaagcagcaaaccattcaagaggaagcagatcataaaaatttggaaagtttgcagactgaagatgcaatagaaaagaaaaccccattttctggggagaaattcaagcttgctgcagaaatttgcataagtaacaaggatccaaatattaatagccaagacgatggggaaaatgtccccaggaagatgtatggcaatgcctggatgtacaggcagaagtctcctgcagaggcagagccgtcatggagaacctctgctagggcagtgtggaaaggagatgtagggttggggcccccacacagagtccccactggggcactgcctagtggagctgtgagaaaaaagccactgtcctccaggccccagaatggtagatccaccaacaacttgcactgcacacttggaaaagctgcagacaatgccagctgtgacagcagccaggaggggggctacaccctgcaaagcctcaggggcagaactgcccaaggccatgggagcccacctcttgcgtcagcgtgacctgtatatgagacatggactcaaaggagatcattttggaacttcaaggtttaaggactcccgtattgaattttagacttacctggggtctgt

SEQ ID NO: 470380 - DNA, 713 bp, Homo sapiens
cttctaaaaacctttgtttctaaaattctgtgattctctaaaaaacaatctcctccggtgggggagattcttaaaccaatatccaggggttgatagacggcagtgacgccccactgggagagaactggagtctgtaggatgactttcaggagaacagcttgtccttacagtccttgtgatgccccttcatcagaatatgttccttcaagggacccaggctttagtggttctcctcagagaggtgtggtcaaaacactggcaagacacacccttctcaggcatctccagaatggccccctgctcctgcccagtgtgcgctggcgagtttatgggaaggtgcctggagaggacactctgggaactggggctctgggaaagagaaagtggaaaaataaggcaacttctggaagcatgggcagcagggaggctaacgatagagcagggcttctcaacttcggctctgctgatattcagggcagggccactccttgctggggggactgcagctgtcgagcagcatccctaatctccattcaggaggtgccagtagcacttctcccaagttgcaccagccaaacgtgtgtccaattattgcccctggttgacaaaatcatccccagttgaaaatcattgttctagtgccaatgcttcccggaggggaaggagtaccctcaagtacagaaaaagcccaatacagaaatttgagagagaga

SEQ ID NO: 470381 - DNA, 740 bp, Homo sapiens
aaatgaatgcagagaaaatatcatccacttcagagacaggtaatgagaaataaatgtgataatctgtgcagagcatgccagacagttgcatacatctgtttcagtctccctcctagttacagatcatgttcccagctaagtagcctagttcttccccaccaggaacagactcctacctcgaaaccccagcctattacctggaaccctgctggattcctcctgcttatcctcttctcagcggggcacatggctcagctgtgggcatcaggattcagccatggcaagacagaggcagggaagtggcttagagaggaacaagagagaagactcccctctgcagtggagatgagaagtacccagctgcccgggccgtctgcaggtcgaggagcagggaagccagtggtggatccatttgagtccccaaacctcaaaaggagagaaactcacagtgcagccttcggtctctggccaaaggcccgagagcccctggcaaaccactggtgtgggaattgaacaatgagatcacatggacacaggaaggggaacatcacactctggggactgctgtggggtggggggaggagggagggatagcattgggagatatacctaatgctagatgatgagttagtgggtgcagcgcaccagcgtgccacatgtatacatatgtaactaacctgcacaatgtgcacttataccctaaaacttaaagtataataataaaagaaaaaaaaaagaaa

SEQ ID NO: 470382 - DNA, 588 bp, Homo sapiens
caggattgcattggtgataaacagcttttgagaggagtcactaaaattatgagtcatatccccattggcatttttcaggagacacaagctgatctgtatggattacagagcaaagggacactttgccatacagtcaacgttctggcttccattgagtttgggcactgggattcaggcaggagatcaggggaggaggaaggagaggaaggtggatttctccaggctccccgctgttgggtcaccttgccaaagctgggacactggactgaaggtcacagctcctctccaggtggttctctctacacattccccacctctccacagtctttaaccaagtctttcacttgccccttcaagcctcggattacatcaagatttctggtatccacagggggtcctggaaccaagccccccacagatactgaggaacaactgtacacacataatttatcacagtctcctagtattgcatgcaccagttcaagtgacatgtgaaaaccttacctccctttaagtccctttaccctcgcacacatataacattacatattacttctatatacattgaaaagcacaacaggcagtgtt

SEQ ID NO: 470383 - DNA, 587 bp, Homo sapiens
agagcacctctctcatgcagttatgtgagaggacagaaagggcatggggagcaaaccatgctgtaagagcctgctggcactggcacacaagggcacatgcaaagaagtgcaccactctcccctcctgcctggcccctgccagtgcctctccaagggccgaatcccagtggaggccagaggagtccaagggctcagcttcctgggacatggagggcacagtagacgagggcaaaaaatagatctgggcacgcagagaaccagcccccacacaactcgagggctcagcatgcaaaagaagaggaggagacactggaggagagaccagaaaggcattgggggacaagccttgtcatgcatggggaagaacattgcagcaggagggaacagcaagggcaagggcaggtggcaagtggaatggcaaggtgactggtgggtctggagcaaagagagggagggggagcactgtggagccttaatgcaaggtcacaagaacgcttaccagggcctgacctgtgaacgtgatctaaatgaggttgtcacagctgctacaggaaacaatagagcagggtgatggagagagaaagccc

SEQ ID NO: 470384 - DNA, 519 bp, Homo sapiens
cagctaacaatgagtacacatggacataaagatggaaataatagacactggggactccaaaagtgggagggtggaactgggatgctggttgaaaaattacctatcgggtacaatgttcactatttgagtaatctgccagacctatctgcagatcagacctgtcttcattcctgggcctgtatgactgtggctgtaattcgccaaaatgacaaacacaaagagaaagaggagaggcacccgatacatattctctggccttttagaaaacatacagttgttcctttggccacgtatatgcgaatctataagaaaggtgatatcgtagacatgaagggaatgggtactcttcaaaagggaatgccccacaatgtaccagtgttaaggggaaaagccacaccaagcaggctttggtttatgtaaaccagctaatcatctcattgcatttcattgctggtatttaatacccagacgttaggctcttttcctccaagtttcctcctccctcccgaccgaccgtca

SEQ ID NO: 470385 - DNA, 1871 bp, Homo sapiens
cccttacccaagggcacaccccaataaaaggctctcccaatctccccagtcagaaagcagccacctcccagtctggtggtcggtttctgggtctgcatggctcagtagaggatgaagtccaaccccccacgctcctccctagaggcctgcaaagctgcaggccagggtctggctcagggtctgagtcaaggcctgcaccaaagcctggtgccattccagggcctggactggggcccaaagctattccaggacctcaggcgggttctggtactgttccgaggcctggtgctatttcagggactggaccaggagctaggtccgtacctgggccaggagctgggtccgtacctgggccaggagctgggtccgtacctgggccaggagctgggtctgtacctggaccaggagctgggtcgggacctggagctgggccaggagctgggtctgtacctgggccgggagctggatcggtacctgggccgggagctggatcggtacctgggccgggagctggatcagtacctggggcaggagctggcgccgcagcagaagactcaagccaaacctacaaaggctgccaggcagaaggttctagtgactggaggaggaggctacctgggcttcagcctgggatcccacctagccaagagcggcacttccgtcattctgcttgaccgccgcagaccccagtgggaactgtccccggaaaccaagttcatccaggctgatgtccgagatgaagaagccctgtaccgtgccttcgaaggggtggactgtgtcttccacgtggcttcctatggaatgtccggggctgagaaggcctggctcccagggtgtagggtcaaagggagggcctgtgggcagcgcatccttcgtgcactgcagacctccccagggccctgcatggtctgtgttcgccggcgggttccaaggctcatctataccagcactgtcaatgttgcatttggagggaagcccatagagcagggcgatgaggactctgtgccatatttcccattggacgagggaaggtgcagccctggggctgggcaggcattgccagcagcattgctgaccctctctggtggttctgtttttcctggcctctggcagcacgtagaccactactcccgaaccaaagccatcgccgaccaattgaccctcatggccaatgggatgcctctcccaggaggaggcactcttcggacgtgtgtgctccggcctccagggatctacggccctgaagagcagaggcacctgccccgtgtggcggtacgtcatccccgccttcaggacccaagtcagagaaggatcctggctgaggtgtacactggtcgggccctcccagcccctggtcgctgcatcagtctcgaggctaagtgtcctgagcctggaaccctcagttctacaagatgttcctgcccccactggtccacaggccccttggagctcctggcaggaacagagctctcagagtgtaccagccaagccaaggcacggggccacatcaagaagaggctgttcatgttccgatttggggaccacaaggcacggatgaactgggtccacgtacacaatctggtgcaggcacacgtgctggcggccgaggccctcaccacggccaagggctacgtggctagtgggcaggcgtactacatcaacgatggggagagcgtcaacctctttgagtggatggccccactgtttgagaagctggggtacagccagccctggatccaggtgcctacttcctgggtttacctgacagtgaggtaagtgggctgctgttatgggacctaggccctgctccccatccctcccttcctacctctccccaccatccccactgctgccactccttacccctttga

SEQ ID NO: 470386 - DNA, 911 bp, Homo sapiens
gggtaggttctccccggaaccaggctgccgcgtcgctatgggctaacgcaggctcgggtgacgttggtatgagtttgcgccgtcggctgctgctctgtctgggcttcctatgccggcatattagtgtgatgacggaggcgccccgccctcaaagtttgcgcatgctcaatatagaaccgctgtctcctgcgttgctcacggagacttggagtcacagtgctctcgcgatcagcagcacaccatatttggcacacaataggagcttaataaaatttgccataagaattaatgctcagaaactctactattacatcctatctgctcaactccctggaaaagagacattctctttttatggttactataaaaggcccagattagtatttcactggcctaacttggatcacatgctcatccctgaaccaatcaatgaggctgaagggatgaaatatgctaattggccaggtctggtcatgtgtccatttttggagccaggggagtggggagggctattttcctgaactgaaatagggtgaactggttccctgaagactaaccaagacgctaatgcaaagaaggacactcctgctgggcagacaaaaatgacagaggctcagagaagtaaaataacttgcccaagggccatagagctttaagcagtagcgtcttttttttttttccaatcttgctttgggcttggacagactagttcagcatctttgatcttcccttcctgcctgacggccccagggtcagaattccaggtgcaattttgtcttgccaaaagctggagtttactctctttggggtttataaataaggaaaaaagttctttggagagcctgaactttgaaatcagagaagtctggatttactgctggctctgccttttctagctgcctcacctgggg

SEQ ID NO: 470387 - DNA, 530 bp, Homo sapiens
gattaaacggatgggtgcacttaaagcatcagaaaggagaaatggctctaggagaagcctgatgacagtggaaatgatgcctgattcaaacagggccgagctgaccacgacccagggagccaagttggagctcagagtctgcccttcccaacgatgtgacagtttctatgggaagttcttgccttccctgagcttcaggtgtctcctctttgaagtgggtttcaagctgtgtcctcccctgtgcttagctcaccaattgttagggagaggctttgaaagccaccaggaccctgtgaccctcggagggatgctgcccttccctcgaggccccttggatgtgggggaagagccaggtgaactcccaggtgttccatttaatcactgcagcgccatctgtgcctggtctggtggtcacaggcctggccatggacaaggacaataggcagtaatgggtgctcagaggacacaggttccctggaggaagggacatctgagctgttttccaagtggatgagggggagaagcatcct

SEQ ID NO: 470388 - DNA, 592 bp, Homo sapiens
gtttttggatccatactgtatgagctgtaatactcactgcgaaggtctgcagcttcactcccgaagccagcgaggccatgaacccacggagaggaacgaagaactccggactcggcgccttgagacctgtgacaccacgaaggtcttcagcttcacttctgagcctgcgagaccgcgaacccaccagaaggaagaaactccgaacacatccgaccatcagaaggaacaaattccggacacgccacctttaagaactgtaacactcaccgcgagggtctgtggcttcattcttgaagtcagtgagaccaagaacccaccaattccggacacaaaaggccccagaagagtctacacatcaaattgggcatccccttctgggcacctcaagaagggccttggcctctggcgaccacttccccttgttggttgctgtctgctcctcctcatgcctgggggttaatggccaagtgtgacccagctgcttctagctttggttctctcaggaagggcagagaaaggaaaaataaaaaaagtattattttaatgggcagcccccagaactggaagaggttcagaggactccctatttcct

SEQ ID NO: 470389 - DNA, 1246 bp, Homo sapiens
ttgtcattgtttgcctatttaaagagagggcagtgtaatgataagattccttaggtgacttcacagggtagtgatgacctcacaagcttccaaagtttccatggcagcgtgactacacacctgcgtcctagagaagcctccctaccatttctctgtaagataccaatctgtttggttggctgagagagaatgactgaccggatcctctatattgtctctaacatgtcctctgtcccctgggagggcagcgcagcagctgcagtgcctgccacttctcctcccacacctgggcactaccatgttctctaccgagggtgtggagaaactcaggtaggctggcatggggagacgtactgcctggttggtggctaccgggtccatggggatgctcctttggccaccccaacaaaggctgaagcagagaagccagcccccaggcgtgctcccaagagacgtcaagctacgatagagtcagataaagacctgggttgctctagccccaaaattcggcgcttggagcatcgtggcaggagactgaccccacagaagcttgctggctgagccatttgggagaaaggacaaatgtttagctgtctaagacagctaatgcctcttctgcggtgacctcccctgcccaccactgcagatagagcctgagtcattctgcctatgccttcctcatccagaagcccccttccatgctaactacccatggccaaggagcctcagaaactgtggtttaaaatgagaggttgctttgaacatcccaaggctgaagacggcctggaagaaaacctgatgttcctctactcatctctccagagtccctttttgggcagaagatagaaatagtctgcactctgctagccgaggagtcaagtgcagagagggagtgcagcatagcccagtaagggcttgatctaccagatgggtctttgctttgagtcactgccagcaactaccagcacaaaccaggagggccaggacttgctgaaactggaagcagcagcccatggctagtcacagcaggagaaagcctcctgcttggcatctcaggaggtagaagaaagagacctggggagacctgccacctacagcaagaacaataaggaggaagttgagcaacatccccctgaagctcacatgttactttatttcctgcccattatggccccagtgaggtccctactgctcaatttaaaaaaaaattaaaaaaattatttttccataacagtatttgacttga

SEQ ID NO: 470390 - DNA, 1630 bp, Homo sapiens
gaggagaaaaccttgatttctgcctcaggaccctgggcctcagttttcctatctgagaagaagggcgaagagctgtgcccccgaccacacccgtcggtgatggggcaaaccgagggcaagcaggtttggttcctgcccagcaaaggtgagggaggacggaggagactctcccaccgcattcagaactttattcctttatttttgtctcaatcttgtcatagaggagcgcttcacttttggtcatcccttgggccaccagggccttcccgtctccgtcttcccatcgcaggtcctggcctccttcacaccactccaggataccgcagcatctcccccagcgcagcagacggagggcgcttcacatgcccccggacctaagcccactctccccttcaagatctggactccacttttttgcaacactcttaacttctttggaagctgggaagcctcctactcccttgggcctctccaccctgccctcagctaactcaagtggtcaagcttgtccgcatgggctccgagggctcccagggaccgcaacgcttcagccttctaggccacactgcagggtacacccagtggtcgctgccctggtcactgccaccgccttggcctgttccttgccctgtggcaccaccagtggggccctcctccccttgcccataaaattcctgaaagaagagagcctgcccggtcaggcctggtggatggacaaggccttcatgttagccaggctcccacagcagtagcagccacagggttggggtggggggaactgtgcaggtgcaggagtccaggctcagataacaaaggtggggagtccaaggccagagtggaggcagaggccttggctgtgccccagtgccaggagataaggtttgtgaggagctgggctgtgcctggcacagggtggggagctgtgggtgcagctgctattctcagtccagggcactcccctggggctttgacagtgaagactggagccaggcactgaatgggggggcagcctgaggaatctggggtggaggctcagcgaggaggtgtttggccacaggccagagggtcaggctggggatccctgaacctggagtacagagtcctgccagcaacccaggtggagccagtgctacctgggccctgtatggagggctgcatgcccctacagagccatggaaagtggccagacagatggaccctcagcccccaggcctccgctggcccacagcggagggagggtgtcctggggttccagtgtgtcagggaaaggagcagattgaatgagccactgcccctggccttcttgatggccaccaagcacttccagcatcaaacctgggtgaagctggggcctcactggggtaccgctcagggctgtggtcaatgtcagacacaggacagtgggggaaggaagaaggcccactcctggtactacaagtggatctgtgccccaagaggggccactatggatggtcagaggaattctcagcacctggtactgcctgaacctggtgtcacccagcagctggcccatcacaggtgagggactgagcgtggaggggtggtgggcaccactcatgctgagcacagtgggggtcctgggacagccctgggcctgcagcctgccctc

SEQ ID NO: 470391 - DNA, 1056 bp, Homo sapiens
ggaagagaaaatcagaagtcaatgcagatggtgttggcaaaagcctctctaaggaaggtgcatttaaatcaagaccagaagatggagagggatcagctgtttcacaagagcacagtggcccctagagatgttcacgtcccgatcaccagaacctgtgaacatgtaacctcacatggcagtaaagactttctggatgtgattaaactaagaatcatgagaccactttggctgctgtgtgatgatgggggcggtggggaggctgtggtgaggacccgtaagagcagaagcgtagagttcagtctggaggctgtgaaaataatccaggaaggcaacacaatggcctctatcaaggcggtagggatacagggcagtgggagagagaatgaatgcaagcagcggaaatgccagatgcttataaaaccatcagatctagtgagactcactcattatgacaagaacagcatgggggaaactgcccccatgattcaattccttccacctggtcctgcccttgacacgtggggattatggaaattacaattcaaggtgggaattgaacaataagaacacatggacacagggtggggaacatcacacattggggcctgccagggggtggggggagcggggagggatagcattaggagatatacctaatgtaaatgacgagttaacgggtacagcacaccaacatggcacatgtatacatatgtaacaaacctgcacattgtgcacatgtaccctagaacttaaagtaaaataaataaataaataggaaaaaaaagaaaaaaaaagaaggcaaagaaaaaaataaaaatataataaaataaaataaagttctttaaacaccatgaaacagaccttgacaagacatgcatatccccttatgcctaccccaagatttaggatgtcacactgtacctgtcctttgcggtaatttgtcttaaggacacaggtacaagttatcctgttttatatgcacttaaatgaattttcacttcaaattcaagttgcagtatatgtcacatgccgccttcccttcaaagtaactaatgt

SEQ ID NO: 470392 - DNA, 1026 bp, Homo sapiens
ctgcctcttgctgacagctcctgcagcagacgactgctacctcatgatccaagatggcagctcacatgaagccatcacatctgcattccagccagcagtagggaggaaggatcaaagaagctctccatgccatcttggtttctattcattggtagctccatggccttgggcccttcatggagctcagaccaactggatcatctctgaagttttccccacagtgaggaaggatgaagataagacacaaagaatggaagacgtagaggcagagaagtttgctggtggagcggtggaagctttaagctcttcctactatgtgagtgatgaatgtttcctttcagctctaaaccctgatggcctttcaaatgctgagtactcctgtacccctttcatgatccatcctctgcctccctccccaccaaatactcactcaaaaaagatgcagctttttaaaaccagctatatttattaatagccattaatgcatgtggtcatttaaacattaatcattcaataaagcaatacatcacaacataaaatagaaataacacaaaaaacagtgctttccctttatttaactagttggcttaactaataaggtgattctaatttcataaaagtagtaatatcaaatatgtatgcatgtgggccttaataggcaccagacactgttctaagcagttgatagttataaactcacttaatcttcacaacaatctccatgaagtagagtttcctcgtcatttaacagagaagggagtggagaaaggaagagaataaataacttgcccaaggtcacacagccaggctcatgcagttatttccctaatcaacttatcccataaatcacatgacctatttcagagaccaaataattacaaataaaagattccccccaaaccatagattcttgttggcaatgagcatcagttgagctcagattcggtaaaaagtaaaaatgaaaaaagatccatagctatagatttctgttagccttttttctatggtttttggtaaccactgtcc

SEQ ID NO: 470393 - DNA, 528 bp, Homo sapiens
ctgaggcgcactaattgtgagcgaagtaggatcatggataaacatcagcaggatctgcacctgagctgtctgccatggcgaccatctgtggctattgcgcacttgaaatatggcaagtttgcgtaagtacactcgatgatgtttgcacaatgacaaaatcacctgacattgcatttatcagagtgacgagggcaaaccctgttgtaaactgtggatgcgagggatctaggttgcacactccttatgaggatccaatgcctgataatctgaggtgcagtttcacccaagaatcctctcccaaccctgccccagtccatggaaaaattgtcttccatgaaactggtccttggtgccaaaaagatgagaatgtctacagaggatgtagggaaagggtggaggaagaaatagagttagcaaataatgaagagagaagtcctgtaggtaaggaaggagggaatggaattttctcttacctctgaagttagctcattcatccaacaaatacttcttagggagtatattagggag

SEQ ID NO: 470394 - DNA, 837 bp, Homo sapiens
ctgagtccagacttggaccgctcactgcgtaacagccaggcggaggaggatgttgaaggcagtcgctctaaaggccaggaaaggagaggatgtttctgcccattgccattggtctatcagcacccattgtcccctggagcaggacccgagggaaggactcagtccagagctgctcacactttgccaaccttgccccaaccatctccagctgcctcataagcctccttctcctaatagagaccaaggggcccctgcaacagagataccccaacttcctcctctctgcaaccagattcttgagcatcttcctgctctccttccagacctcagtgagagaggaaagcaaatctcagtcctcattcctggggcaatgtaccctgtgcttatgctggtttctgtgtctctgtgcgttcccaggacactcccaggagggaaagtcgtttcatctgccccttccctggcactccacaacgtggaggatctaaggctgggggctacctaaccatctgctgtggctcctggggagagagggaagagagtcagcaatacctgggagtctgtaaataacctgctctttgcatgtttaacaaaactcatccataaattgtctgagcatacaatattttggggaagtggggttttgtttgtttacaacttttactatttctttcagggctacttctccacttctcttcctccattattatcacaggtagtgtaatttttaaaatcagcagtgacttctgaaagccatctcacctccactcaccaattctctcgggctgcagcattgccttgagctaatgtggcttcatttctaatgtttgctatcagtac

SEQ ID NO: 470395 - DNA, 808 bp, Homo sapiens
tttctgcaggctgtatgggaagcatagcagcatctgcttctggggaacctcaggaagcttccaattatggcagaaggcaaagggggagcaggcatgtcacctgtcaaaggcaggagcaagagaaaaagaattgggggagaagtgccacacacttttgctcagccagatcttgcgagaacacactcactatcataaggacatcaccagcagatggtgctaaaccattcatgagaaatccaccccatgatccactcacctcccaccaggccccaactccaatactgggagttacatttcaacatgagatttggaactcggtaacttgtgactgtagggctgaggtcccagttaccttgctggctgtgagctggagtcacccttatctcacagatggcattccctggtccttacacatgccccctctatataccaagccagcaatggtacctccaatctttctcatccttcaaatctctctgatttacccttctgctgccagcttgagaaaactctcagctcttaacgggctgatgtgatcacatcaggcccatgaatgaccttccttttgatttactcaaagtcaactgaaattttaacttatggtacaaattgcacctggaattatattaaactactcttactcagcatacatgaaaaatgcttaagccttttgtctttttatttcccttcattttgttactagttcgttctatgtgtttattatattatttcaggggttggcaaactatggcttatggaccaaatctgggctcgctgcctgtttttgttaaaaaaaaaaacttttatc

SEQ ID NO: 470396 - DNA, 707 bp, Homo sapiens
ctcgtagcctgccaggctgaaaaaaatattaacgagaaggagcattttgcaacaacgatggttagagctgaaataacatatgcagataaaaagcaaatgcagggtggtccagtggtcaagaataaagatgagtctgaagcaatacttattctagaacacaagctgatccaaactagccaagcactgaatttaaggtccccaatggggctgaactccagtcgcgacggtggttatcttcccattaatacaacctatgttggtttcctgccctcctctatgtcacttttacatgccttcactaaggtttcaactctcagaggcagtgacttgagctttgccgagcttgttcagccctttactaacctcccttctgctctgattattctaggcagctcattcccatcagtccccctcctcacagagctcctcagcgataacacaaacccagtttgcatctgtcaggctctgcctgaaaagctctaaattcatacaaatgtcacttctcagcctgtaaaagccaaagaaaggttctttcattcaacagatgggccacaggcaaatagtgaaagaaggggtcctgatgttttcctttttcagtaagataaccaataaacagtttaaaaaggcaaccacttacatagtcttcataccctatattaatattttatgtttctacaattcaattaaataaattattagtaaacttc

SEQ ID NO: 470397 - DNA, 908 bp, Homo sapiens
cactcgctggattcaccagcaggattcactcgctgtttgtgtccttggaacctgctgcactagaagggccgaggggctcccagacctctggtcccggcactccagtggattttgccagccgaagcatttcatagggcggtgttagtggaatccatccttgttcatacatgccagcagcagcaccggcggcagtacagcagggtgcacactcatcagctacggcacagtgccagtgggtggcagggtactggcctcggtgcaggtgtttgcagcagcagaggcagcacagctccggggggcagtgggtctctactggttactgtgggcatggctgtgctggtggtagtgtcagcttcagaatttcagttagtcactgtggctgtggctgttttggagagaataggctttaatggattaggaatggcactgataagccaggaagaccaggttgcaactgatggttgcttgagccaaggtggtaatgtagtagtgttcattaataaacagttgttcaacccaaatgcccataatgatggactggataaagaaaatgtggctcatatacatcatggaatactgtgcagccataaaaagaaagagttcgtgtcctctgcggggacatggatgaagctggaaaccatcattctcagcgaactgacacaggaacagaaaaccaaacaccaatattgcgagagtaagaaggtgtttattttctctatgaaagttgcaagtgaaaatggaataaaaatacattgaaaaatattctcatcagacatatggaggtttcttcattattaataaagtatctatctaagtatttgctttcaaaggtattataaacaccaatttttaacatgtttaagttacatttggaaggataaattaaacatctaatatgccttgaatgt

SEQ ID NO: 470398 - DNA, 3708 bp, Homo sapiens
ccagcactttgggaggtggaggtggcggatcatgaggtctacagatcgggaccaccctcgccaacatgagttggaggagtagttcatccggaagcatccgccaagtgatcaattttttggggacggtaggaatagaacaggtccgaggagttacttttctggaaaatcaggaagtactcattgcctctcgttcttcaactgaagtcaggattaaccaagacaacatgattacatacttggcaaagagattcacacctcacatcctgtacagacctcacatcttgccttactctcagaaagagaatgaggatgctgttggaccagagggaagaaaagaaccagttcatgctgatgctgccacatttacatcccagaagaggaaggctaaggaaaccaaaatttgtgtgccagggaagttgcaaaggtttatgaattccccagccatcaacctctcatctctgactattggcttcatctactccattcctttctcctgtatcttgcctgcctctaacatctgaaatattgaggtgacctactttcactgtataagtagaggcaccggagctgtgggctagagcatttgttgaaaagactgttctttccctcatttgtgttcttggcacctttgtcagaaaacaattgactgtgtaaaaacatggaaccaactcaaatgaccatcaatcaacaagtggataaagaaactgtggtgtgtgtgtgtgtgtgtgtgtatacatacatacatatatatatatatgtatatatatatatatatatatatatatatatatatatatataggctttggggactcagggggaaagggtgggaagggtgggaagggggtgagggataaaagaccacaaattgggttcagtgtatactacttgggtgataggtggaccaaaatctcacaaatcatcacaaaagaacttactcatgtaaccaaatgccacctgttcctcaataacctacagaaataaaaaataaaaaaatcggttggctgtaaatttgtgaatttatttctgggctctctattctgtttcactgatctatgtgtctgtttttatcctagtactatgatgggtttttttaaaaatccatgctgtttgattactataactttgtagtatattttgaagtcaggtagtgcgatgcctccagttttgttccttttgctcaagcttggtttggctattcaggatcttttgtagttccatacaaattttagaattgttttttctatctctgtgaaaaatatcactgatattttgatagagattgcactgaatctgcagatcactttgtgtagtatagacatttcaacaacattaattattccaatccatgcacatagggcatctttccatttatttgtgccttccttaatttgtttcatcaatgttttatattgttcagcatataacaggccttttttctctttggttaaatttatccctaagtatgacattttattttttgtagctatcataaatggtattgttttcttgatttcttttttgtacagtttattgttagtatatggaagtgctatttatttttgtatgttggttttatatcctgcaactttactatatttattagttacatcagttttttttttttttggtggcgtctttaaaggtttctatgtataaggtcatcttgtccacaaacaaggacagtttaaattcttcttaaatttaggtgtcatttatttatttcccttgcctaattgctatggctaggacttaaaggactatgctgattagaagtagtgacagtggccatccttgttttgttcctgatgttggaagaatatctttcagcttttaaccattgatgtgaaaattttcaccagtgatgttagctatgggttgtcatatatggccttttttgtcttgaggtacatttattctctacctaatatgttgaggactttctatcatgaaaggatgttgaattttgtaaagtactttttctgcatctgttaagacaatcctatgggttttgtcctttgttttgttaacaagctcagtaattttaaagtgcataatttattggcttgtagcacattcacagtggtgcacaaccaacatcactatctcattccaaaactttaaaaatcccaccccaaaagccagtcattcattcatctttagccgccttagcgtagtgatgcatgagcattcagtgtttattaggtgcctcgaggaggaacaacatccgttttcaataaaacaagtgtccagcattgagagcagacgtctggtaatcattctctgtgttgcagtgtttctaagacttcaggtgtccctttcagcactcggagacttgccaaatgccactctttttaaaaaatccctattggcctggataatttaaaactgagttggcatcgtggtaaaagacaatgtgattcactgttacagtctaatctcacccttctaactgattctttcactaaattccaccatgtagcccattgttcatctacatgaaccatcaacattccttagcttcatagctttattcaaaacgttctctcttcctagaacacccttccctgggacattctactcatttttcaagcccatcgtcagggtcacttcctctatgaaatcttccctaatgctgatctcttcttcccacagtccattgtgtcattcttatgcctttgtaacctcatagcttagctcccatgtatgagtgggaacatatgatatttggttttccattgctgagttacttcacttagaataatccagttccatccagattgctgtgaatgccattaactcattccttttatgtctgcatactattcatatatatatatatatatatatatatatatatatatatatatatgtatatatatcagtttctttttgttttattttaagttctgggatacatatgcaggatgtgcaggagagaatcaaatacatcaaatcagcttattgcttgaaactggcaaggtgctagctacatttcacttatgtttttttctctttttttttttttctcctcaaggctaacagctgcttaaaaacctctttgaaaccctaaaagccacttgaggaggacaattaacaaaccactcattttggtgagggccagagcacatataattcaatttgttgagttgcttatgaacagtggttgcaatgtcctggtaaccaaacatcctttgttattaagacatggttcccttctctaattgttagggagtacaattgcattctttttgctgtgtgtactgcagtctgacataattaaggctagagcaaatgagattcttctttagatattaaaagtgcctgtgttgtaaataataatgtcaccctctctttcatagaaagcactttcattaagagctgcattttaatatcaatgcgtttgcatgaattcatttgggtcatggtggggggacattgctgatgatttttaatcttccatgagctcaccaggtgttccaattaggtcatttataatgcctacccctccctgccaggagccctgaaataaatactttctcactcacattttccatacaggtgtttgttcccagtaagtacccacccatggtagtaactgtatttactgacttgatatgctcagaggaaattgacttttttctttgcagagtaaaatgaacccagaggattcttctctctttttaatatttttcaaaggcttgggaaa

SEQ ID NO: 470399 - DNA, 479 bp, Homo sapiens
tttcacaggtctcctataccaaggaggctgctgggaaccccacaatggtccttggagactacctagtttctctccttcatgttacattgggaggaattgaggcccagggaagggaagggaatttcccaaagccacacagggagttgatgttagatctggccttaaacccaggacccttgacccttggaatagtgctctcaggctacaataagacaggaaggaggcctggagaaagtgacttctggaatcaacccaaaggacttgagtggtttctggaggctgcaggaggcaggatgtccaaagattcctccttaaggagcaactgcaggctcccatccactctgtgcatgtggctgttgctgcctccaggaacggaactcagagttgagtcagatgaaattgcaaaaaggctgggtggttctggactcagagaggctcccagctctgttgaatctggctcaatctcttcctagatctgc

SEQ ID NO: 470400 - DNA, 586 bp, Homo sapiens
aaactgctgtgcaaactgatctatgcacatggggctgccgaatctttactgggctgcttcccatagaggtagttcaagaattataagttcactatctcaaatgaagcctttacctatcctcatgggattctcagaaactgccagctgtgttcaccatctatctcagacctttgttttcacaaagatagaatccaccatcaccttatctgtgccattcagtatagcacttcttcctgtgttacttagaacagccacttctcttcttcatgacttcatccttttcgtggggaaggaacagatgtttgctgtgcaatcccctgttaaaaagtcccctggtaacaggtccttgcagataagccaaagggctccagtgctccaaaatggaatctatcagctttcactgcactactatcaacagccccatggggttcctgggcgagtggacttagatgacagcttaaatctcatgcaatccacaacaacaaaaaactattaactccctttcaatattaagtacttgcctgaaataactagttagccaagaacttggtaacatgtttaccttgagctaaacgtaagatccatc

SEQ ID NO: 470401 - DNA, 633 bp, Homo sapiens
tatcaatttacactgaaatcaatttcctaaactcaaattcatctttatctgtaggcttaaggttattatgaccagtgctgttatgaatatccatccatgtcacaaattcccaagatccattggaagtgtggcccagagcgctaatgattgggtccactgtgagttggggccatggttatttgatccaggagacctgtcactcactatcaagtctaaattcctcactgatgacaaggttctctattctgttccattggtctatgtgcatatttctataccagtaccatgctgtttaggtgactatggccttatggtgtattttgaaatcagtgtcaaaaggattgatacgcattcgtctttgaatgtctggcaggattctgctgtgaatccatctggtcccggagtttttttgttggtaatttttaaattaccatttcaatctcactgtttgttattggtctgttcaggatagaatagatgttgaaccattcagatgcatttgtgaacataatatgattcaaaagaattgtaagtcgatccacatggccaaaataaagagtgtgatggggagaaagcaaggaatattgctggaagggatagtgggagtcagaccctgcagggtcttttatttgt

SEQ ID NO: 470402 - DNA, 600 bp, Homo sapiens
agactgacactgcccgatcgcctcggaagccccctagaccatcacggacatcgagcttcagggcctgtttcccttgcctccataactgttgtgggtattgatggccaggcttctaaacctcttaaaactccccaactctgatacctctactccctccttggtgaccaatcatgcaccccttaccatctcattaaaatctaatcacccttaccccactcaacgccaatatcccatcccacagcacactttaaaaagattaaagcctgttattacttgcctgctacagcatggccttttaaagcctataaactctccttacaattcccccattttacctgtcctaaaaccagacaagccttacaagttagttcagtatctgtgccttatcaaccaaattgttttgcctatccaccccgtggtgccaaacccgtatactctcctatcatcaatacctgcctctacaacccattattctgttctagatctcaaacatgctttctttactattcctttgcacccttaatcccagcctctcttcgctttcacttggactgaccctgacacccatcaagctcagcaaattacctgggctgtactgcc

SEQ ID NO: 470403 - DNA, 594 bp, Homo sapiens
cctcctctgcagaaggggatgtctccatgaagaactttgagaggtttttgagcagcctgccatctgggctacctggagcaggatttactaccccatttctagccttcaaacaagcaaacgagcacaatcttgcttggctgctctggcctctgggtagaggttgttcagacacagacatgcccgacctgaatcagggctggcagtctctgtacaactgtctcctctcactgtgtttgacttcctgttgcaaaacaaagcatctggtaaattcaaccacactcagagttttggcactaattgcagcatttcttaaatgcatggtccaggaacccccggcattggaatcacctgggttccttcttaataacatcaattcttgggcctttcagacctcccaaaacaagatgaggctgggaagtctgcatctggaacaagagctccaggtcattcttgtctacgctaatgttagacaatcgctgctccagggcaaagatctctggtgatggtgatgatttccataatcttgtcaccttaattgctgctgtcacttgcaacgttccttttcatttatgattggaagttgtttctcagatt

SEQ ID NO: 470404 - DNA, 1015 bp, Homo sapiens
gctctcctttgaagtcaagttgcttctctgccgatccagccaccacctctgaagtcaagttgtctctcttcactgtccagctgcttctctctctctctttctttctctctctctctttctttctctctctctctttctctgccaactgagtctggggtctttataggcaaaagatgggggtggggcaggccataggttacatgatcatccctgaaccaatgactgtggacaggcaaatcttcattgcctctaacacgcagaactcctcatcacctccttacagccagactggagcttccaaggacattcaagttggcaaagactggagacagaaggaatcaatcatcacatggaagatgtacattggttccgtccggaaagatggaacaactggaagtggggagcttcccggtctgattaagaagcaagagatgttctgtgttcggcgctctgaagaatatagaggaaagagcttctgttttgttcataagacatatttgactttaaatcccagcccttctgtttcacagctgtgtaactttggcaaagtcatgcagcctctctatgcttccaagtttgatggtgcctacctcaaagcactattgtgaagaagagcaaggatgagccagttgcctggaaactgaatgcttgcttaaagaggcaaaaaggaagctcatactacatgacagtttggttgtgtcaaatattggtgctttgcaaattattctgttgatgctaaatcacagaagaatctaccaatcacatcacctaggagggaaagtgaaatggactaaacaaagcagaaagcccatttctggacagtggtgtaacaaggtgtccatgagagaaacaaacatcatgggacagctatgaacgcccagagaggacaagtcacttcctgtattagtccattttcacactgccaataaagacatacctgagactgggtaatttataaaagaaagaggtttaatggactcacagttccacatggctgcggaggactcacaatcac

SEQ ID NO: 470405 - DNA, 1196 bp, Homo sapiens
aggagagatggcggcaaaggtgcctcctgggtcacctaacgtgtctgttacttgtcagatgatggttgctaagtgacctgaagacgtcacgctgcctgcttccctagtgctgatgaggggccctggggcagtaacaggaaccaacaggtgcctgagcctcagggtaacctgggagtctccttggaggagaaacatgtgggccctgtgggagtgggcatgaaagatgtgagagcacagcctgtgggagggtgccaagggacagcactgcccatcctccaggtgtgccacaggaagcagctgccgaaagtcatcctctcccctcagtgctgtgcctggagtcagggcatcttctcaccggatcctgggcatgctctgggtttccagggcaatgccaacaaactcagactctgtcttggggccaactataaaagcttcccacttatcaatggctccaccacctgccatgtgcctgttgaacaaggtgacatccactggatcccgcaccggggccgcaggtggagctgcctgccagtcccgcgccgtgcgcccgcactcctcagcccttgggtggtcaatgggactgggcactgtggagcagggggcggcgctcgtcggggaggctccagccgcacaggagcccatggaggtggggaggctcaggcatggcgggctgcaggtcccgagccctgccccgaggagaggcagctaaggcccggcgagaaatcaagtgcagcaccggtgggccggcactgctgggggacccagtacaccctccgcagccactggcccaggtgctaagcccctcattgcccagggctgctccaacctctccctgactcagtcagcacctctttgcagctgcgtctctccctctcctgtgctccactgaagtcatttccagccctgcttcagcccaccttttgctccggtctgtctcagttgttattgactcctccctgccccaccagcttccgcagggcaggggttctggtttatctgtgtcccctggtgtcaggcccagtgcttgatgaatacaccatggaagagggaaaaaacactgtcccagtgtcagccagacctgaacttcaattgtggctccaccagcctctgctgttctgctgttgtaacctccatggagttatttaacagttactctgagcagaggctaaaacctactttgagggctgctatgaaga

SEQ ID NO: 470406 - DNA, 1790 bp, Homo sapiens
acgccacggagctgcagctcacgggttccggtgatgccgccccgcccgggcgagtccccgcaagctgcctcacaggagctgtccaggtggaggcagttctcgcgggagcacgaggcccccttctccgccttcctcacagacagcttcggcgggcagcacagctacctgcggatctccctcccggagaagtgcaacctcagatgtcagtactgcatgccggaggaaggggtcccgctgacccccaaggccaacctgctgaccacagaagagatgttgaccacaaaagagatcctgaccctcgcctggctttttgtgaaggaaggcgtcgaaaagatctggctcatgggcggagagccgctcatccagccggacgaggtggacattgtggcccagctccagcgactggaagggctgaggaccattggtgtcaccaccaatggcatcaacctggcccggctgctgccccagcttcagagggctggtctcagcgccatcaacatcagcctggacacactggtgcctgccaagtttgagttcattgtccgcaggaaaggcttccacaaggtcatggagggcatccacaaggccaatgagccaggctacaaccctgtgaaggtgaactgtgtggagatgctagaaactgtatggcagctgtggccagagttggagaagctgtcagagcaggaatccaggacagccaaggcctttaaaatccctggcttccaaggccagatcagcttcatcatgtccatgtctgagcatttctgtgggacctgcaaccacctgcaaatcacagctgacgggaacctcaaggtctgcctctttggaaactctgaggagctgctgagaatcattggcgctgccgtgggcaggaagaagcagcagcatgcaggcatgttcagtatttcccagatgaagaactggcccatgatcctcatcggacaccagctaaactcagaacaactaactcatgtggatttggaaggacgggaagctatggtagatgtgggcaggaagccagacacagagtggttggctgtggcctcagccatggtcatcctggggcctgtagccttcaagcttgtccagcagaaccagctcaagaaaggagatgccctggtggtggcccagctggctggagtccgggcagccaaggtgaccagccagctgatccctctgtgccaccacgtggccctgagccacgtccaggtgcagctggagctggacagcacatgccatgctgtggagatctgggcatcttgccaggctcggggcccccaccagggtggaaatggaggccctgacctctgctgcagcccccctcctctgaaacgggatgtgaacacgtgggccacagccctaaggactcctgacagaccacatagcccacaactggccctgctcatggctgttccacccacccctctttattctggagcatatcagggaaagaagagtgccctctgacgtcagcagctggttgaaggtttaatggcttagagtgcgcacagagtggggtgggaacttgtgtgtctcacccctgccccaccccgcttgggtttccctacagtttctaccaggttcataagcagaacctaaaacaaatgggtttagaagtaactttagcctctttggctacttctggtgctcgccgaatccagaaaaatggtctttttaaatgtcctgttattttgcacaaacgatttcctgcttagagtgaggagcaaaacctctggcttttaaccctgccaaagacctacttgaagtcaatctgtgcatatttaattttt

SEQ ID NO: 470407 - DNA, 1055 bp, Homo sapiens
cctatgatccctgcagagctcccagagttgctcaagggatgctttccaggaggcaggggtggtgtgtgaagaagagggagcccttattctggcgctcttgcggtgttccattcccccgccgcccattcccaccccaagaggctctccaactttgcaccacctcccagcgctagaagcggagcggccctgggcatggtctgcgagctaggggtgcggggccgccggcgggccgcagccaggtgcccctcgctgctcttggctcttgcactctcgccaagccccgtgagcagcgcggcccaagctcccgcagtggcccgtgagcagcgcggcccaagctcccgcagtggcccacagggacactgcctcccgtggggcgccaacccgctctcaaaaagccagcaagcccgaaaacaaactctcctgatcttctgccctgggaaccccatggacctcacagaaaccttgtctgaagcaggaggtgggaggaagaggacccagatcccctgggctaaggacagccccctcctttccacgcttttctcccagcgccccacttccaaggcccagcccaatatcctgcagagtggtcttcctgtacccaccagcaccaagctcagcaccttgcacacaggatttcaggaagcactgaatgaagaaaggagcctctggcagccctgggatgccccagcaggcccagtcaccagggcaggctgctgggggatctgagcacattcttacactgagggttatgtgttatttctcccagcccatggtcaccccttgctaggacctttgaagagctccttggcaaagccgagtggaatctcatcatggcaagccataaggtctctgttgaactgacttaactgcctttgtagtgtgaaaacacccatgcatgggtgtggctgtgttccaataaaactttatttatggacactgaaatttgaattctgtgtaatgttcatgtgtcctgaaatatgagtgtttctttttctcttccccaaccattaaaaatttgtaaagcactcttagctcaagggagggctgtataaaaa

SEQ ID NO: 470408 - DNA, 656 bp, Homo sapiens
ctgcagctgagggtcctgactgttagaaggaaaactaacaaacagaaaggacatccacagcaaaatcccatctgtacgtcaccatcatcaaagaccaaagatagataaaaccacaaagatggggaaaaaacagagcagaaaaactgaaaattctaaaaatcagagtgcctctccccctccagaggaatgcagctcctctccagcaatggaacaaagctggatggagaatgactttcacgaattgagagaagaaggcttcagatcaaacttctccgagctaaaggaggatgttcgaacccatagcaaagaagctaaaaatcttgaaaaaagattagatgaatggctaactggaataaccagtgtagagaagtccttaaatgacctgatggagctgaaaaccatggcacgagaactatgtgacaaatgcacaagcttcagtagcaaattccatcaactggaagaaagggtatcagtgactgaagatcaaatgaatgaaatgaagatgttatccaggagaacttccccaatctagcaaggcaggccaacgttcaaattcaggaaatacagagaacaccacaaaggtactcctcgagaagagtaattccaagacaaataattgtcagattcaccaaagttgaaatgaaggaaaaaatgtt

SEQ ID NO: 470409 - DNA, 505 bp, Homo sapiens
gacagctaccccagaggcagcagcagcagcagcagcagcagcagcagccgccgccatgagggcttcctgggagcaggccctgcattgggtgacctcagaggattggatgatgcccacccacactggggaaggccatttgctttgcccagtccaccaattaaaataccagtcttttccagaattacccgcacagacatgcccagacataatatctaatcagctcttgggacatcccatggcccagtcaagatggcgcgtaaagttaaccatcacaacaagtcagaacaacctcagcctggaggcagagtcctggagaggtcctttcgggtcaggtgttactcacttagtcactggattgcagatggatcctgggggtcagtgggggcctgatcagtggctgaaaagatcagagggcatgagggcacttagtgacttcactaagcctggacctttaaccaatattaaacaatgggatgaactgagaatgtttccctaaacctgtgtt

SEQ ID NO: 470410 - DNA, 620 bp, Homo sapiens
acccattactcagcttcccctaaagatgacatctcagagctcaggggccacaagtgtggatacaaaaggctgccatactggccctttgccctcactggcggagagcagccgtgggcccaccaagctgttaacacttaagctgtccgtggatggcaaagctaaaaagagcactattgaatcccagcttccacccacaaacaggagaggccaggctcctgccccctacaaatggtatgaacttccatggctccaccccagtgcacactactcccagtgcacaggccagtcagaggttctcctgggaccactttatacttggctgtctcagtaccatcaccttggggcttatgttccaacagatgaattttggagggacacacatattcaaaccacagcaataggaatgcgagagatggatcttggtgatgtctgcatgggcaagcagtgtggaagtggcaactccatgccaggcattgaccagtgcaaagcggggcccatccctcattttacagatgaggaacctgagtactagggaatagaagtgatttaagctcatatagaaagccattagcacagccaagatgttgatctctttacttcaatctatttccattatgcaa

SEQ ID NO: 470411 - DNA, 528 bp, Homo sapiens
tctgctgaccacagctgctcaagaaagagtttctttagcttcataatgttggctcttgctctggatctagctgactcctgctgccattcatggcccctggcgcacattgccaaccctgctccaagactggagctggcacagggaaaggagagaggccagacaacaggagcagacacctctgagcctacagggattgggaaacccttcctgggccctgaggacacaggctgcagagatgcccaggccttgctcctgggagggctgctgcagcagcactcggggagcttctgctctgcaaactcggaaggggcagggcttccacttgtccccagctcctgtatactctgtggaatgggaggcccaggtctgcagccgtgggttgggcacccaggagggcagatcccgcccactaccggttccccccaagagcacagagaagctcggattcacagccacagtttgggtggctacagctgcagtttgggtctgcagcctgtggtttgggcagctgcagcagtaccctaggag

SEQ ID NO: 470412 - DNA, 782 bp, Homo sapiens
gtaggtaaatccacgaagatgaggaaaaaccagtgcaaaaaagctgaaaattccaaaaaccagaatgtgtcttctcctccaaagggccacaactccttgccagcaagggaagaaaaccagatagagaatgagttagatgaattgacagaagtaggcttcagaaggtgggtaataacaaactcctccgagctaaaggagcgtgttctaacccaatgcaaggaagctaaggactttgaaaaaaggttagaggaattgctaactagaataaccagtttagagaagaacataaatgacctgaaggagctgaaaaacacagcacaagaactttgtgaagcatacacaagtatcaatagccaaaccaatcaagtggaagaaaggatatcagagattgaagatcaatttaatgagataaatcatgaagacaagattagagcaaaaagaatgaaaaggaatgaacaaggcctccaggaaacatgggactatgtgaaaagaccaaacctacatttgattggtgtacctgaaagtgatggggagaatggaaccaagttggaagacactcttcaggatattatccaggagaacttccccaacctagcaagacaggccaatgttcaaattcaggaaatatgaagaacaccacaaagatactcctcaagaaaagcaaccccaagacacataatcatcagattcaccaaggttgaaatgaaggaaaaagtgttaaagttagccagagagaaagggcaggttacccacaaagagaagcccatcagactaagagcaga

SEQ ID NO: 470413 - DNA, 687 bp, Homo sapiens
agattatatagtccctgacaaaaatgcactgtgtgctgctcagaaccagcagagccatgggcaagatgggccatatcctgtttaatggtggccgcagatatttcctggctgagagctcagcctggaaagataactatgcatcaggtagttacttaagtggaaccactggtgtagggttaccagagtcttttccttttagtgcccaagggcaaagagcattgttaatgacgcctacaccggaaagatgcaagaagaaagatttctatacaaaagaaaatcaaacttatggaaagaaaaatggccctcaggacagggcttgtgacaattgcatctggaccatcttgtcactgcgccaagcctccatcttcacagagtcctgcatccttgccaaagggcctaggaaaatctattttaaattaaatatcataagcccacaagccatagcaaacaatatttttcaccatatgctctgaattaatatgccaaagattgcaacctctatttttcttcataaaaagctgccccaccctgatgtgggtatggtgagctggagggcgggagggtaggaattttcaataaggccaccaaggataggatgacggcaaggaaccaaagaaaaaaaaaaaatagagtccattgtcatccttttgactgggacaagtaaagggcagaattgatttttcagcc

SEQ ID NO: 470414 - DNA, 721 bp, Homo sapiens
gctatcaggatctggtggcaaatgaactctgagttgaaatgtgcacttcagctaccctgtgggcagaacttggccttcctagatggtgcttttgaaacttactcagaagtgctttctgggccggctcactcacattctaccttacttactccatcaaagtcccaaccatggaaggctctggtgtcaaatcataagatcccactgctgtttttttttttgtttgtttgtttgttttttgctgcaggcatgcaggaggaacacagacttggtgtattgtcagctcctaggaggatggacgaagctcctgtagagctgattaacagaagcaatttggccctgggaatgcacagagagaagtggaaagtcatgctacagagttgggtaagagttcgaagtcagagaaggctgggttggaatccccactaccacctagtatttggtgacatgggcaagttccctaacctctggagctccaatctccttacctgtttgatgtgtgggattacggtgcccacctcatgagtttgctgtgaagattaaatgtgtaaacctacatagcaccacattattcttagcaaatattagctttctttaccaccgtcgtcaactttattagctattttcattcactctctttttaaaaacagaacttaacagttattcatatgttgacacattgccttgaattccaagtcaacaaatatgtcagacatttttgttg

SEQ ID NO: 470415 - DNA, 1630 bp, Homo sapiens
ctgccttctcttacatacaactgtcttgaagttggctagagcagaggtccccaagcgggccacatagtaggaggtgaagtagcggatgcaacgaccctcactatgcattctgtgtagaccggccggaaccactgcctggtcattctctgtagaccggccgcaaccactgcctggtcattctctgtagaccggccggaaccactgcctggtcattctctgtagaccggccggaaccactgcctggtgaatctctgtagaccggccggaaccactgcctggtgaatctctgtagaccggccggaaccactgcctggtgaatctctgtagaccggccggaaccactgcctggtgaatctctgtagaccggccggaaccactgcctggtcattctctgtagaccggccggaaccactgcctgatcattctctgtagaccggccggaagcactgcctggtcattctctgtagaccggccggaaccactgcctggtgaatctctgtagaccggccggaaccactgcctggtgaatctctgtagaccggccggaaccactgcctggtgaatctctgtagaccggccggaaccactgcctggtgaatctctgtagaccggccggaaccactgcctggtgaatctctgtagaccggccggaaccactgcctggtgaatctctgtagaccggccggaaccactgcctgatcattctctgtagaccggccggaagcactgcctggtcattctctgtagaccggccggaaccactgcttggtgaatctctgtagaccggccggaaccactgcctggtgaatctctgtagactggccggaaccactgcctggtcattctctgtagacaggctagaacgaatgcctggtcattctgtgtagactggctggaactactgcctggtcgatggtctttcagcagggaggaatgctggcctggaggcttaggagggctgaatggtttgggccagccccagatccctggcagcctcgagacactgctccctgcatccttgccactccagcttcagccatggctcaaaggggcccaagtacagctctggtggctgcttcagagggtgtaagccataagatttggcagcttccatgtggtgttaagcttgtgggtgcacagagtgcaagagttgagtcttgggaacctctggctagatttcagaggatctatggaaaagtctggatgtccaggaaggagcctgctgcaggggcggcgccctcatggagaacctctactagggcagtggagaggaggggaaatgtggggttggagccccaacacagagtccccactgggacactgcctattggagctatgcgaaaggggccaccatcctccagacccaccaatagcttgcaccctgtacctggaaaagcctcagcttctcaatgccagcccatgagagtggctctgcccaagcttcccaaggccttgggagcccaccccttgcatgcctggatgtgggacatggagtcaaaggagattattttggaactttaagatttaatgactgccctgctgggttttgggcttgtatgaggcctgtagctcccttcttttgggtgatttctccattttgaaatgggaatatttatccagtgtttgtact

SEQ ID NO: 470416 - DNA, 885 bp, Homo sapiens
gaggacccacgagcatgccttatagcagctgcacgctcttcatgccaagatccatcgtgcccctcctgggggctcaggtcttgtccctggcagctgctggcgctgtgaaccccagctgcagccccctcagcaagagcctcatggcagcagctgctcccctcggcttcaagcacacccagctacgatcagtgctcaccgctgggggctgccaaaaataccccacagggtcctcagggtgctgctggcagcaacgggaaggcacctatccatctgacaagcgtgcgctgggcacccactcaggtgacactgtgtctttggatgcagagatcgttaaggaggctgaggtgccgcaggctgcgctgggcgtcccagcccaggggacaggggacaatggccacacgcctgtggaggaggaggtcgggggcatcccagtaccagcaccggggctcctgcaggtcacggagaggaggcgtaagtactgctccctgcccagcgcacgctatggggaccccgtgagctcccccaagagacaaggcagcagggtccacctcctgtccaaacactccctggggggtctagagcctctgagcagcgtctcctctctggaggtccacttcgacctcctggacctcactgagctcaccgacatgtcggaccaggagctggccgaggtctttgctgactcggacgacgagaacctcaacaccgagtccccagcagtgaccagtgaaggacactgacgtgacctgtgtgaacttcagtaactgtgagagcatcagggccgagccttctccgcatgggacagtttggcccagcctctgcttcccaaccccccaggccactcaggacctcattaaaaggaccagccccactgtgactcctgcc

SEQ ID NO: 470417 - DNA, 1143 bp, Homo sapiens
tcatcggagggcaaggggctccgctacgcacagtacctgccccgggagcagcagctctacacccaggagcagctcttcgaccgcacgtgcatgatgctcgggggccgggtagccgagcagctgtgctccgggtagatcactatgggggctcaggacgacctgaggaaggtcacccagagtgcctacgcccaggttgtgcagtttggggtgagtgagaagctgggccaggtgtccttcgacttttcccgacacggcaagaccctggtggagaagctgtacggcgaggcaagcgcccagctccttgatgacgaggtccggcacctcgtcagtgccacctacaggtgcaccctggacctgctgacacggtgccgggagcatgtggagaaggtgggccagcggctcctggagaaggaagtactggagaaggcagacatggtggagctgctgggcccccggcccttctcggagaagtctacctatgaggagtttgtagagggcgtgggcagcctggaggaggacacatcccttcccgaggggctgaagggttggaaccgcggacaggaggaggaagatgtggagagcagcctgtgcagggggctctgtgtagcctgtggcggtcgcctgcacctgctgctgggtggagttggggtgactgccacttacctggggccttggcaaagcagctgcggaatctcacccaaaacaaattaaaacgtgacaactgtgaatgggtgttttagatgagggtgctctgagcccacatgcagggagtaggagtgggagtgggcagagggggtaccctgagtccctgggccctcccgctggaggacagtcgggtccaggcttagacgggagaggccccagggctctggcccctgtggtgctgaggaaggcacgactgtagcttcgagaggggcttgcgtgggacaccttggagacaccaggccttcctggggcctccgtggaggagcgttgatatggtcataaagacactcggaggagcctgggtccagcacagaaaccctcaccgtttgggtgtgtgtcaggaggtgacggctggagcctcgtgggcgggtgaagtgtgtctgctgggtcagcactgcccagatctgccatcgtgttcggaccccatccctgcaggag

SEQ ID NO: 470418 - DNA, 1026 bp, Homo sapiens
gattcccctgtggcactggtgtctggacgctgcctgcccctgctcagggatcagcccgcagtaggcccagtggccctgggcccctggaccacctccccggcccccggaccgcctgtacccactcacctcctcccatccccgctcacctcctcccgtccccgctcacctcctcccgtgccccgctcacctcctcccgtgccccgctcacctcctcccgtgcccgctcaccacctcccgtccccgctcacctcctcccgtgccccgctcacctcctcccgtgccccgctcacctcctcccgtccccgctcacctcctcccgtccccgctcacctcctcccgtccccgctcacctcctcccgtgccccgctcacctcctcccgtgcccgctcacctgctcccatgccccgctcacctcttcccgtgccccgctcacctgctcccgtccccgctcacctcctcccgtgcccgctcacctcctccaatccccgctcacctcctcctgtgcccagggaccacctccccagcccgcagaccacctgtgcccacttgcctcctcccaggctgcccttttgcagacttgcccgacctccccaccacgctaaccctatggacctcacttccttccaaaccaactcctataatcctgaggtgctgctgggaggcctgacactgggcggctgcctgtccacgaggtccgtgcactcggatgagcagctgaagcccaagctgagcagggcctcggaaacccacgggcctgaaattcctcaaactgcagggcagtgccccgaagcccacagtgaggacagcgagggcacctgcctcgcctggactcagcgctcacccgggacacatgatgtgacttttctgcccacagacctatggttcggcctcacagccatcaacaaagtgtggggccggcagggcctgggctcagctcaccgcaaggagcctgggcagtgcggcagcttctgcagagggaggggttctgcgtcccattccccaagtgggttctgatgttggaaagtc

SEQ ID NO: 470419 - DNA, 1367 bp, Homo sapiens
gcccagcacggccataatgaaatacagcacagatgatggaaggagccagcctgagctgctggaccctggccagccagctgggagtcctctggcaggacctgaaatagtgatcgagcgggcagctggaggagaattactgctcggcaaattgctgctggaaactggattcctgagcagtgccacacacaattgtggaaatactgaagcttctcctaggtctagaaactaccaaggaaagggcaggcctggactgacctttgaaactccatatggactagtacagtcgttctcaaagtgtggttcccagaccagcagcatcggcatcaccaggaaactcattaaacatgcagagttgcgatacattcagtccacaccttccgaatcaggaactctgggggtaggacccagtgctctgttttaacaagttcagcaggaggttctgatcaccactaaagtttgagaatccctgctctagagacaaaggtggtgcttgttgttgttcacaaccatttacaataattcatagtgctaccactcatgcatagatattgcttaaactgttaattttctaagcactctgttttaatggagacctttcctttttgtatttgttccacccagtgctatgtttgtggcttttagatattagggagtatataaatttgttacatcaattttctctatgataaattataaagaaaattattctatttagttttattcatctcctcatgaaatagtacaattagattttgggatgtgacaaccttacatcattttgtttttctaaaatatctaactggtatttttatcagagagttggttgtaatgctaacattattacagctatgcataaaccaacaatggccactacaaggcttgtaaaagcacatgtaaaatatgagatgactttccaaattcaccaaatttgtctgccatagaaaaaaactgttgagaactcattggtgccaagtaggtaggtgctatggaaaagcaaagatgaataagacatagctgttatattgagagaggtgtcattgctgagcgataataaaggaaatcttgaaaaaaataaaacaaaaaggccccacagaaatagaggcagaatgtggaaaagtcccaagtggaatgaaatgttatggcatttagagattggagaaatgaatttggggtttaaaactccctgtttggggcaggaaggggtggtggaatttatggtgattaagatttatcaaaactcaaaaaaagactttttttttctgtctctcgagttataaaatagtgccaaataaggctaattcctggggaatcagaaataaactcttctccctagagaagggtcttctcttagtctttgttttttaaaa

SEQ ID NO: 470420 - DNA, 709 bp, Homo sapiens
ctgcagccacaatagggagggtgcttatgaatacctctgaaaggcttctaagaagaaatgatgctgcaactgaaatgtgtagcttcatgggagtgaactgggcacagaggaggacaaccagcagctgttccctgcccctctctggccctggcctgcaaaaccctgcagctgagtcaggggtagctgatactcaggctgctgggccatttctgcttcacctcttcaccagttggcctttgtcaggcagctctgatgagcctggctgcctggtacgttttcctcttggaaagaatggggggaagttgacctactccgccgataaggagggagatctgcttcctcggccacagcccttggcaggtcccctccaggatttccctgggccgtctgagcaccgtggggagatgagagtggatgtacagttgtggcttgagagtcttaaagccagaggggacttcatcgtcatcggcaaggagattacgcaggagtgcatgtccgagtcttcagcctttgggaataaatttccctggggcccctccagggaatgtactgaatcagattctgacagcagggcctgggtaatgatatttcattcttagctcctcattttaaatgtcatactcatcattttttcctgaaatgaaaccaatgtatttctattgccattactgaaaaatgtttacttacagcccttttgaaatctttcaga

SEQ ID NO: 470421 - DNA, 555 bp, Homo sapiens
tgcttctgggtgatgctgctgctgctacctggttctcaatacctcactttgagaactgctgccccagagctttgcttgtccaagcgtattctacggattaacagcattggcatgagctgggagcttggtaggcatgcagagtcccaggtcccaaccagacctgctgaattggagcctgagttttaccatgattcccagggacctgatgaccgagccctgaagaccacctgtgaagactctgaaggtgcagagggcggtagcagagatgagatgggtgggacaattgtgaatggccacacctgttcaggattccacagagtgctccagcggagtttgttgcttcctctgagaaacactgaagaggaggtgggtagcagccagtcaaaccgccggagacaagctgcagctcttgataataaatgtgtgcaagcctggctgtgtggagtcgggagtatcggctgatgcgtgttgtgctgaaaccagcctccattaggtttgtggggtggggggaggggggagggatagcattaggagatatacctaatgctaaatgac

SEQ ID NO: 470422 - DNA, 4573 bp, Homo sapiens
caagatctgaggccggatttgaatccagtttcaacttgacgatgccggctcctccccttcaaaactctttgattactcattgcctttctgtggacttcgtagttgttaaaatcctattctaccagggacaaaccacaatctctgcaggcccttctccagtgtactggactgggtccaggactgcaactagtgtggactttgtaagaggggtaagaactctggtcctccccagcagctacaggggcccatcatctgtggacacactacaaggaaaatacaaggtagaaacatttaacaggacacagacatggaatgaaaaagagagaattgttcttgttttcttcccttggctacctggaaattcaaagataaatgtaaatgctttgaacatcttagcaccttatccttggcttctggtaaaattactgcctctgaccccgcccccccgccccccccaattaccacttatacagttcactttccccacttagcttctgctgagtgtaccccctgtgatagtattaatatattcgacattactgctaatatcacaatgggtgtataccctgtgatgttatttatatcttttatattactgctaatatcacagtactgctatcacacttggtgtacatcctgtgatgttactcctaatattttagattttactgctgatatcccaatgggtgtacaccctggttgtacatccactgtgatattatttataatatctttgatataatggctaatatcacagtgggtgtacaccctgtgatattattcataataacatggaagccgtgtgtaaacattggatattataaatatcagagtgatatttcattaatatcacagtgtgtaaacattgtgttaacacagtatgttataaatatgagagcaatatttcattaatatcatggtttgtaatcactgagtgtaaatactggatatgataagtattagagtgatatttcattaatataacagtgtgtaaacagtgtgtgcaaacactgatattataaatatcggagcaatattttataaatatcacagtgtgtaaacactggatattttaaatatgagggggatatttcattactattacagtgtgtaaacacttgatgttataaatatcagagtcatatttcattattatcaacgtgtttaaacactgtgtaaacactgatattacaaatatcagagtgacatttctttaatatcacagtgtgtaaacactgaataatataaatatcagagcgatatttcattaatatcaatagtgtgtaaacactgaatattataaatatcacagtgatatttcattaatatcatagtgtgtaaacactgtgtctaaacactggatatgataaatattagagcaagatgtcattaatatcccagtgtgtaaacactgtgtctaaacactgaatattataaatatcagagtgacatttcattaatattttagtgtataagcactggatgttataattatcagagcgatatttcataaacatcacagtgtgtacaccactgccattataaatatcatggcgatattttattactatcacagtgtgtaaacactggatattataaatatcagagccatatttcattactatcacagtgtgtgaatactgaatattatacatctcagagcaatatttcattaatatcacagtgtgtaaacactggatattataaatatcagagccatatttcattaatatcacagtgtgtaaacaccggatattataaatatcagagtgatatttcactcactgaatattataaacatcatcagagagatatttcattaatatcactgtgtgtaaaccctgaatattataaataccatcagagaaatatttcattaatatcacagtgtgtaaacagtggatattgtaaatatcatcacactgatatttcatatatatcactgtgtgtaaacactggatattacaagtatcatcagagtgatattttgttaatatcatagtgtgtcaatattggatattacaagtatcatcagagcaatatttcatgaatactacagtgtgtaaacactggatattacaattattatcatcagagcgatatttcattaatatcacagcgtgtaaaccctggatattacatgtatcctcatcagagcaatattcattaatatcacagtttgtaaaccctggatacaataaatatcagagcgaaatttccctaaaatcacagtgtgtacatcgtggatactataaatatcagtgcaaaatttccctagtatcacaatgtgtaaatcctggatactctaaatatgagaccgaaaattccctggtatcacagtgtgtaaaccctggattttataaatatcagagctaaatttccccagtatcacagtgtgtaaaccctggacactataaatatcagaacaaaattttcctagtatcacagtgtgtaaaccctggatactataaatatcagaacaaaattttccttgtatcacagtgtgtaagccctggatactataaatatcagagtcaaattttcctagtatcacagtgtgtaaacactttgtgtaaacactggaaattatatgtatcagactgatatttcactagtgtcacagtgtgtaaaccctgtgtgtaaactctggatattataaatatcagagcgatatttcactaatgttacagtgtgtaaacgctgtatattataaatatcagggtgaaatttcactaatgtctcagtatgtaaatactggatattagtaatatcagagagaaattttactaatgtcgcagtgtataaacactagatattacaaatatcagagcgaaatttcccttgtatcacagtgtgtaaaaagtggacactataaatatcagaccgaaatttccctagtattactgtgtgtaaacactggatactataagtatcagagcggtatttcactagtatcacagcgtgtaaacactttgtgtaaacactggatattatacatatcagaatgatatttcaccagtattacagtgtgtaaccactggagatgataattatcagggtgatatttcactagtatcacagtgtgtaaccaccggatattataaatattagagcgatatttctttaatatcacagcatggcaatgtcacgacttggtcttcccgaggagccagtcagaaacagtttgctagatgatgctaaggcccgcttaagaaagtatgatattggaggcaaatattctcacttgccatataacaaatactccgtccttttgccattggtggctaaagaaggaaaactccatttgttgttcaccgtccggtcagagaaggtaggtggacaaaaaatttcctgcccttaaacctcaggacatcagaagacctcacgagattttgtcacttgcacacactttgatgccaaaattctcaaaagggctttcaaaattgtgatgtcagaggcatacaaccacaagccacaggataacatggtgtttcttggagaaggtttaacaagaaaatgaaggaatttagctagcaagcagtttaaaacgctttcacactagggttacctaaccttggtgctattggcatttggggctgaataattctttggtgtggaggctgtcctgtataatgtggtgtgtttaccatcatccttggcctctacccaccagatgccagtagcacacacaaacacaagctcacacacacctttgtccctttgtccagtatgccagtagcacacacaccacaaatgtcttcagaattgcctactatcctggcaggattgggggtgccaaattgccccccaccaagggccactgttttagactatcccacccccagtataatgtgaaaatactagagcatagaagttaacggcctaggctctaaagctagctgtccacgttgaatccaggctctctccttgccagctgtgactttggcctcgttacttgccctctctgtacttcagtcttttcacttgtaaaatgaggacaaaatattagtaactgcttcatacagctgctatgaacatttcacagggtaacaaatgtaaagcacctatataacccaggtacttggcaaggaagaattcagtaagttttagctgtcatcgttagtgtcaagtgacctgtcagacatgacctgaagttttaagataaatgatgtcactttacagaaataatgggctgggaatggagtttctggctcaccccttgtattggtccattcttgcattgctataacgaaatacctgaggctgggtatggtggctcaagcatgtaatcccagcactttgagaggccaaggtgggaggatcacgaggtcagcagttcgagacaagcctgaccaacatagtgaaaccccatctctactaaaaatacaaaagaattagccaggcatggtggcacacacctgtaatcccagctactcaggaggctgaggcaggagaaacacttgaaaccaggaggcggaggttgcagtgagccgagattgtgccactgcgctccagcctgaggaacagcgagactccatctcaaaaaaagaaagaaagaaagaaaaagaaatat

SEQ ID NO: 470423 - DNA, 688 bp, Homo sapiens
ccgatatccttgcaacgtgcagggactctcactgataataataaaccacacgtccacttcaaaggaaatacatggctatgattgaaattactggaacattccagcaatgggatgtttacctgcctctgagaggtgctatctatacaggaaaatcacgggctccgaagttgaaatgcctggcttgactccaggctccaccctttactgccagtgccaggcctttctgggtgcacccaatgacaaggtttctcagtttgctttcagttaccatgagtgtacaacagagaagtgtgcatacagccttacacggaatcaaacacaaagtgggggcttaggagatatcctgcggctgaggttctgttctgggcgggacaggacccatcacagctggaaggtgacatcggaggcttctggatcagagacaggacccttttcaaagctctatgtcccgctgtttcctatcaatgacaaactttcaaagttaactggctttctttgcgagtgtaacatcagtcctcagtttagtccctgagcacagtcatcttgggtcctctagaccaggcacttacgtcctcatgttctgcggcagcttttactcctccctctagtaccaattaccactgccatcgatgactaatgcgcctctttattagcgttaaatgccacttccttggggatgccttccctg

SEQ ID NO: 470424 - DNA, 1523 bp, Homo sapiens
ttttttttttttttttttaatgtaggaggggcagctgctgagagatcaccggccatgagtaagaacacagtcatagtcacgatcacaatcaccatctgcacggggcaaactggattctgggccgtctaccgaatcacctctaaagcttcttattgctactgctggcctggccctgcctctggaagcagcccagctgttgggcccccagttagtgtaaggcacagatgtgggagctgttttccgaaaacccatcaccagtgcctgggcgcctcctccctcaatctgcagcagcagcagcagcagcagcagggtcctgagaagggccttggcgagggttatttgcaagtgccacacccacagaccctgctgtatagtgagctcttgctaacctccgatggcaactgcatccctgagcctgatggcttttctggaaccacggaaggccccctcatcacctttcccagccttacaggggagcatccccaaccagagactgtggtgtataaattccttcgttccgtctcttcaataatgcggtcattctgagttccctgctggtagttcctgaatctcctaagtgaactccttgtactttagtcattgtctcagggtcttcttctggggggaatcgaaaccaatgtgttcagcaatcctttaaaattaaagacacagggcaaaggactctctgcctctgccaggtaacaggtgtcacagcacaaatgaatgactcattctcctcacttagcaaatttcaattttaagtaattgcttgaatcaaagttatttattggatctttcagaattaaagctggttttgattagtttccatcactagtaaaatggaaaatatgcttcccattgggtggggattttcctcaatcatggcctgcttgacaacgaacactgaacttggagcacaccattctgaaccttcccatcaggacctctccttttctcccatccaagtactaaccaggcccgaccctgcttagcttctgagatcagacgagatcgggcacattcagggtggtatggctgtagacaggacctctccttttctgtcttcaaaagacttttccatgatcacagcccttgctatggccaggcacccagtggacactcaatagctgattagaaaattccttctgaccatttaaaaataaaatctagacctgaggacatgccacggccagtttttaaaccagggaaaaataacttctagagttgcttgctgcctggaaaagagttccctgctatgcagaagtccttgattccctgatggttcccgggtaacaccattaaatatcccctataccatggcatctgcgggttgatagtataacctttcatgctcattacacacagtgaagactagagtgactggtattgctagcgatgcaagggagccaaagttgagcttctgtgccttcctctacttcccattgcctgccaggggtgatgtccccggagcacacatttctttgtttcacctgctagtttagaaaccttctgtggccgccctc

SEQ ID NO: 470425 - DNA, 551 bp, Homo sapiens
tgattgataactcaatctccagcctccctcaccttactggaaccatgtaaacacaagttggcttattatgttatacaatatccagcctctgctttctgcacatgtgtatgtcagacaattctgcttttatgcaaattgctgtgtaatcctttcatcatctaagacatcactgctgctgaatccacctggtcctcctatccccctgacagtctatactagtcatcctacagcaaagaggtctatgggcatatccccccaccttgaattgccaaatgaaatctaccacgaaccaagtggcttgaggattttgcacactgtcccaggcagcaacagtgatgggtccaagggcagccaatcagaatcattgcttggaaggaaagctgtcctatttcggtttgggttcatgccaatcacattctataaagcttgtaagtgataaagccactatgcagatgggaaaactaaggactgggggagaaagtgatctactcagtgtcacagagatccatggactggacagaagtgtttttactttgtttgtagagtggcat

SEQ ID NO: 470426 - DNA, 773 bp, Homo sapiens
gcaggacagacaaaacacccaccaagggccatattcagctctcaggcagccaattcttaaccactgtgggaaagaacacgtccacaacaaccccaatgtcttccccacccttcacccctctgacaaacccaggtagcaaggccccggaagctccagcctgccatgcacacagccagaacagccttccgctttcgagcagaatgatccaggtactagcagttgggagttgatcagggcgagaagaaaggggaaggcccacaggatatggctgaagcccagagcatgaaccacccaatcgctgttggggtgaaagatgcacagctccaccactgtgactctggaaccagcatcattcaagtcctggagacagtggttagcgctaacataaccagcaacccaggcaagggtctggggagccctggaggcccaggctggggcccagagcatggaccacccgctcactgttggctctaccactgtgattctgggaccagcatcattcagctcctgatgaaagcttcctggaggtggggaaaggtgagccaagagacagggagagctgaagtggacaatgatgaaggaaaggtatcgctggacagtggcagcaggtggagctgggtggcagcaggtatggagtggagaccactagcgaccttcattaatctcaccagctggggaaatgccaaagcaatagtctagacccaggccaagaccgagcctgagctctggctcctttcccagatgcatatatatacaggggcacaacgtgtgtg

SEQ ID NO: 470427 - DNA, 1274 bp, Homo sapiens
accagcagcctggaagtgaccagcagagctgacaaaagcaccccctgctctgcccacctccgcagagtcctgtcctcatcagaaacggtatcgcggatgctcctcagctcctagaccgtggcttgtgatgttagatccgtcccttagcagccacaccccagtcactgcctgagcctcttccatcgctgactgcctgagcctcttccatcgctgactgcctgagcctcttccatcgctgactgcctgagcctcttccatcgctgactgcctgagtctctccatggctgactgcctgagcctctccatcgccgggatcggccggccaccttctccctgtgacttcctcccagtcccgtcaccaaacccctgaggccgtcctggcatcagaccgcaggccataaaagcgtccagcagagggcgccccaaacccacgagggccgcggcgaagaagaaggtagcggccgctgtcctctcccctcccaggcaggtccggtgcggaagggatcgctggacactggcgatggtggagaggcatggtgggccgggtcccccgcacccttcatggccctgactcggggctgcccgtgaccttcagcgtcagagctcggtctggtccatgcctgccttggggaagctgcgccgcctctgcacccacccagtgctgggacgtctgtctgagcctgagctcagactttggtgtcccgctgctgaggccggggtcccgccgctgtgaccgtggcaaggagagtctgcgactgccccgctcaacacccccagcaactttccttaaaagactcaaaccccacaccttcccccaacaccaccaccggcgtcttcaatcatccagcccttttggatgtacagcccccgggcttctgcagacctgctccctgattcctgagcacagccgcctccctgactttacctctccttcccccattggcacccagctcagggcctggcctgtagcccacgatcacatgcccaatcccccgacatttgctgagctccgtgtgagccgagcaactacagatgcatagaagggaacagagcaggacacatgtcaggatcagaacccacccatacggctttattttaccttaattactacctcttcaaggccctatttccaaatatggtctcattctgaggtgccgagggatagatctccaccatttgaatttgggggccacagttcagtccataagaccaggtggaggaagtacttccactgctgatgtccatctgccagcgaggcctctccagttctcacc

SEQ ID NO: 470428 - DNA, 763 bp, Homo sapiens
gctttgggtgcacagaggacagctcacgcacatgtgtccaccagccgtttcccagctccatgaatttgtggtgcattcccaggttgaggcagtgagcaccctgcacagtggcctgaggcccccaggaagtttcttctctgaattcaaacaagacgggcagctggagcaggctggggagagagctgcgctgcgtgggctttccgaggaccatatgggcaacacggctcattccgcggctacacccgccccgcttgtcatccccaatcatacttgctctaatccgtgttttaatttactctgctggtgcaacgcccgtgctgccagggcggtccttggggccccctcattcctgctgctgatgacaaggcactcgccttgtatgctttcttgccggagatccaagaaccctctcttggggtctggattgggacccctttcctgtaacacagacacaatcctacctctttagatatttaattaaccatttcataaatttaatcttgtggtttttctttttatgttcttaacccaatactgtaattttgttttcagatggacaatcattccatgggccatcaaaaagtgggcctggggccaatagataaaatggcttctacctgcaaagagtttctctgattctttgagtcagttggtgagccctggggggcagcctttatatctttatttaacactcgagtctgacttcacaggattttgctagcccaaataaagccaggtggctaggtttacatttttagggcct

SEQ ID NO: 470429 - DNA, 660 bp, Homo sapiens
ccagggagcgtaggtgcccagaggggtgaggggctggaaaaaacaatgaacaagagatgtgacaacctcaattatctggtggtgctaagagctcggagacagctcctgctgaagagagctgttgggaagcccgggggtgtcagcctggctggaaaaatggcagcccccagccactctcggattgaaatgagcatcttctccattactggcctccaaacgcgtcccgtgtcctgcccccaatccattagtgagatggaactttctatctgcacaagaaagaaatcagcctgcagattaaatgctgttgcgccgaacgaactgctctcggctgaagtgggaaagcatgattcgattagtatagattctggaatcggcaaaagcaaaacatgggagacaaccagcaagaaaagaataggctggtacgttgcagaacgttatgcagctatcaagaagatcaactaggtccataggcattggtgtggaaagatcctgaagataaattgctcacttttttaaaagtcaagagttatgatagtgtgtattgtgtgatctcaattattttgaaaggatatatacataattatacatgtatatatgtatattcacatgtgtttatctatatatatgttttgcatggtggtatgtacacagaaaaatatt

SEQ ID NO: 470430 - DNA, 518 bp, Homo sapiens
gcctgtgttcatagcagtactgttcacaatagccaagaggtggaagcaactccgtgttcctcaacggatgaatggacaaaacgtgcactggtgacctgagagaaggtttggaattcgggctgggaggaaatgagagaagctctcagggcagtggccctgcccccattattctgaagctttcagtagggtctgtgtcccacatcattggtttggaggatggcgagaagtcatcctactaccagggcctgccagtacagcagaacccaggatgcaaaggagcccagcaggccactggaaaggtgaccttaacccatgcccacagagaatcgcccactttacagctacacggcgggcatctgatggctttaatgaatgcaaaagcatgtaagcaagccaactggtcttcactccactcctgcctgcagaatccaatgcatacctccagcctgcactctaagctgccgtgaccattttcttctttttcaaaatatgtacttcaaattcttcctatttcctcc

SEQ ID NO: 470431 - DNA, 879 bp, Homo sapiens
gtgcccgccggcagagtggggccgtcattcctgggtggaagaagcctgtccggtctcctcctgaatccagccccactgcaccgccacaacacccaagttcagatcgcagctccctgtgctctctctggatctctcattgaccacccttgcccccaccttctagacgctgaggtgcccctaggttaatcctcagccctcttctcactcttagttcattttctctttagcttgggtgacagagtgagaccctgtctcaaaaaaaaaaagaaaaagaaaaaagaagaagaaggaggaggaggaggagaaggaggagggaggaagagtaggatggaggaggaggaggaaggaggaggagggcggaggaggagggaggaggagaagaagaaaaaagaagaagaagaaggaggaggaggaggaggaggagaaggaggaggagaaggagaaggagaagaagaaaagaagaagaaagaagaagaagaagaagaagaagaagaagaagaagaggaagaagaggaagaagaggaagaagaggaagaggaggaagaggaggaagaggaagaagaagaagaagaagaagaagaagaagaagaagaagaagaagaagaagaagaagaagaagaagaagaagaagaagaagaagaagaagaagaaattgggaccaggtcacattttaggtcccttgctgccttctcactcacatgcttatccccacatgtgaggacactgagggtcactattataaatgccaacagatgccaggcaggtaatgtcaatgaaccgcatgggttggatgtgaggtattagggaatgatggaaactgtgacaagctaagagcacaggctcttgctaagaagggcagccacatttcagctttgacct

SEQ ID NO: 470432 - DNA, 1047 bp, Homo sapiens
catcgttatcagccggggacccaagcagccacaacctgccacattttccacagggtttggcggtgttaagaaaataccctctagcctggtgttattttaggctgaaacaaaagtcgacatgaatggctgggcggaacagagggggcattgttctccctgtggccgggtgctcagaactggcctgaaactggaatccaacaaacggagaagtaaatgccatcacgtacaaatgagctctcgagtgtccaagggatcaattgagcacagagggcggccgggccaaggattttgccaggccccgggtcatgggaagtttggtttccagaggacagacggaaagtgccacctgatttgcagtggacggacggctgtgaggactgtgtgggatgatgacgtccatatagacactttgcatcatggaagcagtcaatgtatccctgaatacattttttccccaagtgtaaaattggcataagacttaaaggattctagcagtataaaaggttatgcagcgaagagtaactctttcctactcttgaccccttagtcacagagggtgtctacagagaagacacttgttgtcaatgtcttgtgtaaaatgccaaagatggtttccatataccaacatggaaatgagatatatatatatatagccatttttgatctacaaaaatgggagtttcatatggttcaatccaagtggtgtgtgtgtataaacaacggtagcctgctgtatacactgttcacatcttgtttattttttaacgtaataatatcttttagagaacattccatgccacttcttacagacatttctcattcttttcaacagtcgtgaagtcttccagcatgaaggcataccttcctttatttaactcttggtgaatagtacctgggtttttttgtgtgtgacatttttggaggaggaaaggaaagtcgtgcattcaggcattcaccatcccctagaccccaggccagcccccagcctccagcacctgttatttcttctccgttcagtaattccctggagtgcacatttttctcatc

SEQ ID NO: 470433 - DNA, 680 bp, Homo sapiens
ccccatgcaagatgaccttctggaaaccatactacacaacttatctctgctctaaccttacatggagggcccacttattcatccaagaacaatacggcgaacaagaaattcaatttggcaggggcactgtctgtttcagcatactttctcttaatttaatcacccatgcaagagctttccagacatttgaatggttaggaatgcagatggaaggatttttgcaacataaagttgtggagaagacacatgttctggagccaggcccaaccggttggaattccagctctgctgctcattgctgtgtggccctgagcaagtcacctgaccaccctgaccctcagtttctcatctggaaaattttgttctctcattccattgctcatgggttctttcattccatcaacactcttgtgatcaaggagtcatatgccggtgacaactgctgtgaaccagcaaccggcaccagaggaggaattgatgggcagccatgcctgacctgaatttggggagttgtaaagaaggccgctgggacggagggacagtccagcttatcctgggtagagcccattcttgggaacagcaaaataaaatggaaaatgtcacatagcctggagaaaagtggactctctctcctcctctcccaatgatggtctgatccaatccataccctctgcaactgc

SEQ ID NO: 470434 - DNA, 611 bp, Homo sapiens
aatcctgctggctctcagcttcacacatgctcaccagacagtcgctcctcacagctcccctgcggccatcctcatctaaaccatggccatcgcactctttgtcaacttgtggctctggaggcccactgtgacctgccttggttcctctctgagcttttctactctcctcatcacccattctgcttccaccactagggcctccctacggcagctggcaacacccaggctcaccccaccccagggcctctgcacctccctccactatgcctgctgctttctctctcgacattgcctcatggaaaccacggcccctccctccacctcctgtgtgtccttccagatcttcaataatgagctcatctttcctagccgtctgctccaggtggtcgtctccagctgtaccgctgcagccaagcctggtctgaataccaaagagtcgggctgggagaagggaggaggggggagcccagggctgccactcaactgcagaggcccagctcatctgctggccccgcggggctgaaggacagaagcatcttctggcaaggcttgccaataggttagtcttctctcaactctgccaaagtccgctgaaaacaggacttgttttc

SEQ ID NO: 470435 - DNA, 447 bp, Homo sapiens
ggacccatcaagatgaccctgccagaagacatcagagctccttcaaacagtcctgaaaagggtagatattttttaaaagtaaaaggaaaacaacagccaaacaagagaagatgcagggaaggcccaggagtcaaggggcttctgctggatgaaagacccaaaagcaggtgtcatcagtcaggagatgcgtctgagagcagacgtgatcaaaggatgcaacatccgaaaacgcatggcaatgtgaatactaagtcactctgctcgccagcaccacaggaagggctgcccctgaagcttgaaagaggttgtttgcggacaaataaaagcaagcatgacctgtgcaagatagtgttggggagtttagccacaacctctccaaataaaggcattgttatatgtcccagctgtgttgaaatggcgtagttttaaagggagccctggttatgc

SEQ ID NO: 470436 - DNA, 927 bp, Homo sapiens
atcctttgaatgttttaaagcaaataggaggtgcccagcagccaagtgagaggcatccaaggtggagcggagagaggagaagccggtgacagtggggctgcacggtcagcatggctcttgcccacagtactcaagaggaaagaggagggggcgctgcctatcctggtagctgccaaccttttcagaaatcacctccactatctccactccttagaccctggctctatcagagttatctccttgtaaatgaggtcctcagtgaggaacagggattgttcaaaggggcatttggaaaggagcataagacacaggaagaagagaaaacaaatgttggtgaggatggagaaattggaacccacgtgcctggctgctgtgggaaacagtacgatggacccttagaaatcaaacatagaatcaccataggacccagcacttccatttctggttacatacacaaaagaattggaagcaaggattcgaacaagtctctgtacacccattttcatagcagcattattcacagtagccaaaagatggaaacaaccctcaatgtccattgaagatgaatggacaaacaaaatgtagtatatggaacaaaatatacagtagcacatgattcagccttaaaacagaatgaaattctgatacatgctgcaatggagaggaaccttgaagatattgtgctaagcataatatgccagacacaaaaggacaaatactattcaattccacttacatgaggtgcttagaatagacaaattcacagagacaggaaggagaacagtggttaccagcggaatagttataattggagttcagattagatgagaaggtgtgtcagttgggctagactaagttatgctaggtaacaagcaccccccatgtttctcactcatgctattggtccgtcatgggttgtcaaagggg

SEQ ID NO: 470437 - DNA, 623 bp, Homo sapiens
agcacaggagaagattaatcaatccaacagacttgcattaattgtgaaatggaagggatgatgcgatcaatgataggaatgaaagtgcagcaacatgtccacataaagagtgatgaacttgtattaacagaaaaggaaatgacattggacactgtctgtgtcatcacactgcagagggaagaggaagaggaggagggaaatgtccttccctctgagaaccatgagctcagtgaaatccctgcattcccacccacatccttaatgttcccagtatccaccaccctgaccggcttaagatcaaagtatatcgagtttggaaagggagttgaaaacaaggaagactccctgcttttgattcccatgagggcaatagctgtcactctcctaggggatgttttgataagacagccacttaggtttctatatcctcctgataaccgtatgttgaaaaaggatttaagaggaaggtcataaaaccagggatttcttaacagcagggtgtggcttggcttactaagaatatacttgtgatgcattttaatgacatgctttatgttatcatattaaagattgtaaaagcatctagtaatcatttaataaatattaatgaagcatttacaaat

SEQ ID NO: 470438 - DNA, 731 bp, Homo sapiens
ctctagagcagactgcctggttcatctgctgcaaccattgaggcctccacctctgggaccttggatgccatttgctacctgactggggaagggcagaccagccaggtgtctggctgcagagcccgtcctcccgcagaccacacaattctgcaaagctttggtgtctgtcgtctccccatcctccatggggaaatggccatgtctcttgcccgtacaaccgactctgagcagaaggctaatgcgatattgtgccgctgtcatttctgatcagtttttcccccactgtctcacagcgggctgtcaggaggccttgttccccatggaagcctggctcctcgtggagaagatcaaacctggaggttgtgtggtgacaaaggctgaggaagggcactgctgggactgggtcttgtggctctattttcaagacctttatttttggttatcagtgttgaaacctggaaatacactttctgttttccgtttaaacacaaatcaagcaacgttaccaacacacattctctgtcaaacatgtcagttactcccggggctgtggacagcttgcaagcgatgtcttctattgttactgtggtggtgtgttatttctccctctacagctctgcatttgttttggcgagcagtgtaaacactgaggggcctgctctcggggaggttttgacagaacatgtgaaattgacatggaccgtccgatgaccatcttaataaggctgttc

SEQ ID NO: 470439 - DNA, 676 bp, Homo sapiens
accggaacgagaaagacctggttgctaatagaaaccatggcctcagacatttcagttcagcgtttgactggtaggctaagaaccttgaatcctgccagatatgaacccaacaaccttgttggtgtaataattctggaagttggaagtcgtaaatcaaggtgtaggcaaggtggattccttctgagaactctaaggaaggatgtattagttgattctgatgctgctaataaagacatacctgaaactggaaaatttacaaagaaaaagaggttcagtggcctcacagttccacattgctggggagacctcacaatcatggtggaaggcaaaggaggtgcaaagacacgttttacatggcggcaggcaagagagaccatctctttaacctcgttagacttgaaatctctactcaattcaagcctgcacatccccagtgcctgaaaccatggctgttacatagtaggtcttggtgataatttgtcagttggataattttagctggagaaaaagaaacatgtatgtgtgtgtgtgtgtggggggggggggttgttttgttttgtttttgtttttgtttttttcacccatcctgcagaaaacactgcttctgtgacataaagagaacaccttcacagggtaaagtgttcttcccatgaggtctaagaggagtctcaaatgc

SEQ ID NO: 470440 - DNA, 1010 bp, Homo sapiens
tctctcctccacattctttttttaagacaagagccatctctgtgtctgagaaaggttcatacatcttgtagcatgtgtaagcaaattgttttactgtacatcctgggctgcctttctttttgtttggggatcttgttgctcctctcacttcattattttcatacaaatcctgatggctccattctcagagtagaactctccaagtggaaatacagcactgactttttggatgccgccaattccatttaccccctctatgctaactccctgaagccaccatgcaaagtatggtttcttggggactctgggattcagcattgtgactcggcatgtgatatcttttacatatcccctgttgtgatgaagcaaccattcaagagcttcttagctgagcagctccgcggaaacctttttgaggttgatgtcgatggcattgggtcccatagagttagtgaagccttatcatggaggaagaccttggccagaggaagttccgataaatttcttgctgattcagtaatcctcataacaacgccatgaggttaatggaattatccccaagttgaagcgaataatattccatcaaaggaatatactgcattttgattatctattcatcatttgatgggcattagcattgtacctgctattttgctattatgaatcatgctgcagtagttgagatttggagatagggctaaatatgggcaaattgttatgattgtagtacattccatacagtagttattaaattaattctgtactacaaagactcatcttctaatggaactcactcataggtgggaattgaacaatgagatcacatggacacaggaaggggaatatcacactctggggacggtggtggggtcgggggaggggggagggatagcattgggagatatacctaatgctagatgacacattagtgggtgcagcgcaccagcatggcacatgtatacatatgtaactaacctgcacaatgtgcacatgtaccctaaaacttagag

SEQ ID NO: 470441 - DNA, 973 bp, Homo sapiens
agccttgcccagccaatgttttgtctgattcctatgggcctcttcatttgggaattaggatgcctttcctcactgtgctctcacatcgagctgcaaagggctgcgaatctggcagaagccactcatgtgaaagtcattgtcactatggaacaaatagcctggcataaggaaggcagaaagcaacagctctgtctatctaaggaggattccaattcccagtcaccacaagggcttcctacaactgaggaaagagaaaaggagaacagagttactgagctccaaatagatagaagttcaactctcaccaaggaagacttctggaaggttagtggaaatgaacccagacctttactaccttggggaagcagaaagtgtctggactcaaagtttcaagcagataaagaaaaaaacctatttagcagtgcctcagatcaggttccctaaaaagaaagcataaactacagattcgaatgcattaattgcaatgtagaatatcctccttttaaagcaaggggtcttttgaactctccgtgagtcaatcagtggtcatgggccctcccttcaagtgaaggggtaacctatgggcaagaagttcagcagctaaggccagatgcactggccaggtaaagggaatttaggtgggaacccaccagcatatgaaaagcaaaaatgaaaatgtataaatgagcataagattttcatggaatgataagaaagcagtccgaatatacgacaatatgtgaattgcagtgtcgaatcaggcccaaacagggtgaagggaaggatgcatggacacatttcagaagccttttgagaaaggcaacacatgcctgaaggtagagcccccccatcctgatataatatatctagaatgtgaactactcagtgatttgattgttttttttttcctatatccgatgttattgctgccatccatctacattttacagagaacacgagctgaacccttctc

SEQ ID NO: 470442 - DNA, 872 bp, Homo sapiens
tgggaaatggacatgctgaaaagcacaggggaggcctatgcccttatgcatttcacctcatggtcacgagatggctgctgtatcccagacccttattccaggaagaaacaagaaggaagaagatactgaaaggatgatactggtatcaggacataagaagttttctccagacttcttggcttatgtctcattggccataaccgactcatgtgcctacctcaagtggccagaggtgagtacccctaggctcgagagggtgagcgatttgtcctcacattcctggtatgtggctgagcctggactagaatttaagtctgcgaccatcatccctagaccagttcaacgttgtatccatgaaagatgtcagtgtgattttaaagaacttaatgaagagtttggaatgaagtgcagcatttactatctgtttattttaacctttgcctaccaatgaggaaacaaatgtattagattctctgagaaacataaagaaagacagcttagctcaaaacacagcttgaaatacaggcccttggaaagaaatcattcagaaaccaaagaaatacatccctatcttcttcactttactatcccccctgccagtagggagaaaaaattacctgaggacagttttcagaaactttttcaaaagatttgaatttcagaatctttttcagatatttgactacttttttcctcttcttactgactaataaatgaggtaatgaaatgtaactatttgatatttggcctctgtgtatctgtctctcttagaagaaaatttggggaaatgttgactatgtggggaggacaccaggagtagtaattcttctatggactttgtgtttttctctctccttcacatgtctgtgtat

SEQ ID NO: 470443 - DNA, 1573 bp, Homo sapiens
ctgccttggtcatcttggggtctctctctgctgagctgtctggagctgggagaggggtgacacaagcactcctgtgaccaccaccactggggctgtgctgggtcatacctgaaaacaacatagcatggccctcacccaaggtcttgtggtgactactgcctggctactgctgatgttcactcaaggcccaagggcttttcagtcagcaggtgcagaaggactccccttggccaccactgccccaggctcctgtgggctcctccctggcctagggccaggtccagaaatgccatcaaagacaaagcctggaaatggggactccaatagcttgcttggtgttctaccacaccgtggccacgctggtgcccaagttacaagaccaagtcccctttattctctcttctcctttgctcaagcagaaggagtctctacccatggccaccaaagctgggaatgtggtgagtcacacctgaagccagcatggccctggatcgcatccaagtcccgtggcaagtacctggcttgcctggctaccgttgctgattatgccggggccatgggccctttagtcagcaggtgatgaatcctgttaggattgtatccttcccttcaaggcagcaggttcccttctggcccagggtgtgtctagaaatgttgtctaggagctagggcctaaaataggggcctcaggactctgcccagtgtcctatcctactgtggctgagctggtattcaagttgaaagacaaggtcctaaaataggggcctcaggactctgcccagtgtcctgtcctactgtggctgagctggtgttgaagttgtaagacacggtcctctttgtctcccagctggtatctcactaggtcacatataccccaagtgcactggctctgagcccagcatagcaccaggacttgcccaggaattgcagtccttgtggcctggacttcctttcaagtctgtgtaggaacctagagccctttagccagcagtagtggggctagctggaactgaagtcctggctgctgtgatggacaatgtgtctctggctagggttgatctaaatccttcctctgggggcactggctgagttctgccctgtgttgctcttcatggtgacaggacagcactgagttccaatgcacagccccacaatcactgcactctgtcttccccaaacacacaaatcttctctccacaccacagtgcagctgctgggggttgggagaggagtggtgtaagcaatttgagaatgtcttttctaccctcttcagtgtctctttccttaatatgatgtgaaaaccaggtattgtgatagctcccttgtttttggttttaatgaagatgctttcttgtgtggataattgttcaatttggtgtttcattgggaggttggagggtggggaatggtcactggggacttctatttgtccatattgctccctggagcacatttttacatgatggtcattactggaaaaatgtaatatggcagcccacctccagtagtgctatttttataaaagtgaaaaaatagagctgaacttcaaaatttgaaaattgagtgccaggag

SEQ ID NO: 470444 - DNA, 608 bp, Homo sapiens
acagctggatagagtctgagctcgatgaccacatgtggccagtggctatggtgttggacagtgtgggcgggactagatggtcctcagtgcacccccgagcattagttgctgtgacaactgtgagctcagaactaaaggcacaagcgaggtatcactgtggagttaccaagggacagacaagacgatcccagcacctgggggtctatttaatggagctcccaaggtgggaaggttggtcatgatttctgaagaatggaaagttctgagtgtgcaggtatggaataaagaaaagcctctaatctcagaggtgctgacaatggatttgggtcctgaaaaagctgccaagtctgcaaagaaagaaagcagtgttgcttttgaaggggaaattcagaaggaagcagagaagaatgaaactagacccctatctctcaccatacacaaaaatcaacccaaatggataaaagacttaaatataagacctgaaactgtgaaaccacaagaggaaaatgcagggaaatgtttctgaacattgtactggcagagatttcatggtcaaaacctcaaaggcatgtaaaacaaaataaaaaatagacaagtgaatttatatc

SEQ ID NO: 470445 - DNA, 592 bp, Homo sapiens
ctgcagcgagtgtgtcaccaagagctgcagcatttcctgtaggctcatgagctgagcgcctctcaaagcagccatgctcccaggtcaaaacaaatcaagttttaaccggggaaagaaaaagctgccatcttcaaggctgcttttccttcttttatgcctggaaaactcctggtcatcctttaagacccagctcaaatatcacgtgcttgtgaagcattccccatgccttgcaaggataatgcagccgtcccctcctcagggcctactcagcaatttgcacggacccttcctacatcatgtttctgtcgtaggggaggaacatgggccatttctatctacagtctcctggtgtcagacatgtgatatgtactcagtttatttgttcatttattcacttaaatacttactgagcacatgcaaagagctgacatttgatgacccagtcttcaaaaatgtgacctgctatttgtgcgttgagggtattgaacaaagtgatatgcctcttacagtgcttcccaaccataacctcatggcaagtttgtttcgggaaggagggagaaagagaaagggtgaaattctttgagcctctgac

SEQ ID NO: 470446 - DNA, 630 bp, Homo sapiens
cagtgacagcagccgctgatggagccctttaggagacagtaacaccatttcaggtcgggagcagaggagggtggtaaaacacaggtagtgtcagaattgatggccacacagcctgtgggggtgcagaggaaagagggggaacagtctgttggtgggaagaagctgaaggggtgtggagaatccccggtcaatgatccactttcttacaatgtgctgtggcttgaatgtatcataagccaacttaattgtagtgaaacctggagctgccccggggctactaagctacaagaaagcatccaaatctatgtcccctgcactcaccagtcccctgaccgccagaatcataactctgcctgcctaatcaacatcaccagtagggtgtgtagaaggcatctcaaatctaccgtgctccgaaacaaccccaactcagttttgtcctctccaggtcagaatggcacctccatccactcagttgcttttattaaattctcccaaatccattcttaatatctttatatcattcaaacctgtatgcccttcatccaatttctaaagggggcttggttcctttccctaaaccattacatctgtgcacttttctccataaatgttggtgtcatcctaggctaa

SEQ ID NO: 470447 - DNA, 710 bp, Homo sapiens
atcacagaactaagcatgctgattaatgctagaaaggacatgctgatcaatgctagtatgggtatgctggtcaatgttggtatgggcatgctgatcaatgacagtatgggcatgctgatcaaagctaatataagtatgctgatcaatgctagcatgggcatgctgatcaatgctagtatgggggttcttatcaatgctagtataagcctgccgatcaatgctagtacggacgtgcttaccaatactagtatgggtgtgctgatcaatgctagtataaacctgctgatgaacgctagtatgagcatgctaaacaatgctaatatgggcatgccagtcaatgctagcataggtgtgctgatcaataagcaaagagaacacatgctgaagtcaagggctttaacaataacttttggattaaacaccagcatggatgtcaatcatctggcccatactaagtgttcaatgaatgatctccagggccttttttacttacctcagataataaaagcccacttaaagcctgtgggtcctgaaagccgagaggaattcacagcttggccaacgatggaaagataatcagaatggaaagaagagagatgtataattgggaaatttcagtccccctctgtttctctggctgtctgtgtccattcacaaaagccattttagcccgtattcacttatgcgcatatgtaaaatgaggacttgaa

SEQ ID NO: 470448 - DNA, 544 bp, Homo sapiens
cagaggccggcttccctgagcttcatgggctgctgcagggcagagaagcggaagctggcctcggcctcacagcagcagagtggagctatgtgtttgcaagcagacctcagaaaaccggagcttaagaaagtttccccacagccagtgaggcaggaaataaccaacccattgtacagaggagaggaggaagccaaagctcaaagaacccgagtccaagcacctttcctgtgctgcctgacacgtttgtgccctccattatctactcgttcagcgcacattcactgcccactgggcctgttccagcgaccaaagcacgccaaggggagaagcaggcagagatctccatttcagtgggctgacagcccaccaagatgcccgtggtcccacccttcagagaaccttgctttcacctcaacaatccttcctgtttggagatggtgtatgttgatctgcaacatacccattagctacgtagccattaacaaaaacaaacaacactgacaactaccatttattgagcacaaactgaataccggtcctctac

SEQ ID NO: 470449 - DNA, 809 bp, Homo sapiens
tggacttaccctccactgtgagagttacctgaagcttggcgtctgtgatggtccagggggcttctgaggcgattgggcagcgtcagtcttcagctgctaagctgagaagatctgggaaggagtcagtcacagagccttgggccagagttccagggactctggaagtggctgccagcgcaccatattaccttctagaaatgcaaaatgtcaacacagaagtcaccagactccatgtggttattgataatgatcacaactgcaataaaaataaggggtgtcctgagctacttgaccctcaggtgaccaggagactgtcttggcctgtgaacatctcggagctgagtggggcacgagctcacagacgcactgtgacaataggatatgatgtgtctatcatgcagatgtcagcaccagagagtggacagagcaggagaggcaggatcaagtcggcctggaggagaggccagcaagggcatcctggaccagtcacctgtgttccctcgctggcggcagccatgattgctaattccttgggtatccttccagagatattctacgcatagataagcatataggtcactttcttaagcatatattgctttttgttttttcaaataaagtttttattttggaatgtttttagatttatagaaaagttgcagggatagtacagtgactttctataaacactttgcctggttttccctaacgttaacatcttacacaatgcagctgattagacggtgcctacccagattgagggtgggtctgccagtccactgactcgaatgttaatctcctttggcaac

SEQ ID NO: 470450 - DNA, 2191 bp, Homo sapiens
ccagggtccacagacaggcacacagagtcccatctcctgtgcagcgcatgggactcctgggcctgtgtccagtccccttgctcctgacgaacatgctcctggtggccttccagtccatggagaccatcgacagggctggacagacctggccacagaggactctcttggggctgctgctgggcgttggggatgtgaagttcccgcagtgtctagcggcccccgcaggtcccacccgagaggcccctgaatctcacgcccctcagaggcagcccctgggggaggtcctgggctccttctcttccccagcacaggggtccctgagtcctttgtactccagtggggtccactttgccagcttccgaaatgcatcactgatgtctctgggcagtgccagggtgctgtcccggcctctttctcccttggcaggccgagtgcccggatcgacgcttttcctgggtccccttggcctggcgatgaggctcccgctcctgcaggccaaggcttggcctatgcacctgccgcgcacgtcccggagtggggtggggggggaaggggatcggtcttcaaacagagggtcccgaggcccgcgcgccgccctgtccctgccctgcgtcccgaacggccaccgccgccgcatcctccccgcgcagaggcagtggcctcggaggcggagtgggcgggggagggggaggggggagggcgtccagaccccgcccccggtcccgccccgcgcccgctcccaggctgcgggaccgccgggcgcagagcacaagccgggcacccacggactgagcggcgcgcgggccgagatgcgcgcccgcctgctgcccccgctcccgggcctggagcggcgcgaccccatggcaggtagcggcggcctgggcggcggggccgggggcggccagggcgcaggggccgggcaaggggccgctctgcgggcgtcccgcgcgccgatgctgctcgtggccctggtgctcggcgcctactgcctctgcgccctccccggccgctgcccgccggccgcccgcgcccccgcgccggcccccgcgccctccgagccgtccagctccgtccaccgcccgggagcacccggcctgcctttggccagcggtcccggccgccggcgcttcccgcaagcgctcatcgttggcgtgaagaagggcggcacgcgcgccctgctggagtttctgcggctgcaccccgacgtccgcgcgctgggctctgagccccacttcttcgacaggtgctacgagcgcggcctcgcctggtaccggatggacgtgggggtgcggcagcctcagctgaagcagcccgcgctggtggctgctcatccccaagcttggacccagcgcctgcagagaggaccctgcccaaggccagttggggagtcagtgggggtggcaggacccagacgcttctccaggagtctgatgccccgaaccctggatgggcagatcaccatggagaagacccccagctacttcgtgacgcgagaggccccccgccgcatccacgccatgtccccggacacgaagctgatcgtggtggtgcggaaccccgtgacccgggccatctccgactacgcccagacgctctccaagaccccgggcctgcccagcttccgcgccctggccttccgccacggcctgggccccgtggacacagcctggagcgccgtccgcatcggcctgtacgcccagcacctggaccactggctgcgctacttccccctgtcccacttcctgttcgtcagcggggagcgtctggtcagcgacccggccggagaggtcggccgcgtgcaggacttcctgggcctgaaacgggtcgtcacggacaagcacttctacttcaacgccaccaagggcttcccctgcctcaagaaggcccagggcggcagccgtccccgctgcctgggcaagtccaagggccggccacacccacgcgtgccccaggccctggtccggcgcctgcaggagttctaccggcccttcaaccgcaggactatccatctgacagtgaagatcctgggcccaaaatgagggaatgagggccagagacctaggttaaaaaccaggatctcaaaatgcaccctccagattttaatttatgtagccaaggtgtgtagtaggctatgccatataggatttttggtttttctttttctttttctttttctgaggagtttcgttct

SEQ ID NO: 470451 - DNA, 1324 bp, Homo sapiens
ctgagggaactcagagaccggtgccagtgcaggtccttagtatgctgagcgccggtcccctgggcccactgttgtttctctatactttgtctctgtgtcttatttcttttctcagtctctcgtcccacccgactggaaatacccacagcccccaccaggatcaccacccctgcactgctgtggctgagatccccaggcgccagcaggcctccagccacccagctaccggcctgagcctggtagacagccctggggacaaaaccctgcacacaggggcccagtttgcaggcgaaggccagtctgctcttgggcctgagtccactctcggggaaacactggccccagcagctccctccctgccgcagcagagccgccttccacaggacctgcccacagagcccttcccagagccactgctcctcctgcagggagaagcagaaagggacaggtgtgggcatagaggacctgaactggctgcctagaacagtattgggagccctgtgcaccccctgccagacccgccatcaccaaatgactcagcatggcaggacaaggaccctgatcagaggccactggcagccggccacatgtggcctggagtggctcaggtccctggcggcagaggacacagggcttctcccagctgtgtggcctcagactaatcgcgttctctgagtcccccttgtctccccagaagaatgaggctaaggagagtacctgctgcactgggctccagggagattctggcagctagcctcagttctggcccccagcagggcagagatggagacatttgctagaacaggaggctgccacagcacatgctgggggaggggcaagcagcaggaagccccttctgggcactgcccctcctgtggggggacgctgccttccattgagggtgcctcttccaattgtacacccggaaccggggatgaccacgggacaggtccactgggatcggacccgagccaacgctccctcagtcactgggccttcataagcccctactctgacccagtgacgtctgactccagagttagcatcggttcagagccagcatccaggagtccccagaaggtctcatgatctccttttccccagtgcactgccatagagatccctttggagaaggctgggaaaagacgaacaggataaatttggggggtccttcctcaaggcaccctggtcccctccatacagcggtgtgggtctgaatggaggttttaggtctgtgacctggctccagtctgggaattcactgagggccgtggttctggtttttctcgggagatgggttttttgtttgtttgattggttgggg

SEQ ID NO: 470452 - DNA, 615 bp, Homo sapiens
agcaacttgtcaaccatcacacaagtatcccgtagcccagaagtcccacagtctggtgtcttcaagctggaggcccgggaagctggtggtatggctccggttaaagctctaaggcttgaggaacagaggaagaatttgtgtcagtcccagcctgagtctgcaggcccaggaaccagcagcactgatgtccaagggcaggagaagatggatgtcccagctcaagctgagagagaggtggagagagagagagagaaagagagaggtgagtgtcggaggagacctagaaagtcaccttttaaaagagagttgctctcctctcctgtgctgacaccttctctctgctgcatcccttcttgtgcttctgcatccaccctgctgtgcgaagtgttgcatgggagcagaccccatcatccatgcatatggaattccttagagcaggggtcctccatgcttcctatcaaaactgtgttcatcctgaatgaagagtcggctttccatcagagagactatagaagggactggaaataatgagaggcaatgctcagccgtttttgctacacatgaggtgctatagtaagagctttctttacatgcttcaacccattgactcgtcat

SEQ ID NO: 470453 - DNA, 1128 bp, Homo sapiens
gctaccccttgcgccccatgactcgccacaacgccatgcccaatcccaatgggcaattgccatgtgggtctgcccaaaggaatgggaggtcccccatgggaattactggcactcgccttgattcacaaaggcaccacacgtagtaatgtacgtgtgggcaatacaacttgggttcttacatgtggtgccccaaagatacttcccaaaagggccaaagcccaacgaaaaaaggtgcaaacggttcaaccacctagtccaagtaatagtgaccacccccgtaatatgggctatgccccagggaatgctgcctgttcaaatttgcttgctcttgctgctcgttttgctcagcactgcaggacccgtcatgctctgctctggctttctgcagcgatgctcatgctcccatgccgctgcccaagacttaatggaaccctcatttgtgtctaccgtggaaaaggagtggaaaaatgtagttgaaatggggagagatttggggaggaaataattcagtctggaatcctgggggagctgcatgccaggtcctgctccaggtgctggggaatcccagtgtggcttggttttccaaggcagacaggaattccaccatgtctcctttgctttagaatttactgttttttagagatttaaaacccattagggaatggcttgagaagttaataatgtgttaccattctggagaattatatttgatgttgtttatagctatttggcttatgaaaataaatacattaagattgggagccaattcttattcatgctacttattgaaggcagatcatacaataataaataaatgccattaatcttaaacccacacggggagaatttcgttttttaaaattaattgtacttgtggtattgtttttaaactagaacctaaaaaaaagtgcaataatacattaaactttgcatctctggtacagaattcgatttgtgtgggaaaaacaaattaactgtgaaatgtaaccaggaaaagtaatgttgattacaaggagcacataattagggcagctcagatatgcactagattcctctaccaaggcccctaccaagcctgaactctagtgaacaggtattcaatttggctttaattatcatgttagtgtc

SEQ ID NO: 470454 - DNA, 1749 bp, Homo sapiens
gcataagaggaggaggaaagggaaggggtggagaagtgggaagaggaataggagagggataaggaggaggagagggagcaggaggaggaggagagggagcaggaggaggagagtctccggctggggctctgcattggccacatgcaaagagatatgatgagccaagggagtcctttgatgcagtccatgcaggtcaagcttccagaatagaggcaggagagaggagagcaaggggtggacttgggcaggggcaagaagtgatgaacagctctaaggaagaggactatgaaagtctggagaagccctgactttgacccaactgctatctctcttgcatcattgtgcctacaagttacagggatggctcagaggccatggcctatggctgctcaagagaagtacaacgacttttccatcgcctcattaaaatgcaattgtgtgattcatcaacactattggagaaagctgttagataaaataaagggggagaaattagtatttgcaaagacaagattgcttgggatgttttacagaccccaaattccagcaaccagtttgaagacccccatagaggaacaggatgagtatgagatcacggcttcttcctctccatttcatgacttcacgcttcaccctgcgctcttcaaccaatcgataatcgccacactttggcccactccaaaacccttaaaaaccctagccccaaactccttggggagatatatttgaggttccctcccatctccttgttcagtgaccctctgattaaacctctgactctgctgcatcccagtgtctcagagtattgactcactgtgtgctttgggcagtggacttactacacctacacattcgtgactgcttttaccattaaacaccatttgttagatgattacttagtattccattgtgtaattgaggaagcagaggttcagaataatgaaggagcttggccctgacacccagccagggctggggttaaaaagcccacaggatcccttcctcaggccccatggaaaggtctgagtggtacctgccacttgctctccttgggccagtcatgggtcagtcaggctgcttgacattcaaaggtcaggcgggaacaagccgaggggtcagtagcccatccttatggcacctgatgtgcggctgcacacagccctggggtctcacccctccttcctacatctcaccttcttttcatcgtcctatcttccaacataccccgcagaggacctgggatgtcacaggggagctagatgtctcagaattagaacggaatcgagttcaatactagataggcagctattgatagcctggaggagagcaggaggactgacaagctaagaccccaggggagggctgggccatgttcccataggggctggaggcattgcctggctttcccagactgcccttcatgactgcaggtcattttctcctgcttttgtctccatttctcccctattctatgccggcccctctgacattttttcctttggtccatttttcccttgtgattccatttgcttttgagtttcttgttctcttccctccgctctacacattgcccatcccacctgactccccttccttgctcccctctctggccatgcctctctccatcctggctgtctctccctgattctccctgttgccctcattggcccctttccactctgcttctgcctttacaggcttggctgggtccactcagcctctgtcagaagccaccaccctccctagctc

SEQ ID NO: 470455 - DNA, 752 bp, Homo sapiens
tgtcaggaaggacagcagcggcttctagaaaattcttccgttcgctggacgcgagcagccagccaagtcaagcccggtctctggcgctcccggcctcttgtgatgtccctgctatcaatcagctttgggataatgctgctcctgtcagctggcctcctcaagtcgccgttccttgtgtctgtggataaatctcagccacagccaaatctattaaagccagttaagagaatgaaaagacaaaatctgatgaatgcttttaccttggtggatataaaagttggcgggctcgataactctgagagtgatctatttgccaatagcaatactacattaagttggggaaatatcattcccttaaatgcaagggattgtatcacttataaaggcctcaaggatgtttttcatactgaaggttataaacaagtaaatattgctagtctagaagagaatgtttcaccatatggtggctttccctggcttggcttccaggggcatcctgagtcatcagaaaagtgtacaaatctggatgatgctatgaaaatccccttttcttggttggagttggaagatgacttgggtgggaaggactataggactccaaggtctgatgataacaggggttattctacttgccaataggtttagaaaacagttatgaggattcgattagctaaactatggaaagcccccacccatcatgtattagatgctcaatgaatggtagttatcttggtgtcaggggtagtagtggt

SEQ ID NO: 470456 - DNA, 2258 bp, Homo sapiens
cctgcatagccctggctcctgtcaaatgtctccgctgacagagcaaagactacagcttctcatgcctgagaaaaagaatccagaggagcatatagatggagagaatgagcctagagtggagccggcaagcaccgtctccctgagagggtctgtagagggcatggaactggttgtcattgtgtgcctctggctgcgcacacacactggagctcttattattatcatcaccatcaacattgccaccatcatcaccatcagtatcactgctaccattgtcaccaatgttaacaccattaccaccaacatcaacactgccattgtcaccaccattatcatcatcattgtcattatcactatcatcattgtcatcaccactattatcattgccactgtcatcaccatcaacatctccactgccattgtcactggtgtcaccatcatcactatcagtatcaccaccgtcatcatcgttaccgtcactaccatcatcaccattaccactgccattatcaccaatgtaaccgtcattaccatgaacatcaccactgccattgtcaccaatgtaagcaccatcaccatcaccatcaacatcattgtgctcataaatatcaccatcatcactgtcatcaacagcaccaccaccattatcattaccatcatcttcatcatcaccactgcctttgtcaccagtgtcaccgttatcatcaagatcatcaacaacactatcattgtcatcactatcaatgtctccaccagcacgataatggttgtcatcattgtcatcactatcaccaccaccaccatcatcatcactatcattactccgtttctgtgcctgaactgtctgtggtcacagagatattacccctggctaggaaatatgatggaaccaccttttaatagcatccttatctcagtttaactgaaggaaggggtcaggaccctccatgggcaccaaggagacgtcttcaagccactctgcatttcatggcttccattactcaaacccagacagtgttagttctgaaatgacagaacaaagcagactattgcctgaattcattcttctcaatcacatctgaattccgtcctcacagaatgtcacagtgtgcctggttgccttggcattagcgatacaacttttctgaactttctttctccaaggctgttgaggacatctgttttgccatgccccacccttcagttccttcccgcttccgcatcttgacccttctcctgttttgatcactgaggcatgtgggtgtccattacctaatagagtagaagaggacttagttgtccatgtaataatctcatcctctttccctcaagcacctccttcatttaaaaaggtgggcagaggcaccagtgtgtgatgttccccttccctgtgtccatgtgttctcattgttcaactctcacttatgagtgagaacatgcagtgtttggttttctgttcctgtgttagtttgctgagaatgatcttctggtctttaaaaaatgttttcatacattatatttatacatattcatgaaaaaaaaaaaaaaaaaaaaaaagggaaatctaaaggaagtataaagcacattccattgatttcagtctgactgcaggttttccactggggcatttgaattgggagctggagtgggggtgcacagcatgtgaatcaggaagtatttatgactctgtgtaaacatatcacagtggaatgccaaacattagcttctgctgaaatcagctagctcatctaaaccttagctagaggggtttccttaatgtcaacattgatgcaaacaaccagggaagatggatgaactcaaagcaaaattgggtctacatggattttcttctctctgacaaagaacaggctaactcccacttactccacacaccccttcctccacaaggccttgcctgaatctcaagtttagaaaaaactcttttttgctgttgtcttgaaacaccttgaaatctaacagttctgttgccttattgtccttcttggtttaagtatgtgtcttatccattgggctgtaaacttcttgagtgtaggaactgtgccccttttgcacatagaaggtctgtgataattattcaggcaaggaaggatgaaagaaaaataaactcatgattgagggggaacttggcgtccaatatggatattaaggctagtcccagtgaaacatcccacttttagcacataactgttgtgcacctatgggtaacgttctgcgtagcaggcagtactcaaggcacc

SEQ ID NO: 470457 - DNA, 600 bp, Homo sapiens
gcaccgtgatgaacagtattgggggtgtagctctcgctatatgatgagaagagcatttcacttctgcagtgttgttccccacaactccaaaccccaggctaatcatgagaaacacatcagccaaacccagactggatgtacaggacgccggactgtaagcagcagccttgcagttgttcccagaagctggaggctgtttcaagggccaaaggtgagcttacagtcacctggtttccatggaaaccgaagcatcgccatgctctctccagagcgacttggcaaggccccaagctttatcaagttattcatgaaactctacctctctttgcagttccaaatgcaacaggaacagctgaagcagttgagggctaaaccaaattggatctggcattgcctgctgtgcatccgagatacgatgatcatctctattttacaaatgaggaaatgaggttttaaggatgttaaattaatttaaccaaggcttcacagtcagcaggtgacctgaaaatgaaaatgccggtcatcctgatgccagagtccattcaatatgcattttctgagccctacgaagtgaagtttaaggtacaggagattcatcac

SEQ ID NO: 470458 - DNA, 867 bp, Homo sapiens
gcaggaacatggagctgatccaggacatctctcgcccgccactggagtacgtgaagggggtcccgctcatcaagtactttgcagaggcactggggcccctgcagagcttccaggcccggcctgatgacctgctcatcagcacctaccccaagtccggcaccacctgggtgagccagattctggacatgatctaccagggcggtgacctggaaaagtgtcaccgagctcccatcttcatgcgggtgcccttccttgagttcaaagtcccagggattccctcagggatggagactctgaaaaacacaccagccccacgactcctgaagacacacctgcccctggctctgctcccccagactctgttggatcagaaggtcaaggtggtctatgttgcccgcaacgcaaaggatgtggcggtttcctactaccacttctaccacatggccaaagtgtaccctcaccctgggacctgggaaagcttcctggagaagttcatggctggagaagtgtcctatgggtcctggtaccagcacgtgcaagagtggtgggagctgagccgcacccaccctgttctctacctcttctatgaagacatgaaggaggcacggaagaagaccatcccagtccttacccataggagccaagcccagctcatgatgggatcacagggcagacagcaattcattttgccccagggactggggtcccaggggtcgaggagctggctctatgggttttgaagtggaagtggccagttcccctctgaggttagagaagtggaccccttttattttcctgaatcagcaatccaagcctccactgaggagccctctgctgctcagaaccccaaaagggagattcaaaaga

SEQ ID NO: 470459 - DNA, 3237 bp, Homo sapiens
cctccctgggctgcaccaggccttgaggggggcactggcagactcctggcctaatattttctgaatttcagtccccacctccaaccatgcgtcctcgtacccctaatcgatgccccttctggctccttctgcaaatcctcttcttctcctttcagatcccagattccctcggcacctttgtctcctacctcctgggagatgcagtccccactgtagagcgggaggcgcaggcggctgaggaactgggggtggtggcggtgggaaagacagggaagattgtagaggaggaagcccaggaggacctggagggccttagaggcagccaaaacgagggggctggaaggctgagagggcctggagatgacagaagacatgaagtggggagctcagctgtagaacagacctggggctggggagatggcagctcccatgggtcccaagcagagaggcaggacagtggggctggggagacagccaaggctgccaggtgccaggagccaagcgcccacttggaggccagaaagaaatccaaggcagggtctggggcttgccaagacaggagcggccaagcccaggagaggcaggagtcccatgagcaggaagtgaacagagaagagaggctgagaagctgggaacaggaggaggaggaggaagaggtcagggcaagagagccagggatggccagaggggcggagtcagagtggacctggcatggggagacggaggggaaggctggtgctgttgggccaaaggcggcaggggacaaccgggagatggagcagggggtcagggaggcagatgcaggggaaactgaggagcctggggccgaaggggctgggaaaggagaagaggtggtagtggtggagaaggcctgtgaaagcactagggcatgggggacgtggggcccaggggcagagcctgaggactggggaatcttaggcagagaggaggccaggacaaccccaggaggggacgaggcctggacaacctcaggcaaagaggaggctgacctgctgggagtcagacagacagaatatggagcagtcccaggagaaaggctcctagaggctactggaaaagtctgggtcctagaggaggagggggatgaggagagagaggctgaggtgagccctttccccaaacagccccaggtcctgggcactgaaagaacagaagaggctgctgagagccagaccgcagggagggaagctgtgggaggccaggaggcaggggagagctttgagggccaggtagacctgcgtggtaaggaggctgagatgaggcaggacttggggatcagggccgaccgggccaggatggaagagctggtacaggcagaggaggcccaggaggagagagggagcagcagggatccagtggctgagctgccctcagatggagaggctgaaggcactgccgacttggaggcaactccagaggccaggcctgaggaggagctcacaggggaggagagtgaggcggcccagactagctgtggcctactgggcgtggaatggggtggcctcacacacagcgtcaccaaaggccaaggacctgagctgatggggggcgcccagaccccaactaagcaacccgaggaaagggaggcaggggaggtggagctcatgggagttctggccctgagcaaagaggagcaggagaggagcctggaggcaggtcccaggcacgcggggtctgtaaagcctgaggcctccgaggccttcccaggagcctgggaaaaccgcacgagaaaggacatggagagaggaaatactcaggaggatgcggccgatggcgagcagcgggaggaggaggagactgcgggaggccagaccctggcggctgaggctgaaggagaccgagagtctgaactatcagaagtcccagaggcaggcggggaggggctgacaacccaggacgcgggatgtggaactgaggagggagaggcgtctgtctcagagaaccaggagctggacggaagcacaggggcagacgcagggccttgcccgtcactgggagaggcctatgccagagaaactgaggatgaggaggcggaggctgacagaacatccagaagaggctggaggctgcaagcggtggctgtgggcctcccggaccgtgaggatgcacagactggctctgtggctgctgggattatggggggtgatgtggtcccacacatcagcgctgctggcgctggtgaagctttggaaggggcgcttgggcaaggctgggactcgaaagaaaaggaagaggcagcagcaggagagcatgcaggtgggcaagaatttggtctggagggctcagcagaggaagaggtgactggcagaggcagccaagtagaggcttttgagtccagggagggaggaccttggggagggcgggtagaggccgaggaatctgcaggcgcagaggacagctgtgggctggatcccgcgggctcccagacagcgagggcagaggggatgggagccatggtggaggctggggggcttctagaaaagtggacgctgttggaagaagaggctgttggatggcaggagagagaacagagggaagacagtgaggggcggtgtggggactaccaccctgagggagaggcaccaaggctccttgatgcagagggtctcatggtgaccgggggccggagggcagaggccaaggagactgagccagaaagcctggaacatgtcaggggccaggaggagcagccaacacaccaggcccctgcagaagctgcgccggagtcagtcggggaagccgagacggctgaggccatgggcagtgccagaggaggtgctgccaacagctggagcgaggtgagggctcttggtggggtctcggggggaacgagtggaatcccgaagccggccccatggtcctctgtgccccctttcctgcaggccccgctccccgggtccctcctagacgtctctgtcccaaggagtcgcgtgcacctctcgagaagctcctcacagcgtcgctcccggccctcttttcgtcggactccggcctgggagcagcaggaggagcccccagcccccaaccctcctgaggaggagctgtcagctcctgagcagagacccctccagctggaggaacccctggagccaagccctctgaggcatgatgggaccccggtgccagccaggagaaggcccctgggacacgggtaggcacagggcaactcagctggggtggggaagagaccgcgggcacctgggaacctgttctcac

SEQ ID NO: 470460 - DNA, 653 bp, Homo sapiens
gagttcgtatgagagttgtctttatgcagggagcgaatgccagtgtctgcctgaatctggaaggtgggagtcaccatctggtttgaaggcagggggtgcctgtttgagcacccagaggcctggatgggaaagaaaaggcccctccacccacctccacagacagctttcccagctacacctcccctgcgctgccctgagcagacaggctccaaccatggagagaatggctgtgtgtgtgtctttggtcttgacacccatatatatcgacgtgacccacagcccaaagcgcttacacgacctcgttctgccctgggcacctgcgtcccgtgtctctgtatccacacgccttgggctcccgtcctggccacacactcgtctccctcgggtaatggaaatgtcagcttgattcatggagattcatctgcggcagccaggcctgaagacgaggcacgctgcgggaggatcatcccctgtgaagagctgctgcagcaagggtgtcaagcccctgcctgggaggatgtgaggatggaagaaagcccctgaggctggcctgtgccgccgtgtcaaccacggtccttgcaggccagtgttgacatcactccctgacatcacttgtctggcccctgaataacaggactccaccccagggctct

SEQ ID NO: 470461 - DNA, 970 bp, Homo sapiens
tgcctacccgggccttcctgtggtgggagcctgcggctgcctagttggtgttcctctgcccagaaatgggccttggcatcacagcatttctcagcatcacttaccatcttctaacatactttgtaatatacctccttatagggttattaatcatggctttctccttcagctggaatgtaagctccataaaggcagggatcattgcctctgatttatccaagtacctagaacagcactggcaaggagtagacactgaagatgctcgtccagtggttgtgtggaagggagaagaggatcaggaagacacaatccaggcacttcataatggccagttccactctggattccaaagagccaacaagtcacctgctgtacatgtcactcaccctcatgtgggcactgagcttcctgaggctgtgactatgtgtctggggactggcgattggcctttgcacaggattcaagtcacaaccatcagcggtgctatgcagcaggactcagccttgacacgggctgctctttgtcaggagaggggagtgtctcccacagtgaaagtcatgtcaaacagggctgcccggtgaccaaggaggatggtagcttctgtgttcttctccacattccctcatcagaccacgatgttaagtctcactggagccatattttccatgaggtgtcagcatcccggacacatttcaaatggtgtagttgctttcctcggataattctccagggacagtctgggtccaggcaactgatattagtaatactctggttgtttccaaacttggttcaattattccaattgtttttattctttttctcatcctaatgtaaatccttcctcttccccctcccctccccatccctcccttcctcctttcctcctttcctcctttccttccttccttccttccttccttccttccttccttccttccttccttccttccttccttccttctttcctggg

SEQ ID NO: 470462 - DNA, 422 bp, Homo sapiens
agaagggctatggcgactgttcaccgcaggagggctctgcgctgtctgaaaaggggaacagaatgccccagtggaagcagatttgcagatgagtttgcagcatggcagcccctgggtggcgtctccatccccgacgctgagcagtactcatgctctcagagctcgctgcgcagagaaatagccgtaacagacccggagctcaatattcaggggatcccagagctggctgtgcagagcaatggccataacagacccggagctcaacactcagaggatctgcgaggggacacccgggagcccacaacccactggcccctcatccctccctttgccggaggctaccccgtgtccctccctgtgtcctgagggctgcccccaccctgcacaccttctgcaccctccgagcctctgcccctcactgg

SEQ ID NO: 470463 - DNA, 873 bp, Homo sapiens
tgtggtaaccctgactctcaatccaaactctcaaaatgtatccaaagccacctccaacttgcaacccctgtcctggccctgatcactgtgctctaacctcactgtcctgctttcatgcttgttcccaaatttacatttgcttctcctctgcctggaagacccttcttccagatctgcacaggaccagccccttcccatcatccaagtctcagttcagattgtcacctcctcagaaaggtcttccccagccatcctgtctaaggctttatacaggattccttccaagaccccagtgcaaccagaaccatttcaagagagtgattatctactgtgagaagttaccactgcttaaaaatacaggtgccctgggttcgaatcccagctttgccattcatcagctgtttggcctttggcaaattgctgagctctctgaccttcagttttctcatccataaaatgagaataacgatggtatcttcctcataggactgttgtaaagactaaaaatacaaagacaacttagtactatgaagttttaaaaatgtatttatcaaattcatcagggaatttaacgtacgataaggtagtatttcatttcaatggtgaaattataaagtattaaacattattgagattactgactagccttttgaatgaatagcactaggtcctcaactcacttttaataccataataaatcttaaaggataaaaaaggattttaaaaggacttttaaaggtttaaaagttatgttgaaatttcatgaattttaagatttgtaatggaaaatctttataattgtggcatgaaatccagaagctgtaaaagaaaaggttaaagacaaatacttttaccctctaaaaatatttaaac

SEQ ID NO: 470464 - DNA, 2221 bp, Homo sapiens
gtgaggcccagtggtcatctgggccaggccttgatgctgaggccatggaacaggtggcagacactggcttcccctcttgctctcacaactgtcctgtgacctggtgtctgagctgtgagcccatcacttcccaggcctctcagtgctttcttggacagattctgggatcattcactggtgactgccctgctagggtgtcagctgtcagatcccccagcaaccccccaactgagctctgccctcgagcactcactgtgggctcccgaccgtcactgtctccagggccaagggctggaacctccacctgcctcaccaacaacattctcaggatcgattgccactggtctgccccagagctgggacagggctccagccccgggctcctcttcaccagggatcacatcgttggggtgacctggctcatacttggagcctttgagctggaccctggctttatccatgaggccgggctgcgtgtccagatggccatgctggaggatgacggggcacaggaggagcgttacacaggccagtggagcgagtgtagccagcccgtgtgcttccaggctccccagagacaagatgggaagagtgaggcccaggagtgtggctcacacaaggtccttcagcaggtgacacaaacctccaaggcccatcacaaggtccttcagcagatgacacaaacctccaaggcccatcacaaggtccttcagcagatgacacaaacctccaaggcccatcacaaggtccttcagcaggtgacacaaacctccaaggcccatcacaaaccttccactttggcccagggcactaaagggcgcacctttgccagcaaggcttggtcctggatgtcctgggtccctgacttgccagatgaatcatgtccgttttgggaaaatggacttaagtctccggagcccttgtctgggactgaacctcctgagaatgggcccctagcagtggtcggaggtcctgtctggatggaggctcaggggcagctttagggagaaaggatccctctgctcagtgcctgtggggagcagcctctaccctcagcatctgcccacaggttcttccttccgctgtcccttttctttatccccggcctctctgagaagaggggtgtggtctctcagctgttccaccatcatccccttaagcggccagcctgggcccagtggacacagaaactgagagatgaggctggagctcccagtcagtgctagaaatgaccatccagcagtgatggtggcctgtgaagggtccttcttctgtcctcagcctctcatggggtgggcttggggaagagctgtggtctggagagagcggcagatggagcagaacgtgcctgcatttgtttcctagggctgccgtaacaaagtgccacaaaatgggtagcttagaaccatagagatttgctgtcttagttccgaagtccagaagttggaaataaagatgttggcagcgttcctgactacaggttcttaggctcccatgaaacagaagttgatacaaggccaagcaagcttctcagacaaggctttattaagtcttatgcccctaaaggctgggcagaaaagagacgtattaagtcttatgccctaaaggttggccaggaggaaggattcttggctggttccccatggggagtgcgttgtggtatcttgagggtgacatgcataatttatgagttaggtgtctatcttttaattgggttgtttttctttttgttattagaatttgtttgtatatttagcacacaagtctttttctggtttgtttttaaaatattttctctcagtctgtggcttgttttttgattctcttaatgggatatttcacagagtagtcattttaaattttaataaagtccacattatcatttttttattttatgaactggcttttgatattgtatctaaagactcatcaccaatccaaactcatatggattttttctataatttttacaattttatatttgaaaatttaagtctacagactatcttgagtgattttttaggggtgagctatgaagtttgtatctacgttcattttttcccctatggtttgattgttcagtcgccatctgtggaacagacttttctttccccattgaatatttttgcccctttgacaaaagcagttgactatatttatttgggtcttttgggttctgtattctattccgttcatctatttgtccattccttcaccaata

SEQ ID NO: 470465 - DNA, 758 bp, Homo sapiens
gtcaggcggcgccatgctcagcgcccaggagcgcgcccaaatcgcgcaggtctgggacctgattgcgggccacgaggcgcaattcggggcggagctgctgctcaggtcggtagaggcggggtctccgggagctcagggaggtggagatgagggttttgggcgcgtgggccgccaacgccatccaaggtccttcgggctcttcacggtgtaccccagcaccaaggtctacttcccgcacctgagcgcctgccaggacgcgacgcagctgctgagccacgggcagcgcatgctggcggctgtgggcgcggcggtgcagcacgtggacaacctgcgcgccgcgctgagcccgctggcggacctgcacgcgctcgtgctgcgcgtggacccagccaactttccgctgctaatccagtgtttccacgtcgtgctggcctcccacctgcaggacgagttcaccgtgcaaatgcaagcggcgtgggacaagttcctgactggtgtggccgtggtgctgaccgaaaaataccgctgagccctgtgctgcgcaggccttggtctgtgcctgtcaataaacagaggcccgaaccatctgcccctgcctgtgtggtctttggggagctagcaaagcgaggtcactattgttggccagtgaagctcagggacctaaaaggagcctcctagaactctcaaatgcgccccacccccggagcccagagcattgttatttcaacagaaacactttaaaaaataaactaaaatcc

SEQ ID NO: 470466 - DNA, 1537 bp, Homo sapiens
aagacggggggccttggatccagggcgattcagagggccccggtcggagctgtcggagattgagcgcgcgcggtcccgggatctccgacgaggccctggacccccgggcggcgaagctgcggcgcggcgccccctggaggccgcgggacccctggccggtccgcgcaggcgcagcggggtcgcagggcgcggcgggttccagcggggggatggcgctgtccgcggaggaccgggcgctggtgcgcgccctgtggaagaagctgggcagcaacgtcggcgtctacacgacagaggccctggaaaggaccttcctggctttccccgccacgaagacctacttctcccacctggacctgagccccggctcctcacaagtcagagcccacggccagaaggtggcggacgcgctgagcctcgccgtggagcgcctggacgacctaccccacgcgctgtccgcgctgagccacctgcacgcgtgccagctgcgagtggacccggccagcttccagcgctcgccgcagctcctgggccactgcctgctggtaaccctcgcccggcactaccccggagacttcagccccgcgctgcaggcgtcgctggacaagttcctgagccacgttatctcggcgttggtttccgagagcagccttcttgccgtgctctctcgaggtcaggacgcgagaggaaggcgccgcccctccccaaggaaaggcgagggcctggggcacacccccagtgcccagatccaggcgcgcctctttccacctccagcaggtttggggcctcggccatgggggcaccgaactgcgtgcagcctgaccctcccgaatggggtggtaggtgagggccgcgggacgccccgggcggcgggctgcgaggacggccgactctgcccatcccgagggcggctggcttcgccctccccactctgcgccgagcacgcggcccggacccaccgcgagaactccgcacctgcagcgtgaacgcacgcgggcggcgttaagggctcggggctgactcggagcaggttagggaacagcgccccctcccggcgcgagccggtacctgcgcagcacccagccgccgcggctgtggcctggaatcggggacctggggtgccggggggttgtggtgaaggaggtgggaccagccccagcacctagccacgtagctggcgaggtggaccaggaaccgacccagacccctgccgtcacccgacatcactacggagagtgaagcttttttatatttgtccacataaaaccaatcatggtcattgtagaacttccgaaaacaaggcttgctgcaccttcctgtgtatcccaggtccaggaatgggtgcagcacatccttcagctgccgcttgacacgcggcaaactgtgtcatgtgtaaacaagaacaggacatggctgtcatatccaagagcacatgtgtaacacagacatgccacacacacacacacacacacacacacacacacacacacacacacacggggtagaggcaggcctcatccacacccctaacatttgatgc

SEQ ID NO: 470467 - DNA, 584 bp, Homo sapiens
ggctccatcccctgctcagaaccgggctcatcgcccgcccggacccacaggccaccctcaaccgtcctggccccggacccaaaccccacccctcactctgcttctccccgcaggatgttcctgtccttccccaccaccaagacctacttcccgcacttcgacctgagccacggctctgcccaggttaagggccacggcaagaaggtggccgacgcgctgaccaacgccgtggcgcacgtggacgacatgcccaacgcgctgtccgccctgagcgacctgcacgcgcacaagcttcgggtggacccggtcaacttcaagcgcaggcggcggctgcgggcctgggccgcactgaccctcttctctgcacagctcctaagccactgcctgctggtgaccctggccgcccacctccccgccgagttcacccctgcggtgcacgcctccctggacaagttcctggcttctgtgagcaccgtgctgacctccaaataccggcctctgggacctcctggtgcttctgcttcctgtgctgccagcaacttctggaaacgtccctgtccccggtgctgaagtcctggaatcca

SEQ ID NO: 470468 - DNA, 506 bp, Homo sapiens
cctgtgaggaggaggttgcaaaggaaccaatcggagagagagggtaagatggggatagaagttctcactctggtcatgggctctatccagatctggcagctcagttttcaggctttatattatctctggtttgcagcaacacctttaacattgtatgtatataaagaagagataggagccatgacagctgcaaaagaaagaatgaaagaaaatgtgaaaggaaagactggaggttctagtgctgacaccataatgggctgtcagggactggagtcagtcctggtatctttggtgatcctggatgagcctaattgctacaggattccttcagtgccgcttcacctgctggaaatctctctagccaccatgacttccatttgggaccttgctcaggcctgccaagctcactccacccgctcagcccagcaggctgtgcttggcttgcaccctggcccagatcccatacctgaccagggactctgcacttagtctgtggctggaccaag

SEQ ID NO: 470469 - DNA, 1410 bp, Homo sapiens
cctgcagtagtagcagcagcgcctcttcataaagatgacgcccttcaagactttggtaacctctgacgttgtagcagagaaaaatgagcagaaaggcagttcacagcctgaactctttttccccaattccctgaaaatcaagggatcaccttttgccctcttgcagctggagtacaagtgggcatcatctagagtccaggggttacccccacagtcacaggaaggcacattctcaaggtcatctccttggaaaaccaacctattcaatgatgtaatggaaggaacactggacttgcgggcaggagcctgggccatgtggtctagcctattgctcctgggctacaaacctgtaccgcatgttactgtactgagtgctgtagatgattgtaacacaaagataatattagtgtatctaaatgtagctaaacatagaaaaggttatattccaacctaagacatcatgagtgatgaaatagcctctttcatctcagtgagacttgaagttaaatgttctttattgttttctgcattaacacaaggtacattttccttattgcctgatactaacaaattaagatccgcatctagtgggttgccaaaagtaactatgatagagacctttatgtactactcatggagattctaatttgaaagttccagggaaagacgtgcaaatgttactttttacaataggccctggctaaatacttgacttggctttagaaataatagaaattattcatattttcaccaaaactatgcccatcccatcctttgagttgaattcacttcatacagttttgaaattgtttttcttaaatgctcaaagcccacatttctgttttggagatagtatgaaatagcacaaaatgaagatacagaaaaagagaaaattgaaaagaactactgaaaagcaagtaagaaatgaagaactgattagttagtggtaggtcagttgaacagttcagtgtggcttgtgggaaccatatggggtgattgtcactttactaggatctttcaataaaccaaataagtgatatggcttaccttctggtgttggtaagcaaaaatgtctgataccagaatgcacgtgcatttcaggaccataatatatcatgatattttgcatataggtgatgacccagtgaaaggttctgtactttattgttttcaactctgaaaaggatattttgtaagaggtcatcaaaaataaaatgtttaatatattatgtcaagaatttttgttaatagtccaatatttgtagctatagggcaatattactaaatagatgttttgtgttgttaagtggtataaataaagttcttattccctaataccagtaggtgaagatcatctgataaatggctcttcaaagtatatcttaaatcagaaatgacctaagaaattcc

SEQ ID NO: 470470 - DNA, 599 bp, Homo sapiens
aaccttagaatgagtagtgtatactcattactcatccccagtgtctttggttggctgctagtgagaagtgtttggatcctgcagctttatgaaatacagaactcatgccccgtgttttcaactgttaccctgatcagtaagcatggcatttgttcgttcttctctgagaacatcttgtctttgtatcaggttccaggagcaacaaagccagcagtgactcagcccgaatccccaaaccttagaagtggggaagccgacaattgcagccttcagtctatggccaaaggcccaagagcccctggcaaaccactggtccgcgctggcagccaattggatggtgcccacccacactgtgggtgggtctttgggaggcaggacagctcaaatcatgctgaggatgaccttcaattaagcagctttcatgagctctggctgtctccagctctgtttcagaaatcatccaaaataagtgtcatttatacatctgtatttgagtgagtgtttacattgctaaaaacatgaactgggagaggcccagcattgctaagcttccagttcacatgattagccgagagaaataggagggcagagagataccc

SEQ ID NO: 470471 - DNA, 2719 bp, Homo sapiens
ggatcctgctggaaagccacctttgtcagtgtgggaagccaggcacctcatcaacgagggaagataaatacgtatcatgggagaggagacggaaaagaaagacctggactcaacgccagaaaacctcactttgaatcccagaccttctgacagaatcaaggagaggagaattaaggtccgcttcttgaagagaggaatatcgaataatctgtggacgtattttcaaaccaccagaatcctggaggaggatttcagacaaagcagtgacattgatctgcaacaggaaaaggtcaatctgaaaacagggttcatgggatggctgttggctgggccacttgtcttccagtatttagcagggcttattcacatcaagtcttcaggattcccacagcagccaaaagaggaaaactcacaatgcacaatttattttcaagcttcgaattgcatcacgtttgctaaagtagaagacgatatggcaaattcactcaccagaaaattgtactatgagttttttgtttttgtttttgttttacataagagaaaagaagaagtcgatgtgcttgaccctagatatttgatccctgttggtgattcttggtcatctggtgttgtgatcctcgttagcagaaccgcatctgcatagatagcactttgatgcacatcagagcccaaaacacttgaattttccaacaacgagaacatcgggtgtttctcttggtgtgtgctaatggtatggactgattttgcagaatcactgaagcaagctgtaaatgatgtatgaaatgaaaaactcctgtccagtgcacagagcgaatatatacagttctgtgtaatcactgtggtgctgggctatttgttttaatatttccttcagacatatagcagtttttttggtgagtcatatccagacacttgccattggcacatagctcaggtttctgttacatatattttaaataaatttcaatgttgtataagtgtacttgaattaatgcaataccagattttagaagacttgacctttataaaatagtatttttatgaaaacaatatcaacatttttgttctgaaaaatttggaaaatactgaagagcctaagtagcaaaattggaaatcattttatgccattatggagaaatagccattgtttacattttgtatatattctttaaggtatttttacccactgtaattagaatatactctttgaaaaaattatccgatgcacttcttttacactttcattcccaataaccaatagggcttgaacatctcccaatggtcttctacagtgtgacttttactcactgcatgctgttcacacatgcgtgtaacacagaaaagttttactcattcctgttatcgaaaaatgaacatttagtttttttctgattttgctaatataaataatttcctgtatcactactgtaatgtttatgtgatttcagtaattttggtgtatatttggtaatgccaaacttgtctctgttcttctcttacaaaattttctttacttttgcatttgtttttccctgttgggttttgacaatgactggattatatttataaattattggagtagactggtatctgtgtaatattgagtcattccattggaggacatagagtgtctctatttatgggtaaattttctaacatgaattcatccttatgtaccagaaataaacctccctaagtcacaagagtattttatttagggtttctgcatattatatactagtataattatttttttgtgccatctttgtttaggaggagaagttgtttgaagcctctaattttctttcaagattaattgacctgttcaggttgttttctatttctatttgaatcaagtttgatgatttatattttcctgttgaaatatcagttcatttaaatttatttttatagatgcaaacaaaatattgttatagttaaaataattctagaaatctattgttaaatcacttttcttattcttaatatatctttttttgtgattagctatgccaaaggtagtgtggaagagccaggtctaaagtttactatttccagttgttctgttttcctactagcttttaaagttgcatgcttagttaattcattttttgttgttgttgttgtttattaataaaaatatttaaaactatgaactttgctatgatttttagcttagctgcatcatataacttttgctgttatattcttactttatccattgtttaataacctaaagtgatattctgatagcctctaagatccaaaattcttttataagagtaattttaaattttaaagtggttgattttatgacatcatgttattattaatttacagttttatttaattgcctcctaaaatatacctgtgatgatttttacttaaattttgttgacatattttggggatagtatgtataaacatctttggaaaagaatccatggtcactggaaatgaaggctattttccttaagatagagaattaactaattataaagctccactgtatcctttggtcttctttgaccaactgtgaggaatgttaaagtcctttatgaagttggtcttactattctttaacttttacttctagagatattctcattctgagagtcagtgttgcgttatttgacacatgaatattgcatatttgtgttgaattgtattcccttaatataaagtctgtctttgcccacttcttgtgttttgccttgca

SEQ ID NO: 470472 - DNA, 597 bp, Homo sapiens
ttggaccctgtactcagaccatacacaaatattaacaacaaaaggcgataagaaaaacatgaaaaccttatcttggaaacaaaagcacatttctaagtatttcatggctcaaagagaaactatcatggacattagaaaatatttggaactacacgataaaatatcgcatgccaatgttaggcttgtgggcggccagtggttccagcatcatttattgaaaagggctgttattcactactctaggatccacagcccacggaagactcacagaattgcattggctttccaccggcagctcacccacggctgtctgtcggagccggacagcggggcatggagagtggcccagaatggagacgataatttaccatccagctcgatcctgtggctagaggggggccagctccatgctgcagcctcgcgcaatggcaatgacggtggtgaatgggactcacctggacttacccggtgggaagagggcttttctcccttttctctttccttcccctttcttgtccaactgtgggaggaagagaggacgtcgaaaatcaagttccacacgggttgatttcatcagtcaacgggttgatttttggg

SEQ ID NO: 470473 - DNA, 760 bp, Homo sapiens
ccccgagcggcagcctccccacggaaagaacccaactttcctcttatccttcatgaaagcgcaggacatagattggtctatattctcacttgtcactttcttgcctgccgcggtgctgggagctatccgggaacacttctcggtgcagctcaaacgcaaattccaggacagaatcaaggagaggagaattaaggtccgcttcttgaagagaggaatatcgaataatctgtggacgtattttcaaaccaccagaatcctggaggaggatttcagacaaagcagtgacattgatctgcaacaggaaaaggtcaatctgaaaacagggttcatggattcccacagcagccaaaagaggaaaactcacaatgcacaatttattttcaagcttcgaattgcatcacgtttgctaaagataggatgcattggtggccccagatgcacaagtgatattggcaaagcagaaatgggctatggatgtcaaagagatgctgctgtcccttattcttggatggagaagtttgatgatacccagaaagatccaaatgtgatggtgcaggtagaagagggatcacccactttggctcatgtgatgggagtcacgtgttaaagacggcaaagcatcaagagagaaggatcttaattgccaataaaaatatgcggccactacacctaccctagactttcatgtaagagagaaatagacttctgtcttgtttaagtcagtattagttttagtatcttggttaaatcatcctcacct

SEQ ID NO: 470474 - DNA, 1351 bp, Homo sapiens
ttcctgcctgctggctctgaagagagcagtggatctcccagcacagcactcgagctctcctaaggggcagactgcctcctcaagtgggtccctgacgcctgtgcttcctgaccgggagacacctctcagcatgtgtcaacagataccttatacaggagagctccagctggcatctggtgggtgcccctctgggacaaagcttccagaggaaggagcaggcagcaatctttgctgttctgcagcctccactggtgatacccaggcaaacaggaagaggaaataccagtgcaaaaatgctgaaaattccaaaaaccagaatgcttcttctcctcaaaaggatcacaactacttaccagcaagggaacaaaactggatggagaatgtgtttgaaaaattgacagaagtagacttcagaaagtgggtaataacaaactcctctgagctaaatgagcatgttctaacccaatgcaaagaagctaagaaccttgataacaggttacaggaactgccaactagaataaccagtttagagaagaatataaatgacctgatggagctgaaaaacacagcacgagaacttcgtgaagcatacacaagtatcgatagccgaattgatcaagcagaagaaaaaatatcagagattgaagatcaacttaatgaaataaagcgtgaagagaagattagagaagaaagaatgaaaaggaatgaacaaagcctccaagaaatacgggactatgtgaaaagaccaaacctacatttgactggtgtacctgaaagtgactgggagaatggaaccaatttggaaaacacaattcaggatattatccaggagaacttccccaacatagcaagacaggccaacattcaaattcagaaaattcggagaacatcacaaagacacttcttgagaagagcaagacacataatcatcagattcaccaaggttgaaatgaaggaaaaaatgttaagggcagccagaaagaaaggtcaggttacccacaaagggaagtccattaggctatcagcagatttctctgcagagaccctacaagccagaagagagtggggaccaatattcaacattcttaaagaaaagaattttcaacccaaaatttcatatccagccaaactaagcttcataagtgaagaagaaataacatcctttacagacaagcaaacgctaagggattttgtcaccactaggcctgccttacaagagctcctgaaggaagcagtgaatatggaaaggaaaaaccagtaccagccactgcaaaaacataccaaaatgtaaaggccattgacactatgaagaaaccgcatcaactaatgtgcaaaataaccacctagcatc

SEQ ID NO: 470475 - DNA, 810 bp, Homo sapiens
tcatcacagctttggctttcttgttcaaatgatgcatgcagatttaggtgtcaggccagtaactagattatgtgatgcttttgttaaagatcttgctgttgattcccgggcaagatggctgaataggaacagctcgggtctgtggctccctaagagatcaacgcagaaggcgggtgatttctgcatttccaacggaggtacctggctcatctcattgggactggttagacagggggtgcagcccacagagggcgagtcgaagcagggtggggtgtcacttcacccgggaagcgcaaggggtcagggaactccctcccctaaccaatggaagccgtgagggactatgccttgaggaaccgtgcattccagcccagatgctatgcttttcccacagtcttcacaacccagagactaggaggagattctcttgggtgtctacacaaccagggccctgggtttcaaacacaaagctgggtggccatttgggcagacaccgagctagctgcaggagtttcttttcatattccagtggcgcctggaatgccagtgagagagaaccgttcactcccctggaaatggggcagaagccagggagctgagtgctcttgctcagcagatcccacctccacatggcccagcaagctaagatcccctggcttgaaattcttgctgccagcacatcagtttgaagtcgacctaggaggcttgagcttggtgtgggaaggggtgcccgccattactgaggcttgagtaggtggttttcccctcacagtgtaaacaaagcccctgggaagttcggactggttggaa

SEQ ID NO: 470476 - DNA, 665 bp, Homo sapiens
ctgaaatgataagatgcaaaattcaggcattagcagtgaccatgtattccactatgtaggagaagctcttgctgatgaaaagtggaggaacatcatcattccagacactgttcttcctccacatttccctgcttcatccaaaacactgatgcagccacttctccgggactctctccagagagctgaattttcctccaagctgcatttcccaggctcccgtgttagctggttttctgagtggattaagctaatgaagggtaatggcaggagactggaacacagaggaagacagaagctggggtatttctcccctttcctttctgccttgagtgatgtctctagcatcttctccatgctgtcagctcctgctagacaagctctgctgcagctcctgtttccaccgggtagacctagcccctggattccagaaacactgtctccatcctccctttatcccaccagcaagtggagactcaaagtggtttcagtactcctggttgaacctgaccgatacgacccttttctccattctcagcccatccgctacaagggaagttgactccacctgcagctgcaatagtgggcatgtgacttacactcggccaatcagaacatcttacacccctggctgtggtgactggttcaggaatttgcacatagcacaa

SEQ ID NO: 470477 - DNA, 547 bp, Homo sapiens
ctgcctaactggcttcctgctgaaggcaggccagacatcacctggacgatgatggaggatgagaaacctgaacagatatagagaggaagaaatggaagacatgggggtgtttgctgaagacaaacagtatttccatggagcacagcggttttgggtggatggggcacagcaggatcatttgggcacggagacaacgtgccttcttggttgtactggttgtcacactcccgctggagcctcctttatattcaagagctcctctgagtcccgtcttcccttgagcggtccagggcttaggtttattgtggcagatttggagccagcttcccaagccgtgcacatctgccctctgaacacatgctggctacctgcagacatcagctggggcttgggagccactgcccaacaagcagtgactggttgtatcctcagcgatacccacagccaaagtctgaaaccactgtctgttaagagtacatgggatccagaagaatggttgcctgaaatggagaggctgaaggcttacagcctttgacaaaatctcatt

SEQ ID NO: 470478 - DNA, 794 bp, Homo sapiens
gcagcagcagcagcagcagcaacaacaacagatgcaacagatgcagcagcagcaactccagcagcaccaaatgcatcagcaaatccagcagcagatgcagcagcagcatttccagcaccacatgcagcagcacctgcagcagcagcagcagcatctccagcagcaaattaatcaacagcagctgcagcagcagctgcagcagcgcctccagctgcagcagctgcaacacatgcagcaccagtctcagccttctcctcggcagcactcccctgtcgcctctcagataacatcccccatccctgccatcgggagcccccagccagcctctcagcagcaccagtcgcaaatacagtctcagacacagactcaagtattatcgcagatgcaagtacaagctgacaaggggtcattagttcccgagtcagagaacaaaagcttaaatgccttcgtgcagcataatttctgcaatatattaccacctgatggaggatctgaacaggccaagataaaagtcatcctggtagatgtagaagacatctcccgccaaggggagagcagagaaaatccattcaggttgaaaacacaggcacctcaaaacagcagaagagaatcaaacaaaattggacaaacagcttttgtggagggagtgtccaggggacaccgaaagctgaaagaaaagtggaacaagatgaccacttgaaaatgtatctcaatatttaattattcatatggataaatgaagccgtcgcttcatgtgctttctcctctttctcatgacactcccatcttcctgg

SEQ ID NO: 470479 - DNA, 571 bp, Homo sapiens
agagtcagggatggggtgggggtttcccagggcagggtgcccatccacccagccctacatttttcagggactttacctgcaggctggaaatttactctggatctgggaccagaatcctatcctcaacctggtggcccttcctgtctttttcctcctttcaggagaaaattacatttcaatggacaaatggctcttcctagagaagggtgcaagattccactctcccaaggcccctcacagacttctagggacaaaggctccagagaggcacctagcaggggagccccatggggtcagcccagggaggcccagcaagggtggatccggctctgctgacttaatggattccttcccaccagctgtcctgggtgagaagctgctaaggcttctggagctggctggctcctaggtcgccctaactcgctgggctggcaggggttgtttatctcccagctcctctatgccccaccctgggttcaatgcatcaccagcttgtgcccagcccagtgcccggcacataagagatgaacaggagccctgtggaggccaccctttgcacccactcctgcct

SEQ ID NO: 470480 - DNA, 4117 bp, Homo sapiens
gcttaagacctgtacctggttcaagtcacggggcctggtactgtgcttgtgcatggtggacctcaagaaagagggagcaggtccagcagggatatgggccttggactggctccagggcctggtgaagcagtgtagcctggtggttaatggtgatgacgacccacaactctcctgggtggcctcgtctccctccagcaaggatgttgcgtcacccacgcagatgatcggagatggttgtgacctcggcctcggcgaggaggaagggggcacgggcctgccatacccttgccagttctgcgacaagtccttcatccgcttgagctacttgaagaggcacgagcagatccacagcgacaagctgccgttcaagtgcacctactgcagccgcctcttcaagcacaagaggagccgtgaccggcacatcaagctgcatacgggcgacaagaagtatcactgccacgagtgcgaggcagccttctcccgcagcgaccacctcaagatccacctgaagacccacagctccagcaagcccttcaagtgcactgtgtgcaagcgcggcttctcctccaccagctcgctgcagagccacatgcaggcccacaaaaagaacaaggagcatctggccaagtcggagaaggaagccaagaaggacgacttcatgtgcgactactgcgaggacaccttcagccagacggaggagctggagaagcacgtgctcacccgccacccgcagctgtccgagaaggcggacctgcagtgcattcactgccctgaggtcttcgtcgacgagaacacactgctcgcccatatccaccaagcccacgccaaccagaaacacaagtgccccatgtgccctgagcagttctcctcagtggaaggtgtctactgccacctggacagccaccggcagcccgactccagcaaccacagtgtcagtcccgaccctgtactgggcagcgtggcctccatgagcagcgccacacccgactccagcgcctctgtggagcgtggctccaccccggactccaccttgaagccgctgcgggggcagaagaagatgcgggatgacgggcagggctggaccaaggtggtctatagctgcccctattgttccaagcgggactttaacagcctggccgtgctggagatccacctgaagaccatccacgcggacaagccccagcagagccacacatgtcagatctgcctggactccatgcccaccctctacaacctcaacgagcacgttcgcaagctgcacaagaaccatgcctaccctgtgatgcagtttggcaacatctctgccttccactgcaactactgccccgagatgttcgccgacatcaatagcctgcaggagcacatccgcgtctcccactgcggccccaacgccaacccctctgacggtaataatgctttcttctgcaaccagtgctccatgggtttccttactgagtcctccctcaccgagcacatccagcaggcccactgcagtgtgggcagtgccaaactagagtctccggtggtgcagcccacgcagtccttcatggaggtctattcctgcccctactgcaccaactcccccatctttggctccatcctgaaactcaccaagcacatcaaggagaaccacaagaacattccactggcccacagcaagaagtccaaggccgagcagagcccagtctcgtccgatgtggaggtgtcttccccgaagcggcagcggctctcagcaagcgccaactccatctccaatggggagtatccttgcaatcaatgcgacctcaagttctccaactttgagagcttccagacccacctgaagctgcacctggagctgctgctgcggaagcaagcgtgcccccagtgcaaagaggactttgactcccaggagtccctcctgcagcacctgacagtgcattacatgaccacgtcgacccactatgtgtgcgagagctgcgacaagcaattttcctcggtggatgacctgcagaagcacctgctggacatgcacacctttgtgttgtaccactgcaccctgtgtcaggaggtcttcgactccaaggtgtccatccaggtgcacctggcggtgaagcacagcaatgagaagaagatgtaccgctgcacggcctgcaactgggacttccgcaaggaggctgacctgcaggtgcacgtcaaacacagccacctgggcaacccggccaaggctcacaagtgcatcttctgtggggagaccttcagcaccgaggtggagctgcagtgccacatcaccacacacagcaagaagtataactgtaagttctgcagcaaggccttccacgccatcatcctgctggagaagcacctgcgggagaagcactgtgtgtttgatgctgcgaccgagaacggcacggccaatggggtacccccaatggccaccaagaaagctgagcctgctgacctgcagggcatgctgcttaagaaccctgaggcacctaacagccatgaggccagcgaggatgacgtggacgcgtcggagcccatgtacggctgtgacatctgcggggcggcctacaccatggaggtgctgctgcagaatcaccggctgcgggaccacaatatccggccgggcgaggatgatggctcacgcaagaaggctgagtttatcaagggcagtcacaagtgcaacgtttgttcacggactttcttctcggagaacgggctacgggagcacctgcagacgcaccggggccctgccaagcactacatgtgtcccatctgtggtgagcgcttcccttcgctgctgacgctcaccgaacacaaggtgacccacagcaagagcctggacacgggcacctgtcgcatctgcaagatgcccctgcagagcgaggaggagtttattgagcactgccagatgcaccctgacctgcgcaactcactcacgggcttccgctgtgtggtctgcatgcagacagtcacttccacgcttgagctcaagatccatggcaccttccacatgcagaagctggcgggcagctcagcggcgtcctcccccaatggccaggggctgcagaagctctacaagtgcgccctgtgcctcaaggagttccgcagcaagcaggacctggtgaagcttgacgtcaatgggctgccctacggcctctgcgccggctgcatggcccgcagcgccaacggacaggtgggtggcctggccccgcccgagcccgccgaccggccctgtgccggcctccgttgccccgagtgcagtgtcaagtttgagagtgccgaagacctggagagccacatgcaggtggaccaccgtgacctcacgccggagaccagtgggccccggaaaggcacccagacatcgccagtgccccgggtaagtgcagtccacctcatcctgctccctgctcctctccttggggctcctctggtccccacaggagccacgtaccctgagtgccgtgtttccaagaagcggcgctatcgcgcagtggcaaaacagaactgctgtgctgtagactccttgagtttgaacctcagcactgccattgcctttccagccatgtgatgggctcatgttatttatctctctgggtctcatttgtcaaatgctaatgtataaaatgggaataataattgtcccaacctcagagaattgttgtaagaggccgaggacatcatacaggtaatgtgcctggcacagtggctgatgcacagtgagggcaccatgggtggtggcttgtgtctttgttgttgagctggggtatgacatactcatttgcttattgggtctccttaggcaagtcactgacttctctgggccttagatccaggattcttttgacagttcatagagatcacacacacacaaggggccgagagcccagcactcatggctcagtggtgctggctgtcatcaccagctggtactcttatcaccagtggcatcatttcagttagtgcagttgctggtatgtggaaggccctttgatgtggtttcaattgctgttattgttaatgactgattgattcgttcatcaaattttccctgttcatcaaagcacccattatgtttggaggtgcctgggagccaaggagaaccagaaatggaccctgacttgggacttgtgga

SEQ ID NO: 470481 - DNA, 1687 bp, Homo sapiens
tccccatcttactgcacatgagcttgtgcccacagcatgctgtgtggggctgaggagccagaatttgaacctgctgctgcttgattgtgagtgagggcaccagagctctgagcctcctcgacattggcaaggctggtgctcaggcactctgtgtcccccggcgcctttgggtgaaggtttggggtctcagcggctcccagccccggtgctggggattggaggggggttagtgctggggtctatgggaggccttgtgagcacctgtctgggggacatggcatgctggtcactgactggtcacgggttttccttgcagaggaaggcatcaaccacgagtgtaagctgtgcaaccagatgttcgactccccggccaagctcctctgtcacctcattgagcacagcttcgagggcatgggcggcaccttcaaatgccccgtgtgtttcacagctcccatccatgctccaggatgcaggggtcaagggcagctctgccggccaagttcccagcccccagactggctgccggcccaggcgaatggctgtcccagcccgaggcaagtctcaggggctctgccggccccctcctgctgcccagatggcagccggtgtgcgtgggagagcctggccttccctgcctcccccgacatctgctgtctgccacggcaggaagcccaccctggggaggacgcctggcaggagggtatctctgaagtgctcacctcccagacacacagctgctctgggccacctcctgggtgcgctcagggctggggccacctcagaactcctgccactgggaagccagggctagaccttctccatgccaggcccaggggtgtccactctggggcaaatcccccaaacacacacccctggggctccccagagcccctgagcaccctgatgccatcttccccctcatcgcaggagcccccacccatcttcttcgtccaggccaacaagttgcagcagcacatctttgccgtgcacgggcaggaggacaagatctacgactgctcacagtgccctcagaagttcttcttccagaccgagctgcagccccctggcctctgccagcccagcgttctcaaaagaaccaactgccactggctgagcccagagcaggagtcagaagcttacatttgaggtgtttcgtggcaagtcctgtctgctcttggggattccaatttccctacctctattgtaaaatgatatttcactgagctttggttctgtggctagaagcccatgatgtctttgtggctgggtcctggggctgtgtgggaacaggagttaggtctggggccttggagcctccagttttgtccataaaagccagaaaagaagagtagtggtgcccgattgccccagcttagaggcagtcaccagaggtcctgagactgatgtggccctcaggagcacagttgccagtataagggaggtgtgagtcctctttgattccaagttcggagggctctgcccaaaagactgagattaattcaaaggagtttagacaaactgttgcaaattcacaaccgaataattaggaacatgagagggaactagctttcctattcatttgtttgaagcaagtatgtggagggcccatgatgtgccaggccctgtttctagcacctgagaagacagtggtgaaaagatgaagaaatacccacggggtctgcattct

SEQ ID NO: 470482 - DNA, 808 bp, Homo sapiens
actcccctaggggcctctcagaagaggacgctccccaccagtttgaggggcatgcctcagaaccaatcgctgcctggcacggctccctgggtgaggggcttgggcgcagtgccatatgagcagatggccgtgattgctggcaacccggagaccctgcaggagagtcgcgtatgggtgtttacagcatcctggtcccgccgcgagcatcaaaatggcagaccaagtggtgcccagcccatccagggtggggtaggggcagctcgctttcctgagaaaggagaaggaggtccccttcttctcctaaggagagtcctgcccagcgcccatggacagccagagggggccatgaagtcttcagtggatgaggctcattcattcattcaacaaatgtgtacagagcacctcatctttgtcagaccctgttccaggtgctgggatggatcaatgaaccaagcaatcgaaagccctgtcttcctggcacttccattcatgtggtcctggatagtgagaggaagttacaaagagcatggggcctggggcctgcatggtcagttcctggggccagcgggctcccaggagcctgactacaagctcagtccttgcctcgtgtccttcccccatcagctcaacctaaggcccaagttcatgggtccagtgggagtcaaaggaggaaacagccagcaactccctcctcgagcagcagcccggtccatcaggcaccctggtgtcagcagggtgcatcatcagctcctggaaggttaatgccagcccagatgctaggctctaggactgggagggggaatgagtc

SEQ ID NO: 470483 - DNA, 876 bp, Homo sapiens
gtctattggtgcacacgttcattggcgcacacgtccattgatgcacacgtctattgatgcacacgttcattggcgcacacgtctattgatgcacacgtctattggcgcacacgtccattggcacacacatctattggcgcacacgtctattggcgcacacgtccattggcacacacatctattggcgcacacgttcattggtgcacacgtctattggtgcacacgtctattggtgcacacatccattggtgcacacgtctattggtgcacacgtccattggtgcttacatctattggtgcacatgtgcatgcagttctgttcattcacgccgaaccccagaaaaaccttcagtctggcgctacaggtgcatctggtgtctgagaggtttgccatgagcagatgtggatttggtattagcagcttttccaaggggattgacgtgcctagttttggggatccctctcagaaaagcagcggctggaaaatcagctcctcgtctaccccagtgaactacgaaacagcccacatttgtatggagttcttggctgtcactgactgtgctccctgcttcacatgcaagctctcatgtgctcttcacagcactcctgctcagcacatactgtcattaaacccattctacaggcgaggaaacagaggcacagaaaggagaaaaaccagtttctcctatgctggttctgactcggatgtcaaggaccagtcttacggaagcacaatgatcacacagccgaggcttgttttctgattgcttactttctaaagggatgcactaagttggaaggaccacttgtagtgtgccagaggatggcatctggaggtgaagggtcccatgacagaaggagcctgaaggtggtggc

SEQ ID NO: 470484 - DNA, 456 bp, Homo sapiens
atgatgtatgtgcgcacatgtgtgcatgtatgtgagtcacagccaccttaaccaaattggtaccttcaccctcatgattgtgtcacaacacactgcgtcattgtcctgtgtcatggccatgatccaaaattgtcacatttctattgattccgtacctattgttactcttgaacaaggatctgcaaaccatgacccatgggtcaaatcgaacaaatccagtccactgcctatttttgtatggcccaagagcaacttaacagtcacgattcgagaagctgcctgctccgtgaagcacggtgactttcgggatatccaaccaggatcccagaacggatttctgcctgctctttgggctttctgctcagcttcaaaagaagcttctcgctggcatggaagtgtttgaatttgatggccactttgctttttttgaagagttagtttaaaccagaggtctca

SEQ ID NO: 470485 - DNA, 647 bp, Homo sapiens
ttattggaagggatgggagtggcagtaattgtagaaagggcagaacatgaaaaagtaacagctcctgtgaatgctgcaaagtgccaaagcctctccaagttggagttgttgacggcaatggctggctcaagtggcctgcgagggaggccggtgggcagtgatggatggactccaaggatggctttccagagagcagggcatggacatcttatcacctccagagtgaacatcctggtgatttacttcaccaccactcattctctggtaccatcccagagggtcctgtatgctgccctcaagagggctcgtgtgatcagcctcagtttgtcattctatatcaagttcaaagaatgcattaccatgaaggttgtctgaagaatcaaacgagactccatacatgtaggtactttgtaaactctggagttgctgtgcaaatgttagtcattattcttgtacacactaagactcaggcccagtctttccctccagaattacacgagttcagggtcacactggaactgttcatcaaaaacccttatttgcaaatctgacaacccagattcttcttcctgcacagttgtttgttgatgattaaattattgtaaattagttctacttgtagtataataaatgtcattagcatgact

SEQ ID NO: 470486 - DNA, 741 bp, Homo sapiens
cttccaagctgctccaaatgggtgaaaggaaggggagtcaaaacattttgcatctccaacatgttgactccaccaaaaacttcaataacgccttctcaatctttttctttctctgtttcctatttggggttcatatctgtcaacctctatgataaatgcatgactgaacttctactgtttactgatacagggaatgttcagattcatagaattcttcttttctgtcattctcttcaagaagaagcaacgttgacagacatagagcatctggggtcaggtgggaacctgagagacagaaaactttatgtgttaaataaaagcaggtcccttcagttcaacaaaagttggaatagcaatgatgtagtcagacatgagcagggcaggagaggggatccccaacccccaaccaggaatgtcaggctaccatctggtgaaggttcttgtgaacttttccaagaacggatggacctatcagtggtcaagctgtttgatgtgcagagctttacagacttaatggaagacctgttttaagtatttgtgatcttctctgtgacttctatgcaagtattcatgtcattagtgccaaatattttagagccatacacattggtcagtgaatttattttataagttataggctttagcatgtaagaccgttaaacagttaaagcaaatgtattaatttaataaatttattttattggctttaaaattaaagatttgtgaataaaatgtttatgt

SEQ ID NO: 470487 - DNA, 603 bp, Homo sapiens
gagaaacacccacaggactgacttgctcagtgtaggatgtttggcagtgctgtcctcaaccccatcaaatatgagtggctctggatccaagccactgtgcagaccaaaccaaacccaaccctaaacaaaagtgacgcccctgcacatttcctagtggacaggttcacccttggaaccgggctgcacagccagagatcagtggcagcattagattctcataggagcacaaaccctattgtgaactgcatatgccagggatctaggttgcatgctccttatgagaatttagtgcctgatgatccgtcactatctcctgtcacccctggatgggaccatctagttgcaggaaaacaagctcagggttcccacagattctatattacggtcaatggaacaattgtcttccatgaaactggtccctggtgccaaaaaggtcacagtgagaaggcagctgtctgcgagccaggaacagggcccttgccagtaacctgatcatgttggcaccctgatctcagacttccagcctccagaaatatgagaaataagtgttcattatttaagccccccagcctatggtaatttgttacagcaacctggactgac

SEQ ID NO: 470488 - DNA, 618 bp, Homo sapiens
tgactatcatgtaaaggaagcgatagtgaagctgcagacaaatgggcctgggccggccaacccgacagccacctgcatggtggagaattgaaggagaggcagctgtgggtcaaaacgtcatagggcaaggacgactgagcactgacactttgggcaagttagcctccgagatgactctggtggccccagaaattaaacctggaaagagtgttcgtgggagcgtggtgatcaccaaaagcaaggcagacagccatggctccgggtcacagaagcagcatcactcacaccagtctgaaacaccacaggtacaaatcagggctctaccgcagaagggctgggatcttcctcctccccagcatcctgcagccagatcagtgctcttcatccctgcagtgttctcgccaggccagcctgagcactgtccctgcgcccctccttctgaaaggggcattcacccagctggtgctcagcaagcatcttttatgctgtaggcactggcaaagtgcaaataaagaaagcagaatccctgcactaagagtctgatgaaggagataaccacatttgcaaacatttgcaataaagtgaaattagttacaaaagaagtgtgaaaagggaatt

SEQ ID NO: 470489 - DNA, 1500 bp, Homo sapiens
tttctgtgaatatgatggggtggtattgtccctgttgagaatgcatgttcctaaagaatttgctgacttgctcttccttcttgcttcagaacatcagaaaacaaccacccctgatcctatggatgacccctgcttcagccatcggagtcgccgcaaactggccaaaatccagctaccagagtacatcctggactttggctacatcatccttggcgaagtccgaacccacatcatcaagatcatcaacaccagtcactttccagtgtcattccatgcagacaagcgtgtccttcatgagacaggattcagtactgagctagatcgtgtaaagaatctacctcattgtgaaacggaaatatttgaagtgagatttgacccacagggggccaatcttcctgttggaagcaaagaagtcattctgcccatcaaggtggttggagggccaacagttcacatctgtctccaagccaaggtgaccattccaaccatgactctctctcgtggaaaagtggactttgccacaattcagtgtggacagtgcctggtggaaactattcagctttccaatcatctccaagtcccttgtgaatggttcgtccagagccaaaagcctgttgacaagctggagaaacacatgccgaagtacttaagacagaaactacgcgctgaattaaagccaaagacacggatcttcgaaatccagcccatttctggagtcttggatcctggtgagaagtccaacgtgcaagtgaaattcatgccaaaagaagagaaattctacagccaaaccctggtgtttcagattgcccagagtgctcaaaagcttaccctcctggcacgtgggcaaggtctagagccacgcctggaatttagtccttcagtcctggatctggggccactgctactttgtgcacctggagacgaggccgaggtgatagtgaagaatccctgcaacttccccattgagttttattccttagaatttgatcagcagtatctcatagaagaaaagcagatcttgcggaagctgaagggctatgattcctacaacaccctgctgctgcctccccgcaaccctggggagaagctgcccccagaactgtacgagtacttcaaagagataaagaagtcaaaagaggagcagatgagggcgaaatatctggagaatctggcacaggagaatgaaactggtgccctaaaagcagggggtgggcattcacacaagcagaagacgagcccctccatagtcctcaggccaaactccaatcgcagagctgtcctgtgctctcagaattgtgccctttctggcccaccacccctgagttatcccatcatctgcccaggggctcttgtgtgcttggccataaaggttcctcgctgacttgtgggactgtgtcacttatgaggatgcatcttctctttcctgcttctctgtaacctcatcttagaaatgtacccaccttgtttttacttgctttcatctgtgtaacagtcatacac

SEQ ID NO: 470490 - DNA, 596 bp, Homo sapiens
tttccctgcttttttggtctggaatgtccttgtccccatctttgcctactaatattctcttgcttcttcaaacccatttccttgaaaacttcccacatcacccttgttggaacccattcatcccaaagtcgctctttcaaagaagctggtatttctgttgcaaaattattttcctctgctctgacctcctctccttccttcacggactgctctatggcagccctgatgcagagctcacgggcccggatccctgggatgttgttgctgttggccacagcttccagcacaatggaaagctagaagagacaaggaaacggattgtcccccagatcctccaagaaggaacacagccatgctcacccattttagacttctgtcctccagacctatgggagtataaatttgcattatgtgaagccatgaagtctgtggtcacttgttatagtagcaacggggcactaatactaactacacaccggctcatcccttgactggtttatggttaggaaaatattccttgagaatatttagcatgtgatggaagtttcttttcaatgaggattcacactgcagcattgtggtatgctttcttctac

SEQ ID NO: 470491 - DNA, 1197 bp, Homo sapiens
ccctgttctctcctccagctccacacttctcccactgacctgaaacagcttttgctctccctgctgctacacttactttgttctttctttttatgcccaagaaagctctgcccaatgtccctccacctggaaatcccaggcagcagaggggtgaggcatgggggcccctgaactgttttttctctgcctggtttgatgaagggagcaggagaggctggcaaaggaaatgcaagaaaagaagctacagcaggagctggagcgacaaaaggaagaggatgagctgaaacggagggtcaaaaaaggaaagcagggacccattaaggaggagccccccatgaagaaatctcaagcagcaaacaagcaggttcctccgctcaccaaagtggatgtcaagatggagacaatcgaaaggaaaatatctgttagggaacaaacaatgtctgagaaggaagagctaaataagaagaaaaggaacatgggcgatgtcagcatgcatgggcttcctcttgtccaggaccaagaggacagtgaaggggacatctcaaaggaccccgacaagcaactggcccagaagtttaagacctatgaattgacactgaaggatgtccagaacatcctcatgtactgggaccggaagcaaggagtccagctgcctcctgcagggatggaggaagctccccatgagcccgacgaccagcgccaggtcccctcgggtgggcgcaggggccgcaaggaccgggagagagagcgcctggagaaggagcgcctggagagggaggaggcggagcgggagcgcctggagaagctgcgagacctggaggagcggagcgactgggagggggaaggggaggaggaccacgaagagaagaaggagaaggacctgggcgtacccttccttaacatccagacaccagactttgaaggcttgagctggaagcaggccctagagagcgacaggcttcccaaaggagagcaggtgggctgtaacctttactgttgtgataatggctattagtctagaggcaacatgcttattctgaggcaggaagtagctgttaaattttcaaaccatttgctctggaaattgctcattcattatatatgagagcaggatgggaaaatgctggaggaataaatgttttctctctcaggttatttttcacttctctcttcattcccattctcatccccagtccc

SEQ ID NO: 470492 - DNA, 1997 bp, Homo sapiens
aggaagtagacagcaagcagatggggataactggtttagtggggggcaaacagaaaatgaaagaaaagatagaccaagtcttcgagagtcagaaagacaagcgtcacatggccttaaacaggaaggtcctttctggggaacctgctggaaccatttcccagctgtcagatacagacctggacaacttcaacgggcagcactcccaggagaaattcaccagactgaatcacttccggtggatcgtgccagccaatggcgaggtaacgttgcaggtgcacttctcttctgatgagttcgggaactttgaccaaacctttaactttgagatcctaggaacttgctgccagtaccagctctactgccgaggcatctgcacttacccatacatttgccaagacccaaaagtggtatttcctcagcggaagatggacatgaagacaaatgaggtcatctttaagaagtatgttatgagcacggagacgtactactttgggccactactttgtggaaaatcaagagataagtacaagtcatccttattcccaggcaacatggagacgctaacaatcctgaacacttccttaatggtggtggaggcatccttctattttcagaatgatgtcaaagcaaacacgtacttcctggaacccaacaccatggtcctgaaacccaatgagaagcagatattaaacgtatgggcctaccctacttcagttggtgtctttgaagacagcattgtctgctgcatcaatgacaacccagagccagccatcttccaattaagctgccaggggatccgcccggaactagagctggaacccaggcaattacattttgaccggctcttgctgcacagacaggaatccagggtagttcttctccgcaatgtcacgctcctgcctgtggcctggcggatcaccagcctggagcacttgggtgatgatttcactgtatccctgatgcagggaaccatcccccctgaggctgagtacggcctgcacctgtactttcagcccaccaagcctgtcaacatcaagaaggctattcggttggaggccacctgcagcttctctcacctggacttctacagaggtttcctaactggcttccctgttggcattcgccacagtgtccagagggatctttacaatgtcattcagacagttgctggatcatggggagtccaggggttcctgtggtggggatgcacaggaggcaggcagcaaggggatattggagaggtcatcatgacagctgcttaccaactggttttagatgcagaaaatcttcttggtgttgttcagattgaaaatatcatggtctttgcagaggcatacgacatcgccttggacatcaccttccccaaaggagctgaagggggactggattttgggattgtcagggtcacagaggaggcgaagcagcccctgcaattgaagaaccgtgggaaatatgagatcgcgttcagcttttccgtggactctgtagggatttcaacacctaatataaattccatgatctcagtccaacccaaaaagggttcactgaccccaacagaaaaacccagaaatgtccaagttttcttccatgcaaaaaaggaagtgaagattgagcaccagcctgttctgcgctgtcagattattgagcccaatatttcagaaggaggtgagatcattgccagcatcccaattaagttttccgcgaatgcagtatattccaaatacaacatcaccccctcctctgtcatcaactttggagctttgatctgtggcactcgtaaaagcaccaccttcaccatagaaaatcaaggtgttactgacttcaagttcgccctttataagctgacaggggagagccccattcatcaaaagaaagcgtaagacaaatatttacttaactcattccattccctctttaatttatgctttatattttataaagagctttcgtatatcttacttaaattcacccaatcccgttttgtgggtgagatcagt

SEQ ID NO: 470493 - DNA, 599 bp, Homo sapiens
gctgccagtaccagctctactgccgaggcatctgcacttacccatacatttgccaagacccaaagcagcctctcctcaccttttcccctcctgtgttcagagtggtatttcctcagcggaagatggacatgaagacaaatgaggtcatctttaagaagtatgttatgagcacggagacgtactactttgggccactactttgtggaaaatcaagagataagtacaagtcatccttattcccaggcaacatggagacgctaacaatcctgaacacttccttaatggtggtggaggcatccttctattttcagaatgatgtcaaagcaaacacgtacttcctggaacccaacaccatggtcctgaaacccaatgagaagcagatattaaacgtatgggcctaccctacttcagttggtgtctttgaagacagcattgtctgctgcatcaatgacaacccagagccagccatcttccaattaagctgccaggggatccgcccggaactagagctggaacccaggcaattacattttgaccggctcttgctgcacaggtcagagttctagatcatgtcaggactggaagggaatttaaagagc

SEQ ID NO: 470494 - DNA, 888 bp, Homo sapiens
atcccaccactgtccagggtgacatcttgcaaagcttcagtaaaatgtcacaacctggtattgacattgacgagtcaagacacagaacagatcccttgccgcaggattcctcatgtgacccttttgttgccacaccctttcccttcccccaagcaacacctcctcaccctctggaatccaatactttcctctgtgtctatcattttgtcatttcaggaatgttcccaattgatattttcttcactccaaagcagcaaggagatgtgaactttaatttgatctgcaatgtggaaaagaaagtccaccctgtgacattaaatgtcaaggccgagggctacactatgaatgtggagatcaagtgcaaggacaggacaggctccatcactctgttgactcccaaccagactaacatcatcaacttctatgaggtggagttaaatgaatgtgtccagtgtgaattcaactttatcaacactggaaagttcaccttcagcttccaggcacagctgtgtggctccaaaaccttgctgcagtacttggaattttcacccatcgacagcactgtggatgtaggacagagtgtacatgccaccctgtcttttcaaccattaaagaagtgtgtcttgacagacctggaactcataatcaaggagcaaacaagaagttcatttaaaaatttaaaaggagagactgggaagaagatattcatggggggctctgaaaagcttcagcatattccctggaatctagacagccatgcatgtgtaagatgtgtatacctccaggctgttactgctcaggaaagacctgagaaggccctaagctcttacctctgactaacctttgggtcccaggaaagataaagcagaattggcaactgcctgcctg

SEQ ID NO: 470495 - DNA, 600 bp, Homo sapiens
agtgattgattagatgtgtgaaagcaagcatgtgtggagaggagaaagaaggagaaggaggatccagggatgatgctggtggtgatggtggtggtggtggtgatggtggtggtggtggtggtggtggcggtggtggcggtggtggcggtgttgtggtggtggcggcagtggcggcggcagcagcggtgtggtggtgtggtgatgtggtggtgatggtggtggtggtggtggtggtggtggcagtggtggcagtggtggcggtgttgtggtggtgtggtggtggcggcagtggcggcagtggtggtggttgtggtggtggtggttatgatgtggtggtggtggtggtgatggtggttgtggtgatggtggtggtcgcggtggtggtggtgatgatagtggttgtgttggtggtgatggttgtcgtcgtggtcgtcattgtggtggtggtcgttgtgattatggtggcagccaggatgatgaagacagtgatgctgatggtgaaggtggtgatgatatgctggtggtcgtgaaagatgtgattatgattgtgcggcgaggtgttcgtcgcgtagcagatgagagatggtgttggcgatgatg

SEQ ID NO: 470496 - DNA, 2283 bp, Homo sapiens
attggctaagcacttgaatttttttagataagaacacaggtgttatgaaaactactcctaaagccaaaatgggaaaggaaaatactcacatcaacattgtcatcattggacatgtagattcaggcaagtcaacctccactgcccatctgatctacgaatgtggtggcattgacaaaagaaccattgtaaaatttgagaaagaggctgctgagatgggaaagggctccttcaagtatgcctgggacttagatagactgaaagctgagcatgaatgtggtatcaccattgatatctccctgtggaattttgagaccagccagtgctacgtgactatcattgatgcccctggacacagagacttcatcaaaaacatgattacagggacatctcaggctgactgtgctgtcctgattgttgctgctggtgttggtgaatttgaagctggtatttccaatggaaccacactgcttgaggttcttgactgcatcctaccaccaacttgtctaattgacaagcccttgcgcctgcctttccaggatgtctacaaaattggtggtattggtactgttcctgttggccgaatggacactggtgttctcaaacccagcatggaggtcacctttgctcttgtcagtgttacaactgaagtaaattgtgttgaaaagcaccatgaagctttgagtgaagctcttcctgggcacaatgtgggcttcaatgtcaagaacatgtccgtcaaggagattcgtcatagcaacgatgctggccaaataagtgtggactatgcccctgtactggactgccacacggctcatattgcctgcaagtttgctaagctgaaggaaaagattgatctccattctggtaaaaatctggaagacggccctaaattcttgaaatctggtgatgctgccatcgttgatatggttcctagaaagctcatgtgtattgagagcttctcagactattcacctctgggtcgctttgctattcgtgatatgagacagacagttgctgtgggtgtcatcaaatcagtggacaagaaggctgctgaagctggcaaggtcaccaagtctgcccagaaagctcagaaggctaaatgaatattatccctaatacctgctaccctggtcttaattggtggaagaacagtctcagaactgtttgtttcaattgcccatttaagtttaatggtaaaagactggttaatgataacaatgcatcataaaaccttcagaaggaaaggagaatgttttgtggaccactttgattttttgttttgttttgttttttcgtgtggcagttttaaattattagtttttaaaatcagtacttttcaatggaagcaacttgaccaaaaatctgtcacagaattttgagacccattaaaacaaaatttaatgagaaaaaacacacattattactagaccccaaaatgatcacaaatcaaatcattgcatggattccattctggttgtcagggagatgatccagaatgtgctagtatttgtgaacacactaaaattttaataagttattgctgagcacttataaatccctaagtgtaatctgcaaactttcagggagactttaatgatagttttagactcttcaagacaagatctgtcttctagcatgctccagctttgccttgtctctggccctttcctgttccttgcagcagcctgaattagttcattttcatactgctatgaagaaatacctgagactgggtaatttataaagaaaaagtggtttaatgaactcacatttccacatggctggggaagcctcacaatcgtggtggaaggggaaggaggagcaaaggcacatcttacatggcagcaggcatgagggtgtgtgcaggagaactagctgccctttataaaaccatcagatcttgtgagacttattcactaccatgagaacagcatgggaaaaccagccctcatcattcaatttcctcccactgggtccctcccactacacatgggattatggaagctacaactcaatatgcgatttgggttgggacacagccaaaccatatcacagacttataatcaaatgaacaattgtaaaattgttcatttacatgcttgagagtctggactttatttttttgatgtttagtacagagatggataccaattaggaactgagtatatttaacaaataacttcaatttttccttttataccaaagttgtatatgtttacacccctaattctatgggaaaattgggccagtttcactcttggatggagccagctggtaaagttggag

SEQ ID NO: 470497 - DNA, 534 bp, Homo sapiens
ctgcccaataaatatcagtagttatgagatgccgcaaacacaggggtattttgtcagcctggctgtgcatggaaatggtggtgtggggttccctgggcacaggaagctcagcccagggcagcgcacagtgcatcgaccaccctttcctggttccacagacgctgggcatagagccagtcctctaagctttggcctccaccaagagttcaggcttttccagcacaaaagccagagactagcagtgagtcacaaacccatctctcctgaaagtttctcagcaacaagggagacaaggcttgggttgactgagtggagactaaaggcaggagatggtgtttccaccttcttgtatcatgtacgttgtggaacccaatcacgcattgaggtcaactcaaggctcccaagtgctgaatttgctagctcagcaaatgagaaaaggtggtactggatccaaagagaagaggcttagaggagatgagcttctcccctacagtatagaattatttattcaaatcactgatgtaggaggttgac

SEQ ID NO: 470498 - DNA, 543 bp, Homo sapiens
tacacatctgaaatgaaggaggtgctacgtatgtatttgttgaatgaatggaaagatgggtgatcttggattcttcggctctcagggccagaaagaactttatggtcatcttgttcagctccttcttcccaagccctctgcagaatgcctgataatgagttgtctggcattttccaattctggaaaagaatttggaactccagattttccagttctggagttgtcaggctccatagggaaggggagctcaccatcgccagaagcaactctcccttgcattgtcaagaagctctctgggttgcaagcaaagcatttaagaggtgacttcgatgtgttaaaagcattcagttgtaaaagagaaacagagcataaaagtttggaaaatttgcagactgacaatgcaatagaaaagaaaaacccattttctgaggagaaattcaagctggaagcagaaatttgcataagtaataaggagccaaattataatcttcaagacaatggggaaaaagtctccagggcatgtcagagacctttgcggtagcc

SEQ ID NO: 470499 - DNA, 562 bp, Homo sapiens
ttacccctgagatgaggtccagaaaggagctacatcccacacagatgcagaagagacctacaagaatttccctcccagtgcagcagagtcgaggctcagatggaccactgatgagggagctggtctacagtaaaccacgtgagaggccacatgcagaaccaagatgcctcagccaacagctgacaccagctgccagacatgtgactggcaaattcaaagcctttgaattcatgaaagaggaagatttttctcgtacaatcttaggaggtagggaaagtgcccagcagagagctccttcaacacggaaaacagaggcagcagcgcccccaaggggccagcaaggtggggcagcggcgggagtgctgagctccggaggggagctctcctttcttcaacaggcatttattgagcacctgctggacagagatgcttacactgaaggcagagaaagagaacaataaaatccacaacttttcaggttgtgaaaagttcttggaagtaaaaaaaaaaaaaaaaaaaaaagaaaaaaaaaagcaaggtgctgtgcttttgtgctttcatc

SEQ ID NO: 470500 - DNA, 563 bp, Homo sapiens
aacaagattcaaagatgatttttcttttccttttcttccaccccgtcttaccttccactttgattatctcccggcatccccagccctctgaatttggagaggaggaagagaagggaaaaccagagaagctcacgacatggaaacagaagaatgagcaggaggccgatgagcagatgggagttatttttaaaaagaggcagcaaaaagtcgtgggaggagaatgctacagacaagagagctctggagctacaggaattccttcacttgcaatggctaacagagctgagctgaaattttactgcttaacagcagatgtcagtgttggccattactcacaataccgtgaaactaccctatataccaagctactggttctggaaaataaattaatggtaaatttgcataagtcagtacaacttttacttgatgacagaagcctctatactctccccctagggatgtttcataagaacatggaagaacagatctccagtcttctcagaactccttagaaatggttattcttattgtgggatagaaaaaactgctctgaattcttaaac

SEQ ID NO: 470501 - DNA, 769 bp, Homo sapiens
atcacaacaggatgctagaggaaagccttgatagccacgtagacatggacacaaagattttcttaggaaactctcatgcaggcaacaactgcagaaatataactttttcaggtcccccagctgcaggtctgatggagtttgctggaggtccactccagaccctgtttgcctgggtatcaccagcggaggctgcagaacaagctgtcagacagggacgtttaagtctgcagatgtttctgctgccttttgttcacctatgccctgctcacagaggtggaactatagaggcagtaggccttgctgagctgcagttggctccgcccagttcaagcttcctggccactttgtttacctactcaagcctcagcaatggcagacgacccttccccctgctgggctgcagcttcgcaggtcgatctcagactgctgcgctagcagtgagcaaggctccatgggcatgggacccacagagccaggcacaggagagaatctcctggtctgctcattgctaagactacgggaaaagcacagtatttgggcagaagcttatggatgcttattttacactttggattaaaatccaatactacttattttgctgcttaaattattccatttttgccattaggagctctttcagtgcctttttgatatactcccccctttttttttttttagcactttcttctttcctggcaatacaagatgtcccaggctcatcttctattttttgtacccctgtcctagaataattcatttctctgaggag

SEQ ID NO: 470502 - DNA, 1031 bp, Homo sapiens
gcatccagcatccgcatccagcatccataaccagcatccacatccaccatccgcatctagcatccgcatctatcattcgcatccagcatccaacatccgcatccagcatccagcatccagcatccgcatccagcatccagcatccgcatccagcatccagcatccagcgtctgcatccaatatccagcatccagcatccacgtccagcatccgcatccagcatccagcatctgcatccagcagccagcagccagcatccagcagccagcagccagcatacgcatccagcaaccgcatccagcatccaacatccagcatctgcatccagcatccaggacaatgctgcaggtccattatccttggcatctcgttctgctttccacccccgtcttttgctgtcaggaagggttttcttccaggctgccaaccaacctctttgacgatttgtcttggttgttgtgcaatggtatgtcacctctttccactcaccctttgaaaacagcctatttaaagaaagatgatttggggttagagtcaataaaatcaggtggtaagccattcttcagtatgtttggtcttcagcaggtgggctgggtggccagggagacattttttactgaccactgtctccttgtcagcagtgcaagcctgagagatgctctgtggctgtgcatgcaaaaggctccaagtgacttaaagtttatcatgttggaagtcagttaccaccagagaggtacttttcaagcagttcatcgcagagtacagagcaaagttgctggcacctggggggttggtggggggtagttgtctcatggacccttgattcatgtgcttgtccacagcttagattttgagcagtaagaaagcatagcctgaagtgccccaccaagtgaagaaatgtctttgaagttccatattttaacttgaaaatttatgtgaattttattttctgctcaacagtatgccatttttaaatgtaaaattatttttaaaattattgatcagacaaaaagtagaagccaaagaaagct

SEQ ID NO: 470503 - DNA, 696 bp, Homo sapiens
agtcaaagccagcatctctatacacgttgagatttagcacagcatgcaagcagctgagctgatgtcaacttctgaattcaagaaggcaaagggatggctggtgcttataactggagataaagatgacacagggaatgatgatggtatgggtttcatcaagagggcacttactgtgatggttaatactgagtgtcaacttgattggattgaaggatgcaaagtattgatcctgggtgtgtctaacatttcatcaccctgttatctctggcagcgaagacacagagccctgacagagtggagaaagaagagcttcaaggactgctgctggggtcaggctgccatcctcctaggggctgtgcatctcctaggaggagcaaactcgggtccctgcctctgcctgcctcctcacctcccattccttcctccagcagttctatgttcccagcactcagcctcccctgctgtctcagtccctggaggggcagagacaccctctccttcctacgtaagcattagtcattctccaggagagcgctatgacaagatcccatctccgcagtgcccagggaatccgacacctgtgagccatgtgtattttcttccaactcttggtcatgctgtgaatgttattaaaatgccctatttatcagagtgataaatgccctatttatcagagtgataaaatgccctatttat

SEQ ID NO: 470504 - DNA, 606 bp, Homo sapiens
tgaattctgcaactgctcaggggagtgaaactgaccaaagccatgctaatgcggcctcttagcaccttcccatccaggactaatggtaattctcggaaagtaaatacagcccttcctgagcccccagaagccatttgctataatgtggtgtggaatgcagtggtcatcagtgggaagtatttcaaggacaggtggcagataaaaccagacacaagcaatcagcagctgcagttacctgcacacctgcgcatgaatctgcatctgcagaaggtctacaaaagagacaaggagcctgggaatctgaagatgctgcatggagaagtgagaaagctatttggaccaaaggttatggtcagggaaaccagagactactgcttcaggggtgggaccaatgcggacgatgataggaaagttcatgatgagattcaggtggaggcgaatcttcactaaagaagggaggcagaggaatgtttacttttatgtttttttcccactctaccttgaatgcagaagttgacactaagtggagataaaaggcagctctataaaaaaacactagggccatttctgccaccttgctgggaagaacaattcagtgaaggtaga

SEQ ID NO: 470505 - DNA, 530 bp, Homo sapiens
cagttccttcagagcatctgtggattctctcagctttcctggagctgcaagctagtcctgcctcctatctgccatcttcagaacatgtcacaggtatcagtttccattggagttcttcaactaggaagatgtagcagcgacatctttatctgtcctcacttaccctgggcaatactgagcgggcccagggactcatgctacatgatgtatgtatctgaccgttttcctgtccatgcctccagcaggcaaggaagagactgggctccctccggatgtgaaaaccaaggccttgttacagtgatgagccaatgccacattggaactcctcatggccagttggctccctcacagcatggaggcttggttccaaggagcagtgttccaagaggtgaagatggaacctttagatcttttaagacatggtcttgcagttacacatctccctcctatcacattgtattggtcataagaggtcatagggcaaacccagatctgaggcaagggagcacagactccacctctccatgagg

SEQ ID NO: 470506 - DNA, 664 bp, Homo sapiens
gcagatgtaatgttgcaggaccatagtgtcaatcatccatgtcccattgaaggatacaacctgatggaagctgggaccgagagctttattatgtcctgtggtcaccggcaccagagtggcagggaagaactggaccttggactcaagaagttcatgatgagaagccaaagaaggctgggaagtgctgccgtgggtgaaggcaaggtgaggggggaggaaaaaggtggacctgctgggaagtccggaggtctacatccggaggtctacatccggaggtctacatccggaggtctacatccggaggtctacatccggagaatgatgtggctcggaaaaacacagtttttcctctgcttttacctcacaacagtcaacccagaagaggtctgtgaccccacgtgtggattttcccccacacaccaagcaagcaagcaagcaagcaattctgcagtggacaccaactgcacgaccaccaattccattctgacaccatctacctggagatagcgtcagattccacagcttgaggctgggctcaagccccagggcattttacctgtgcctctaaccggttggctacaaatcgggcttctcacaaccccctcctttaagtttgattaatttgcagaagcagctcatagagctcaggagaatacttaggttt

SEQ ID NO: 470507 - DNA, 1073 bp, Homo sapiens
ttgctttttccgagtgttcttaaaacacgcctccggagcagtgtgaagaagaggcgagaacgacccccagaccgaccaaagcccgcgcgccactgcatcccgcgtccagcacctacgtcctgctgccgtcgccgccaccaccatgcccaagagaaaggctgaaggggatgctaagggagataaagccaaggtgaaggacgaaccacagagaagatccgcgaggttgtctgctaaacctgctcctccaaagccagagcccaagactaaaaaggcccctgcaaagaagggagagaaggtacccaaagggaaaaagggaaaagctgatgctggcaaggaggggaataaccctgcagaaaatggagatgccaaaacagaccaggcacagaaagctgaagaacaagctaagttatacaaggattttaagcttattccaatagaaatgagtcagattcgggagcctcgtcccggcccacaggagggtgagctgggaccatccctggtgccacatttctgggagctgctgaatgatctgtatccatctctttctctggttcttcccggggcggggagtggcggggccctgtgcctgggtttccgcttcagctcctctgctcactcttgctatctaaaatcacttcccaatcccagcaacatgcccaaggcaggtagtcccgctctgaatgggactggtttggctggacccacagctacctcaataacatccatagccatggttttacccagtgtctgctctgtagatactcatcgccacactagctccattgaggttaggcgagagcacgtgaactgctttagctaataagcacgtgaactgctttagctcataaaataaatgtattattcctagccagatctcctttgtcgtgtcatttcttctcaaagttttcattctttgtctaaaaagtataaaagcgtcttgctttggccacttcagacttcactctcttttgaagattcctgtgtacatgtatagctaataaaatagatatgcctttctcttgttaatctgcctgatgtctgtttggtttctggatccagccaaagagctcact

SEQ ID NO: 470508 - DNA, 688 bp, Homo sapiens
agacttggccatgggtcatacagtctgtgaagattattgccagctggcttctgcaactgggagccgccttcccacaaagctggaggctctgaaggttggaagtcagaatgttgagcatggaaatgacaaagtagtagaagaggagctagtccctaagataaagtgggtactattggatagaaaaataagagagagtagatgttgggcaaggaaatacaagaggtattcacaacaacaacaaaacaacaacaacaacaacaactctgaaaagatgctcagatgcttggaggcctggaagctgaggcctatttcaagggcctattatgaaattagcacatccattaaatcagcttccatggttccaaattcccagtcatggcaaccatcccccttcctgagccagacctaccgcttcctttcagaactgctgacactaatgatggatgagggtactggagaacaagaaagtcggggctctcccctccggcccctaggtcagaagcagggacttcccatcgccagacttgctagagaagattgaaatttaggaattagtgtcttatgattgctaagggtgatggtgtctaaatgtttcttagcaacatttagacacaatcaataagcaatcagtggttgaaatcatgtgaatgaacacttagaaatctgaggactggtattcttgattctt

SEQ ID NO: 470509 - DNA, 626 bp, Homo sapiens
ctccccaagttaagaaaatgagatgttttatataagcgggtatcaggccggtggtgctgaaggcttgagctactccacacccatagaaagcggtgaaggcaggtccgtgaagctgaaagcaatgagagctagaaccagaaacctgggcccctctgctgcagatatgctggaatttgctggaggtccactccagccctgtttgcctagatatcaccagcggaatctacagaacaacaaagactgctgcctgttccttcttctggaagcttcgtcccagaggggcacccgcctgatgccaactgaagctctcctgtatgaggtttctgtcgaccgctgctgggagccgtctcccagtcaggaggcgcaaggagccagcaggtgggaaagtttaagtccgctgaagctgcgtccacaggcgccctgtcccccaggtgctctgtcccagggagatgggagttttatctataagcccctgactggggctgctgactttcttttagagatgccctgcccagagaggaggaatctagagaggcagtctggctacagcagctttgctgagctgtggtaggctccacccagttcaaacttccacgcggctttgtttacactgtgaggggaaaacc

SEQ ID NO: 470510 - DNA, 613 bp, Homo sapiens
tatttgttttgttttgttttcttttgttttgttttaagattcttgattttttcgcaggtggcaggggagatacgagagactggagacgtccagcttcagagcaggaaccttagttgcgccagcaacgaaaaacagaactaaatatgggtgatgttgagaaaagcaagaagatttttgttcagaagtgtgcccagtgccacaccgtggaaaagggaggcaagcataagacagggcctaatctcttcgggtggaagacaggtcaggccattggattctcttacacagacaccagtaagaacaaaggcatcacctggggagaggatacactgatggagtatttggagaatcccaagaagtacatccctggaacaaaaatgatctttgccggcattaagaaggaggcagaaagagcagacttgatagcttatctcaaaaaagctactaatgatcaatttcaagaaagagagtgggtaaaaacaattttagttcataaaagattttggagaatctacatttgtattttagaaagatcatattggcttcagcaagaaacatcatagaagaccagtttggggaaaggatgtatgagactggaggttgctcaagcctggaa

SEQ ID NO: 470511 - DNA, 493 bp, Homo sapiens
caataaacacttaccgaaagacatggatgaacctggttccaggatccagaagggcctgaaagcatcagcggcaagctgggctcttagaatttccgctgatggaactcaagattttcctttatttccatgcttggcagggagcagggtgggtgtgtctgcaggcatccaagagggacccctgcttcatctcaacaggtatcagtggccttatatgcctttagcatggagatgtaaccacagaagcatcccaaactggccctactctgttgataacagaacattcactgtcagaaccaagaagatagacatgtccagagcccaggagaagaacctgaatgctggaaccctttcagaagaaaaggttcctctgagcccttctcagaaggggtctgttggccaggaaaatccagtgctgaaatttgcttgaacataccttactgtaaatggtcaaatttgaagacctccaatcagactctgccaagccaacattccc

SEQ ID NO: 470512 - DNA, 1055 bp, Homo sapiens
aagagacactagaccttccagaacataagctcacactcaaccatggttaagatgaaggaaaaaacttttaaaaacattgacctaaagcttccggccaggctcctagtgactgctatctataagaaggtctccaacagccataaggcactgagcatagcaccgggcccacaggctctaaagaaagagggcctgagggatccccaggattccactcgctgctctggttgttgggggcacaaaccactctcagcacgaaagtccccagatcccacccaaacctcaggaggggaggcttttgtcatgcagaggggtcctgatgagaagcccctctcctgtgagcagcagttgacaatgttcagcgatttgtttaccatcgtcattattgttgctgtacaggagcatctggaggcagccatcagtgggctgaacatcgtgatgctcaggttggccactggtcaggttgggtttggcagaggttggccatcgtagcggaattcacttatcaggccaggtccagggacaagtaacaggacattatgacagatgcttcgtggagctggaaatattaaaagcaacagccctctgctgacattcgtctccagaacctggtaagacttgttcaacacgctgctgtctccagacttcccatcagtccttgcaggcacccttggcctgatgaccaaagttttaaaatagcttcattgttttaaatggtgccattttaaatatgaaatatatatatatgtgtatatatatatacacatacacatatacatatatatgtatatacaatatatatgtattttaaatggtaccattttaaatgtgaaatatatatgtatatatatttgtatatatgtaatatatatttcacatttaaaatggtaccatttaaaatacatatatatttatttttaatacatatgtattatttaaatatatgtatatatgtataaatatacatatatatttcacatttaaaatggtaccatatgtatatatgtgtgtgtatatatattttttttaccaaattttaatgataaaggcataatggt

SEQ ID NO: 470513 - DNA, 1238 bp, Homo sapiens
gacatcctcctcctgctcccgctttccttcccaattcgaagggaaaaggtgacagcctgctggcagccctcacagccctcgctctctctcggcccctcctctgcctgggctcccactttggcagcacttgaggagaccttcagtttgctgctgcactgtgggagcccctccctgggctggccgaggcgggagccggctccctcagcttgcggggaggtgtagagggagaggtgcgggctgcaaccagcgctgcacgtggtgcttgcaggccagcgcgagttccgggtgggcgtgggctcggcggccccgcactcggagtggccggccagccccgcggaccccgggcagtgaggggcttagcacctgggccagcagctgctgtgttcaacttctcgccaggccttagctgccttcctgcgggcagggctcgggacctgcagcccgccatgcctgagcctccccgcctcctccgtggactcctgtgcagcccaagcctccccgacgagcgccgccccctgctccatggcgcccagtcccatcgaccacccaagggctgaggagtgcggcacacgcttcactcctgaagccagcgagaccacgaacccaccaggaggaatgaacaactccagacgcacggccttaagagctgtaacactcaccacgaaggtctgcagcttcactcctgagccagggagaccacgaacccaccagaaggaagaaactccgaacacatccgaacatcagaaggaacaaactctggacacgccacctttaagaactgtaacactcaccacgagggtccgtggcttcatccttgaagtcagggttgctctagagtttgcaaatatacagttctgcagaggtggaagctgctggctgaataatggtgacaaaactgggaatctttccacacaagtggcagacaccctggcctataatgattccctgaaaatgatttttccacaagccctacggagaatcactggattattttgggaagggaagctcgccaagttcaaggtgaaggatgaacatctgcagccacaggaagaggctgaggactgtcatgaggacaggaagggtacagtctgtcaccagatggaaaagacttcccacgtcttacacatatttttcaccagttgagtgttttctgtggacctggcattgagctgagcagttgatacacctcagttactcccatgtggtcatgacaatgaccatccagcgtagaagcactt

SEQ ID NO: 470514 - DNA, 635 bp, Homo sapiens
aacaggaagaaagagtagcccactttctggaaactgctgatggtttatgcagccagggtgtcatgttcacagcagaacaacaagaggggcactggacaggtaggcatgaccagataatgaaaggacttcgagggaagggcaatggggagccagtggagattgtagagagaggaaagacatggagcctggggcggcacctgagcaaagacgaaggattcgaacttacagcccagcaatccattgatggaagaacctaccctggcaccctgtctagtccctgggtgagtgatgggggctgccatcactgcgagagtgatgcaggaggaagaccacactgtggagttgacgagacagtgaatttacttgtggatgagttaaaggccatgaactgggacctaggagagaaaggatggaagaaaggagatattaaagatgcagaagagagaaaggaggagggagcgaggcatccctgagaaggtgggaaggaacagggagagggactgcccatggccgggtgggatcgtgcctgcacacagagcagagtgtacagcagctgagaacgagttgtgctcccgcattctgactgcccatcagtgcactctccctcccatagcctgggtgagctttataagtga

SEQ ID NO: 470515 - DNA, 582 bp, Homo sapiens
agctcatctagagccattcacatcatggtcacaggatttcagattttagttaaattagaagataactgtcactccaggacatatctagccagaagagtatacccaggggtctcccccatgaagttttcttgtcatctccattgcctggtgggctcgggtgcagaaatagaaggctcgaggctagtggctgactgcaataaagctcttgtctttgcagcattgctttgggaaaaaaaggatgaaacggatctaactgtagcaatgccgctgcaggccttgcagttttcagtgcatctcattgatttgctgagcatacttctcagatgtaatcgtttccccgggattcagaaagcggtagtggatcagaccggcagcagaccagcaaacagcaaggtgcaaagtgctttggagcttcttctcagttcaaccattgagctggtcgtcttcagttgtcatatgacatccacttttcattgcatgtcacaatctgattgagaaatggttcgttgttgcgtagaataagagaagacgacatttcaaaatgacgatttgtttttatttttgctcagctcatgaggcacc

SEQ ID NO: 470516 - DNA, 1438 bp, Homo sapiens
tccctgcacacgtgaggagccgcgcgtcccctcccgggataaactctggtccctgcacacacgaggagccgcgcgtcccctcccgggataaacgctggtccctgcacacacgaggagccgcgtgtcctctcccaggataaacgctggtccctgcacacgtgaggagctgtgcgtcccttcccgggataaacgctggtccctgcacacacgaggagccgcgcgtcccctcccgggataaacgctggtccctgcacacacgaggagccgcgcgtcccctcccgggataaacgctggtccctgcacacacgaggagccgcgcgtcccctcccgggataaacgctggtccctgcacacacgaggagccgcgcgtcccctcccgggataaacgctggtccctgcacacgcagtggtgaggaatagatcagagatccggtgtccccctcatgtggtctctcccgaggtggcatcctgtgcaactgatgacatgtcggaaccggatattgacgtggacacagtcaggatggggagcacccgcgccccggggccattggccatcgtccctgctgtcctacagccccgagaggccaggtacgtccatgtgtcgtgcccattttacagacggtggagctcaggcctgggagacagactgacagtgttcggcactaactccaccccagcctttttccacctggccacactgtttactcgttcccgccagcagcatgggggctctgtcctccaggaggactggggctctcctcccagcaccaccacggccattgagcccagtgcccaggagaccgaggcctgtgattccaactcaagcctctttgccctagagccgtggctcagcttgaggagcattagggcccctggaggttgttaaacccacgttgtggggccccagcccccagttcctgatgcagctgttggggtgagctgaaaatctgctgcagagcctgcatttcagggttcccaggtggcgccaccagcttgagggggtcttggcgctattgtaacgataacagcagcggtctccagaaccttctgtaggcctctgcatgctcacaggttagaccactgagaccacccatggattttatgtagtagacacacagggtgggcctcgtgcccagtgttgtctaacatgctttgtaagtgcagacccgttcctcccagtgcctttggaggtggagattgtggtccttgttttacaggcagggacagtgaagggactgtgaccgctgttggtgccaggcatctggctgcagctcccaggctctcatccctttgctgtgctcctttgcagcttggagggaatgattttttatccccatcttacagtatggggaaggtgaggctcagagaagtcaaggacttctgtctggggtcacgtggctaggaagctaacagccaggatccgagctcagatttgccc

SEQ ID NO: 470517 - DNA, 719 bp, Homo sapiens
agtgatgatgatggggatgatggcggtgatggtgatgatggtggtgatgatggtgttggtgatggtgatgatggttgatggtgatggtggtgatgatggtgatgatggtgatggtgatgatggcgatggtgatgaggatggtgataatgttagtgatgatggtgatggcgatggcggtggcgatggtggtgatggtgattgtgatgatagtgatgatgacggtggtgatgatggttatggtgatgatgatgatggttatggtgatgatgatgatggtgatgatggtaatgatgacagtgatggtgatgtaatggtggtgatggtgatgatggtaatgatggtggcgatggtggtgatgattataatgatggtgatggtggtggtgatgatggtgatgatggtgattgatggtgatgatggtgataatggtaatgatgatagtgatgatggtaatggtggtgatggtggtgatgatagtgatggtgatgatggtgttggtggtgatgatggtgatgattataatgattataatgatggtgatggtggtgatgatgatggtgatagtgatgatgatggtagtgatgatggtgatgacagtgatgatgatgaggattatgagaatggtgatgatggtagtgataatgatagtgataattgttacatgtagacataagagttccttatggtttgtggctgtttttattaaaaacaactgcttt

SEQ ID NO: 470518 - DNA, 1093 bp, Homo sapiens
atgtgaaggaggtggacaaaggccagacagcagtgagctctgagggatgggaatcggctgcatcaacagcctggctggactggtggctgatggcagagattcaggtaccacggagaaggcaggagccctgcccagacgcaggcagcgtcccaagaatgggcttctccagcctgatgaccacatgtcaagcctggcggtgaacacactgccctgggctgtcatctgcctccagcttcctgcaagaggagtggtagggggagacgtgtatacctggggccctggccattcagagtgtgggccccagaccagcagcatcagcaccaccatagaaatgcagagtcttgggcccctcacagacttcctggaccagaaccttcattcgaacaagagtccaggggactctgatgcatgtgggcagggccgtgagggcacggagcagaggaggatggatgcgggtgagcgtcctcacaaagaagggagtgcaaatcgcaacctgactggatgccccaacaccagtgaggacgctggacacccccacatcagcgaggacgctggatgcccccacaccggcaaggatgctgaatgctcccacactggcgagaacgctggatggacgccctcacaccggcaaggatgctggacgccctcacactggtgaggacactggatggacgccctcacaccggtgaggagactggatggacaccctcacaccggcaaggatgctggacagacgccccttcaccagcgaggatgctgtcatcagagagacagacaaaaagaagtgtcaaagaagatgtggagaaactggaacccctgtatgctgctggtgggaaggaaggatgatgcagccccagtggaaacagtttggcagctccttaaaaggtaaaatacgcagttaccatatgacctggcagttttacttttcggtatatacccaagaaaattgaaaacgtgtgtcacccaaacacttgtacgtgcatgttcatcatagccccaaactggaaacaccccacatttcatccactgatgaatggatgaacaaagtgtgctccagccacacagtggaagattaactggacagaaatgggac

SEQ ID NO: 470519 - DNA, 1177 bp, Homo sapiens
ggaggaactccagtgtccacccggatcccgctctctcaaccctaggggaaaaaacagcgtgaccctgaggccctgctgggtttgcatcctgcctccagaggttcatttctgggtgactctggaaatgatgagacttccctgcgcccagtccccaccccgcacggggagttcacaccaattgttcttccccggggactcctgccaaccagggaacgtgacagttcacagtgaggggcccgaggctgtgggcagcaggtcccgctggggactctgggcaggatgccaccttcagatgctgccgtggccacagcattcgtgccagaccagcaagggtgtcctggacactgcccagatgctgaccccgtcatcaaagcagacactggacactgcccaggtgccgaccccaccatcgaagcagacactaccttgtcccctcccgccccccagcaagaagacgccaagccctgagagatttgcctgtgctcagcactgtgtggaggagcggcatgttttcgtgggcacagagacagctctggtgaggatgtaaaatagcgcaactgccacggaaagcagtctggcagttcctcaaacagtttaacctagagttatcacattttgtgctccccgccacactggatatctacccaaggaaatggaaaacatctgtccatataaaagcttgcacgtgaatgttcacagaagccatgttcacaatagccaaaaggttggaagcaacccaaatgcccatcaaatgataaatggttaaacaaaacatggtctatccatgtgatggaatattactcagccatgaaaaggaacggatcctgacacatgctacaatgtgcatgaaccttgaaaatatgatgctgggtaaaagaagccaaaccaaagacaaatattgcatgattcaacttgtatgaaatgcccgaatcatagacacagaaaacccgagtgctgagggatggaaggattggggattgacaggtaggggttcaggagtgatgaaaatgttccaaaactgactgtggtgatggctgcacaaccccatgaatccacgaactgctctttaaaaaaactttaaatggatgaattgtatggtatgtgaattgtatttcaataaaacagttaaaaacaaaagttaatggaaggcaagaatgtagaacaactggaactctcc

SEQ ID NO: 470520 - DNA, 639 bp, Homo sapiens
tcctcaccccaggggcgcaatgcccctggagggttttaagaagacgtttgctcctaaggattggaaacgaccatcggcaggggacgggttaaaccgattaaggacccccccccccccccgccccctgtgggagcagaggcaggcacgacttggtggaaggaggttcgaggcagcagggccctgcttcctgctggcgggaggatgggggccgtgccaggtgacagcacctgcccgggtggccgcctcttactatgaccttagtcctgggctcctacctgctccctgctggaggagactagtccaggccagggccagcttgactcctgcccgctgcttccgcacgcagtcgtgcccagccctgcggggcatctccagttccggccagaatgctggggaaggctttggtggggaggtggtgttctgccgggggccgtacaatccacccatcttcttgctacctgtcagcaagtggctcaccctgccgccactccagggcccatccatgatgtagcgtgttgatgctttgttccttcttacagctgaatcctattccattgtatggagagaccacagcttatctgctcatctgctcatccattgaaggacattgggatgttttctttcattaactgccaaaac

SEQ ID NO: 470521 - DNA, 897 bp, Homo sapiens
gtcacttgtgttactcttaaaatggagcttcctgagcctcgtcccagattaactggatcagccctgtgcctcactcaggaagaatcctcggaggagaactgctgcgcaagaggatttgccgttgtcagtgccggggctgtgggcatccctaaaacgtggacagaggaagcagagagaatggagtccaaacactcagatcctgttgtcaccccaccagggtctacccagcaacgccgagacactgaacagggccctccagggctggctgcatccaggaagacagcgctgctggcatttccgtgcatgagggtgaagcggcttcagagagcccacaggccaccctctaaaccagaggtctccaacccccgggccacggcagaaggtgagcagcagggctcccactgattctacgttatagtgagttgtataattatttcattagatattacaatgtaataataatagaaataaagtgaacgtggaagtgtacgagtataaaatgaaataaaaacattatatgcgtagatgtatagtgtgaatatatatcagtgtatgcttatacttgtgcatacccatgcatatgatgtaaaaatatatatagcggcaagcagatctgtaggtatgatcttaaatttggaaatcaatcaatcaatacatttatgtggagagttttgaaaatcacgatctggcaatccacgcaccacggggctcgcggtgatgattcctgggtcatgagacgatggcggcttcctgccctccctcctctcgttacactttcgatcttctgaatattttgcaatgagtatgtacggctctcacaatgagagaaacagctatttagcaataaataaataaataaaataaataaataatgttgcaaggacaagcagcgtttac

SEQ ID NO: 470522 - DNA, 523 bp, Homo sapiens
tgtccccagctggcgagcatgacgcgtacacctcggctgctttccacagggtggtgggccgaggctgctgtcatcccgggctgctgctaccctgctgctcccgcactctttgtggtcatcctcctgcattacagcccattttcaatcacgaagtgtgaccaggaggaggctggagaggctgtctatccgtggtttcctgctgttgaacccatggctggccctgacggaggacacctgcggaataggcacgttgtccacaacattctcaatcctcagcgttcacttggatcttgtgccgtgattatcactcgcatgaacactagcttccgccctgccttggccccgagcagactgcgctggaatgctcctcaccctgtcagcttattaatggttagcagctcttaataagtgagagcattggaaaaggctagcgctttggaaacctgacttctgtacttcctatctgtgtgggcttgggtgtgccttactccgtctgtgccttggttttctcactgtgtaatgc

SEQ ID NO: 470523 - DNA, 638 bp, Homo sapiens
ggccacctcaccccatggagacctcaaaatgctctccagaaaagaaagtctcagaaagtggttcccttgtagactctgaggcagttgctcctcagcaccttctattttggaagccagaaaattatttcttgattgacaaggggggcagtcctgtgcaccataggagtcccattgttgactgcatgtcagtagctgccaccagttattacaaccagaactgcgtgagtaaacttcctcaggatgcagaagccgctcccgacgataacaggaaggggcttactgaagtagagaagcaccaacaagaggactgggtgcatcaccacagcaacaaatggacccatggagagccaccctattatctcagaggaggaaaaactctaaggctacaagaaggattcatcccaaataattacatagctaatcaggactagacttatgacaggaattaaaggcacttcacgatccctttttattttctccattagtacgttgtaaccgtgtagaaatacagtacttcacagaattaacatattaatagaaatttaatcctgaagaaaatcattctgtgtatagaatatgcatcttctgggctttgtggtttcttttaaatggctagatgattgaatagcatacccttt

SEQ ID NO: 470524 - DNA, 1378 bp, Homo sapiens
ccagaaagcaactcaccagcaacaagatggtccccttttctctggggaggctcttggagagaggttggttctatgaaggaggtgccagggctgatggcgacagcctggagcatgctcaggaggcaggtggtgcagatggagaggctcctcatcaccctgtgcatgcagaagaatgccttacacttgaagtcattctgaaaatacagcaccagatgaaattctggtactttcacagcaccagcctcttcccaagaccttccccagagaaaagtgccactcagaccatcctgctcctagtgagtatctttgtggtcatctactgggttgatttcatcatcttattcacctcaaccttgctatgggcatatgaccctgttgtcctgggtgtccagaggcttgtgggcaatgtgtatgccactaacatttattgtgcatttacatttggagactgaagaaaatgataggagcagtatttctttccaagagcaaaaactttaacttgaaagagcccactgaagtggacaagtggatagcgctagccttagacactagtgtgtgtaaaacaaattgagggaaggacaccactgataaacattttcattttaatttgattaatattcatatcaagtaatacatgtttaaggtggtgaatatcatggttactctgatttgatcattacacaatgtatgcatgtatggaaattttacattgtataccataaatatgtaaattactatttgtcaatcaaaaataaaactgaaaaaagaaaccaaacaaaaataaaaataatagaattatataccaggacaaataatttatttattaataaataaattaaacctgattgaatgttggaacctcaagctaccaccttttcttccctcaccctctacatttcacgtactttgactgtccttaggaaatacagttgcctttccttggaatcattagtaaagattgagatgcttgcttggctgcttaagcatgtatgttataacacccaaagaataatgaaaacgctgttcaaaatttatggtgtgaaggaaagtaattagcttgaattatttttaattaactcagtgttgaagccctgtttcttctgtctcccgtatgtaaggtaaaaattttgaggaatttattagtattaaattatcatttaaggaggaagaaaatacagacctccatgcacttgaatgataactcacacatatttctggcttagaatgaaaggagatggaggtggaataatgtcttcattttaggcaggagcctctgagaataaatgcaatgggttaataaggcaagagagcctcaggatgctactttcttctccctttcctcagaatgggctgtgactcatcactcagggcttcttcc

SEQ ID NO: 470525 - DNA, 513 bp, Homo sapiens
agtccaggacagggtggcacctacgactctcaggaccaccctgccaaggcagaataaacctaatcctgcttgcaaggaagcatggagcctgggcacctctgtgcacctagcagtgaaatccatggctggctctgcaggggagatgttcgagtgggccacatgcccacagctgtcactcttcactgcacccaccaagggagtggggcaaggctcaccagtgacagccctggagcacagctgctctgcctgcaccctggaattttggctgctgcccagtgttcttctgagattacagccttgcgtaggatattgctgctgctcctgtgggagaaaaacgtgggtggacaatgtgcccggcatctgcctgcctccactgctccccctgagggagccctgccttccctggaacaggccagcagcacagctgccctccttccatgtgatgattttagccgtggcctggggccttgctgcgagaccagccctcacaggcctatgatctgtccttgagct

SEQ ID NO: 470526 - DNA, 1248 bp, Homo sapiens
tcagacagctgcactgggctctgagctgcaccatgcttgcccctaattccctgatgagtcaagaaatctgccaccttaaggtgcttactgggtggctgtggatgtctaacctcagtgccagccacacagaacctgaagcaggggtggttgctcctcttaatggatgtaaacctgtacagagctttgattctgcgtacacattccacatgagcaacaaagcaagaacctgtttcaaaaaatttttcttgagtaagaagcaacttataaattgtggaacaccagagcaaaagaggtttagcatttcaatggcaaaatgtcagaggggggaaaaaagcaggattctacttgctctgtcttggcagctgtctttggagctgattctcctttacttggagtttccctcatgcaagctctactctggttctattgataaaataatagtttgagtgtgctgtctgtgcaaatagtggacccccaaaaaatatcagatggtagacagacactgcctaacaaaattgtctgaatttaaataggatttaaatgaaacttataatatcactatatattgataccatattatcatataaaatttatttgatatataaaccattttgatatattatggtataatatcataaagcagtcattcacacaagaggagataatattcttaggtactattaagtttatatgttaaggtagttacaaaatttaactcaattttcttataaaattacctaacaaaattttatatgttatcataataatacatatgaattatatcacaaaatatgatgtcacaatgcttatgaattatgatgtcagaatatattgtgatgtcacaatgtaaacaaatatgatttcataatatattgtgatgtcacaatacatgaattatgatgtcatgacatatggtgatgttgcacatatattgtgatgtcatgatatactgtgacataatggatgtgaatcatgatatcataatatattgtgatgtcataatatatacaaattatgctatcataatatatcagatgtcataatatcatatttatttattatatttatgatgttaaaataacacaaaattttttcaggtaattttataagaaaattcagtgaaattttgtaacaacattaacatataaagaagcttacagtcatggtgaaagatgaaataggagcaggcataaacgctagaagtgggaacaggaaagatgagggagagatatgcctcacttttaagcc

SEQ ID NO: 470527 - DNA, 1020 bp, Homo sapiens
cacgacccgtctcctccctactcctcctccctgtttgcttctccctccccatctggaatttcctgactcccatggggtgccccccattctggggcccagacaaaacagatacaattattttaaatggaaacgtgaattccattgaattcatgacagcagaagggcccgagtgcttctggccccttgacttctcctacgctcctcctgctgttactatagctgaggaagatgtaatagttcccaggagttttccggtttccagaccttgcagatcggggagggccatcagctgcccccttgcttgttgcccacagccccgtttggctccaggcaaatgtgtcagggcatcctggtgggagccacagcagccatcttggcgaagctgcctttccatgcctgcattcccgtggcctcttggctccccaactgtccattatggcccccgtgcagccctcctcacattaccagtgaagggaatgtaactgcagaagatactaaggaggaaaatgagaaaaaaaaatgtcccgtgtattagagtaattgtcattagatcacctgtgttgcatacagggtcactctttatcattactgctgtaaaacctgtggcaattggaagagaaaatgatcctgagcatactctttgaatccctgaagttggtgtcagtaagtttcatgcagaaatttattttgaccatgacttacaaagttatgtccttgtagatcaaggcagtcaaaagagaacagttgttaatggaaaatggattgttcaactggaaattaatgtgacccttatgtacttgagcatagtcatgaactgaaaattggagagactgtgttacccttttacactcatcctagcactgatacctgggctggctgtgaaccacgacaagttagagctcacccttgccttgataagaaagatgaattgttaattggaccaactctaagcaaggagaaaaaatagttggaaataagaaaataattaaagaaaatacaattaaaatatgtttacagaaa

SEQ ID NO: 470528 - DNA, 598 bp, Homo sapiens
agtgtggcctgaatgtggaaggtgggacctgtcttccatttatctgcacttccacctggagctgtggcaccagcaatagagcctggtcatgaagtgtggcaccctcagactgctgtcgctcacctctgtgatggagaacaagttcagcagccctcagtagacatgcatgctgggcatctgggtgagggctgtgacacatgggcagggggcaggaagagggctccttggtctagcggtaacgccagtgcctgggaaggcaccggttacttagcagaccggcaaagggagtctccctttccctgggagagttggggaagactctgctccaccacttcttgtggaaggcctgacatgagtcaggcccgcccgcagtcatccagaggcctaaacctcttcctgtggtgctgtgcttcagcggtcacgctcctggtccactttcatgttccgccctctgcaaactaaatgtgacccttatgtccttgagcatagacatgaagtgaaaattggagagactgtgttaccctttcacattcaccctggcagcgatacttgtgatggctgcgagccacggcatggtagagctcacctttgccttgat

SEQ ID NO: 470529 - DNA, 693 bp, Homo sapiens
ttctgcggacatggccccccagggaggcagttcccagccggctcggagagctgaggggagcacagtcgtttcgcagggccagggtgacagcagaaacaagagatggctgtggatcccgctggccccgtgggtggacggggcgggggcggggacggggccgagcgcttgtggcccagcgctggggcctgcaggtggccctggaggaatccactcacacttacagtgggccttccaggagaccagtgtggatcgcgccttggagacgcccttcccagctggaacatttgtaaggctggaatttaaactcttgaaaacaaggtgccggaagaagaactggaagaaacccgagtgcaaagtccaacccaaggggagtaagcggaaatgcctggcctgcgtcaaactgggctctgaggataaggttgcggcctggatggtcactgctctatagagacgcaggctctgcgggaccctgaggagcaccaacgaccccgtgaagcaaggccgagcggacggacttaagtgaagagcccgacatttctattttttcttatattttaaaacttatttacctataaagaaaatgtgtagaataaaagctgtgtagacagatgacaggaatacagaaataaacagtgaactgttcagagggtttttttggtatttatattgactttcttgtgctttgtagagcaa

SEQ ID NO: 470530 - DNA, 701 bp, Homo sapiens
ggggcaaccacttcagaggccgatgtcagcgcgcagcgctggatttcattatttgtgtgaatttattgaaaacatttttaatgtaataatgtttttattgcaactgaggacattttcaataaatatcttaaacttgaggctctggctaagtattccttttgtactagaaatcagatttctctggtgcaattccattgcctgcaataatatttatgaaaactacaaacaccagcacactatatcaatactatactcagttgcctacgtgtgtttgccaaagctgaagctgaatcagagttttcattcctacaccatccttccccaggccctctctttcttaccacctcatcttctccaacatcatccgaccttcgttgctgtcagtaatttcagaatgaacagatgcaggagcaccatctctttggaaagttccttcacttccaatctgctcactatgtcttccaactgtatctttatattctaggtttttcaatgtctatacctcttcatagtgtatattctgtaaaccatatattactaagattttatttaattattttcttatttccaactcttttttgtccttacttagtgttgaaccaataaataattcatctttcttatcaaggcaaaggtgagttctaacctgctgtggttcgcagccatcacaggtatcacttccaggttgaatgtaaaagggt

SEQ ID NO: 470531 - DNA, 1098 bp, Homo sapiens
ctcaagacatccagagccatctaatacatattttcagaaggaatggtaccaattcctccttctacctctggtagaattcggctgtgaatccatctggtcccggactctttttggttgggtcccgccgagcctgagtctctataggacagtggcccatccggcccgaaaccttctcctcagagcccagtttgacgcaggccaggcatttccacttccttcccttgggatggacttcgcactcgtgtttcttccagtccttccgccggccgcttgtctgcctgagcttaaattccagtttcacaaatgttccagctgggaaggacgtatccaccgcgccgtccacaccgttctcccggaaggcccatgccggggagggtgcattcctccagggctacctgcaggccccggagctgggccccggagctcggacccgcctgcctccccagcgccccccgcgcccacccacggggccagcagcatccgcagccgtggcttgcttctgcggtctctcactctggccctgcgaagctcctgtgcaccgctcagctctctgagcccgctgggaggtgcctcctcccctgctcttcccctgggtggctatgcccacagaactctgggcagaggtcaaagagccaggaaatgtctctttctccaaattgactttggtgtgcgcctggttctctccactccctcctgccctgtccacactgttccctggggcccgcaggtttagcaaagttccctgccccctgcctgggccaggaagcagtcctgttgcccactcccacccttcaacccttttatggcccattctctctccccactgggtctcccacacgacaacccctcctccctactgtccccggagcccctctctggttctcgcgctcagcctcttccctgactgcttctccatctccatcctgaatctcccagctccagtagggtgccccccaatcccagggcccaggcaaaaccaacaaaattatttaaaatgggaatatttgaattccactgaattcgtaaaagcagaaacccatctggttatattttaaagaattatgaattaataatagcaactatcaatttaaagtgtaa

SEQ ID NO: 470532 - DNA, 789 bp, Homo sapiens
cctccacccatctgttcctttttttttttttttttaattcagttgctccagactgaaagttcctggatgaagacaagagtgcaagccttctgttatgcccagacagggccaccagagggctccttggtctagccgtaatgccagcgtctgggaagatgccattgccaagcggacgtggtgtagcggtagcatctgtgtcaaggaaaaacacccactacttagcagaccaggaaagggagtctccctttccccaggggagtttagagaagactctactcctccacctcttgtgcctgcagttatccggaggcctatccttctccctgtgatgctgtgcttcagtgggagaaatcccaccgaccctgtggggctgctccctacagtgcagagctgcccagagagggcttcaggccaggacaaagtcactgcacagggaagggacagaacaatggggtccctgctgccggcccagccgccatcttatgttctcctgctcctgccacaagtggggctgggccacaacacggccccgccccctttctcgggctgggtgggatttgtgcggctgcgttctgggccctgggcaaattctgacccactctaaacaatataattctaaaatgaccagaaaactgcatgcaacttgtctgggcacttttcatccttttcatgaatctccttgaagacacaatactccaggattttgtgtgcttatgaagattttaggaactgcattagaattaatccattaactgtggaaatatcttaaaatgcttataaaggcacatc

SEQ ID NO: 470533 - DNA, 490 bp, Homo sapiens
atagcccaggaatacttaagggaaagttgagatagagggcagtatgcctggtaaaagtcttcaccattctccattcttgattaaccagggatacaatgcactgcggagagccacagggacctttgtccaagaaagcctgtgtattgtccaggaccaagttggcatgggcagcctggatgggctggtgagtcaggaaaccctggtgatgcaattcccagctgacagcactctcccaattgcaaagagtatcttttcacttctccagttgctaggtcagaggggacccatgggcagctccgcaggtcattttaaagtcagggaaatgcagaaaaaaaggataaaattgagtctctgtcccagtgtactcctgcccccagccaaccttccacctctctcattagtgtccctgagatgcctggcagtgccttgggccctcctttcatctgggtttcagcccactctgtcctcttctacttcctgtctttgattg

SEQ ID NO: 470534 - DNA, 1756 bp, Homo sapiens
tggaatgttctgcagagcatagtttaagagatgtccaaggccccttcctggggatttgtccaaggtcccttcccagctggtgtcagacttagggactggctcccagagggccatggcaccattgtgtgtgtgtcttatctatataacagctctggacatgaagatatgaaggaagagagggcagagttctcaggttcccatagcacccaggagcccaggctgtatggaaaaggtgccctgggcacacagaggcacacaatgcctgtttgctggtggcatgtgacaagagatgaagcctgctcagcttccactaggaaggagcccaacacaaagccaactgcacctctctgggctcccggtgcccacctggcactcatgccccagaaccccttcccgactgcaggatactgtcaaggaccctgccagaggtgctcacagcccaacggtgaggtgacaggactaaagccaaagttatacgcaggattttgtgaatgtcaggattcaggatttcaaacctctgatgctgccaggtgtgcacagagcccaggggacactggagtaagtcctcctggactgcaatgaacgacccatttgtacagttcagtggtactggatggattcacattgttgtgcaaccatcaccaatatccatctccagaactcttttcatcttgcaaaactgacactctctacctgttaaataataattctctatttctctcttctatagcccctggcaacccccattctacttcctctctgctattttaactattctaggtacctgacataagtggaattgtacaggatttgtgttttgctggctgacttatttaactagcaccatgtcctccaggctcatccatattgtatcataccttagaatttctttcctttttaaggctgaataatactctctcatgtaccacctgtatgttatttttttccctgttacacattaaaaacattaacgaccacgtgtctgtatacttcttaaatcaactgggctaccagaggcacatatggaagaggacctgacacatagaaggtgctaagtaagtattcactgcttaatgcaagcccaagtagaggcccgggcgtatgtctttttcctgtgctcctgtaaactccgaagtcccagtaagttcctcctccccctgcctcatgaatggattctaacccatccttccatctcgtgaatggattctaacccatccttccatctcgtgaatgggttctaacccatccttccatctcgtgaatgggttctaacccatccttccatctcgtgaacggattctaacccatccttccatctcgtgaagggattctaacccatccttccatctcgtgaacggattctaacccatccttccatctcgtgaatggattctaacccatccttccatctcgtgaatggattctaacccatccttccatctcgtgaacggattctaacccatctttccatctcgtgaatggattctaacccatccttccatctcatgcatggattctaactcatccttccatctcgtgaatggattctaattcatccttccatctcatgcatggattctaactcatccttccatctcgtgcatggattctaacccatccttccatctcgtgaatggattctaaaccatctttccccacggcttatctgggggaggaggagacactgccagtgctctctcctccacactccagacggtttatgcaaggaccttattgacatcttctcacccactgg

SEQ ID NO: 470535 - DNA, 1296 bp, Homo sapiens
ggtatggacaggaagactagcatgtggggaagccttcagctacagtctgctttctctaggggatgcaggaacagggagaatggcagacgagccacacagttccaagtacatcttaagaagcacactctagatgcagaatgaagattcacttgggagaggcagggagcgggtatgagacgcagatgtgagcaggtcaccttgccagggccctccttcttgggagctttcagtgtgagtgcgagtgagactgtggatgccaatgtgtccataccaaatgtgaacttgccccatggagagaagcagatgcccaggtctcccaccatgcttggccacggcaccatggacattttggactggaaaatcattgtggggatgtcctgtgcattgcaggatgctgagcagtatccttcgtgtctacgctttagatgccaaggctgtcaaggtcctgttggtgaccaatacaggatatactgttataaccaatacaggcttttcacagggcagtttgatgctgtctatcacaatttaaaatgggcaagctgtttgacctgccaattctattcttcagatgctctgtagcagccagtctcaactcaggatccccaagagaattaagctcgaatgtcctggggcatccgttgtaggtagcaaattagcttttctctgatgtatccagaatggtactagttatgtacatctttgagagatctgagaaaacagtcacttagtatagtaaaaaactggcaacaacctaaatgtccctcaataggggaatgaccaattacactgtggtgtatccatacccagagttatatggtcagctactataaagaaataacttaggtctctagctccaggcaaggaaacagacctcagacctggacatgtgcaacaacaacaaaaaaatcatctaacttgtgaattctttcatcccacagccagatactattaatatattttttacaagtttcagatttatacatcagtttcatatgatttatgaatctcttgtcacaaaaccacactcttttttttgacatgtgttgagtttagatatctaaagaaaaacaaaaatgtacacacaagtgccactgctcagatgggactgacggatcagggtggattttccccttatctgcaatgtttcagtattttaaaataatgagaatgtatacagccttgacttgaggaattagattttaacaagcatcctttctgcattatttgggcaagttcttaaaaatcgtgaggagaattctcctttccctgccttctcaccatcttttcactttggtc

SEQ ID NO: 470536 - DNA, 1491 bp, Homo sapiens
gttgccctcatcggaagcagccgcccagttgaaatggtcatcccaacactctgcgacaggccagttgtttccaccttctggttatggccaatcatgctgctacgaacacaggtgcacaaatatctgcgggactccccactttcagttctttggggtgtattcccagacgcgaaagcagttatgcaggtggcaatgcctcacctgtcccctatcatgcaggcccgagggcctccaccctgtcaaggccctaatggcagctataatttggaagtcaaatgcagcagggagctcttagagctgatgcatgattcctgcatacaggcagccaaggtgagattggggcctgcctgctgcggaagtgaggaacagacgttggagcaggagagatggatgaggagagtccggtctacgtgttcaaggaagcgaagggatgaagactcacctggtgtggagaagaacaaagaaatcctgaaaatgttcattggtttggcagtggagggatggccacacacgctcctgaccctgctcttgccatatctgccctggatgcacgtttcggccacgtgccgcctggaagcaaaggatgtaggtcagcattcatgggagcagacagagatggcccaggctacaggtcccggctgcccattggagaacgcagcttggaaagtacacgctgatgtggccgctgagaaccaacacccctttgaccatgagaaggtgccttgcctcctcttcaccttccaccatgattgtaagttccgcaaagcctccccagccatgctgaactggatactcaatatcacatctaatttcatcagctgaaaagaggattctttcctcattgaattgttttgtcatcttgtcatatttgcagaaaatccactggctatttatgtgtggttctatttttagtctattctgattttactagaaaaagtaagatataccttctttttggaaaaacggtaacaccaaatgtagctgaaaaaacaatgtaacaatgccaaaaaaaaaggcaaaaaggcacttatattcttatcaccctaaaacccgtatatatatgtgtgtgtgtatacatatgtatgtttatatatgtatgtatatatgtatgtatgtaagtatgtgtatatatatgtatgtgtatatatataatatatgtgtgtatatatatgtatatgtatgtgtgtgtatatatatatatttcagatgactctactcaacctgaagatgacaaggatgaagacctttatcatgacccacttgacagagagtaaatatatactcttcttcttatgattttcttcataaccttttcttttctctagcttactttattgtaagaatacaggatagacatgtaacatacaaattatgcgttaattgactgtttttgttattggtaaggcttctggtcaacagtgggctattagtggttagatttctggggaggcaaaagttatatgcagatttttgactgcatgggggaatcag

SEQ ID NO: 470537 - DNA, 1203 bp, Homo sapiens
ccttcagctggaaggaactcagtcactgctgtaggaggaagtctgagacccgcggcccatgatgcctgactcccgggctcctccaggtgtttccctctgggataagctcctgctgctgcacagagttcctcgagatgattgcagctttgcagccttatatacaagggctgcagccagaggagagctgctggtcctcactctggagactggaagtacctctggccccagcgaccttggtgttttattgcctgatgctttatttgggagaacggaagctgagcacctgggtgtgcctggaaggcgctgtcctgggggccccacttcagtggaaagccagcgttcctcaggctatgcaaacccagtgttcaacagcgacacagttttgaaggttgctgacctcccccatggacccagaatgcccccagacttcacggacaatagggaaggtgaggatcttcaagatgcaatactggactttctacaaataaagacaactgggatcaagcaaggccatgtctgtttgtataatgacgacaatgataactgtaatgatgacggtgatggtggtggtgatgatgagagtgataaagatgatggtgataatgataaacatgaagatgaaggtgatgatagtgatgaagatggtgatggtggtgatgaagatggtgatgatggtggtgatggtggtgatgatgatggtgaaggtgatgatggtgatgaagatggtgatgatggtggtgaaggtgatgacggtgatgatgaagatgatgatgctggtggtgatggtgtgacaatgattatggtggtggtgagggtgatgatggtgatggtgatgatgatgctgatgatggtggtgatgatgatggtgataatacgatgatggtgatggtaatgatgtgacaatgattatggtgttgttgatgatgatggtggcgctcatttggttaatgataacaatccaattcattgatcattgtcctttactggtgcttgtgacataccagccactgggctatgtgcttctcacatctcacttagttttctccctatccctgaggacttcagcaaggagcatgaacttctaaaccatagctgcctccgtgagctgggacccactgtactttctgaaccccccagccacactccaggtcagaggctaggatgggggccttttcccatcccactcagtacagtgcccagggt

SEQ ID NO: 470538 - DNA, 694 bp, Homo sapiens
agcagtacattcagtgcctgctattaccttgccctacttctgtctttccccgggactgacttcatgctccagccctgagtgagtatctcatgggccatctgtgcacctggttggagcttgtgcatctgcagcgttctgtggtgaagcagtctgatgttgatggggatcatgaggctgtccctgggatcactgtgaaagccaactctctaagggcctgcctgagtactaccttctttgtgaagtattccttgtgtgcagctgatgttgaagacagaaaaatgtatatagataattcagccagagaccaaggggcagcccctggtggagtgttaagccagatgttcccaagcacaggcatggccagccgcagccacatcatgggtcagagtcctgggccccagcttggactctcctgtgatggggtcagagattggcatttttaacaagctcccaggtgattcttaggcattacttggtgagagaactcctgttagaatgcctaagagtaaaattctgccacgctgtcccagagctgagacctcagtcgctgcttctcaaaccattacatttaatggcaaaaactgcaatcgcttttgccccaacctgcagggcaggaccagttgttaaaaattccttgatctaatgtgaaccaaaattgcaattaaaatgttagtgggcatttccccatttttgt

SEQ ID NO: 470539 - DNA, 895 bp, Homo sapiens
aactcattttcacctcctcttgcaagatggttgtcagggctctttcttgtgaatttaggcagcagatcccttgcagccattgttcctaccgcctctgtgactaccgcctctatgaccgacgctggtactacgactgtagccattgttcctaccgcctctgtgactaccgcctctatgaccgacgctggtactacgactgtagccattgttcctaccgcctctgtgactaccgcctctatgaccgacgctggtactacgactgtagccattgttcctaccgcctctgtgactaccgcctctatgaccgacgctggtactacgactgtagccattgttcctaccgcctctgtgactaccgcctctgtgaccgacgctggtactacgactgtagccattgttcctaccgcctctgtgactaccgcctctgtgaccgacgctggtactacgactgtagccattgttcctaccgcctctgtgactaccgcctctgtgaccgacgctggtactacgactgtagccattgttcctgccgcctctgtgactaccgcctctgtgaccgacgctggtactacgactgtagccattgttcctaccgcctctgtgactaccgcctctgtgaccgacgctggtactacgactgtagccattgttcctaccgcctctgtgactaccgcctctgtgaccgacgctggtactacgactgtagccattgttcctaccgcctctgtgactaccgcctctgtgaccgacgctggtactacgactgtagccattgttcctgccgcctctgtgactaccgcctctatgactgatatttctcctgctcctcctattactccctgcactgcttctatcactgccacgttactgccttgactctatgattactgctgct

SEQ ID NO: 470540 - DNA, 589 bp, Homo sapiens
cgtccctgatggataaggaggatgctggtgaccacctcgggctggggcttggagactggtttggggaaaacagtgattccagacagctgtgcctgctcagcccgggcaaggccacgagactcagccaaggagcagcttcgctcagggcgagcctgctcttccgaaggcccgggtgaagctgctgcagaatgggcctgggggaatcacctcctccccaccttccgcttggccgggctggcgcctaacacgcgtaacttctcccctgccaagaggagacgctggtgggaaggcagcctgactgctgacatcagcccaatcttgacttctaggctggagtcgctccttcactgtccccgctgcattctatggtatgactgtgctatcactgacccactctcccatggaggggcacctgcttggtttccagattttggctgtcactgtgggacctgcatgagctgagcatgtatgggtcacctggctttccggagcctcagtttccttatttgcaaaacagggatgatgttggtagtttctgtggctccacgtgcttgtgtggggctcttgggtgagtgcctgcacctgactc

SEQ ID NO: 470541 - DNA, 1353 bp, Homo sapiens
ctgcagaacatgaaagacaaagaaatgtctgcaagcagccggagagaaaagccctccccagtggaacacagatcagtacatttaagtcgagagactgggacttcaggccctaatggcagctataatttggaagtcaaatgcagcagggagctcttagagctgatgcatgattcctgcatacaggcagccaaggtgagattggggcctgcctgctgcggaagtgaggaacagacgttggagcaggagagatggatgaggagagtccggtctacgtgttcaaggaagcgaagggatgaagactcacctggtgtggagaagaacaaagaaatcctgaaaatgttcattggtttggcagtggagggatggccacacacgctcctgaccctgctcttgccatatctgccctggatgcacgtttcggccacgtgccgcctggaagcaaaggatgtaggtcagcattcatgggagcagacagagatggcccaggctacaggtcccggctgcccattggagaacgcagcttggaaagtacacgctgatgtggccgctgagaaccaacacccctttgaccatgagaaggtgccttgcctcctcttcaccttccaccatgattgtaagttccgcaaagcctccccagccatgctgaactggatactcaatatcacatctaatttcatcagctgaaaagaggattctttcctcattgaattgttttgtcatcttgtcatatttgcagaaaatccactggctatttatgtgtggttctatttttagtctattctgattttactagaaaaagtaagatataccttctttttggaaaaacggtaacaccaaatgtagctgaaaaaacaatgtaacaatgccaaaaaaaaaggcaaaaaggcacttatattcttatcaccctaaaacccgtatatatatgtgtgtgtgtatacatatgtatgtttatatatgtatgtatatatgtatgtatgtaagtatgtgtatatatatgtatgtgtatatatataatatatgtgtgtatatatatgtatatgtatgtgtgtgtatatatatatatttcagatgactctactcaacctgaagatgacaaggatgaagacctttatcatgacccacttgacagagagtaaatatatactcttcttcttatgattttcttcataaccttttcttttctctagcttactttattgtaagaatacaggatagacatgtaacatacaaattatgcgttaattgactgtttttgttattggtaaggcttctggtcaacagtgggctattagtggttagatttctggggaggcaaaagttatatgcagatttttgactgcatgggggaatcag

SEQ ID NO: 470542 - DNA, 787 bp, Homo sapiens
cgccctggggacaggcggccaccaacaggcacctggcaggtcctccatgcctgcagcaggccccgtggagggcgcttcctgccccttcgcctcccgctgcggcgtccatgggcttgtggttgcctcggccccaatctggactccgagttgctcaaccggccatgcttttcctgttccccttttcccaggcgggtgcagctcctgccggtgtggtcccggcctctgtgggctcaccgcagggaagcacagcccctgcacggtggcccccggggctgtgcccacaggtgcccacgtaccgcccaggccacacagacgtgggaggatcctttgaaacacctacacccaaaaacacctacacccaaaaacatctacgcccaaaaacacctacaataaaaaacacctacacccaaaaacacaaccaaaacacctgcaaccaaaaacacctacacccaaaaacacctacaataaaaaacacctacacccaaaaacacctacacccaaaaacacctgcacccaaaaacacctacacccaaaaacacctgcacccaaaaatacctacacccaaaaacacctgcaaccaaaaccacctacacccaaaaacacctgcacccaggagaatcccttctgtggggagggcgggggcgagattaacactgggtcccggataatgtggcattcttataccagctgatgggtccatggggattcactgtattaccctttatacattctgtgtgtttgaaatcttttataataattttaaagcaaaaaactttacataataata

SEQ ID NO: 470543 - DNA, 1470 bp, Homo sapiens
cacatatttcttgagtacctaccatgtgcaaggcaccgtgctagatgctgaaggggacagaaaatgtgagatacagttcctgttcaggaggatcttgtggtctagagagtagtcttggcttcaccttcatcatcaccatcaccatcatcattatcattgccatcataaccatcaccatcatcaccatcatcatcatcaccatcaacatcatcatcaccatcaacatcaccatcaccatcctcatcatcaacatcaccatcaccatcaccatcatcaccatcactgtcctcatcatcaccatcaccatcatcaccatcatcatcatcaccatcaacatcatcatcaccatcaccatcatcaccatcatcatcaccatcaacatcaccatcaccatcctcatcaacatcatcaccatcatcaccatcatcatcatcaccatcaacatcatcatcaccatcatcatcatcaccatcaccatcatcatcaccatcaacatcaccatcaccatcaccatcctcatcatcaacatcaccatcaccatcaacatcaccaccatcaccatcaccatcctcatcatcaccaccatcatcaccatcatcaccatcattgtcatcatcaccataatcaccatcatgatcatcatcactgtcaccatcaccattatcatcaccatcagcatcttcatcctcatcgtcattgccaccatcaccattgtcatcttcataggcttaaagacaatggtgtctgttctgtttctcctgtaaccttagcttctaggatattgtctggcacatattaggcattcaataaacacttaatgcatgccttgtcatcataaatcatgctaacagctatgttgtacattgtgtcacctaatcctgcaaccctaagatataggaggtatggttttctgttccagatggagacaccaagaaaggccgaacaacttccaaaggctgtatgtcaaacaggtgataggaccgggattcagacacaagtctgtccacttccagggccagggtgttcagccttgagccatggtagcctggctaatagcacagacttcagataagagttgagctcagagggagcaagcccttgaggccaacttggtcaggggtggctgtggcttggctcctccactggatatcgaggcaagtcatgtccagataccagagagtgccaactggaggtgaccacatgtggtcagagggtgtggccaacaggggactcaggcagtcattctgtgtgcgggcttcctggctaatagccatgtaggcttctggtgctgcccaggcatcccacacaagctgtgggtgtgctgggctggaggggggtccctggggttttccctttgatcaggagccttctggggatttgggggaggacgcgtcttcagactctctggggtcacctgggaagcagagtcatgaggctgcccagaggactttcccagccattggggccact

SEQ ID NO: 470544 - DNA, 674 bp, Homo sapiens
tgaatattgaatgaataaacaatcaatgaaccattcgcgcattgggcagcccccagaatcacagcagattcacagatactccagggatgtctcgtggtcagaacaaatttatagaccaaaaagaagaagaagaagaggaagaggaagaggaaggaggaggagaagaaaaagaagaagaggaagaagaagaagaagaagaagaagaagaagaagaagaagaagaagaagaagaagaagaagaagaaggagaagaagaaggagaaggagaaggagaaggagaagaagaaagaaggaggaggagaaggaagggaagggaaagggggaagaaagagaataagaagaggaggagaaagaggaggaggaggaagaaggaggaggaggaggagagggagaagaagaaggagaacaatgaagagaggagaagaagaggaaaagaattcttgaccttctttttctcagtttggaacttggcagcagtgttaaaagaattattatttaatgtgccaaacttcaatgaatgagcaaaatttggtcctttggcataacatagaggctgaatatcatgaaatggatgtctggaatcattgtcctattcaaactattggacttcaggtgattgaattgctatgcttcttttgaatttagtgaaatgtttagaatactgtttattcact

SEQ ID NO: 470545 - DNA, 500 bp, Homo sapiens
aacagaaagttactacactggataggttatgtcttggctttcccttctacgaaagtttcgaccacaaaatattgacaaggatgaggggaaaccggggttacagactaagaacttgggtactgtagaaaaagagagtagcacaaaatccaaggctgagaaagtgaaaaggtgcttcagagaggtgggtggcagtgtaggagtgaaggaagagccgacaaggaaatctacagaatcctctccccttataccccaagccccaggaacctgcccagcatacacccccagcactgattccaagattttcttaagctcggcccctcgcttgctctgctgtatagagcagctcattcaccagctctggccaataagtccacagaagactcaagtttgccctgaaatacaagggcatgatccttgtcttaccacaggattcttcagatcaaatgcatatatgcatacatgtgtttcttcagaacactgtagttcacactcatagtaga

SEQ ID NO: 470546 - DNA, 919 bp, Homo sapiens
ctctctctggagtcaagaggacaggaggaaggtctgggtgagagcagtgatgggggtggtggaggaggggagaacaggcctccttgcatcatgaacccgccagcccagctgtgctgtgtgcaaatgttcactgggctagctggaattcttaacagacattccaagaatccaggaggtttctgggcagataatggtatcacgtacgtaagtggagaatcctggatggaggtcgagtttgagggggctgataaagagtttaggtttggacctgctgattttaaatatgtagtagacaatgggatatggagagctagtgctaagaaaaatggtccatacatattagaaatgtcatgtaattgcaatcatacagtattcacactctatgattctatttatatgaaacctagaaaagacacatctatagtgacagtagatcaaggttaccagggtctagaagtaggggttttgtggggaggatgtttgactgggaagagacataaggaatcttttgggatgatgaaaatattctacattttttttttgtggcggtgattacacaattgtatacatttgtcaaaacatagaagtgtacccttaaaatgggtgcattatgttgatgtaaattataagttaataaaattgatttaaaaaaaatgacacagaggatggccactcactttgtcctgtttcctccaatggtaacatttgaacatatagtgtaatagtatcccttatatgtggaaatatagaatgacatagtatctattatatgagggtattggcattgatgcaatccactaacctcaatcagatttccctaatttcacttgtgctcattgtatgtgtgtatatgtatgtataggcatgtgtgtgtgtgagtgtagtgttacacaagttatcccctgtgtaggttcattgt

SEQ ID NO: 470547 - DNA, 982 bp, Homo sapiens
agttccttcactctctccttccactattctgtcttctttcttcattaccaaaccatattattttactcatgcaggctgatcttacagaagcagtggaaactgcatcttcagaaggtctacatgtgaatgcagagattgaagttcttcaacaggcattattatatatgaaaacaatgcaagagaaacgtgaaacactacagaaggatcaggagaagttggaagaagaactagtaaacctcaaaagtcacatggaaatgaatatgttagaatgtggtcaattggaacactataaacaggagtcacagaaaatagctcatgaccagttacagttaaaagaggaaagcaatgctactatgaaaagtcagatggaacttagaattaaagatctggaattcaaactctacaaagcaagaacttcacaagcggactgtaatacaacagaattggaaaaatataaggagctgtatctagaagaattaaaacttagagaatctttgtcagatgaactaaacaagtctcagcagaatacatattccaagagaagccttaagaattcctaccttaaactcattgtcttcaaatatcagaatggagagcgacttgtcaaagatgtaaatgattgatattcaaacacctaaccacatatggatgattattatgtaaaggaatccaggataaatactttttatgaattctatgaacctgtaacactgaaaaagatttcttctgtttttcagtttaaagttttgtgattttcttacatgaatacatccttaattgctattgtacttttagcattttaatatcaattgttgtaaaatgtgcccgttgctgtgcaatcgtacagcaatttttaaatacttaaagcaatatttgaattcgtaaagtgaagttcacttatgtctatcttaccatcacttgaatgatttatggctaagatggcaatgatatcaaaagtagttaaatagcaaatgtgaccaaa

SEQ ID NO: 470548 - DNA, 1196 bp, Homo sapiens
tgggaaaagcccaaagctctggctcctaaagggaaatagctgttgtatacacttcccagacggggcagccgggcagaggggctcctcacctcccagaaggggtggcggccaggcagaggcgctcctcacctcccagacgatgggcagacgggcagaggcgctcctcacctcccagacgatgggcagacgggcagaggtgctccccacctcccagacagggcggccgggcagaggggctcctcacctcccagatggggtggcagccgggcagaggcacccctcacctcccagacggggcggccgggcagaggcacccacttcccagatggggcggctgggcagaggcacttctcacatcccagacgatgggcggccaggcagaggcttcctcacttcccagacggggcggccggccagaggtgcccctcacttcccagacggggtggccgggcagaggcgctcctcacatcccagacggggcggccgggcagaggtgctcttcacatcccagacgatgggcggccgggcagaggtgctcttcacatcccagacgatgggcggccaggcagagacgctcccctcttcccagtatcctctgcttgacttcttggctcttgcactaccggtgtcaccagttccccatattaaactgctgctgtttggaggcagaggctgtggaagggacacagtcactgccagagacaacagtcagcaccaagaagagccagaatgtgtaggtttctatcaaacgtcccctccccaatccttccccaagcacacacagagaatcccggatgctgctagaacacttccaccactggaaagctcaggaccctccatcccgttggtggctgccccagtcattacagattttcttcctttcactgagccaaatctgtccactggcttccaggaagaggaggcctggtctgtgcccctgcctggcaaagccccgtagactttcctcaatctttcaagtgtcttctttatcttctatcctgcttacaacataagcaccacattcagctttgggttttatatgtcggcctgctaagtatctgaaccaggtttatccaaaatttgtcacagtatatgaattgatgttctttgaaaaagaacaaagaaagttttatggtcaaataagctttgaaaatgctgggttaataagctttggtggtcacactaagtgttcatct

SEQ ID NO: 470549 - DNA, 686 bp, Homo sapiens
gattggaccccatcttaacatctcggatcctcaacttgctcccaattgcttaaacacagctgtctgtcctgctccctcttctcctactccccaaaatactacttggcacactctttctatgcactcgttgatcactgaatacctagaggatgctgggcatggtggcaagtgtggggaggcacattcagaaagaataagacacaggctgtctccctccaggggcctgtatttgcactttaaattgggatttttcaacccaaaaaaggctctaagatctaaaaatgcagctcaaatggtagatttttcaggaacttatcacactcgattgcagctgtctgtctgtgtctaccaccagacagtggaacccattcctattcatctttgtagctcatgtctctggcacatagtgccataccagagacatgaggtaaacatttatcagatgtataaagatgtgcacaactccacattagtcacacacacacacatcattgtcatcatcaccatcatcatcgtcgtcgtcatcattgtcatctactgtattcacatggaaaaagctggtcctagctctgccccactacgtggtgcctggcatgaatacctgcttttgcaacatgctaagaaggaaggcttcataaagccatagttgacttggcagctggagaaaagtacaaaggcatattgca

SEQ ID NO: 470550 - DNA, 678 bp, Homo sapiens
tgactaatcaacccagctggcattggccaccatggactggcaaccaactggcctgtggggcatggccgcaccacacgaacatggcccttctcactgcacagaagaagttgggggcggggagcggcagttctcagagaagagaaaaagaagaagaagaaaggaagaagaagaagaggaggaggaggagaagaggaagaagaagaagaagaaagaagaagaagaagaagaggaagaagaagaagaagaggaagaagaagaagagaagaagaagaagaagaagaagaagaagaagaagaagaagaagaagaagaagaagaagaagaagaagaagaagaagaagaagaaacaaacaaacaaaagggccaccgtgcaaaaatctaatgttggtcttctgccctcagaacaaagccccttctccctgtctccaaattgcagcagagttcagctgggcatgggcaagctggagggggttggcctggagctggtgggggtgttttccatcatgacggatcctgctgagaaagaagccgacaaaggaaagccagaccaagcctggggaaaaagagagttctgaagacactatctgagcacctggatccaattgtgcctgaaggtggtccacccctcagttgcctgctggctaggcttatgaattctccctttgaaagctggttgtaa

SEQ ID NO: 470551 - DNA, 1717 bp, Homo sapiens
accccgatggacattagtgcaggatgaagttggcttggggtgcagccccgaggggcccccctccctgcatccactctgtgcttgactggagtgacagcctggcccaactggctcaagccagggcagccctctgtggaatcccaaccccgagcctggcgtccggcctgtggcgcaccctgcaagtgggctggaacatgcagctgctgcccgcgggcttggcgtcctttgttgaagtggtcagcctgtggtttgcagaggggcagcggtacagccacgcggcaggagagtgtgctcgcaacgccacctgcacccactacacgcagctcgtgtgggccacctcaagccagctgggctgtgggcggcacctgtgctctgcaggccagacagcgatagaagcctttgtctgtgcctactcccccggggaatctccctatctcacccagctccctgactccctggcctggccgcaggagctgaaggggccagggagaggcaactgggaggtcaacgggaagacaatcatcccctataagaagggtgcctggtgttcgctctgcacagccagtgtctcaggctgcttcaaagcctgggaccatgcaggggggctctgtgaggtccccaggaatccttgtcgcatgagctgccagaaccatggacgtctcaacatcagcacctgccactgccactgtccccctggctacacgggcagatactgccaagtgaggtgcagcctgcagtgtgtgcacggccggttccgggaggaggagtgctcgtgcgtctgtgacatcggctacgggggagcccagtgtgccaccaaggtgcattttcccttccacacctgtgacctgaggatcgacggagactgcttcatggtgtcttcagaggcagacacctattacagagccaggatgaaatgtcagaggaaaggcggggtgctggcccagatcaagagccagaaagtgcaggacatcctcgccttctatctgggccgcctggagaccaccaacgaggtgattgacagtgacttcgagaccaggaacttctggatcgatggcaagggtgtgttgagggcctggagcccagagcggggccagctgctcaccccctttcccggggagggcccaggtagggagcacatgggggctgccagcgctgggaagaggggccagaaaggcagctggcagcagactccagggtctgagtgggccaaccttgactaccccggcccagggctcacctacaagaccgccaaggactccttccgctgggccacaggggagcaccaggccttcaccagttttgcctttgggcagcctgacaaccacgggtttggcaactgcgtggagctgcaggcttcagctgccttcaactggaacgaccagcgctgcaaaacccgaaaccgttacatctgccagtttgaggatgccctgttgatggccttgtacctgtgggctcctgagcccagaggggcaatgacgggcccagcttcatacagcaaggccacgcaggaaggactagagctacagctctgcaggggatttctccaaggaccctctcctgtcatgaaagctgcttcctgggaacctgttgggttccttggtgttcccgggagccccatgaactgtggtggaggcggagaccctgtggggcagcggagcttccctgtggcatgaaccccacggggtattaaattatgaatcagctgaacctgtgcatg

SEQ ID NO: 470552 - DNA, 982 bp, Homo sapiens
tattgacatcgatcgcacatcgccaattaacaaattgattattcgtaccacactggccgattttagcgacggtctctaggaaatcctgatggtggaagtataatgttccggccatctagcaccaggtgacaagcctgttctatatcctgcccacaggtaagccctccctccctggtcggcaaggcctggcgagatggtaaccgctgctgtcggagctgggcgagctgcgatcttcgcgcatcacgccggccgtcatgcactggctggcgccgcgcttcccgcagctcgacctggcacgcatgcttgccggacttcctgcgcccgctgccgctgccctccaacggtgccgacggcgtaaagcgcacgccgaacttctgctagggctgcccgcacaatacctagacccgtgtgccggaaggcagacgaacctatgccggcatcggctgccacttcatggtcacctggatgaagcgcgacacgaattacctgttacatatgggcggcgaaggcgtcagctgggccgtggctgcgcgcaccaacatcacctataagatcctgtacaacgacgcgccggaaaactatgcgcaagtgaagctgcccgacggcgtgaccgtgcaccatcggagcgagctcgatgtcatccagcgcgacttgcgcgtcatccccggcgtgacggtgctggtgtacgaccagacatgcgccgccgagaagcgtcgccgccgcaagaagaacaagcctggcaagaccgtcttccccgacccggcgcgccgcatggtgatcaacccggccgtgtgcgaaggttgcggcgactgcggcgtgcagtcgaactgcctgtcgatcctgccgctggagaccgaattcggccgcaagcgccagatcgagcaatcgtcctgcaacaaggattattcgtgcgtcgagggcttctgcccgagcttcgtctcggtgctgggcgggtccttgcgcaattactaatcaccatcgc

SEQ ID NO: 470553 - DNA, 958 bp, Homo sapiens
acccccagcccacggcaggactctgctccagcaggtctgggaaaagggatgaggtccaggtcctgcctaacaagtgcccaggtgatggtgaggccaccactggtccacagacagcatcaggagaagcaaggccttgcagaaagtagatgcttggagaatggagaggggaagcaaacacctgaaacatggcactgtgtcctacacatagtacaccctggcaaacataagcaggctgaattcatggaaggaaaggcttgcatggctggtcgtctgctcatcagtccaccatttgtgggtgtgcactgccagcctggcagaggattagaggactctgcatgtggcagtggcctttcagacaacactgtcctaaagcccgtttccctgtctccaagtgggatgagggggctctcttcatcaaatcctacttacgggaccatctgtgtccctgaccatgtaaataggcctcttgactctcactcaagcattgttgcaaattgtcctcttctccacactaatgctcaaggctgtgggacactgcaaagaacccttcttccattagggatttctctgtctaagcaggatttatgatgatcctttggcaaggatctttgaatcactggcattcacaggacagccaaagcatatttcaggagactctattgctaacaagcaatacagccctgaagatttatctcctctgatgaagcaggcaaatcctaatgctcccaggatgccatccctagacaatgtgctattgcacagccagcgtagacaatgtggtattggatacaccaactctctcccaaatagctgtgtgacctcagggaagtagttaaacctctcttaccaagttatctcatccataacatataaatgattgtgttttcttcttagggctgtcatcaagattaagatgttgaatggaatcaaatgcctgatttatcttacacctgattta

SEQ ID NO: 470554 - DNA, 806 bp, Homo sapiens
aactggtagtcctgacatctgtacaagtctggctgagtccagggtttttatgggctcagaatggaggaagtgagtgctgattggtccaaggatagccatgggtgggcctggaaaaagcaccataagttctcactctgggccaaggactccacctggagctggcagctgagcccccacgcttcaggccatcctggcttgaatgtggggtctcacctgggacctaaccctttctgctcaggagtctgtctgcctcccatcttcaacatgctgtccacagcacccaggatgttcatgctgaggggcacctgcaggcccacactgagctgccctcagcccacccctggcctccctcctggactcctcagtgtccaaagtctggagggggccaaggcaactgggggaatagcgtgtcagcactgccctgagtgcacacactcccagccaggtcactacagtgcttgggctcagctcaactttcctccaaaatcagagcaggtgccagcatgagggagaggccagggagtgggagcaggcaattctgagcctgtggggacagagggcttcctgagcccccaagagtgcagggatgcccagctcctatcttgtattctgtgtctctggtcactcagactgaattctcaagagataaggcaagagctttagatccagcgtgattcttcaaaaggcccattttcaccaatattttagtggcttggtccatgaaaattgtctgtgcttcatttccagtgtctttcttggccatcgtatcttcagatttcctgtttaactgtttcacattcatctca

SEQ ID NO: 470555 - DNA, 605 bp, Homo sapiens
tcaagacttttctggttcagaatgtatatttttggtgagcttagttcaaatagtcatgggcgatctctgggggttatttttaaaatggaatatgtggctttatcactatcagagagaaccagaaaattcctgtggtgtcataaaacaagtctcaacgctgagaaaacaatgaatactgctccaagaggtcagacctggtgtctgtatacattaaatgctggtgcatggatttacagtttgcgtagacaactacatcattacttcaaagcctttacaagcacagacattacaaaaggcctggctgtaactcaggagggacaaaagtgctgtggtgatattgacggaacggtttacatggaacactttttgcaagcatggtttcatttgtccctacctcaaacgggtagatggatgacaacagagagtttaatactacctgacgtgagataaagtgtgatgcaggacaagtcagaacagaaagagaaatgatcttaatcaattgtggtcaaaatattttcattttaagcattttacaaaattgtaagacaatgtgataatactgcagaaaaatactgacacagacatattctatatgtcctagtact

SEQ ID NO: 470556 - DNA, 555 bp, Homo sapiens
ccgcgagggtccgtggcttcattcttgaagtcaaaatgctgtctgggagccagggactggcatcaaaaccctcagcaatttacctgatgttctcttgtactgcagctaagctggcacacaaaccacaatataagttactttccactctttcctctcctttccatggacactggagcctcattctgtggccatctccaccactgaactcacctttgagggtagtggactctcccctggcccagtgtagatgcagaaatgctgtccaaaagcctacacctaaacttggggacctcaagagcctgcttattgctctaacccgctgtggtcaagctgcaaagaatctaatcagcagcattgctttagtgcccatcattaaaaagcttaactgttgcaccatttttcttttctgctttatgaaaaactcatttatgtaccatttcaatgctattgtaattgtgagcagataagtaattcagtatatagtctgaaacatagcatggctaatgtttagttccttttaaaaaagatattgctcttttcaactgtgaattcatg

SEQ ID NO: 470557 - DNA, 571 bp, Homo sapiens
gggtgacacctcagacaaggaggccagcgctaaagatctgacaagatgctgtcttgctggccgcaggaatctggagttcagaacggaggtctagacacagcgggaggtgacatgaaaaaggcggtcctatctttaccaaagaagaaagaggataaatggagctatgtcaagactgtgttcaggaacaagaaaagtaaactaaagaaaaggaaaggagataaaagaaacaaacataaaaagaaaacaattcacctaagtttatgggaaagttcaggaagtcaaagcaaagctgaagaatcagatctgagaaaggacagcagtcaggagctagggcaggttggggatttaagggaactaataaccttgggcattgcacttaaaacaagcataagaagcctcgaaaaggcaaaaagaagaaggctcacaaactacacaacttgggactcaaggaacagcacagtggggagttcctttagttttctctttgcctcatatattcccacacttagaggagaagaagccagcaagtccgaaatgccattcagcacagaagaaaaaatactataataaa

SEQ ID NO: 470558 - DNA, 907 bp, Homo sapiens
atataatctcctcgtgtgctgtttgctaagaccattggaaaagcacagtatcagggtgggagtgtcccgattttccaggtagtaaagggctctgcagaagtatgaatttcatatgcaagccaaccagtcggcagtctctaccctccaactaccctctttatttagttctcccacaccaaaccagtatgtcccctgccctaagtcaacccagagtgagataccaaagaacatctacaagcatcatcaccatccaggaaaacatgacctcaccaaatgaactgaataagccaccagggaccaatcctggagaaacagaaatatgtgacctttcagacaaagaattcaaaatagctgtgttgaagaaactcaacgaagctcaagatagcacagagaaggaattcagaattctatcagataaatgtaacaaagacattaaaataattaaaaagaatcaagcagaatttctgaagctgaaagatgcaattggaatactgaaggatgcatcagagttttttaatagcagaactgattgagcaggagaaataattaggcagtcacatgaacatgtacatctatctcatccacagcacttttccagttgaattttacactggtgtataaacatttgaataatatctttatcactattagactattaatgtcacaagggcaaaaaatgaagtctgtatttgctaacaattatatccctattgtcaaggacagtgctgagaacatcgaagtcactcagtgaatagttattgattgagcaaatgaagatttttagcattaaataaaaccatatatgtagaagatctggtacatattaagttatattttgtaattagagtaacttcttttggacgtaatttggattttgtaaaatatcaaatgatagtttatcaaaatc

SEQ ID NO: 470559 - DNA, 536 bp, Homo sapiens
ttctcacttaggctccaccagtgggtatggccgatgagtgtgtctttctggattttgttcaccatggcaaccaggatctccgagcggccgcagctcttcatggtctccaggtagcagcagatgagcgcatcggtcttcaccttgttcccccatcagtagaagattcctggctacagctcgtggtgccggcccacagagcactggtcctcgtagtagacaatgacctgctggccccgggaccacagctgccacagcgtcagcacctcctgctgtacaaatatcagctcatttggtcagaattgactaatgcccgctggatagcattctggggcaaaagcacacttggcagcaccagctggagcagctccagagagtgtggagggagaggcatggctcagacagagaaggcaaagaaactgcagggccctccctggtaaagactgagtagtccacagaggctgtgctggctgttggtttccttaccagtgaaaattcttggtttcctctgtggcgcagctctttgtggtccatgatgg

SEQ ID NO: 470560 - DNA, 1326 bp, Homo sapiens
ttagaagagaaaaagtgagagagagagcaaaagatagactatggaaatgatgttagacaaaaagcaaattctagcgatttttttattcgtgttcaaaatgggttgtaaagcagctgagacaacttgcaacataaataacgcatttggcccaggaactgctaatgcatgtacagtgcagatgttgttcaagaagttttggaaaggagacaagagccttgaagatgaggcgcatagtggccggccatcagaagttgacaaggaccaattgagaggaatcactaaagctgatcctcttacaactacaggagaatttgctgaagaactcaaggtcgaccattctaaggttgttgagcatttgaagcaaattggaaaggggaaaaacaagaaaaatcttcagtggttgcacccagatgaagctccaaagcacttcccaaagtcaaacctgcatcaaaaaaaggtcatggtcactgtttggtggtctgctgccagtctgatccactacagctttctgaattccggtgaaaccattacatctgagaattatgttcagcaaatcgataagatgcatcaaaaactgtgatgcctgcagcaagcattgatcaacagaaagggcacaatttttcatgacaatgctcgatttcacgttgcaaaatcagcgcttcaaaagttgaatgaattgggctgtgaagttttgcctcatccgccatattcacctgacctcttgtcaactgactaccacttctttaagcatcttgagaacgttttgcaggggctatactggaataaacaaacttatttctcattggcaaaaatgtgttggttgtaatggttcctattttgattaataaagatgagttggagcctagttataatgatttaaaattcatggtccaaaaccacaattacgtttgcactaacgtaatattacattctcataaagtgcttagtactggtgtaacccatttacataaattatctcagttattccacataaacactcattgtatctcatttcccaggtaaggatattgagaccgcaatatattatctagccagattttgaatattggaaggcttttggggtctagaagtgccaagtttaatataaaatgccaaatattagcagaagcatggcctgtaagctggcttaaatgtacggagttgtagaaaacaaatatccttttgggaagtaacacttttttgatgtttgttttcaaatgatcacaggggaaagtacagcaaagagaacaatcatctgatctccattctcttttttttcttttttttaattatactttaagttctagtgtacatgtgcacaacatg

SEQ ID NO: 470561 - DNA, 976 bp, Homo sapiens
tacatcagtagttccaaaatctgaaggtttgagtgaggaagcatctactctgtctgttccaaagccaactaatttctcatttaaaaattaccctttaacccttcctgccatctttctgcgccacaatggcgcacatgaatatcctgactgatgctctcaagggcatcaacgatgctgaaaagagaggaaaatgccagtttctcattaggctgtgctccaaagtcatcattcggtttctaactctgatgatgaagcatggctacactggcaaatctgaaatcattgatggtcacagagctgggaaaattgtcgtgaccctcacgggcaggctaaacaagtgtgggatgattagccccagagttgatgccatagaggagcatctgttgctggctcatggagctgttggcataattcagttccgaaggggtggtgggaaaggggtccagggttttcctgctgcttgtaagatgaagggccattcactgctctccttggctaatagcccttcctccattttcaaagtgaccaatagcaagtccacgtttttcaaaccagcgaaaaggattggtaaaggaactttggaactaagagctgtttgcactaatgagtctcctgacactgtcccaagtgatgggcatggcagaattccatcaataaaacattaagataaaggacccacgacccttaaggtagcagccaaatctcattccagggacttgcatttttgtgtcaattaaagaatagacttcaagaggtgaaattcactttactcaggcttgtgggatacctccggcaaacattagcacaacaatcgccatcttttttgcaactctcaggtctgtgtgtaatgaccatctctctcatttctcattggtgtactgttgttctaatttactcaccaggacttgcatttacgttctaactgagcttgttggacactgaaatggaggaagaatcacaagccattttcaaacct

SEQ ID NO: 470562 - DNA, 480 bp, Homo sapiens
gctcagccagtgatgggtgctttccgacttgctccgcagccatgtggactggggtcacattaggtctagcagccatgtggactggggtctcctcaggtctcacagccatgtggattggggtctccttaggtctctcagccatgtggactggggtctccttaggtctcacagccatgtggactggggtctccttaggtctctcagccatgtggattggggtctccttaggtctcgcagccatgtggattggggtctccttaggagagatccgctgccagctgacatctggaaaggcaagtgggatcctgagtcagcatatttcgtccgacggcatcctggtgtccagtcaagtctcctctgaatccagcgttttccccttaggcttcctttctgattcctgtttcctaaaacagttttggtgaagaaatgaatggagtggaacgtgtttttcttagctcttgggttttcataaccagcctt

SEQ ID NO: 470563 - DNA, 872 bp, Homo sapiens
cggcaaagtggccaggttctccagggtttcaaagtgcaggagatatgtctggatggggggcctggctcctcctcctcggcagaggggcagctgccttattccgacgagagcctgatgccggctgcagcgagggagggcacgctggcactggggaacacgaccgtgccaaggctggaggtgcatttggcccctgcaaggccatcgccctgctgaccctaagcaggcagccagcagggcacggccggaggctgcacggcttctccactgcacggcttgccggcctcggggtgcgtggggaatgggaaccaggggcttatggggccaagcagcctgagatcacgcagcaagcctggcaggcctggctgggactcacactcgccaggctctcagggctgctgcggacgctgcgaccttgtcatttaccagcattcccacctcccttgaaggtctcagaccagcccagcctccaacacagctcagagccctttaggatcaagagcattctttatcccccgacgccccacccacccagctcccagtgaatccctccttcttgaaagtcttcccacactcactctttcagtaattaatgtgataaatcaataattcactccccaacaaccttaattctgttttcttatgttgttaaaaatagcagtgacctggcccttttgttgtttctttaggaggttgctctaagcctctcattgtgcaggggaggctgagaggggaggtgcttgctcagacttgtgtctgaagttggcaggaaggccagaccctggtggggaaatcaggacgcctggtcgtgcctcacttctcccaactctcagttcattccatgcgtggggctagagagccccagtttttcatta

SEQ ID NO: 470564 - DNA, 687 bp, Homo sapiens
ctgctctgggtctcctgcagtggccagcactgtgctgaatccgcatgcttcaagagtatgtcggtgacctggatcaatgacatcacagcccagaaagtgtacctgggaatgaacgccggatcacactggacacttccccttctacagagagtgaggagaagccattggcatgaggagggcagctcagatgtcacctgctcaaaggagcctccacagaccacactggctcccctcacgttaagttccagcgaggcaccctgtttccacaaaagcacacccaggtggtgggctctggagtccatgctggtgccaaccgtacgacgatggccgccaggggctctgcagggattgaatgaggtcacagggggaggcatgtgccacgtggcaaaccatgtggcctgtaggattgacttcatcctgcttaaaaggccaccgactttcctcttccggagtgataccgcacggctttccatcgctgtccttggctcgggggacattggtaagcagatgacttactggtcagtcacgctgtcgcagaaacgacgtgggcttgggaccggtgacagaaggcctgggtcagaacttccacgttccccacgactgcgggaccttgccaagccctgtgtgtgagtgccctgcagatcaccttcaacgcatgcctgcctctcgtcactcagaagtgcctgc

SEQ ID NO: 470565 - DNA, 1056 bp, Homo sapiens
tacaggaagcatggtaccggcatctgttcatcttctggtgaggcctcaggaaggtttcaatcatggcggaagggcccgaagaaggaagcgtcaccctctggggcctgcccaagctgatgactcacgaattcaggagctctcctaaaaccgctgctgccgcagccattggctgtggtgtcatttgttacatggcaattgtcaccgctgtacgtcaacactgggcggggatggtgactagagctgagaatgcaagcagcgcctcacctctgcccatgattgaaactgataatgtgagcagcacctcacccctgcccgtgactggagctaatgccagtagctcctcacccctgcctgtgattgaaactgagaatgtgagcagcttctcacccctgcctgtgattggagctaatgccagtggctcctcacccctgcctgtgattgaaactgataaagtgagcagctcctcacccctgccagtgactggagctaatgccagtagctcctcacccctgcctgtgattgaaactgataaaggtcttgcatacatgaggggctctgtaaaattttctcaagtggttgaacgtttggaggccagaaaacactcactcttaagaacagatgtggccccagccatgactgtcagagtcactgggacaggaatccaagcagatcagtacagacaatataagtcctgcatttgggttgaaaagatcatccaaacagtactcttgtagaatgttaaaacgaaagctttctgcttatagtcatcactatctatggaaggccccctttttacgctaccagtttaataataaaaatgacatatagatgatgaacaaaaaaggaaaaaaagaactcctctgactactgtacttagaaataacaaccaaatttgtttcaagcttttccccttctctgagggtgccttttttaaaacagaaaatttagaatctcatagacttcgtgtgctcgcctgaattttattgcaggtttattgctgagggatttctcttgttaactcactgagcaagactcaaatgacagtcaggagtgttc

SEQ ID NO: 470566 - DNA, 870 bp, Homo sapiens
caacccccagtgcatttgccttcctcctggtctctgtgttgcgggggtgcagcctttgtcccattccttggccatgagtaatacacccggtatgaccttgtgctgttggcacagcaccctcagagcttcacaggcctccgatggtgatggaagtgagggctgtggcgatgatggcaggagctcacattggtggcacctgttctgtgccaggcgctcttctgagccctgcacatggatggacccattgactgcccgaggactccatgacaccccccagaatccccctcctggaaatgccattgcccccctggggcctgaccctcgctggcaatcctccacttccctggtggtcttccctctgggctttctgtccagtgggcagacattggacaccgtcccgcagggaccttccctgacccagctcagatctgtgagcgtggctgacccggcctgcagggatgctcatgtgcccgcaaagaagagctttatcctcattgatttctaaccagctttattgaggtgtgatgtacacaccctaaaagtcacttttttcggtgttcaatggaattcaactcaataatgaaaaagaatgaattaccgatacatgtaacagcacaaccaagcctcagaagcatgctaagtggaagaagccaggtgtgaaagggcacatatgcgatgcttctacctacatgacatttctagaaaagaccctgtctttcttttgaaatatctgatccagaaatattcaactgaattcgaagtctattcatatcagccccagtccctttaacatcacttttgtctgtgatgaaagatgaagcacagagagtgtctttaaaactctcagtttttatacatttaaaacaagtt

SEQ ID NO: 470567 - DNA, 1298 bp, Homo sapiens
cacccaaccccgcctctcagactcacaggggaacctggccgtccactccacccacgtgccttagcaaagtgcccttggtgaggctgagggactaggcagccaggactcctgaggggaccttatcagagagggaagccacctcggactgagtggtgagtgctgctctaggactgccctaaaactggatttgaacaaaagaccacatgccgtatgactccattggaatgaaacatccagaacaggcaaagccacagaggcaggaagcagcatccccccaggtcagcaacacctctggagctgaggctggcagaatgtggcgggggctcctctgagagcatggcagcttctaatggacccacgtggttagtttgagagaaacagtcaccagaagacagccatatgtgtccgggctgggagacctaacatttcagagccaccaaccctgcatcactggctgacaggtggctggacatcgtgtcaccactgtcttctgggaataaacatttctcagctttccatgggaagtctctgtctgtgtcttgttccagctcatttagagcaactatcatttatcaaatatcctcccctccaaagcctcctggatgcctacaaaggcttgggccagatggcagaattcaccaaagatacaaaggccccaacacggggatgtacttggagagggagagggatgaggaggttcatgtggggaaggggacaggacactattacttacagctgcaaatgggagctggctgccaggcagggccatgcagggggctgcacccaaggatgggtaacagtgagcggctgtagccagcagcttatatgtggtcagcggagtgtacttaaccaggttttgtgggctcctgtggaccaatttgaaaaattttgtgggctccaaagcatagggctatccctagctgtcaggtacctggccctggggagacagtggaatattaatgagatatttacattctctttttcatatgaagcctttgaaatccagtgtgtgacttattctgagggcatgtctcagttccagctgtgtttcaggtgctctgaagccacagaagataaacacatccaagaacctcaaggatttaaaattggccagattattaagggctcaatctcataatatttttggcataagtatacacttaaaattaattttggttgaatatcccactggtaaaatctggacttatccattgcattaaatataatctaactggatatgttaagtatcctttaaaacttgtctttctatgcaatattatgtttatattttacttaac

SEQ ID NO: 470568 - DNA, 607 bp, Homo sapiens
ttttaagtgttgagtttgataaggtttgacaaatgtatacacccagtgccaccatcaaggacctgaaagatgcaggggtggtgattctcatcacatccccattcaactctcctatttggcctgtgcaaaagactgatggatcttggagaatgacggtggattattgtaagcttaataaagtggtgattccaattgcagctgctgtaccagatgtagtttccttgcttaagcaaattaacatgtctcctggtacctggtatgcaactattaatctagcagatgcctttttctccatacatgtccataaggcccaccagaagcagtttgccctcagctggcaagagacagatctcggtctgctactgggccttagtataatagaaactgaatgcttaatcatgggccaccaagtttccatgcgacctgagctgcccatcatggagaaggttcctatctgattgggttcctcctgtgttctgggttataggcagaaatccagggtttcacctcaattgtttatattttcacaagcatcacaaacctgtgatgtgtgttgacaatgtctgaaagcattaatagttgtttcatacattttgtttagcatcat

SEQ ID NO: 470569 - DNA, 753 bp, Homo sapiens
ctcaggaaacttgccaccatcgccatgcacagggctcatggcagagtactccatccacgccaaggcaggcattgcctctgtggctgtgcttggcggggtctggggaagcacttcggaccctttgggaaggaagataagcatccgcacgtttccatggatttgtctgctaagaaaggccccgagaaggagaactttgtaggctctgaaacaggagtgggaaagggcaagagggtcctcttgggctatcagtccttgggccctggcattgcatcccttcccagcccccagcctgaaactgaacctccaaggtctctagtagagtccatgggccctgacatcaaagccctcctgaggctggctgggctggaagagaagggccccaagataataaagccacacatggaccgggcagagatccctgagtggccactggaagagaatacagcagtggacaaagatggccatggtcctggctctcatgaaactcacagctaaatagggggagagagagaaaaagataagtacatactccagttgatgataaatatacattgtgatgagtgccatggacttgaatgtggggctggattataaatacaaatgtttcagcaggtgaggtaaatgaatgacatgacctaatatattatcacatggtaaggatatggcatactgggacatgcatgttcccatcacactcaaatccagtgctgtgtgaagaactttctgttcttcatgatggaaatgttctgtagc

SEQ ID NO: 470570 - DNA, 857 bp, Homo sapiens
gcatctggggacagaatagggagccgcaggggcaaagcccttgttattcgactatgtcctgccctctacagtttggggaattgttgggccagcttgggtgcctccagaactcagagtggctgctcttagatcaacatatgctcaaggtgcattacccgaaattcggagtgtcagaagactgcctctacctgaacatctatgcgcctgcccacgccgatacaggctccaagctccccgtcttggtgtggttcccaggaggtgccttcaagactggctcagcctccatctttgatgggtccgccctggctgcctatgaggacgtgctggttgtggtcgtccagtaccggctaggaatatttggtttcttcaccacatgggatcagcatgctccggggaactgggccttcaaggaccaggtggctgctctgtcctgggtccagaagaacatcgagttcttcggtggggaccccagctctgtgaccatctttggcgagtccgcgggagccataagtgtttctagtcttatactgtctcccatggccaaaggcttattccacaaagccatcatggagagtggggtggccatcatcccttacctggaggcccatgattatgagaagagtgaggacttagcagagaatgtggtcaggcaccttctcaccatgtgtttggctttccttagtgaccatgcccaaggcacctcatgctggcccaaggtgaaccttgttcctccgtgaaaggtctggttcaacaggaaatgggtctagctacacaatgccacaccactggtgtgcacaagtgtgtgtgtatgcccccagcataatacctggtatatatcaggcagccataagtgttcc

SEQ ID NO: 470571 - DNA, 788 bp, Homo sapiens
ccaaatgtgtggcctctggctgggatggtcaggactggttaggatgtggcgctggggcagctgttgcttgtgcctgctcacccccactctctgttctgctcacagcagactaggctgtcctcaagaaagcaggtgtccctaccagccatgtgccccaggctatgactatgatgggaaaagtgagcccagagaagttaaggaatttgaccaaggacacacagcaagtaagcacagtactggaacccgaatcgttgattctttcttctgcagctgctgctaccttttccacggctggaaaatgggtggtgaccactctatcctgatgttgtgtggtcagctatctggctgtgggtgcaaaaaggatgcactgagaccaggttttgaaggcatttacagacacatggagctcttggaaggctcctcagcttgtcctctggagtggttctcagaggtggatgatgccgcagaagcagaaatgctgcagctgtccttccaggtccctgtggagaatccctgagataggaacatagaaggtgtgggggccagagggggtgcagaagaataacttccctttgggtaatttttccattacactgttcccctttggactttcagaaataaaaacccagcccccctggtgtgcagtcacacttgcgccctgaggagtagttaaaattcagcttgaggggcacttagtgtcacagaagcctagataaagaaacaagatttcaggcaggaagaaataataaagaggcaggacttcaagtgtcctgtgaaacacaacattc

SEQ ID NO: 470572 - DNA, 559 bp, Homo sapiens
gcattagaagcctttccaaccctgaaaaataaatcgggtaggggttttgaaaatgatggatttatgtagggagatcagagaagacctcactgggaagaatgatatgaacagagtcctgaaggaggggagagagtcagtcatgtggatggatatttggaagaagagaattcctggcaccagaagcagcaagtgcaagggccctgaggctggaacatatttggcctgctgcagaagagcgagaacaccagtgaagccagagtcaagtgtgctagagagagaagtcgatcagacgccagagaaagggggacttggggaaggggtgtataccatgtcgggcctttcaggtcattgtaaagtcttcctgtacaagaaagctgggaaggtggacagattcttcactcatttccattgcagtcatttgttcttttattcaacttatattcattgcagcagccactctgtgccagacagtgttctcatccctgtgccatagacatgcacagagatgagaatcacctttgctctcaaagagctctaaatcaagtaggattagttagcc

SEQ ID NO: 470573 - DNA, 760 bp, Homo sapiens
tggggacccgtggggctggtgatcatgcttttcagtcccaggatacggccatggcagctgaccccacagccaggcttccctctggaatcctttgcactgccccttcacggcctccaggacccgagcccctgtgtccccagccctcccaaccacagccacctcacttacccattttgtaggaaaatcatccttgattcttttcttatgggtctcagaatgggagccgtgtgtagaactggcatcccagagtacatgctggggacccactggcaaggacagatggttgagccatatctgatctacgtgcatctccttctgggaccagtgggctccccaaggtatgtacctatgacaatgacaggagagcaagaaggcaagcccaaccacacaagcacatttcaagcctctgccggcatcacaatggccaacatcacattggccaaagcagtcatcccagttacaacaagagggatgggctacacagtggggcctctggcctttaatgggaaaagcagaaagctggggctaggcctctctgactttgaagagggtaagtggagtgacacagctcataatgtgcaaataaatgggaactaagctcatcagctcaagtggaatgaattactgtcgccggtgaaatgcagtgatggagagcagtggcccagggaggcgggaggcctccaagcaggcttcgttagcatgcttttcatcaactctctgagttttttcatagaaagatcatattgtctacagtttcttc

SEQ ID NO: 470574 - DNA, 746 bp, Homo sapiens
tcttaaactaatgtgtgggttattggccacccccgcccctgcccctgcatctactgtctgccattcttcaccttgctctgtgcccagggaggctaaattccatgcaccacgactctcacgctcacctgggctctggctgctggtgggtttggccagttggaggctttggcttgagattggagacaggggagaggatgtccagctgcttcttccccagcttgttcctgctttgatactgtggttctggcccctggcaggagggccctctatcccaccccggctctctttgggatctggcaccactactccctgccctgcctcttttaggcctagggagggtagcagcttcccatggtcacccatctgttgtatctcaacatcccttactagtcccctcattaaattcccttcaaaatcccagccaagtgtgccttctgtttcctcccaagaccttgtcagataacaaataaatatgtaagatgaaatacaaatccagatgctagaagcatctccttccagttgtgaccaccaaaaatgtctccagtcactgccaagtgtcccctgtcccctgggggaaaaatgtcccagttgagtgtctagttgggctagactctcaaagttccagccctcacgggtcttacagttcagtccagaagccagtgaacataatggccaatgacaatacagtgtcacgattgtaactggggaaagtgaaaattcacccagggttggtctaagctctgctt

SEQ ID NO: 470575 - DNA, 884 bp, Homo sapiens
ccaaacatcctctgattttagagccaagatcttttgaaatctcatgatgtctggcagctctgtggatcgagagctctctgggcagtggaccaattttgttgttgttatttatgtatgcacagtattatataccaaatccctggttgctaataactcagatggtcacctatgcactcaaggcaaacaatccaactctgtgaagaaacagaagggcttattttgccctcaaaagcattgtccatatggttttgatggcgtatgtcccatctgtgagctcctaggccattccacctacctagtcacagtaattggctctgattgggccacacagccaccaaccaaagagaatcagagattctgtgactcagtggctcccatcacaggtaccatctatctgctcttagttcttcctccttcagtggacactgccttcattttggaggtgtattagttatcttgttgcattacaaattacttagcagcttaagacaacacacatgaactatctcatagtttctgtgggcaggaatcagacaggcttagctaggccctgtggctcaggatgtctcctggatagcaatcaaggtgacagccagggctgcagtcagctcaagtgtcagcagggacaggatctgcttccaagctccctcatgtggttgtggacagaatttggttccttgtgggctatgctctaaagcatccaggattccactcaggttgttcttgcaacggtcttatcctccccatcagtctgtgagctccccgaaaggcagagactgtttcttttcatgtatccccagtgaccagcagagggcatggtgacttttgggcatccataaatatttttgtgatgaaatggtgtggagggctgggttgagatgcag

SEQ ID NO: 470576 - DNA, 645 bp, Homo sapiens
gcatgttgcaatccaaagatagaggtgggtgctggatgcctgcctccttgtgggcgttcatcatagtgccagaggcaacacagctggggaaatgtggagggcccctgctggtgactgcatgcatggtcacactgaaggtgctgttgacactggggcaggacactgatgggcacaggtctgggtgccttctctgtgccccgcatgcaggagtggtcactcagggtggggaatatgttctctgcacagtgttaatacaagggtggggcacttgtaggggtggggctggctggctctgtgcccaccaaatctctgtctacaatggtgtttggccagcagtagcatggagtggactgtactaccacacaccggaagggcaagaaaagaaaaacccactcacccagacacgtgctagcaaagctatgtggggagttgctgtggtcctaggggaccacatgctgcagtatgggaagggagtgtgtgggctggtgcgtggccataggggccaccatgccggagaggccagcagaccaaggggtgctcaggtcaaactggctttgtgtgatgggcaagaccaccctgcagagttcaggtctgacagttcccctaggtctaaagtctcctatgggacaggagcaagctgatcct

SEQ ID NO: 470577 - DNA, 1433 bp, Homo sapiens
tggaatgatcaatgaacacgaaaggaatcatcattgaatggaatcgaatggaatcatcgaatggaatcaaacggaatcatcatcgaatggaatcaaatggaatcatcatcgaatggaatcgaaaagaatcatcatcaaatgaatttgaatactcgaatggaataatcatcgaatggaatcgaatggaatcatcgaatggactcgaatggaatcatcatcaaatggaattaaatggaatcatggaatgtactcgaatggaatcttcatctaatggaatcgaatggaatcatcgaatggactcgaatggaatcattgaatggattcatcaaatggactctaatggaatcatcatcgaatggtatcgaatggaatcatcgaatggaatcaaatggaatcatcatggaatgaaatcgaatgaaatcatcgaatggagtagaatggagaatcatcatcaagtggaatccaacagcatcattgaatggactcgaaaggaatctttgaatggactcaaatggaatcatcatcgaatggaacctaatggaatcatcaaatggactcgaatggagccctcatcgaatggaatcaaagggtatcaccgaatggacttgaatggaatcatcgaatggcctcgaattgaatcatcattaaatggaatcgaatggaatcatctcatggacgcgaaaggaatcatcgaatggactcaaaaggaatcatcaccaagtggaatcgaaaaagaaactaatggaatcatcaaatggacacgaatggaatcattatcaaatggaatcgaatggagtcctcgaatgcaatcgaatggaatcatcaatgaatggaagagagtaattgaagggaatcaccaaatggacttgaatggaatcatcaaatggcccagaatgcaatcattatcgaatgaaatcgaatggaatcatagaacagactcaaatagaatcatccaatggactcaaaaggaatcatcgaatggcctcgaaaggaatcatcatcacatagaattgaatggaaccatcaaatggactcaaatggaatcatcatcgaaatcgaatggaatcatcctcgaatggaatcaaatggaaacatcgaacggattagaatggaatcatcatcgaatgaaatcgaatggaataattgaattcaaccgaatggaatcatttaatggactcgaatggaatcatcatcgaatggaatgtaatggcatcattgaagaacgtatccctgtcattcagtgatgcgtgactgtgctgaaatgctcaatctaagtttcaatgacctccataacattgttgtactgtgaaatacaaatctctaacctatggcctgaatatgtttgcaaactaagcagatcatgggaaggagaatgtgctggaatcgctgggaagattttctcacactacctgaataatatctccagactttgc

SEQ ID NO: 470578 - DNA, 604 bp, Homo sapiens
tggactcgaatggaatcattaaatggaactgaacggaatcatcgattgaactcgaatggaatcatcatcaaatggaatcggatggaatcatcgaagggagttgaatggaataatcgaacggattcgaatggaaacagcatcgaatggaatcgaactgaatcattcaatatggaatcaaatggaatcatcactgaacagaatcgaatggaatcatccaatggactccaatggaataatcgaatggactcgaatggaatcatagaatggaatcgaacggaatcatcgaatgcactcgaatggaatcatcatcaaatggaatcggatggaatcaatgaagggactcaaatggaatcatcgaatggactcgaatgggatcatcaaggaatggaatcaaatggaattattgaatggaatcgaatggaatcattatcaaatgaaattgaatacaagcatcgaatggaatcgaatggaatcatagaatggaatcagacagaatcatcattgaatggaatcgaatagaagcatcgaatgaaatcgaatggaatcatcatcaaacggactcgtatggaatcatcattgaatgaactcgaatggaaacattatc

SEQ ID NO: 470579 - DNA, 2343 bp, Homo sapiens
atccgttggaatcatcatcaatggaatcgaatatagtcgtcatctaatggactcgaatgaaattatcatcgaatggaatcgaatggaatcatcagcaaatggaatcgaaaggaaacattagggaataaaatcgaatggaatcatcaaatggaatggaatggaatcatcaaggaaaggaatcaaagggaatcatcgaatgaaatcgaatggaatcatttaacagaatcaaatggaatcatcatcaaatggactcgaatggaattatcatcgaatggaagggaatggaatcatcgaatggacatgaatggaatcatcatcaaatggaatcggatggaatcaaagaagggacttgaaaaggatcatcgaatggacacgaatggaatcatcattgaatggaatcgaatggaatcattgaatggattcgactggaatcatcatcgaatggaatcgaatatgatcatcatcaaaagaaatccaataatcatcgaatggacccgaatggaatcaccatcgaatggaatcatcatcgaatggaatcaaatggaatcatcattgaatggcatcaaatggaatcatcgaatagaatcaaatggaatcatcatcaaaaggaatcgaatggaaccatcgaatgaaatcgaatggaatcaccatcgaatggaggcgaatggagtcatcatcgaatggaatctactggaatcatcagttaagagaatcgaatggaatcatcgaatggtatcaaatggaatcatcaacaatggaatcatcatcatatggaatcttcaaatggacccgaatggaatcatcgaatggactcgagtggaatcatcatcatatggagtcttcgaatgggctcgaatggaatcttcatcaaatggaatcgaatggaatcatcaaatggactcgaatggaatcattaacagaatggaatcatctaatgaactcgaatggaatcatcatcgaatggactcaaatggaatcatcgaatggattcgaatggaatcatcattgaatggaatccaatggaatcatcgaatggaatcatcattgagtggaattgaatggaatcatcgaatggactcaaatggaatcatcatggaactgactcgaatggaattatcatataatggattcaaatggaattatcgaatggacttgaatggaataattgaatggactcgaatggaatcatcatcgaatggactcaaatggaatgatcgaatggactcgaatggaatcatcaattggacccaaatggaattatcaaatgggctcaaatggaaatatcgaatggactcgaatggaattattatcaaatggaatcaaatggaatcattgaaaggaatcaaacagaatcatcgaatggaatcaatcagaatcaatcatcgaatgaaattgaatggaatcatcatcgaatggaatctaatggaatcatcaccaaatggaatcgaatggaatgatcaacaaatggaatcgcatggaatcattgaatggaaactaatggaatcatcatcacatggaaccgaatggagtcatcatggaatggaatcaaatggaatcatcatccaatggaatcgaatgggaatcatcgaatgggagctaacagaatcatcgaatggaatcgaatggaatcatcatatggattcgaatggagtcatcatcaactgcattcaaacggaatcgtcatcgactggaatcgaatggaatcatcatatgtattcgaatggagtcatcatcaactgcattaaaacggaatctggaatcatcatcgaattcaatctagcggaatcattgaatggactcgtatggaatcatcatcgaatggactcgtatggaatcatcgtatggcatagaatggaatcatcatcaagtggaatggaatgtaattgtcaaatggacacgaacggaatcatcatcaaatggaatcgaatggaattgaagcgaatggaatcatcactgaatggaatggaatggagtcatcaaacagaatcagatggaatcatcattgaatggaatcgaagagaagcatcaaatgaaatcaaatggaatcatcaacgaatggacttgaatggaatcatcatcgaatggactcgaatggaatcatcaatggaatcatcgaatgaactcgaatggaaacatgatcaaatggactcgaatggaatcatcgaatggattcgaatgtaatccaatggaatcattgaatggaatcgaatggaatcatcacagactggagttgaattgaatcatcaaatggactcgatcggaatcatcatggaatggaatcgaatggaattatcaaatggactcgaatggaatcaactttgaatggaattgaagggaatcatc

SEQ ID NO: 470580 - DNA, 1553 bp, Homo sapiens
taccatatgagagagttcaacttatgttcaatgtgaatgccatggcaatattaaaagaatggagtcctcatcgaatggaatcaaatggagtcatcatcgaatggaatcaaaaggcatcatcatccaatggacttgaaaggaatcatcatcaaatggactcgaaaggaatcattgaatggaatcaaatggaatcatcattgaatgaaattgaatggaatcatcatcaactggaatggaatggaatcatcatcgaatggaatagaatggaattatcatcgaatggaatcaaacggaatcatcatcgaatgcaattgaatggagtcatcatcgaatggaatcaaaatgcatcatcatccaatggacttgaatggaagcatcatcaaatggactggaaaggagtcatcatcgaatggaatcaaatggaatcatcatcaaatggaagcgaatggaatcatcatcgaatggaatcaaatggaatcatcatcgaatggaatcgaatggaatcatcaaatggaatcgaatgtaaccatcatcaagtggaatcaaacggaatcatcatcgaatggaatcgaatggaatcatcatcaaatggaatcgaatggaatcaaatggaatcatcgaatatattcggatggaatcatcagcgaatggaattgaatggaatcatggaatggattcgaatggaatcatcattaaatggaaaccaatggaatcatcgaatgaacacgaatggaatcatcattgaatggaatcgaatggaatcattgaatggcattggaatcatcatcgaatggaatcgaatggaatcattgaatggactcgaatggaatcatcatcaaatggaagcgaatggaatcatcatcaaattgaatcaaatggaatcatcatcgaatggaatcatcatcaaatggaatcaccaaattgaatcaaatggaatgatcatcgaaggcaatagaagggaaacctcgaatgggattgaacggagggaatcatcgaatggattcaaatggaattatcatcaaatggaatcaaatggaatcatcgaatggacacaaatggaatcatcatcaaatgggattgaatggaatcatcaaatggacacgaatggaatcaccattgaatggaaacgaaaggaatcattgaatggcatcgaatggaatcatcatcgaatagattcaaatggaaaaatcgaatgtactcgaatggaaacatcgaatggactcgagaggaatcatcacggaatggaatcgaatggaatcatcgaatggagtcgaatggaatcatcaggaagtggaattgaatggaatcaccgaatagcatcgaatggcatcatcatcaaatggaaatcatcgaatgaaatcgaatggaatcatcatcaaatggaatcgaatggagtcatcatcgaatgcaattgaatggaatcgtcatcgaatggaatcgaatggaaccatcaacgaatggaattcaaaggaatcatcatcgaatggaaccaaataatatcatcaaatggacttgaatggaatcatcgaatggactcgaaaggaatcgtcatc

SEQ ID NO: 470581 - DNA, 665 bp, Homo sapiens
gagacgtgcctgggggcctgacagtagagttgggaggtggaaagaggctgggttgttgtggcgaaacagagggtacttgggggagaactcgggggagccccgggtcaggtgtaaatgagcaaagatgaatcaggaaggtgggggagatggcagaaggccccgagcttccagtggcggaactacaagctcatcgtggatcctgccttggaccctgccctgcgcaggccttctcagaaggtgtaccgctatgatggagtccacttcagtgtcaacctggacgagttctatattggacagattccactgaaggaagtgacttttgcaaggctgaatgacaacgtgcgggagaccttcctgaaggatatgtgccgtaagtacggtgaggtggaagaggtagagatcctccttcacccccgtacgcgcaagcacctgggcctggcccgtgtgctcttcaccagcactcggggcgccaaggaaacggtcaaaaacctccaccttacctccgtcatgggcaacatcatccatgcccagcttgacatcaaaggacaacaacgaatgaaatactatgaactaattgtcaatggctcctacacccctcagactgtgcccactggggcaaggccctgagtgagaagttccaaggctcgggtgcagccactgagacg

SEQ ID NO: 470582 - DNA, 930 bp, Homo sapiens
cttggggctcagtggggagggatgcccatgtccttccagatgcagacccagatgttaactcggctccatcagctgcggcagggcaagggattgattgccgcctcagctggcccccccggtggggcctttggggaggccttcctcccgtttccacccccgcaggaggcagcctacggcttgccgtatgctctatatgcacaggggcaggagggcagaggggcatactcacgggaggcctaccacctgcccatgccaatggcagccgagcccctgccctcctcctcagtctcgggagaggaggcccggctgccacccagggaagaagcagagctggcagagggcaagaccctcccgacagcaggcaccgtgggccgtgtgctcgccatgctggtccaggagatgaagagcatcatgcagcgagacctcaaccgcaagatggtggagaacgtggccttcggagcctttgaccagtggtgggagagcaaggaggagaaggccaagaacgcggccaagcagcaagccaaggaggaggataaagagaagacgaagctgaaggagcctggcctgctgtccctcgtggactgggccaagagcgggggcactacgggcatcgaggctttcgcctttgggtcagggctgagaggggccctgcggctgccttcattcaaggtaaagcggaaagagccatcggaaatttccgaggccagtgaggaaaagaggcctcgtccctccactcctgctgaggaagatgaagacgctaccatggcctggaaacttgcccattgagtcagatctgcttccctggagacccactggccttcatactcttttcttgggccaggcataacaagtcagctccctcttccacccgaccagaaaatgatacaagatcaaatggacaggacatatttaaaactgtgtgggctgggc

SEQ ID NO: 470583 - DNA, 798 bp, Homo sapiens
gtggttgatggtaaatttccccaactaccactctgctggcctagaccctgaacaagagaaggaggctggagagccaggacgtccggggaccaagcccccgaagcgggacgaagagcgaggcaagacccagggcaagcaccgcaagtcctttgctctggacagcgaaggggaggaggcatcccaggagtcctcctcggagaaggatgaggaggatgacgaggaagatgaggaagatgaagatcgagaggaagctgtggataccacaaagaaggagacagaggtgtcggatgatggcgaaaatgacagcacatcagactccgagagcagcagctcttccagctcctcatcctcctcctcctcctcgtcctcatcctcctcgtcctcttcatcctctgagtcctcctctgaagatgaagaggaagaggagcggccagcagcccttccctcagcctccccgccccccagagaagtcccagtgcccacgccagcacctgtggaggtgccagtgccggaaagggttgcaggctccccagtcacacccctgcccgaacaggaggcgtctccagcaaggcctgcaggtaggtgccacagggctgtcggttagatcgctgtgtgtgtgagagagagagagaaaacagtggtgcttgcatttattgtgtacaagtgtgtgactttattagaaaaacatacaaagaaaatgtcaccatctcctgtcactaccttctagagacattgattgtctgacacacttcaaactgtaccgtcatggtggtttacagaaccccaggctaagctgca

SEQ ID NO: 470584 - DNA, 1228 bp, Homo sapiens
ctcagagtggggcagaggcaggaagaatccaccaagtacttcaactttgcaacctccgatgagaagaaaatgaaagaggctgagcatcgataccgtgtgaataacctcagccagcgagatctggccatcagcattaacttctgggttcctgtcctgctgaacggggtggctgtgtgggatgtggtcatggaggccccatctcaggactgctccattgctgactgcctgcagttccgctgtgacgtcccctccttcagcgtccaggaggagctggatttcaccctgaagggcaatctcagtttcggctgggtccgcgagacattgcagaagaaggtgttggtcgtgagtgtggctgaaattacgttcgacacatccgtgtactcccagcttccaggacaggaggcatttatgagagctcagatggagatggtgctagaagaagacgaggtctacaatgccattcccatcatcatgggcagctctgtgggggctctgctactgctggcgctcatcacagccacactgtacaaggcaagtcttggcttcttcaaacgccactacaaggaaatgctggaggacaagcctgaagacactgccacattcagtggggacgatttcagctgtgtggccccaaatgtgcctttgtcctaataatccactttcctgtttatctctaccactgtgggctggacttgcttgcaaccataaatcaacttacatggaaacaacttctgcatagatctgcactggcctaagcaacctaccaggtgctaagcaccttctcggagagatagagattgtaatgtttttacatatctgtccatctttttcagcaatgacccactttttacagaagcaggcatggtgccagcataaattttcatatgcttaagaattgtcacatgaaatgaggatgtttatagcacactttccttgcgtggaagagctataacccagggacctgagtgcctctctgggaatagtcgggggaacctatttgtgggcattgaaaaagttttttcactttctatggtgatgggagcctgaggtcatcttttcttgatggggctgagaggtgtgtatcaggggagagggtcaaagagtgtgtgtgtgtgtgtgtgtgtgtgtgtgtgtgcatgtgcatgcacgtgcacgcaggcatgcattggtcatgggtttcttcacacacttcaggttcctctgtaatggtaagtgggcaggctgtcct

SEQ ID NO: 470585 - DNA, 1290 bp, Homo sapiens
ttctttttgatggtttgtgtttggatgttcaagacagcccccgaggcctggggccgggtgctgctcccagactgtgagctcgtggccacgggaagcctgagtgcggcagaggccccacagctgcgccaagtgcggcaaagcctcccgtacagttactccctgagcggtcatctccgaagccctgctcatgagaagcctcccctttgccctgactgtggaaagcgtttcagccagagctcctacctgctgcagcaccggcagattcacccagggccgtcagccctgcaagtgcaaggcctgcgggagggcactggcgggtccacagcgactggcgagagaccttgtcgctgtccccagtgcggcaagacctgctgtggccgctccaacctcatcaagcaccagcgagtccactcgggagaagccattcgtctgcgggagtgcggcaagggtttagcggccagctctgctgctggctcaccaaggagcacacactggccgaagccctgcgtctgtccccagtaccagcaggtttttggggaccggtggaagctgatcggccaccagcgaattcacacaggagagtgtgtcccttctgctgctgcagctgcggtgacagtgtcaatgagaagacctccctctcccagcgcgtccttccgcacccaggggagaagacctgcaggggtgggagcgtggagagcgtcagcctcgcacccagctcagtcgccccggacagcacctctgggctccggccctgtgggagccccgggtccttccttcaacatctgcccccatccacactcctgccccgacctcccttcctttatcctggccccccactcagtctccagcctctggttccatccggccttcccgcagtgcctgcagtgcctctgggaggcctggaagttgcccagcccggaaggcctcgcagcacagagcggccggaccgctcggcgaggccagggccaggcttcagcgacagtgccgagctcctccaccgccctcgaacccacactggagaggagccctaccagtgtttccggtgtggaaggcctccagccggaggtccaacctggcccgacactgaagaaccagcgtgctgcagccctgggtggaattgttgcagccgccggtggactgtggatctgagatgcagtcccctccctccacacagacccgctcaggacggcttttctgtatggcagatctttctcagaagtgctgggggctattttgtttgttttttttcccctgaattctcgctcctttcccttatacattaagggattt

SEQ ID NO: 470586 - DNA, 916 bp, Homo sapiens
ggtacatcacgagtcatatctgttatcagagcgtcgtcggcgtgcttggcacacagatcacctccgccagttgtccgtgtcgtaacgtcggcgtggttatgtggtagagtaaatgcgcgtcacgcgtgatctacgtacatacgtgacatggtccgaacaagcatcgccacccccgggttacgtccttcgcgttcagcgagtgttcagtcgcgtaggcggaggtcgtgcgccgacagcgctctcgccagttgattccgggcacactgcctacacggccatgcctctcaggcgcgccactcacccgccgggttgtcctgagcgccattcgattcattgcgccgctggtgtgactgcaccccagttctcgcggtgcgcgcagttctcgctgtgtgccgacgccgctccgtccactcggctaggttgtgccgcctcgggcaccgttgtgtgtcgtatcctcgatccgcgtcgcctctttaccgactatccctgggcggtcgaggctgcgcgcgcggtcgcctcgctgcgagtgcggcgctctgcattagccttggagtaaggcgcatcggcgcctctcgcgttgccctttttctcttgcgccacagtctatgcacgtgctcgcttccggtgcctcgtgcacgtccgtgtgggtggtcggccatcagtcggctcgtctcctcgtacttcgtgagcgtacgagtgcgagcgctcgctagaccttaccctatatacctcttaatctggctatcatctgtatccttcataatatattttacaataaactagaattttgtgagccattctagaaaatgattgaatcttaggagggggttgtgaaaatcttcaatttatagctggttgatcagaagttttaatgttttctgactgaattcaggaagaaaagaaggaaaccactttt

SEQ ID NO: 470587 - DNA, 2648 bp, Homo sapiens
gtgtgacctcacagttggctctttttccaccaaacgcatcggtgcggggtggggctcacgggttggcgggctcctcggggggcttcctgccgactcgggactcaatgtgtggagctcttgagagcctggtggaccctggggcctgctgggggtcccttagggatggaatcagcggtggcagcagcagcagaggtggcagggaaggtggtcgagctggcatcgtcagggagactcggcgtcctgagctcctgcctgtgagtggcttccacccaccacagggcctttgcacccaccgttcctgccacacgaccactctcctctcacccgaccccttcatccagctaagtcctagtccctcttcaagggcttcagggcagctgtccagtccgtcctccgtggactggcgtcccttggcaccagcccagcacctttcctagctcatcgtccttcgtcacaggccatggtcctggatagtgctggctctgggccccacctgcaccctctcaccctgcccagcagaaccagggccccaggcaagggtgccccagggagccctacgcccctcacctgccagctcctttgcgacggccaagggctgagccccacgctggctgttcacgcggcctttgtacaggatcccatccacgcccaggatgtccacctcggcctgttggatggcccaggtcccgggttagggagcccccgacccgatctgcccccgaactttgtcctgctgacaatcctcctggataccgaggtcctggagctgcagccactgctgttccctgcagcagggcagtgggtcagcagcgacctggagaccctgtaccccagagcccaggacgggccccaagggcctggccagcatcgagggaagaccagcatttctttcagcttgtccctgggcctggaggatgtgtctctgcaggaacagggttcccaggctccagagtggcctccatgcggggcggcctccctgcggggcgcccatcctgctcacctcatctgttgccgctgcaagtactcgcagctgttggcgctggctggccgcagccgggacagcaggtgggctttgcggatggtgatcagctgtctgttggaggacaagggcacagcaggggctgtgggaggcgtgctaggccagcagagggctcgtctcccacccctccaggaagccttcccagcaggaggaaggaggtgcagactcaggtcaccaccctcgaatgccagaagcgtccacagcatagaagtagaaggggcccccccgaaaggcatctcaggacctctgatcatcacaggccggggcaccctgggcggtggtactcacgggccagtcatcatctccacaggccggtcacaggagatgcacttcacgcgcttgaacagcttcctgaaaggcacatgatcatcagccgctgcccctgctgggcccaggccatgtgtgggaggctgcagccagccagagccccagggctgcatccctcctgccagtgcccggcccagctcagccccacaggccctgcagtctccaaccactcttgtggtttctctgccgccccaaacacaacggatggtttttaaagctgtgtgaggggtggtctgaggacaggagccccataaatattgggtccctctgcctggggcactgtctgggtgggggtcaggggtcctggatctgcccagtccccttccctctctgagccttggtttccccattggcaggaatagggctggatcacctctgccagctcaggccagagcttccctcctcctcagtgctttcagccacagccaagcccccatcccctcatccaaaggtctggaatctttcctcccagagcttccagggtgtgttccccacagcctgggcagcaggacccctaccaggaggggctcgggcgggcactcacctcctaaagccagcagcactgtcaggatccagtcttaagccctcaatcagcagcttccggacgattttccagacctcttccatttctttcttcaagggatccagatcactgtggactaactgccaacagccaaggggaagataagaaagaatactctatgaattcacaccctgcctccttccagaagagggttgcagcaacctgggaagttacacggtgtaacaaaattcaactaaaatagtgagggagtccaggaaagggaaaatgacacagcttcgatgaggctcaacccctactagatgctattggtagaggggagctgcaaggggcaggtgacgcagtggtcaaaaagacgaacattgtccgggcccttctgtttatatgggtgggggggggtggtgggattcgtttgcttttcattgaagtgtaatttacacacagtaaaatgccagtaaagccccactggttcccagcctcaagtgcatccccacctcatgcagaaccttcgggaagggccagaaggtctaggtgaggaattctccctttgccagcccttctccagcctacccagtcctcctaaccttgaactcatccatgcgaatctgcaggttctccaccgccttgtccaaagtgatgtagcgatccttcatcatctctatttggttgccccaaattctctcaagttcttcctcctaaaagggggagacacagacaccccaggcctctgcttctgaagtt

SEQ ID NO: 470588 - DNA, 1697 bp, Homo sapiens
gagaaagtgggcacagccaggggccccaccgccctccctgcagaggcctagaggagaggcatcgcaagccagggagccccagggcgctgggtgggggcaccccgtggatgctccccgggcgcagcgcaaggcccgccggccccacgcccctctgcgcctcctggtggagccttccgttcctcagtttccccccggtgggacagcgcagcgtggagggtgcacagagcccagggccgcgtctctcgagcactcagcctgggatgcgcccagggcagcgcccccacacgcaagggcccaggggttggggcgagggctggggttgtcggtggggggtgggggtggccgcggaaccggccgctgcgcggctcctccagctgcaaaaggaactaattagagcggggcgagcgggaggaagcggctgcggcgagggaggaagcgcgcgggggcggccgcggggaccaccgggacggcgggggcttcgggggaccgggccctgcccttcccacccaccgcagggcgggggtcacccggagggtgggctgggcgggccccccgccaccctggccgagacaatggctgctattgtgtgcccgaccgcagcccgagcagacggcccccagctgcagcgctggcggagccacccggccccccgcccgcagtccccggccaggccagagatgggggggtctccctgtgtcatccaggctggtctcgatctcctggactcaagccatcctcctgtctctgcctcccaaagtgctaggattacaggcaggagccaccacgcccagcccgtcatcttctaatttaacagaaagaggaagtgagtccctggtcactcctgaaccagtcagagaaaccctggtctgtgggtgtccctgagtctattactggaaccatcacttcagcagtatggtcttacagatggggaaactgagggctgaagggggaggcatccagcccaggctgcacaagtaggtggcaaacccacaaccagaagccacgggcaagcagcatgaggacagtacccatagccaggtgcgggtactgtgaaggcaggtgctgtttcatccccattttacagatgcaaaaactgaggctcaggggagtgaagtgacccatccaaggtcccacagcttgtccgtggcagagctgggtttcaaccccagggagaaaccaatgcagtgctgcacatccaatcactattgagtgcttctccttcgtccgtaacgttcagcacggagaacagtgcctggcacatagtaggtgcttaataaaacgtgctgaatgaatcgctgggggttccctgcacagcaacttgggcctgccaaggtcacccagataattcaggcagagctgaagctggaagacgggccggagggcttccctggcctgcaccagcccgggcttcctaggagatgccccaccagaggcacttccttctccaacgccagcagggagggtgacaccgggctccgggagccccggcacacacacgcacactcacacagatggccatggcagtccagctgcagggccggcctggcacagaggcctccccatcctggtggctccgggcccctgctgcagtggcctccacccccccgctgcctgcccgctgctgcacctttgcacaactatgtctggtattttcctgtctgcccagctttgggggggtgcttggagctatgatcacc

SEQ ID NO: 470589 - DNA, 556 bp, Homo sapiens
ctgccgaatggatggttcggaagtgtaagctcgtcttcctggacaagcagctgcggatctttgaccccagaacaaagccgcgggcctctcaggggccgggagccttcctgctggcagctccagcacctcgggagggccaggagaggcactacttggcgctctctggacgttgcccagagagcacgcaggcccatgagaacagcagggatagccggctggcatggatgggcacctgggagcaccttgtgtctactggattcaaccagatgcgtgagcgcgaagtgaagctgtgggacacgcggttcttctccagcgccctggcctccctcaccttggacacctcgcttgggaagaaggggccccacccaggcccactgccaccacccactgcccgccatgacccacggcccgcctcctccctcctcgtgccagagccctcagcagccgctaattgaatccagagcctcgcgtggctgggcctgactcggcactgacatcaacacccgcgccacggggcctgctccctgggtctggctgggctgactctgtcccacca

SEQ ID NO: 470590 - DNA, 479 bp, Homo sapiens
tcatcaacaggaacggaggcaggactctggtgataaagatatgcaaacggccaataagcgcatgtatgaaaagatgctcatcgccccagtcactgggaaaatgcaaatcaaaaccacaagatgccacgttgtacccattaagatggctgccatcaaaaaaccccagaaaactgcaagtgttgatgagagtgtggagaaattggaacccttgtgcaccgttggtgggaacgttaaatggcgcagctactatggaaaacggcccttatctcagccagctttgcactgcttggctgcctgtcacattcaattccgtgccagggcattcatcctgccctggtcgtgtgtgtccccaaatgcaaggttctgggacacggggcctggtcttgatcgtcttcggttcccacaatcccgagcacggtgtctggaacacagcagtgtctcagtacatggcggctgaagagaataaaattagtgagaaa

SEQ ID NO: 470591 - DNA, 521 bp, Homo sapiens
ttggtgtttattccgagtggaatggggagctctatcaccatcgcctgcgggagccaacccactgccttccaattagcagtgagaggaagtggaaagggcaccaggcccaggggcttcaaagaagaggaggtcagggagatccctgacaagagaagcaatcagagagcccccaaggagatgagcacaacgggagaagaaggcctttctagttcccgtgaaagtggttactggactctaatggccccaggcaagcccacagcccacacagccccctcctggggacaaagccctttctcttccagctctcagacagagatggataaggggggtctgcacagcagattgacagacgatgagaaaaaggagtgggtctcactgttacctggtgcacttaatctcattcgttccctcattcattcatcctatgtagaattcaggggctactaggtgttagaatgaggagacatcagaacagttgagttggtgaaatgaaacccgatcacacacatagtgaaataatc

SEQ ID NO: 470592 - DNA, 864 bp, Homo sapiens
gcattgccagcacgcaggcgtttgtgacaaatcttttatagtctagtatatagctctctcagataggcagctgtgatatgattgggccctgtgatttctggctaggccgcctggaagctgctaccgctcaacaccagccaattgtttccatgtgcaaaatttgggtgcagagttaccaagctgtccagtttttaagagattctggacatttggaatatttcatgagaaatcctctcagttgtgaatataaacaaactgtggtacatccaaataatggaatacaactcgccaataacgagaaacagactattaacatgcacgacatatgcaacaacaacagagatgaatctcacatgcactctgccaatagtggctgtgagactgtatacatttgtgacaacttgcagaactgcccactaaaaaggatacattttactgcatgtacattatgcattattaaacctgacattaaaaacgcaaaagctgaaaaaaaaactggggcctattgagattcaacccaggtcttttgattttatctccagagcctttcatttttaacatatggtctccttctggaaggaggcatggaagggatccaagatatgccaaagaagcaatttacaaattaacgtttggagtagcattctcagtaaattgggactgtctccacccatagttttgcctaacaagcttcccgatcacccaggtacttatttctgataaccttgaatatcatgcaggtcacattttattttgtgattagagcagagcaaacactatttactaatgaatttatttgtgttttccgtcactgaaatttgaaagacaaaatgaaaatctaggtctctatgctgttgcaaagta

SEQ ID NO: 470593 - DNA, 1975 bp, Homo sapiens
tgctgcagactctttgacagcaggaggaatgggaatctggtgcattctcgcgccggtggcgaggttagggcccgcgttgcgacgtggtgcagcgcatattttcacaagtgggtctcccttgtccgggactatggccaccgactcgtgggccctggcggtggacgagcaggaagcggctgtcaagtcggtcagtagctcagctcctggcgaggaggacatgaccaatttgcagatcaaggaagagaaagtcaaagcagataccaatggtattatcaaaaccagtaccactgccgagaaaacagatgaagaggagaaagaggacagagctgcccagtccttactcaacaagctgatcagaagcaaccttgttgataacacaaaccaagtggaagtcctgcaacgggatccaaactcccctctgtactcggtgaagtcgtttgaagagcttcggctgaaaccacagcttctccagggagtctatgccatgggcttcaatcgaccctccaagatacaagagaacgcattacccatgatgcttgctgaacccccacagaatctgattgcccagtctcagtctggcactggtaaaacagctgcctttgtcttagccatgctcagccgagtggagccatcagacagatacccccagtgtctgtgcctctccccaacatatgagctggcgcttcaaacaggaaaagtgattgagcagatgggcaaattttacccagaactgaagcttgcctatgccgttcgaggcaataaatgtgaagctggctttgcctttgaaatacctatgaaaatcacctgggtctccacagtggaaagaggccagaagatcagtgagcagattgtcattggcacccctgggaccgtgctggactggtgctccaagctcaagttcattgatcccaagaaaatcaaggtgtttgttctggatgaggctgatgtcatgatagccactcagggccaccaagatcagagcatccgcatccagaggatgctgcccaggaactgccagatgctgcttttctccgccacctttgaagactctgtgtggaagtttgcccagaaagtggtcccagacccaaatgttatcaaactgaagcgtgaggaagagaccctggataccatcaagcagtactatgtcctgtgcagcagcagagacgagaagttccaggccttgtgtaacctctacggggccatcaccattgctcaagccatgatcttctgccatactcgcaaaacagctagttggctggcagcagagctctcaaaagaaggccaccaggtggctctgctgagtggggagatgatggtggagcagagggctgcggtgattgagcgcttccgagagggcaaagagaaggttttggtgaccaccaacgtgtgtgcccgcggcattgatgttgaacaagtgtctgtcgtcatcaactttgatcttcccgtggacaaggacgggaatcctgacaatgagacctacctgcaccggatcgggcgcacgggccgctttggcaagaggggcctggcagtgaacatggtggacagcaagcacagcatgaacatcctgaacagaatccaggagcattttaataagaagatagaaagattggacacagatgatttggacgagattgagaaaatagccaactgagaagctccaccagccactgatgccagccctggcactgcccctgcacaggagacaagtgcatttagggcacaggccccgacatcaccccaaggacaacggcagaagtagagagaaactacctacctcacttcaaattatgtttggacttgacaaaaataggtgcaaatgatggggggcaatagaagaaaaaatttgcattttggaaaattgggtcctttccccacttttttaaagccacattcccccatctttataataatctggtcacagtgggagaattctctcttctcccccactgattaatttattcaatcatgtacagag

SEQ ID NO: 470594 - DNA, 708 bp, Homo sapiens
ttctccacgtctccaccagactcaggagcccagctggcttcactcagtggatcccgcattggggctgcatggtggagctgcttgccagtcctgcgccctgcgcccgcactcctcagcccttgggtggtcgatgggactgggcgccgtggagcagggagcggcgctcgtcggggaggctctggcggcacaggagcccacggcgtggctggggaggctcaggcatggcgggctgcaggtccggagccctgccccgcggggaggcagttaaagccgggcgagaaatcgagcgcagcgccaggtcggccggctactccgagtgcggacccgccaagcccacacccacccggaactcgtactggcccgcaagcaccgcgcacagccccggttcccacccacgcctctccctccacacctccctgcaagctgagggagccggctccggccttggccagcccaaaaaggggctcccgcagtgcagcggtgggctgaagggctcctcaagtgccgccaaagcgggagcccaggcagaggaggcgcggagagcgaacgagggctgtgaggactaccagcacgctgtcacctctcactaccatgtcctcagcactgttctaaggcctgaggatacaatggtgaacaaaccaaacatcctgctttaatggagcaggatgggaataatgacgataatcataatggttaatactttttgag

SEQ ID NO: 470595 - DNA, 470 bp, Homo sapiens
gccaaaggtttctgttttcaacctggatcctattggaatgatgggaaccttcccaaagtccaagttcgcaggtgacagccaagggccagccttgcaaataggctttcctaaggagagcggtcaggcctgctgtgttctcttctgcccgatgaccaatttgcagatcaaggaagagaaagtcaaagcagataccaatggtattatcaaaaccagtaccactgccgagaaaacagatgaagaggagaaagaggacagagctgcccagtccttactcaacaagctgatcagaagcaaccttgttgataacacaaaccaagtggaagtcctgcaacgggatccaaactcccctctgtactcggtgaagtcgtttgaagagcttcggctgcggctcatgtggaaggtgacaaagcttgcacccaggtatgtctgaatagaaacagtagctttccagtgttccaaaagcctatccc

SEQ ID NO: 470596 - DNA, 1770 bp, Homo sapiens
gtgtaatcccagcattttggaaggccgaggaaaccacagcttctccagggagtctatgccatgggcttcaatcgaccctccaagatacaagagaacgcattacccatgatgcttgctgaacccccacagaatctgattgcccagtctcagtctggcactggtaaaacagctgcctttgtcttagccatgctcagccgagtggagccatcagacagatacccccagtgtctgtgcctctccccaacatatgagctggcgcttcaaacaggaaaagtgattgagcagatgggcaaattttacccagaactgaagcttgcctatgccgttcgaggcaataaatgtgaagctggctttgcctttgaaatacctatgaaaatcacctgggtctccacagtggaaagaggccagaagatcagtgagcagattgtcattggcacccctgggaccgtgctggactggtgctccaagctcaagttcattgatcccaagaaaatcaaggtgtttgttctggatgaggctgatgtcatgatagccactcagggccaccaagatcagagcatccgcatccagaggatgctgcccaggaactgccagatgctgcttttctccgccacctttgaagactctgtgtggaagtttgcccagaaagtggtcccagacccaaatgttatcaaactgaagcgtgaggaagagaccctggataccatcaagcagtactatgtcctgtgcagcagcagagacgagaagttccaggccttgtgtaacctctacggggccatcaccattgctcaagccatgatcttctgccatactcgcaaaacagctagttggctggcagcagagctctcaaaagaaggccaccaggtggctctgctgagtggggagatgatggtggagcagagggctgcggtgattgagcgcttccgagagggcaaagagaaggttttggtgaccaccaacgtgtgtgcccgcggcattgatgttgaacaagtgtctgtcgtcatcaactttgatcttcccgtggacaaggacgggaatcctgacaatgagacctacctgcaccggatcgggcgcacgggccgctttggcaagaggggcctggcagtgaacatggtggacagcaagcacagcatgaacatcctgaacagaatccaggagcattttaataagaagatagaaagattggacacagatgatttggacgagattgagaaaatagccaactgagaagctccaccagccactgatgccagccctggcactgcccctgcacaggagacaagtgcatttagggcacaggccccgacatcaccccaaggacaacggcagaagtagagagaaactacctacctcacttcaaattatgtttggacttgacaaaaataggtgcaaatgatggggggcaatagaagaaaaaatttgcattttggaaaattgggtcctttccccacttttttaaagccacattcccccatctttataataatctggtcacagtggatattattcctggaagtagaattgttgggtcaaagagtagggacatttaaaattttaattcattgtcatttacacttgccaaaggtttttaccaatttatgttactgtgatacaaaaattacgtgcttgccaacagtattatcaatgtttaaaactttgccagtctaagtggcaaaaacagattatgtcattgtttgattttgatttagtgaggcttggcaaacattaagtttcttagaaaatcttttctgttggggagctgcccattct

SEQ ID NO: 470597 - DNA, 1220 bp, Homo sapiens
ggaatgcaggacttgggaatgcaaacttcccatggcagggacgggacgcgaggtgggtgggaagagcaatgtacgatgcgggagacgccaccgtgcttgtgggaagggcagcgtcaccatgctaggaggaaggggccttggcaaggaatggggagttggggctccccgtgacagtgagggaggaggtgggaggaggggcctggccgtgcattgtcccttccagcctgagccacaagtgcagcagcaactgggcagtctgttgggagtgccctggcagcccccgggccccccaatacagcacagccctgctgatcaagagacaagcacggtgacccagcagcagtggcacctccagggcctggatgaagttgtggtcaggcagaagagggccccacagggctcctggaaggttggcacactcttccatggaaagagagtctacgctgtggccatcagcggctcaacccaccacgtgtacacgtgtggctctggctacatcagggtatgggatgagagtgcgctgcatgcgggggagaaggcccctcgggcccagctggacttgcaggaccgtgttgttacctgcaagctgttccctgatgagcggagcctgatcacagggggtgcgtcccaggccgtgactctctgggacttggcacccaccccccaggtcagggcacagctgacctcgacgggccccacgtgctattctctggctgtctcctctgatgcccatatctgtttggcttgtttccatggatttgttgagatttgggatttgcagaaccaaatcttgatcaggaagcacgaagttcctgtatacgggtcccgatgtgtggacatcaccggcaatatattctggacaggaggtgaagacaccatcctgtattcctgggacctgaggagctaccagaggctgcaccaacacaacttacagaatgagatcctcagcattacccacgaccccggtgaagaatgggtattggcgggcctgagaacgagtgatatcgtgttccttcacactcgtcggaatgagcagtttaaggctctcatgaaaaaatacacccgccaccacagcctcaagtttgcctcctgtggtgagtgagaagccaggtgacacctctggggagctattttgtgaccgcgatagatacgcgcctcagtggcttggaggcaccttctctgcaaaagttgtttcaggtactggacacagagggatgccc

SEQ ID NO: 470598 - DNA, 634 bp, Homo sapiens
ggaagcgccacaccttctctatggacccctcaagcatgagagtgagagagcgagtgagcaaaagaaatgactagtgaccagttgagaaagtcctgtcttccattgagccatttcactcctgcccatctactctcaactgctcaagagccgctgaaccctctgaacacttcaggaccctcagctgcaggtctgttggaatttgctggaggtccaccccagaccctgtttgcctgggtattagcagcagaagctgcagaacagcgaatattgctgaacagcacatgttgctgcctgatcgttcccctggaagctttgtctcagaggggtacccagccatctgtggtgggctctacccagttcaagcttcctggctgcttggtttacctactcaagcctcagcaatggtgggtgcccctcccccagccttgctgccgccttgcagtttcatctcagacggctgtgctagcaatgagcgaggctccatgggcgtggggccctctgagccaggcgagggatataatctcctggtgtgccatttgctaagaccgttggaaaagtgtagtattagggtgggaattacctgatttcccaggtgccatctgtcaccgcttcccttggctaggaaagggaattc

SEQ ID NO: 470599 - DNA, 635 bp, Homo sapiens
cgtgggtttgatctagctgatatggcttgcagttttcttttgttttttgcatatcgttttatttggcgcttggtgcttcagacctgtttattcttcttggcctctgcagcagcttctcaaccatccagctccatttggctccactctagaatgagtggtggttgtggatcccttacaagtgtagccaggtggaagcccgtctgctttcttcaatgtggtcgctggtcacgagtgttcaggaaggatggaggtgacacagaacagacactccagtggagtgcggatgacactacagaaaagagtgatgaggaaaatatcatcaggtacttctgccctagacttgctgaatcagaaactctaggggtggacgcaggaatctgggttgtaacagttctctgggtgattctgacgaatgttcaaggcaaacaaccaggcgctatgcatggaagtcaaattgcagaacgtaggtcctgtgcccttggtatttctgagctgaccagcagaaccttctctttgtcactgacttttgttcaaggtttgtctccctgctcagatcctgcctcataggctatctagtatttaagtctctttaaaattctggctacccattagtgacccattctgtgttgatgttt

SEQ ID NO: 470600 - DNA, 1076 bp, Homo sapiens
gctgataacgtgagctaatattgactgtggctgggtgccagctccacatgaggcttttccatggactactgtattgatgaactcatatgcttccatggattccctacactgatccagggacagaaatggttctattttatggctgcatcattgtctgtcatcatcaccatcaccaccatcatcaccatcaccattgtcattatcaccatcgtcatcaccactgttaccatcatcaacatcatcaccatcactatagtcatcaccatcttcatcactatcatcatcaccactgtagtcatcaccattatcaccatcactatagtcatcaccatcttcatcaccattatcattaccatcatcatcatcaccatcactatagtcatcactgtcttcatcaccatcatcaccatcactatagtcatcaccatcttcatcaccatcatcatcaccactacagtcatcaccatcatcatcatcaccatcatcatcatcaccatcactatagtcatcatgatcttcatcaccatcatcaccatcactatagtcatcaccatcttcatcaccatcatcaccatcactagagtcatcaccatcttcatcaccatcatcaccaccactatagtcatcaccatcttcatcaccatcatcatcatcaccatcatcaacatcatcaccatcttcatcattactaccaccatgtttatcactatcatcaccaccaccatcactactgtcattattgccattttcactatcttcatcatcactggcaccaccaccataatgatcatcatcatcattgatatcattatatgattattgctattctttaacttgtcctattagcccaggacctcctccaggtctcccttgcttgcgctatgtggccgtttccctaataaaaatcagcacctctgtggctctgaatttcaaactcagtagtaacaatcacagtcatagctactgttcactgagtttcattcattatctgtgaaactaaggtggtaattaaacctcataatgctgttatgaggattcggcgatggagccttatgtttgacagtgtttggcccatg

SEQ ID NO: 470601 - DNA, 583 bp, Homo sapiens
tcctcctcctcctccttctttcccctctctctctctttctttttgagacaggctcggcacctggtacatggtgtatgttccatttgtgctggccacggtgatgatgatgatgatgccatctctccggctacactgcgagcacagatcacagctctctgtagctgatgctggctctacccactgtattcggggctggatgaaggtggggccatggaagcgttctacacaagaactcagcagtcctgttggagccagattggaaggaagcagatcagtggagggtgcttggaatctggcagcatggggctttttaattaaacctataactgtgagaaaaggtaactgccttatttctgcagcttgtgtttctgtctgcctgccagaaactgaacaaatcaatgcacttccagaggttctgaggatcttgacaagggggcctctggttttgggatggccagaccctgcagggataaactctcgagtggccagggtgtcaggtaccaattctggagggtcaggtgttgccttttacatttaaatacccatagcaggtgtgattagcaactgcaattcaggggaaggc

SEQ ID NO: 470602 - DNA, 608 bp, Homo sapiens
agctcccaggtgatgccagtgctgctgcagggtcaggcctggttagcatgtggtgctctcttttggtgctgtttggccccggtgttctttggaatttaaaaatcaaactggcatggaaactgctttaccccaaaattttggttcacagccttcattggattacctactggggcaaacagagtactcaagctatactccatatttattggaagccagttactaagacccgcttacactcaaaaggagtggaatcgtggtcctcatctttcctagtggtctgcatttacctgggagagtttgacctcgaagtcagcagtagatgtgttttagctcccccctggaatcttggctgccccaggagcatggggccagggatgggtcctttatatatgcagagattatatgtcctgaaagaaaaatgcaggaatggtaacctctcattcagaaatgcagccagaaagggccgggtagcaaatatttttggctttgcaggccatatcatctctgttgcagtcacttaactctgctcttttcatacaaaagcagccatggacagtaagtaaacaagtgaacatggctgtattccaataaaacattatttacaaaaa

SEQ ID NO: 470603 - DNA, 549 bp, Homo sapiens
tgtttgtttctttctctctctctcttttttcctacagcattgcgatagatttaatctctctctctctctccctctctctctctctctctctctgtgacatgggacttatatgattgacacacaggaccacccacttatcatttacactagtggaagtaagatggttccaaaagctgggcttcagtgtgggcaccgagtcctaggagctttcctatcttctcaggtccaagggtggtgcctaatgttaatttcagggaggtataagactgcatacgatacgcgcttcttccccaagcactggtgccataaatggggccatacatcaaacccattgattttctacttcagagaccccaagagccatacaaccctaaccctcagtgcccctgctgtctttatatgccagacattgttctgggccccaggaataagcattgaacacaatggacaaagcctcttctctcttggggctgactttctgacaaggaagacaagacagacattaaacaggtaagtacaaatcaggcggatatgtcctaggaggaaaaa

SEQ ID NO: 470604 - DNA, 502 bp, Homo sapiens
cccagaaggccctaaaatgcttgaccccagcttttcactctggtgccatcaccctccaatcaccactcccattttcctcctgaaacattcctctcctttgtcatatgctccaccctgtgaagactttctagaactgcatgaaaccactaatagaaattgggctactgccctgcccagtcagccagcctactcccagaccaagagctggctcagaggtggtcccatcgcacaaagaaagccccacacagccacctggcatgctacacccatacctaccctgagagccagcccagtggtaggcccactctccaagagagcccactacacagcctgtcaacccaccacacctgcagatacctggcccgacaaccacctctatgccctaggccccagaaacattatgttaccattgtcacaaactcccatagccaaggcccctgacacaattgcagacattgcagacaaagattatagctaaataatctgtatggagatcatatga

SEQ ID NO: 470605 - DNA, 596 bp, Homo sapiens
ttgtaaacacaatgcgtaaaattttttccacagcagctggtactgactgcgactatggagaagatatcatgagcgaaggatacccatgtcaactccccggaacctgtaactgtgactctatttggaaacagggtatacgcagtgtccccagaagcagtgtcaatttcagacgtctgggctccaacaccgtgagcaaatgtatctctgctgttttacgtcactcagtttgccgttattacagcagccacaaaaaactagcacagggtcctttgctctgggcaccatgtgagatatattttgctgctaatgggggctcttggcaggaggggcgcctaaacttcgggtactgtggaagtgcagaaagggccacattgcccactgttaccccatctgtacctacttttgaggaaatggtagttcagctctgtagggtaaatgcgcctgacagcaatagcttgagcataccttgagaatgactctctgaagggtatatgtacctgaatgtctgttcctagctagggaatctgggagtggccaatcaggagatacattccctgtctatgaggaacaactgagccccctggcctcacaggccg

SEQ ID NO: 470606 - DNA, 854 bp, Homo sapiens
tgacctgggagatggtggcaattcccttgattaacttaaggcccaggttcctcatcttcagcattttctttcaaatatggtataaaaggtacaatatggagcttggtggcaccaccagggaggtgatgaggaagaaggtgctgcctgtaacagtagcagaagaagtgagaatctccctgacccctctgcctcccctgcagactccaacagcaaaacgggggcccacacaggatatgggatccaagagggatttttctgcctgttgtggcctccaaattctccaaatagcaggcgggggcccccaccagggcgtctctgatgaaaacgttcagcttgatgtggcgtctctggttcctctgaacgcgctcagagacagaggcgttgagcggtgctctctgtgtttgaaggtgtttctctacagcaaacaccaggcggagaagagaaaaacccaaaccacttcaagactgagcaactttgacatcacccatcagtgccagaggtcactgcactgggatcggagtgcaggagccacatcttgtgctctgagaaaggatggtcatggtggtgatggtgatgacgacattgatgatgaaaaggataaagcttccctttctggaggccagaagtctaaaatcgaggtgtcggcagggctgcgcttcctttcaaggctccaggggaggatccttctctgcctcttcccatgtctggtggcggcgggcaatccttgacgtactctggcttctggctgtgtcactccaatctctgttctcatttctcatggtgttttctcttctgtgtgcctgtgtatctaaatctctcttttttaattttgatttttattgttttttgagtcc

SEQ ID NO: 470607 - DNA, 931 bp, Homo sapiens
tggaatcttacaggactagttacatgggtcatcgagtcaatgcccaagatgaagaagccttttctttctgaataccctttgggttcaaaaagaataccgtccaactcccagggcgaatttggtgtttctcaaattgttgaccttgaatcaactgcattagagtcactgaggctggtcctccatgagaaagcaccctcagttaaaaatgcagattcccaatctctacccccaaaatggcctcaaccagactttctgtggatagggtctggaaattccaattttacatgcttcctccgagatgtgatgcttattcacaatgacaatcgaggaccatggggaagaaacactaaatgccccattacgaatgctcgagacccattacaaatcacagaagccctgcttgtggaagccccgcttgtggaagcccctgcatttaggaaatggggccgtcgtctgctggtctgcttcaagctctcttccctctcctacagagcataggagtggagggcagggaggtgtcatgtcaccttgttggttcaagtttccattgtacagccacttttcctctgcccagatctcctgcttttggattctggctctaaagcatgatactctccagcgggtagtggcttcctgaatttccttgtttctgagtctccttaccttttccttttttcctttttagcactcctaagacctttgtaactagttgctcatattaagtttcctcctctgaacctatctgggggtgagttctgttttccagactctactctgacctatgcagggagaaacacagtaaaagttgtcatacaaatgactagccagctacccatgagttattgggtacctctggtgggccaaatatggcgctaaaaactttagatatattatattagatatattatttattcattcaaaagtatatatt

SEQ ID NO: 470608 - DNA, 816 bp, Homo sapiens
cagcaagtttgccacttattccctgctctttctcaaggcatcgtccctagaatgctcttctccgagatgccagcctggctcattccctcatctcctccacatctttactcacatatcaccttattgaggccttcccttactacctttttagaacactgcaacctgcttcacacgctgtccatgggaatgatgcctataaagccttcagcacagtgcctggcacagagaaagcgctggctgaatggagccatttgtaatgataacaatagtgatgaggaggaggggccgaccctcctggggtcagaggagggggcagtgggccataactcacactttccaggcaggggaaactgcttgcactctctggaaaccctgagtccagtcttcctggaatgtagggcaggaaggcaagaagcgttggatgaagggggcgggagatcccatctagggggaccttttatgaactgctccatttgtcctgtagtaaatgaaaatccaggaagagattttaatttaggggagaggagatccagtttgcaccttcgcatggtcaccatgacaagatgtgtcatgagagagccggttcggagctggttgcaggagtctgggtagatttggggtttgtctcatgttttctcatgattagattgaagttttgcattttagggcaagaatatcaaaagcaatgtgcccttctcagtgtttcaaaggaggcagcaaggcatcaatatgtcttattactggtgatattaaccttgatcacttggttcaggtgggtttcacaactgtaagggtactattttatctttcatcatt

SEQ ID NO: 470609 - DNA, 704 bp, Homo sapiens
gttcatctcacgctgaagttgacgttgcaatttcaggtgctgcaagaatgggttttgtccagagtttttccatggtctatgactactaccatcaccaccaccagggctaccaccactatgaccatcaccaccacagcaccaccataatcaccagtaccaccattatcatcactactgccaatgccatcaccatcactacatccgtgctaccaccaccttcaccattaccatctcataactaccaacatcaccaccaccaccatcactaccaccaaccatacaatcaccatcatcatcatcattaccaccagagataccaccactaccatcaccatcactgtcccgccactaccactatcatcatcaccaccaccaataccaacaccaagaccatcatcaccaccagggctaccatcatcatcgccgtcacaaataccatacttttatatatccaatatgctaaactctctccttcaaaaattcaacagtattgaattgcaggtatccatccctttttgccagagaattcgggaagttgcaggaatggaaagtgagttgctcgatgtcacaaaggaagagccaagataagaattcaagtgtttctcagtcccaaaccatgttgcatttttttgtatgctttcactaaaccacttcagtccaaaataatcttattatttaggacatttttccttttccaaagactc

SEQ ID NO: 470610 - DNA, 847 bp, Homo sapiens
tgtgtacaggagctcatgactgctgtagatcgcagcttctagaagccatctgcactccttgactcatggccccctctttcatcttcaaagccagcagcagagcatcttcaagcctccctctaaatcgtattctcctgtctccctcttgtaaggatccttgtgattatattgaatacactgagttcttggaattagaatgtgggcatccttggagcatcattatgtctacccccaagtatctactgtggagtaaaacctgcctatttattatcaccatttcattttattgcctgttgaaagctcctattgaagactttcctaagaagcaatgggccaaacttccagattcccttttcatttccatggcaatggtccaaggatgccagacaccaaccatgacctttcagggcttaattgacagtgattcatctcacttgcatttggactcaggagggccttttgttgggttgaagaagttttcagcaaccaacagaggcatgggactccatcaatatttgtggattaaataagtaaatgaatattcagaaggtaacagcctactttcgagggtcatttttgaagacaagaaatgtcttgtagaaaattatttgtaattgacaaaagagcaacatatttcagtaagcatatactgccagggactcacttatttaaaaaaatgtggtggctcatatgcctttcttcccttgggctgaaacattttcaaacacagtggttgagtccttagtgcctgaagcttgttggtgcccaccaaatacttgtgaaatacaagtgagttatgtaaatcatcaaataattcatggaaaagccaagatctcgtagaagcttt

SEQ ID NO: 470611 - DNA, 540 bp, Homo sapiens
ttaggctgcagacacagatgtaggttactgttcagtgttgatttagcccaaccagcactagagaatgggaccattgcccagagttctctcctcctctaaactttgtgcctgcatggttgtgagtgtggcaggaagaggaggaggaatagaagaggattcacccccgtgtgtgcaggtaaatgctacaaggtggccacagggggacagtagtctctgtccctgggaggagaactactaccatagcaaaggcgtcatcttaaacagcctcgacaactcaaacacaaggataaaaatagaagccccagaaggatttagtgaaaataaaatgaaacctgagagccccagaggcaaccctggatttgctggagaggcaaagcacagtgcaatctggtggaccccaaggtcaagggcaggaagcattattgcaggtgagagcttaggaaggggcctcttgacctggccccggggtggacaaaaggctaggagaactacatgacaataatgattttaacaaggatcaggcttcactcagtggtctcc

SEQ ID NO: 470612 - DNA, 725 bp, Homo sapiens
ggcgctgttcgcgtgcacctactcgcgttcgcgttgcaccgcccggccgcgcgttcggccgtcgatgtccgcgtgtcgcctaccggtatcaggagtcgcgttccgagtcgcggttctccagacgcgataccgtgttgccgtgtccctgtcccctcggccgcgccgggtccatgtccgccgacgcgcgccgctacccagttcgcatccgatgtcccatgcccggtccggttcgcagtccgttccgccgtccccgtacggcccgcagcgtcgcggcgcgccgattccgcgatccaaccgagacggtgccctcccagtcctggtctagcgcctccgcgcccgtttcgggcccgctccgtcgccgtcccgcgctctcccgtcatctcgacgccatcccggcccgccccgatccctttcggcgcggccgccacggcgcgggctatccgccccggccgcgcccgtcgcgcccgcccgggcggtgctcacgttcggtgcccccgtcccctcgtgccgcccgtccgccggcggaccggcccgttccgtccgcccgcgcgcgcacccaccttccggcccgccacccaagcctcggacgtgcggccttcggtgccgccccccctcccaccgccgggggatggtcccaccagcaccccatcctctggctggccccggccccacgctctgagcaggagctgcccacagagcctttgaggtagttgggctgttcccat

SEQ ID NO: 470613 - DNA, 947 bp, Homo sapiens
ccgcccagcctgcagctgagcttgttagtccacagtgatctggatcccttgaagaaagaaatggaagaggtctggaaaatcgtccggaagctgctgattgagggcttaagactggatcctgacagtgctgctggctttaggaggaagctgttcaagcgcgtgaagtgcatctcctgtgaccggcctgtggagatgatgactggcccacagctgatcaccatccgcaaagcccacctgctgtcccggctgcggccagccagcgccaacagctgcgagtacttgcagcggcaacagatgagggaacagcagtggctgcagctccaggacctcggtatccaggaggattgtcagcaggactggggtgatggcccccaaaacgccaccagcctcaagtgcaagtcctgcaacctgttgacgctctatccctacggggatccccacgtgatcgactatgacagcgccgaggtggacatcctgggcgtggatgggatcctgtacaaaggccgcgtgaacagccagcgtggggctcagcccttggccgtcgcaaaggagctggcagatcaacagctgaccagagagagggccgtggccacaggaccatggcctgtgacgaaggacgatgagctaggaaaggtgctgggctggtgccaagggacgccagtccacggaggacggactggacagctgccctgaagcccttgaagagggactaggacttagctggatgaaggggtcgggtgagaggagagtggtcgtgtggcaggaacggtgggtgcaaaggccctgtggtgggtggaagccactcacaggcaggagctcaggacgccgagtctccctgaagggtggagactggggtggggcagtggggtgacaaggaggagacttgggccagaccccagaagctgtgtgttaatatcacaggcaagggttgggccagcgggagaccc

SEQ ID NO: 470614 - DNA, 606 bp, Homo sapiens
acagatcggagccgtggggccgcgcgaaggctcggtgtagcaacgatgcccggagggggccgagcaagcgccccgccccgagtccccgcccccgcgccgccgggtccgcgttccagcgcgtgcctagcagtccgcgcctggggccgggcgctcaccggacttcggagggtagcgataggccgagttcgcctggatgtcgatgtcctccacccccgcgatgcggcggctgagaatggagcccatggtgcgcggcgctgccgggcagagggccagggccggaacgggagcggcgacagcggcggggtcctcacgcggacatggcccggaccaggccgcacggacgctcgtccacggccgcggaggcgcctcgagcccccacccccggctcggcccggggcccgacgccacggcggccctccgcctcccggtcccggggcacgtcgggaaatggagtcctctcgccgccgaaggcgccgggaagcagcgcgggaagccccgctgcactaacatattaactctttggtcatttcctcatctgttcgcttacagactctcctggagccccagcgccttccacttgccccctctgaaatagctccctgagtc

SEQ ID NO: 470615 - DNA, 1593 bp, Homo sapiens
gccaggcgagcggcgcgccgagccaagccaagccaggccagatggctctgcagccatcagggactgctcccgtccagcctggccccactttagctgtgcaaacatttctttatcccaacaagacaattaaacccagcagcatgaaaaagagtctccatgactgtgttgggagtgaacaaccagaaacaaccacacacatcacaggagttcttgcccccggggaggcttttgggacccaagaatggctgttcaagtacatcaaagatgagagcaaagcagaacatccaggagctgctgtgagccatcaggtttcctgcctacctgtgactctgcccgaccacagtgaaggtcaaggaaagagggcaaagccaagccacgtgtggtcagtgcccagggtccatccctggggaatcacctgtgaagccaggtggatggacaggcaagcaaaccagaatcatctatcaggaaagatgatgcttgacccaaatcgctatatttctgtctataaaaatgcatgtttaaccacaaaagaaatcctgcctaccagtacccagatttaaggaaagaacatgtgtgcattacaccatgtctgcaggcctctctttccagtgggctcacaagtggacatatctgcagattgatgtagtgtgtgagcagggggtggctgcagcagtaaaaactgtcagtgtttccattatacaactgatttcttaatgacctaaaactcagtcataaaaacttctgctctaagtaaaggacacacaccaccattctcatctcccacccccacccaccaacaaaactctaaagctaaatgcttacttcggagtttgactgctgcacttaattaaaacatttaaaaaatattttatgaaaagatatttatatgaagagaactgaaaaatgagtcaaccatatcagcaattaactctaaattttaagaataaatatatatacatatatacacgtgtgtgtgtgtgtgtgtgtatatcaaccatatatggttaatttgggcaatctggcgaaagcactgtatcctatcactctgctcgtctgaacactttctatcctctgtcttttcatatccccataccccgtcactgcccccatctgcccctgaagctttctctccctttggaagcagtcttgtatactgtcactcgattatctgagaaatattacttatttcaaaacggttctgtagggaggacctgaaaggcatctagtgggaataatcaggccttctaacgacccttaaatatgtatttacataaaacagaccataaatattccgacacacgtcggcatatgacaggagccaagaaagctgctgcagactttgtcttagtgcctcttcaacccttccttacagaaaaatacttctcctgccttccaaaaattcgcaatcaaaagcacaaacgctatctagtatgacccagtgagggatgtgctaaccacctaaggtaaggaagggagtaaaaagcacaactccagggtgaccacagggtagcacagcctccttttcactttgcacctttgttttttattaaagattagtcacaaatgcaactctggataataacgagggtgtac

SEQ ID NO: 470616 - DNA, 898 bp, Homo sapiens
aaatgttaatggcaaatccaaggcagtttacaaatctacttaagagagggaatgattccccagtaatattccctgccctgacccaaagtgctggttggcctccctcccagggaagactgcttcttgcgtaacgccggccacagaaagagactccgatggacttacaccgggcagccttcaagatggagaactcatcctaccttcccaaccctctggcatccccagcactgatggtcctggcatccacggctgaggccagccgtgatgcttccatcccttgtcagcagccacgaccctttggtgtacctgtctcagttgacaaggacgtgcatattcctttcaccaacggttcctatacctttgcctctatgtaccatcggcaaggtggggtgccaggcacttttgccaatcgtgatttccccccttctctactacacctccaccctcaatttgctcccccaaatctagattgcaccccaatcagtatgctgaatcatagtggtgtgggggctttccggccctttgcctccaccgaggaccgggagagctatcagtcagcctttacgccggccaagcgacttaagaactgccatgacacagagtctccccacttgcgcttctcagatgcagatggcaaggaatatgactttgggacacagctgccatctagctcccccggttcactaaaggttgatgacactgggaagaagatttttgctgtctctggcctcatttctgatcgggaagcctcatctagcccagaggatcggaatgacagattgaagaggggtgccaccgacgtactgaagtgaatgtcatttcattaagaagtgtcggctcctagggaatttggggggcctaaagaaacatgtccacccctcctctctttgctgtcctc

SEQ ID NO: 470617 - DNA, 760 bp, Homo sapiens
cgggtaccctgaccctcaggaagatgtgtttcttaggtgctgagtttgcactggatttgagcctggtgattctgctctggggcaacctccccctcccctctggacttctctttgtcatgacagcccccagggtagggtggagtggggtgggacagctggggacaggaagcaggagccgtactctggcctttgggaggctgctgacccacaagcccttgtcccggcagccctcggacgacgagaacagcgacaacagcaacgagtgtgtggtgtgcctgtccgacctgcgggacacgctgatcctgccctgccgccacctgtgcctctgtacctcctgcgccgacacgctgcgctaccaggccaacaactgccccatctgccggctgcgtgagttccccggccggctgttctgtggaaggttctggaaattagggactggccacaccacggtggtcctgggatagggggccacaggtccgttgatggctaagaaagaagagttgtcattcatctagtctgtgctgaacgtgggcgtgttggctgtcggagtcagtcaccgtgagagagctggcagggacgctagcacggggcattcagatcttcacgtctgcctccagccaggcaaggcttgcagaacaaagggctacagaggcgctccagggcagatgaactgaacgaaaattgatgaggactctagaggatccccgggtacgtacgacggttcctcaatttttcaatctttttgccctcatcgtgttcg

SEQ ID NO: 470618 - DNA, 686 bp, Homo sapiens
agcctctccattttgcaggtggggaaaccaaggcacagaagggttagataacttgttcaatgtcacacatgtattcattcagtcattcaacagatggctatcaagggcagcccttttccaagaacactgggataatagtgaacaaaagtctctgtggtccccacctcgacttgcctatgggggtcaagttgcttcctgagtacactcatctggatgcaaggctgtccttccttggtgaatggtgggtccctctgatcaatatgttcattcttgctgtagggagagaggattctttgagcccttggtcctcagcctcagcatcactgacttggtggccctcgcctcatgcattgtcagccagaacttttggtttgctcattgcaacccatcaagatcccctgggacgagcagaatggaaagaaaacccttgtgttcgggatcgttgaattggaggtgcccttgagacttggcacagtgcttggagtgtcggaaaagctcagtagagtttagctgttcctgtgtcttgagagaggaagaagcagggaaacagaagttttcagggataacatgcttccctaagcctgcagctgagcatagcagagatgtcagaatgtttcatgaataagagcacagcttctatgttggataccctgaatttgaatctcagcatggccactttgtatata

SEQ ID NO: 470619 - DNA, 850 bp, Homo sapiens
ggcttgtttactgcctggaacagatttccatccggctgaccttaagactctctctctctctctctctctctctctctctctctctctctgtgtgtgtgtgtgtgtgtgtgtgtgtgtgtgtgtgcgtgtgtgtgtgtgtgttcgcacacctttgcacaatgaaagttgagaggaaaacaaataaaaaccacaaatatgctttggcattggcgttttcgatggatgaaatcaacagaaatcctgatcttttaccaaatatgtctttgattataaaatataatttgggccattgtgatgggaaaactatgacaaatacagctgattttcttgatcggaaaaaatataagcgtattcctaattatttctgtaatgaagagactaagtgttcatttctgcttacaggacccgatatgaccacatctttatattttcaaatgttcctggacattttcttatctccacatttccttcaacttacatacggaccttacagttccatcatcaatgatattgaacaatatccctatgtctatcagatggccccaaaggacacatctctagcattggcaatggtctacttcatactttatttccactggaactgggtcggccttatcatctcagatgatgatgaagtgtaatttcatagctgtttttctagttgaatgtatatatgtcttttatgtgactgaatgtttacatatatatgtgaacacgtatttatatttatgtgtaattaagtatagggctgtattacatgggtgacttgggaaagacctggacctctctctgcattagtgtgtctgtgtgtatgtgtatatttctgtatgcattgcatacatgcatttgg

SEQ ID NO: 470620 - DNA, 1058 bp, Homo sapiens
tcttttctgttgctagcagacctaactaagctttcctttggaaatcagatatggatcaatgcgtgaattgtccagaataccaatatgccaacactgaacagaacaaatgtattcagaaaggtgtcacctttctaagctatgaagaacccttggggatggcacttgccttaatggccttctgtttctctgcattcacagctctggtactttgtgtctttgtgaagcaccatgacactcctattgtgaaggccaataacagaagcctcagctacctattactcatgtcactcatgttctgttttctgtgctcctttttcttcattggccttccaaacagagtcatctgtgtcttacagcaaatcacatttggaattgtattcactgtagctgtttccacagttctggccaaaacagtcattgtggttctggctttcaaagtcacagacccaggaagaagattgagatacttcctggtatcagggacacccaactacattattcccatatgttccctactccaatgtgttctgtgtgcaatctggctagcagtttctcctccctttgttgatattgatgaacacactctccatggccacatcatcattgtgtgcaacaagggctcagatactgcattctactgtatcctgggatatttggcctgcctggcacttggaagcttctctgtggctttcttggccaagaatctgcctgacacattcaatgaagccaagttcttgaccttcagcatgctagtattctgtagtgtctgggtcaccttcctccctgtctaccatagcactaagggcaaacacatggttgctgtggagatcttctccatcttggcatccagtgcagggatgcttggatgtatttttgtacccaagatttatatcattttaatgcgaccagagagaaattctacccaaaagatcagggaaaaatcatatttctgaacaaatatttaggaattctgtcaaatgtaaagttggtacataaccaccaaatattgggttttagtgcatgtgtctagttttagaatcagtctcactggttgctct

SEQ ID NO: 470621 - DNA, 963 bp, Homo sapiens
gtcagctgaggaacggtggtaccgggtgaagaaaatctactttgggttcgtgaaagatcaagatgaatccgaagatgatcctgctcctgatgtttgagaccgggataacatcgttcttcctggccagtcgagcgcgcgcacgaatatttggaatctttgtgactcaagtacttctggtgacatgccttatgtttgaatgtaacaggaatttggcactgcagagtctgtctgcagaaggtgccaggccatccacacttcaacagcacatgctgtgctgtgctcagacacccttgctaagcatggacaatgtgatgatcctccagacctcctatggtcttctaaggcatcaagtgacttacactattggggatacccccatgaacactgagagtagagaggccattcagagtgagaagaagaactgcatacgcagcaacagtggcaaaacttttactagcacatcccacctcaatcaacaccggatgatacacactggagaaaagccttttaagtgcagggagtttggcaagtccttcagccaaaaagtctttctcgtgaagcatttcagaattcacatcggagagaagcctttcagtttcagtgagtgttgcagaaccttcaagcacaactgcttatttgttgctcatcagcgagttcacacaggagagacacctttatatgcactaaatgtggcaagtcatacatgaacagatccagccttttatatcattattgggttcatactgaagaaaagccatagaagtatactatagtagtttgaataggtttgggaagttttcttctataattttgttgaagatatttgctgaccctttaagttggaaatcttcatgctcatctactcttattatccataggtttggtattctcattgtgtcctggatttcctggatgttttgagttaggatctttttgcattttgcattgtctttgattgttgtg

SEQ ID NO: 470622 - DNA, 625 bp, Homo sapiens
agggatgatgggggtggacatccctgccttattcccatgctgagacacaagtctagggctcttcggggaaaattcactctcttagtggagccctctatgatttacccaggatatgctaggaattgggatgtcaaaaggcttcaacaaatagaggcagagctccttgattttggccagaagtgcagcccaacccttggaagtaaggagttggagcccgacgctcagggcagcatcagggcctcaaaggtgtcccctgaacaccagcccttacagcctccgacaggatgcttgcgtcggattcagggctgggcctggacgggggctgggcagctccagaaggtgggactcagtgggagcatttatggggcacattccctgtgcctctggcccattctcctctcaatcctcatcttaatatccactttggaagagcagattatttctgtttctggttgtgccccaaccactgaaagatgatcttgctcctagtagttgctcaataaatatttgttgagtgttgagtgcataccagtcactgtgctgagtgacttgtacctgtgcactctcactaaccctcccaggcccattttacagatgaagaaactgggaaacacagaggctgagc

SEQ ID NO: 470623 - DNA, 714 bp, Homo sapiens
tcaggaggcaaggaacttggaggcaaggatggacacctgtgatgatgatgatgatgataatagcaacgataacagcaacagctcctattcgatgagagtttattatgtgccaagcaatgtgctaagcatgacgctggcaggagttgggattcaaaatcttggagttgcgcctgactcctcccactctccagcagcttcctggccatctctgctgcgcaaatgtctctggatcctttccccctgctccctgacgctggtccaggccctcagtgccttgagcctgaccctgtgcttttgcagccaagccttggctgggatccatctctcctccctcatgtggagactctatcctgatctgcactctctccctctcctggctcttcccggcagcctccacatgggctcaggccaccaccctctgtgtctcccagatccctctgctctgcttcgcagccaagatgtggacatatggcccaagctgtgccagtctgatgccctcctggtctattctgaggagcaagtagccagaggctagcaggggtcactcagtggctacactggtagcacccagcgggtgctgtttcctgtgctttttccgggctgagagacaattgtattatactttctgcttcttggcccacagggctctgacaccaacaattccacccttaaatgtctacttaggagaaataaaaacatatattcacaaaagac

SEQ ID NO: 470624 - DNA, 522 bp, Homo sapiens
acgaagaatgatttacaattcttttgtcttcataggaagtgcccaaaaactggagttaagaatcagactcttctgtaggaatgtcctccttgatcattggacacatcgaagtgattctgctttttggttgacgcgaatattaaaaccatggccaatggtgaatcaggcaagattactgtatatcatctttgggccaatatctcctcaagatggacaggtggtttggcaggaaatgatagaagaacctacagatgaattcagtctgaaaggtttggctgatgccattaagttactatatgacgctagcactaaagagtggacagcagatgatgttatcagtcttgtagatgaactatcagaatgtggcaaatgcatttgcatgtgttataatggaaatgctgcaatcaattatgtctggtgagtaggaatgtacttggtgcacagtccaagaatggaaaaaaaaaaaaaagctatttctatgttgactttaaaaaataaaaactaacaataagtagaggaagc

SEQ ID NO: 470625 - DNA, 551 bp, Homo sapiens
tggacctggtccctgaccacctggacaaatgttctgaggtcccatatatgcaggccttctttgctttgcagggtaatctggacctaggccaacattgtagtattgattcaactctcctagtggccaccttgggagaggctggaagggtcaatcccagggaactaggaaagcaaacctcagaggacttagggcaaattaaaagggatcttgacaagtattcagaaggccctgacaggtatatagagactttccaagtatttgaactcttctggaaggatgtcatattacttttaaatcaaaccctgactaccgttgaaaagcaggccaccctgcaagcagcaggcaatttgggggatgagctttctatctcatattgggccagggaagggaatgagtcttatctgattggaagaatagcaatatcattggaggactctaaatgggaccccaatgatgaaataggagagtggaagaggaaacattttcagatgtggatactggagagcttatgaaggactaggactaagcctctcaattacaccaagctatcc

SEQ ID NO: 470626 - DNA, 604 bp, Homo sapiens
cgacggcatggtcctgttgaggaggataaacttctctggctccatccaatatttacagcattggttgtcacatgggatgggttgtcaacaaggacagtttgctcctgcaggcaaggtctgggctgttgcaagcttatctgatcttctgatcttctattttgcattgctattgaaggacaaaggatggctggaatcagagaatgtagggaagcacaagcttgaaaagacatgtgccccagtggctgagaaaaaggtgaatgcaaaggctgtgatgcaagaattagcttggcaggcacttaattttcttggtagctcaggactgagagcaatctccagaagttgcttcccaaccagtgagtttgaaggcttttcaaccaagaaatttgttactggacaatcaagaaatatcgttgttctaggccctggaggaaatcaggagcagcagaaagtgggaagggcctctgttagaacacttcggtactctggatcctgtctctgggaatcagaggtacctttgaaaaggttgtcaaacacgtacatttcaaaagtcaaactagaggttaattaagaccaaaatctggaggaaaactgggctacccctgtc

SEQ ID NO: 470627 - DNA, 802 bp, Homo sapiens
gccagaagtattggccatttggcacggctaaggttagcctgcccctgggagccctgggagccctggaagccctgaaagctgctgcgatgggtccaggatgagttgcccactggtggaggagcagcctggggcatggagctttggcagcacttcaggagcccagagcaagaggttggagcagcatccacttcggggccctggccagcagtatggccaccatacccacttgttgagggcaccaggttcctgcacttcgggaagaggctctgcttggggccacccagggccacatccccaggttccaccccacatcagggtgactactaagcctgacactcctgatggccagtcctggaacctgcaattcactcctggaggtgcccccacaaggcagggccatgagccaggcaaggtggagccccaggccagccctgagcaccagggccatggaggggagctcatggcaatgtcgcccctgccccagacaccagcccagggccagcaaggacctggattccccaccccaggctgtgaggaggcacagctgaagctgcatgctccatggagccagcgggagccagggacaaacaggagccccaccccttctaagttgctgcagctgccctgccgtggctctacgctggagcgtgtctgcactctgtcccttcaggggcccgggaaggtgcctcctgtccccacaggatccaccgcactaattcatcgacggcatggtcctgttgaggaggtatccaacttacactaataatggagcaatgaccatctcagtctaaggcaaggtttg

SEQ ID NO: 470628 - DNA, 843 bp, Homo sapiens
ccatctagagatggttggataaactatggaatactcttcagctactgcaaatgattctatgagttcgttcagatctgaaaatgaaaaacctgtcgacctaaaggaaggagaagagaatatagttttaaagagtttacttgaggcaaagtgtggacagctgcccaggaaacacttccaagttgccttggaggtaggacaaagaacccagggtactagttcagacaatgagaaagtctacattaaggtgcattgttatgctaatgcagctcaaaatagctttcaaatatcaaatatgaatttaacttggaaaaataagatagactatgtcaatgagaatgttctcgaacatcatatggtagttcctttaccaatctaatatacaatgttaatgttgttttccccttgggtcctttagacagatccaagttgaatgagccttctgacagtaataaattcagaaagaactaggatgaaagctttatcgatctataaatataaaggttttgtaagccacatgtacatcgttcacgtttcatccagagttctgggaaagagtaggtggttcccagaaacaatgtgagttcatgagtctttctaagaagaagggaagaaagtttttgtcaaggccacaatgtatagaccttgtgctaagcactgatttataaataatccagataggagtaagaaaatgaaatgaagtctccttgaggtgaattttcctccagttgatagtagtagaaagctattatgggctgaaaatatatctcccccaccattcatgttgaggtcctaattcccagcacctcagaatgttactgtatttggagatagcctttgatacgg

SEQ ID NO: 470629 - DNA, 537 bp, Homo sapiens
cttcattagttctagtaatggtcatggtaataaaaaagaaaaaacttatcaccattatcatcatcattactgccaacatcgtcatcatcaccatcatcatcaccaccatcatcaccaccataaccatcatcactgtcaccatcactatcaccatcaccatcatcatcaccatcaccatcatcaccatcatcaccatcaccatcatcaccaccatcactgtcaccatcactatcaccatcaccatcatcaccaccatcactgtcaccatcactatcactatcaccatcatcaccaccatcaccatcatcaccaccatgatcaccaccatcaacatcatcactgtcaccatcactatcaccatcaccatcatcaccaccatcaccatcaccatcatcatcaccatcaccatcatcactgtcaccatcactatcacatcaccatcatcaccaacatcaccatcaccatcatcaccatcaccatcatcaacatcatcaccatcatcattaccgtcatcaccatcatcatcataaccatcat

SEQ ID NO: 470630 - DNA, 1055 bp, Homo sapiens
agtaaatacaagaggattgattgagatgaaagaaaacaacaatgtgtttttggaggtgatcagataacatcattgaggttgatctcaagatgtggaacagtgggctgggagtgctgggctggccttctgttctccagttgctgggacaatggtggaggtgaggaaggtcagtgacttcaacagtcctctaagtgggtctgactgaggtacccactcaaactgggaaaacaagcagcttggctgacgccgtccagtcagtggccggcatggctatttacacggggcattgcaaatgtcgtgagacatattcattaccaggagaacagtatgggagaaaccacccccacgattcagttatctcccaccaggtcccttccacaacacgtgggaattatgggagcacaattcaagatttaggtgcagacacagccaaaccgtatcagctacccacccactgccactgctaccagggttatcaagaagccatgaattctgctaccatcaactcaccaggacctccccttgctttggctgtgctgttctttgtgactttgatgcaaggaagccaggatggtgcaaaagtaattgagggttttgccattattttcaaaggcaaaaaccgcaattgcttttgcaccaacctaataccgtattttgcagatgaaaaaacttagggccagagagattaaatgactggttcaaggtcacacaattaactagtaacaaaggcaaggacaaaatgctcagttccctttttggtgtctatatttaactagcaaactacaaaaagtattataccaattaactaattttaggaaagggattttgtataacatgcctttttatctgacattggaatagggggttttcatatgttattgtggtgggaaattgaagcgtatcccttcatgcctcaaagcattatttttattttaaatattttcaatgaaatattcctaagacacattaaatgagactcccccaaagatttttacctcatcagtattagtgtgtgcattttgtgttacatccttttcttcctatagaagacattt

SEQ ID NO: 470631 - DNA, 571 bp, Homo sapiens
agataaatactcagtagacatgtgtaagcgtggtgtgtccttgttgctgcaggagaggggcaggtttgcagtcagcaacaatggctggcccatggcagatggctttcaggctctcggagcactcacttcagcccccagcaataatggcacatggggagagcctttctttagggcatatgctctgggagagtatgctttggtgcccagcagcactggcagtgggaaaggagagactgtcctcaagaagtgtatggtggaaatgtggactgctggggatctctcacttgccctttcccttcactggggagcctctccagactcccagccagttccatccgagccagctgcctcacatccctatctttctatgcatcaggtgtttcctgtcacttatctgttgaattccagtgttctctctcagatgctctatttcaaatgtggtaatctacttgccattttggctcttcttcatggaggaggtgagtaccagacgtttctagccggccatcttgaagcctcctcaccaagatgagtttaaaggctgatagagacatacaggcaagagattgac

SEQ ID NO: 470632 - DNA, 598 bp, Homo sapiens
ataatgtgttcgctgctgtttagttctttaattagaacacttcatggtggggattatacctgagctgggccccaaaggatgggaagggcttttgaaatgcagaaatgggaaaaaccacatcaaggagatggaaatgctcaaaataagctcggagatggagcagtgtccagcgtgtttgaacatgtcagttaatgagatgcaactgaagggaataaagcctaatgctgataaagtaaagttttgtgaattattcaaggtggaaatggaattttctgatttcgtatgtgcacagcatcataatttccaattgctctatcaacagaaagatatgagaatcactgatctactatcttttgtgaaaatggcttccgcaaatccaggacttgggtcatggagaagcagtgaacctttaacttgagttattactacatttaaatctgtgtaattattaccctgaatttactgagcataagctagatgacacaaaataacatattttcatttttcagcattttaaattgaataacaaatatgttcatttgttggtaatatcaatctcaaacctataccgaaacaatcaaaatgtaaaatgtaaaat

SEQ ID NO: 470633 - DNA, 1514 bp, Homo sapiens
tttttttttttttaaatgaaagaaacctcatgttggtgttgagtgcctatagcttttcgaggcacatggggtgcaagctgttggtggatctaccattcttaggtctggagaaccatggccctcttctcacagctccactaggcagtgccccagtggggactctgtgtgggggcttcagccccatatttcccttccacactgccctactagaggttctctatgagagttttgctcctgcagctaacttcttcctgaacatccagaacaattcagtggctgctagctttcagtatggttttgactattcacgtccattccagaagacacatgcatgtagtgatttttcattttcctggtgttcaaatttgaaatgtgtgaattatgacgccgaagttcagggagagtcccttggtcagagagtgaacctggatgagcacttggactccaactcaacatccatttttgctgtggcagcatttaatcactagttcttgctgaaaatattgattaatcaggaaattcttgacttaacgtagaaatttttatgttccatttctctctgaaaacaattattggaatttagaacacaagtttcttgtatattgaaggcaacaaacttttaagaagagctggcttcatattttagttcttatgtcctcttgtgtcacagtgggaaaacttgtgtcccaacctttaaatataaacgttatatttttcttttcctttctttttttaaagatcctctagtctttgcttcttaatacttagcatggttattagttgatattttctaatatagcagcagagtatcaatcattataaaacatgtctaacctagaggtttttaaaagtttttttctgaaatcgctacactgtctgctgggaatccttaatccgatttcaacgggttaacattctttttaaagtctaacacttcttataagacatggggtatagaataagaaagtcaaatcaaaaactaaaaattaatttatcactttaatatttcatttttcagatatgtttgttttcacaaaagtattctaatttttaaaatctgaagaaaacagaccctctactctttatatgtgttttccactgacttacaaggaacaaggaatctgctctttcaaagcaaagcaggccctctagttgtctatagggattttgctgcataaagattatttatttttcatcccatcattttgttcccaaataaattctattctatgatatagaaacttgtggtctgtgcataatcactcttttgggaaaggggaatcaactccaaaggagaggtatcactgcagtggagtcttctgaaatcacaggaaaaatggtgttaagtactcatagggcatctctttgttgggctggaaatgtagatgattgggttcaagtattctaactgaaataaaaggataaagcactgattccttacttgtctttcaagatatcccatattttctcatcttttccgaacccatctcccactcttcaacttatatgttttc

SEQ ID NO: 470634 - DNA, 1076 bp, Homo sapiens
ccatctctcttttctctctcttctttcctgctttccttcttttcttatttcttaaggcagcaggccttgttgagctgcggtgggctccacccagtttgagcttccctggctgctttgtttacctactcaagcctcagcaatggcggacacccctccccctgccaggctgctgcctcgcaggtcgatctcagactgctgcgctagcagtgagcaaggctccatgggcgggggacctgccaagccaggcgtaggatataatctattggtgtgccgtttgctaagaccactggaaaagtacaatatttgggcggaagtgtcccatttttccaggtacaatctgtcacagcttcccttggctaggaaagggaaatcccctgaccccttgcgcttcccggatgaggcaatgccctatcctgcttcagctcaccctccatgggctgcaccaaccgtccaaccagtcccagtgagacgaaccaggtacctcagttggaaatgcagaaatcactcatcttctgcgtcagtcacactgggagctgcagaccggagctgttcccatttggccaacttggaacggaatccctgcatttcttataagatattgggttatcagagcatgggcccatcagtcatgatgatggatttatgggtgaagagatatcttggaaggagatatgcatctctggacattggaaccagttctttcagtgtgcatagcagtactgtggtgcatgacatgtaagagaaatcacaatcaatatttttgaattaatggataaaaaactaaatagtaaagtatttgaagatgagaaagattttcaaataaaaagctgtcaagacattgaaaggcaggatctagtacattatatggaaaaacagtggatattgtctaaggcttttccaagggtctgaatcgttccacacattgcccctctgattagccttggaaactataagtggtctgttcggacatcgggggcatggtacagaaaaaagtttcatgcatgcattctttcaggtcaaaatatcattggggcagctgtgttgattgtgtttttattatgtatgtgatgtatatc

SEQ ID NO: 470635 - DNA, 633 bp, Homo sapiens
ctgggggaggcatagggttaggacaaatacctaagagatgcaagaatggttgtgatacaccacataaacagaattacaaacaaaaatcacataattgtctcaataaatggagaaagagcatttgacaaaatccagcatcgctttatgattaaaaccatcagcatagaagggacatcccttaatgtaataaaagctatctatgacaaatccacagccaacataataccgaatgagaaaaatttgatggtattccctctgagaactggaacaagacaaggatgcccgttctcaccacttctattcaacatagtactggaagccctagccagagcaatcagacaagggaaagaaataaagggcatccaaattggtaaagaagaagtcaaactgtcactctttgctgatgatatgatcgtatacttagaaaaccataaagactcctccaaaaagctcctagaactgataaatgaattcagcaaagtttcaggatacaaaattaatgaacacaaaccagtaacttctgtatataccaacagtgaccaagcagagagtcaaatcaagatctcaacctcttttataatagcttcaaaaaaaaataagtaaaatacttaggaataaacctaaccaagaagg

SEQ ID NO: 470636 - DNA, 631 bp, Homo sapiens
agacagctatgactatctccaaaatgcacctcctggattttttccgagacttggtggacatggatggatctggaagccattatcctcagcaaactaacacaggaacagaaaaccaaacaccacatgttcttacttcccctcatggttggaaacctgctactctagaggggtcaaggagttcctggaccactggccaccactctgaacagtggttgcagccaaagagctttgttggactgtggcagcagaatctgtgctcattcgcccatgccagcagcagcgacagcacagcagggtgcaagtttatcagctgggaaggggctctagcaggcccagggctgctggcctccatgatataccctgtttgggaatctgaggctggactgcaagcacgcatgaccaggataaggccctgggagaggccagcagacagaagagcactcagatcagactggccccatctcataggcaagatcaccctgctcagttcaggtctgacagttcctcagttcacgtccgacagttcctcagttcacgtctgacagttcccctaaggctagagtctcctagagaaaggcttgctcttccaaagcaagccttcagaaatgggtaactttggctgtggtccctg

SEQ ID NO: 470637 - DNA, 716 bp, Homo sapiens
gcaaatgcctctccaggccttcaagagacctcatgtggtcacatgagactcccaaagtccccttagggcactgtccctactctctgcaggagccacgtgagggcgaagcttggggcatgcatggaccccttggtcctggtactcagggctccagggtccccaccagaggaagccttcaccagttcacaaccagtgccacgggcagctctgacccctcctgtggcccagctatctctgggccaggaagctgtagatctgtggctgccaagcctgaccagcagggggggccagcgcccgtgtagagaccatcagctcccagagctgccctggggaagagctgccctagggaagggcctggtcctggccacccacaacaacagtgcccttaacgacaaggggcacctattggttcaccacctggctcttcggctgccagaacttacccggtaccaccctttgaaggatgaattgtctcggcttcacagacttccaaggccaaagtcagacaggaacgggcaggaccaggactgggccccacgtttgactaacatcactgtctcccttatcacaaggaggaagaggccctttgaagatgtcctttcgcacgggctccgaaatatctgctaaatgtaggtcattatgactgaaaatgcatttttccccttgtccttgaagcaggcagctgctctgtaagtttcggctgtagcctgatgttt

SEQ ID NO: 470638 - DNA, 2361 bp, Homo sapiens
aattacctaccttaagtgtagccatgcctacaactctcgtgctgtatgtgcttctgactgagtcaattacctttgcttttataaagatccgagtttggtttcttgcaatcaaaagagtcctgatcaatatggaagctgacttggttaccaagggtgcctgctgttgtgttgacatcaccctcactcataggggctcagtctctttcatagatgaactgcaccatgagaaaagggctgaggaccaggtggtgaaggggcaggagtatttgccttggaggattggagctggctatctgcaagctgaggagcaaggaagccagtccaagtcccaaaacctcaaaaatagggaagccgacagggcagccttcagtctgtggctgaaggccctagagcccctggcgaaccactggtgtaaatccaagagtccaaaagctgaagaacttggagtccaatccacactggcagctgattagacccacccagattgagggtgggtctgcctctcccaatccactgactcaaatgttaatctcctttggcaacaccctcacagacacacccaggaacaaaacttttcatccttcaatctgatcgagttgacactcaatattaaccatcaggccgactattcatcaatcagcattgtggcaatgttcagcaatgtttttctttctgctttgcgcagagttctctgggaagttaaaggaactagaaactttcttcctcataaccgactggtaaggccctctgatgttttcttcttggagctgggctttacagaaataaatttctacagagtctggagaaaatgctcttaaaaaaaaatagctgaaatctccattcctccattgaaaacccactcattttggtggtgtactgcacagagcaaactctgggggtgtcctgcccaggtgactttgctactcacaggtcccacctctggcttcttactgcaaagaactgcagctacctgaggtcattctcaaggatcaggagggtgaccagcctcacacaggcaggcccatagcaccggggagcagggcgcccttttggatggccatcacgggagggtgagcccatgcctcatctttatcacccgtcaggtgggttacctcttaggggtggcccagagactggttgggattgaaccattttgcgaacagctgtaaactgccccttcctctagcctgtgttagcttccttcccctcccatgtccttccccactctcctgctggtacctcctaggaccacttccctaatctgctgcttgccctcacatccttgtgtgagggcctgcttctggggaacccaacctgggacatggggtgtcaggcctccttggcttctgagtgagattaatctgaccgggttgaagccacatctggtggtgcttgttgttttccctcagggcttggcacagcatgagggacacatcagggttccaacatctggttgatgaatcaaagaacgtgaacatttaaatataaggaagcagggctgaaagctgacggggagacagggatggacctgggtctacaggtgccatgtcctcccaggtctgcacatccagcctcctctctcctgagccccagacctgtgcattcaaccagatgtcttcacctgggtcctcaagctcaatgcaactcatcatccctccccaccccctccataggtaacctgcctcctctcctgcgtggctggtgtcaggcaatgaaggtaggcacaggcttcaactccgcttgccctcagccacacagttcttgtttcatcactgtgtgcatctttctcgacgctctccactgtgtccagctcccctggcacctctctggcccctgccagcctcatctctcacctccagtcttgcctccctgcaatccctcctgtggccctgagtgaactttctgaagcggccttgaccgcgtggcttgctgctgaaaatccttggctgtggctccccactgcggtaaagaggaaatccaaactccttgtgatggcctagcaaggccctgcaggaattgcttcctgccagacctccagcccctacgagttctgttctccttaacaccctccccacacctgcagagccaagctgctttcagtcccttgaacctatgatctctcaccttcaggcctccgtgcatgctgttctctctgccccaacactcttccctcccctccttcctgggccaacaaccccatggagcagatgcttctgaatcccctgtctgggttacaaaagcctgcttgtaaccttgtgctttccctgtggctatttggatgctcctgaattatgacctgttatttaaacccatgtctctcctgtgaaaaataaactctcctagagcagggctgatttgttc

SEQ ID NO: 470639 - DNA, 1629 bp, Homo sapiens
ccatcttccaggctctctgctgaaggcccagcagactgagctttctggaacccaaatctgaccacgtcccacctccacttacagtatgtcactgggtcccactgcccgcaggctggcatccaagcttgctctcgccctggcattcaggatcagctgccttggatctaccccctgccaacaggtccccaccgaaccccacaatctgacccagatgagccatcatccccaacactccctgtcgtgtcccggaagcctgaccttgaccctggtcagctgtttcccacaccccgaatgcacttgctgtccttcccatcaacatgggctcctccttcaaggtggcccgggagctccaaggctgtccccaggcccacctggatgtccgacatgaaggctccaagcagctcagcagcatcccctgggaaggaaggggggctgtcaacagtgacagctgggtgctctattggggtcaaagtcttcagacccctagcaatggggatgccccctttcctggcatcacaggaaaaagtggtggcacatacctggtgagtgagatcccatctccaaaaagaagaggaggaagaagaaggaagaaggaaggaggaggaggagaagaggaggaagaggaggaagaggaggaagaagaagaagagcaggatgaggaggaagagggaggcaaagaaggaaaagatgaggaggaggaagaggaggagttagaggaggaggaaaagatgatcatcatgataatgactgatgatgaagagaaagaagaagaggaagaggatgaagaggaaggggaagagaggaagaggagaaagaagaaaaccatgccagtgctcgcagctcctccagggtgctccagggcctttgcactggctgttccctctgcctggggtgctgtcaccccagacatccatgagttcccacctctcatgacagatgccatcaaggcccaggcagacggtgcgctgcgccaatggattttggcagcagttactctgaaaagggctgttcccgcttgggcagattggcaggaaaagccccaagtcaataaggggtgggagataagcatgttcgagagaagccactgagattgggtgggctccaggctgttcctgtgaatctgcagggcaacccaagtccgaccaaacctgtcaattttacctgctgaacatgttgcaggtcacccacttcagctgtgacctgtccccactgccatgggctcctcttgatcactcgtcacctgcagctccggccatcttcttgccagccacatccagccaggcggttttttttgtgtaaaacacttcagtgtgtgccattgccattggtccctcggccaagctctccagtgtagctttgaaggcctctgggggctgcccaggcaggccctctggaaacaccctcccagtcacacttggaaatcatgtcatgccgctatctgggcaccccttagcccagtcaggctgacacataaactgaatcatcacagctgcctctgaggatcagctggggaccttaaaaaattccagggctcagctgtaccccacaggtgctggctttgtacctcagggggtacatgtaactgagggggcctgggcctgggctgaagcctgtttttctggctgggcc

SEQ ID NO: 470640 - DNA, 847 bp, Homo sapiens
gcgcggtgcatcactgcttaatggatacactagttagtgtggtgtatcaatacttcaccaatgcactagtcagtgcggtgtatcactgcttcacggatgcactagttagtatgatacatcactgcttcacggatgcactagttagtgctgtgtatcactgcttcatggatgcatgggttagtgtggtgcatcactgcttcacggaggcactgattaatgtggtgcatcactgcttcatccattcactgatcctgccagtcttagtcagcccactggctgctggcatccagctgctcctgcatgcttggggcttgctgagcctgtgtcctgggcccgaggctccaaagggcagggagctggccccatgtctctctcttttctccccctgcaatgcctggtacattgaacaccctggatccagcagccaagggtccctctcaggcccttgctctgcccagcggggagctggggctagctcacaatctctgtccttcttgcgggttccatgtctctcctggcttgtggtcacctgtggggcagcgggaaggagcctgaagaatgaggtgcttggaaaagtcccaagcataaggcctgcagacagtaaatgagttgtgggtgttgggtgggttgggagagatacgtgtttaagctgtacgtagacttgtgaaaaaaagacctgggtttgagtcctgacttagtcccttactagctgggggacatggaggggtctcctcagcagacctgtgacggaatcctggaaggcatcccaggtgtggcagccggtcctcctggcatccctcgaggcagagcacatgacttcccaccactttttccaaacacaccctgc

SEQ ID NO: 470641 - DNA, 778 bp, Homo sapiens
ttgctgagttgttactgcgtggatgaatggtaaatgctacgcaggtggccaagaagtccagggaacgtcactcctggatacagagcagagcgtaagggcagagataagacccgatatcaaacgggcaggtgactggcacaggaaattcacatcactaaggaggatccagcactaagggtggtaacagcaatcactgattaatggcatcactcggggctttccctgcagtggtgcccttgcacccgggagaactcgcttaccggacaatgctaggaggtaaattttattatcctattttacaaatgaagaggctggggctcagagaagtcaaagaactagtccagggtaacacagcagaaccgggaaatgttatttgcatgcatatacctgaaaagcgttcctatccatactactcaactaacctaccaaatgtgaaaaagatggcaaacaactccatgggaaacaaattcgactgtgattatgacggagtcatgttgcagctgtgtaaatttggtttctggtggtttgtctggaagatggtcccaggaaacgccagcaaaggcataggagcgtgtggtgcccactttgaacgtgtggcctttgtgcctgcctattcagggcggcctcaggacaatggggggcaggcatacaggggaggacaatgacagggacatcgctgccgctttgcattccctttgaagtggctctgccctgggcccccgctggctccaaaaagaatgcttttgttgcccgctccaaagatgctgtaagatgctgc

SEQ ID NO: 470642 - DNA, 454 bp, Homo sapiens
tttctgcctgctgccattcatgacctcccaatctgctgaaatgatcgttgaaacagcagtcgttggcttttccatctccactgccacccttgcctgtgtttccagagaacagaaattagaccttttcatctgtgtcctctcggagcctgacataatgtctggcacagcccagatgtccctgatcgtgagaaagcctcccctggcaaggctggtgcaggatgccagtgacggggcctctggccagttctggtgtgggttgtctggtgaggagcttgactggatgctcgggcgggcaaatttcagcctggactcggaagacctgcccttgcccaaagcacctgaggagagtgggatcagtgtcagccacagcaggttccagagagacacaggtgaggaagactgttgtgagatgtatggaccctggacagagtttgttttgtgacctgctacataa

SEQ ID NO: 470643 - DNA, 587 bp, Homo sapiens
cacccttcctgagaagcaggggcagcctggctgcggctatggagtggcggctgcttcaccgcttctttctgcctgcagctctattgaagcccaagttcaacggcgtggagaagatcaagaccatcggcagcacgtacatggcagctgcagggttcagcgtcgcttcagggcacgagaaccaggagctggagcggcagcatgcccacattggtgtcatggtggagttcagcatcgccctgatgagtaagctggacggcatcaacaggcactccttcaactccttccgcctccgcgtcggcataaaccatgggcctgtgattgctggagtgattggggcccgaaaacctcagtatgacatctggggaaacactgtcaatgtggccagccgaatggaaagcactggagaacttgggaaaatccaggttaccgaggagacctgcaccatcctccagggcctcgggtactcttgtgaatgccgcggcctgatcaacgtcaaaggcaaaggcgagctgaggacttactttgtctgtacggacactgccaagtttcaggggctggggctgaactgagggctcctgctggattcc

SEQ ID NO: 470644 - DNA, 728 bp, Homo sapiens
aagacctggggtggaggccagggcctgggagccagctgtctgcctccccagctgtgggagatgagagtttctataatgctggcaatggggctctcagaccctcatgttttgcttcacattgtgattgatggccctgaggaagggtgcagctggtgcaaactcactggagtccagaaaggcgatctgggaggggaaaaacagcatcctacagaccccagatatggatctggtatcagtcatctacatcttaggggcagtttcttagacacttgggggtctggaggggacacagaagctcttactactgatattgcaaaccactctcccatccccaagcatccagttttgacatggaaacctcttgaggccaggttgttttgcaagaaagcaggagctgctcaaatacaagttggtgtaatcacagggaaagccgagctttggccggcacgatctgaagtttctgctgcctgggccgtcagctcagagccggtgctgtttgtcagcaccaagctcaaccactgagtgggactttctggagcatcccaagagaaaagattctaaatttatatgtctactgttttaatgttttagtactggcactgaatttaaaaaagcattcttaataaaataaaatgtctgctggcaatgatgagttatggtgatgacaatggtgattaatgatagctaacattagtgagcgctcatcatgtatcagggtcagttttgga

SEQ ID NO: 470645 - DNA, 862 bp, Homo sapiens
agatagaggtggtgatgacacaatgacacagcactgtgggtgggctcctttatttgggtcccaaccaatgcatcgtgagtggaagggacctgggccactcattgcttttcatgcagagaacgtggaggctgtgaagcaggattccgagcaggacctcagcgaggccactgtcacaggacggaagcatcagggagcccgagtcattccttggagggcagccgtccaggagaggcacctgagggcatcagtctgtgacggaacacagtgtcagcagcagagcccagatgcaaatccagaacattggacttcttcagtattccacttcttccacgtttccaagtttctagcagcttctcacctcatgatctttcctttagatctgtggatatccttggattgtatcatttgtcctttgtccacctgaatctgaaaccagtgattttcttgttcctttctccaatggtatatttgttgaatcgtgacctttcacttttgtttgactattaaccacttccattgctgtctcggtcttcccctcacttttaactaacttctcttgatgtaggaaatagttaagttgatgctgagccttttcagcttgctgtaaagcctgtttcaattgctcctgaaggactttttaagtgctgtgagatgagtttttaaaatttaaacacatctatggactgattcggttcccaacccaccaggcacaccctctgctgtacagtattagaatatctgaggtagggacgtcactgagcctctaaactgtaagccatccccacacggcccgctctgccatgaccaggaaaaggagaagtctcctggcagaaatgacagctgacatcgattgtttgaaatc

SEQ ID NO: 470646 - DNA, 1547 bp, Homo sapiens
ctttcccagaacccaaagggcttccacactttagggatgtgttgtttttgaacctgagcccatcatggccctggacattgatcaaagagagtggcttgtttttcctaaaagtgtgcggatgggtccgatcagcagaatttcaggtgcagtgactcagcttttcctctgcggctaccacctacccgacatggcccccatggggtacgaggaatggcctggcggtaaccagggagatataacccaagaggtggcgtttgctctggaccctgaagaggtcaagtgcaaggacttcagagaggacttaagaatctgcactttttcccggcatgctgagagttgtggggctggaggcagcaccgtcataattgagattggcagtgagggccaactactcttcccaaagcaggagtgggcctgctgcagctggagggtctgtcctgctccctgggctgctggcctccctcacaaggctgtggactggcctcacttcaatgacatggattgtctcgtgcatgagtgcacatcggatttccaagtctgctattgattttcaaactgcagacaaaaatgcattcattccccgggcctcgccatagtcttccattatccacttagcgtcacgttacaaaaatagctttaaacagttttgcttgaaatattggacacatacactcactgacagcgaggttttgtttggttgtatgactcagcttcagggcataacttttcacacgaagagcgtacacacccgtcactttgacacaagcggagatgtcggtatttatttttgcctcgagaaaatgatgggggaacagggaggataaaaagaatttccagaaaggcccatgccaaactctccccacatctgtgcaggccgtggacctccttcctgggcccttgaattcctttggtttgagggaagagtcatcctctagtccggaagagcctctgaggctgcccgacaaaaacgaggtctggctggaaaccctgacttctctggctcctggttgcccattggcatcatttggggagctcttaaaaatgccagtgcctgagtcccacccaagacccattacattgtcctctcctgggtggagcccagcactcctatttttaaagctccccgggtgattttgaccagcagccaaggttgggtagcactgccctggaaccacccacggagtgacatggtacttctgctctttggagagagattgagatcaacacgatggctgggaaacagtgcttctgggaagaagctttacctggggtggtcactttcgggaaccaccatgggttcccatctaccagggtgctaccaccctgaagggacaggcactgtctcccacccagtgaccccatcttactggtcttgatgcctggtctctcattctccccgacaatgttccttttgcaatgcagccctgcccatggcaccaccttagtaacttctctgtggtcttaagacaaaaggcaaagttcctgctgccatgactttcaagactgtgtcctggcccctgtccaagtccgccatgtaagcaggtgcc

SEQ ID NO: 470647 - DNA, 3443 bp, Homo sapiens
gaggaagtgggcaccagcggacagggaagggcagagaaggccaccatggcgacactcctctcccatccgcagcaggccctcccttcttgcgccaggccatcaagataaggcgccgcagagtcagagatctacaggatcccccgccccaaatggccccggagatccagcctccatcccaccacttctcccccgagcagcgggccctgctctacgaggacgcactctacactgtcttgcaccgcctgggtcatcctgagcccaaccatgtgacggaggcctctgagctgctgcgatacctgcaggaggccttccacgtggagcccgaggagcaccagcagacactgcagcgggtcagggagcttgagaagccaatattttgtctgaaggcaacagtgaaacaggccaagggcattctgggcaaagatgtcagtgggttcagcgacccctactgcctgctgggcattgagcagggggtaggtgtgccagggggcagccccgggtcccggcatcggcagaaggctgtggtgaggcacaccatccccgaggaggagacccaccgcacgcaggtcatcacccagacactcaaccccgtctgggacgagaccttcatcctggagtttgaggacatcaccaatgcgagctttcatctggacatgtgggacctggacactgtggagtctgtccgacagaagcttggggagctcacggatctgcatgggcttcgcaggatctttaaagaggcccggaaggacaaaggccaggacgactttctggggaacgtggttctgaggctgcaggacctgcgctgccgagaggaccagtggtaccccctggaaccccgcactgagacctacccagaccgaggccagtgccacctccagttccaactcatccataagcgggtagaggcctcattgcagagagccacttcggccagccgctcgcagccgagctacaccgtgcacctccacctcctgcagcagcttgtgtcccacgaggtcacccagcacgaggcgggaagcacctcctgggacgggtcgctgagtccccaggctgccaccgtcctctttctgcacgccacacagaaggacctatccgacttccaccagtccatggcgcagtggctggcctacagccgcctctaccagagcctggagttccccagcagctgcctcctgcaccccatcaccagcatcgagtaccagtggatccagggtcggctcaaggcagaacagcaggaggagctggccgcctcattcagctccctgctgacctacggcctctccctcatccggaggttccgctctgtcttccccctctctgtctcggactccccagcccggctgcagtctcttctcagggtcctggtacagatgtgcaagatgaaggcctttggagaactgtgccccaacaccgccccattgccccagctggtgactgaggccctgcagactggcaccactgaatggttccacctgaagcagcagcaccatcaacccatggtgcagggcatcccggaggcaggcaaggccttgctgggcctggtacaggatgtcattggcgacctgcaccagtgccagcgcacatgggacaagatcttccacaataccctcaagatccacctcttctccatggctttccgggagctgcagtggctggtggccaagcgggtgcaggaccacacgacggttgtgggtgatgtagtgtccccagagatgggcgagagtctgttccagctctacatcagcctcaaggagctctgccagctgcgcatgagctcctcagagagggatggagtcctggccctggataatttccaccgctggttccagccggccatcccctcctggctgcagaagacgtacaacgaggccctggcgcgggtgcagcgcgctgtgcagatggatgagctggtgcccctgggtgaactgaccaagcacagcacatcagcggtggatctatccacctgctttgcccagatcagccacactgcccggcagctggactggccagacccagaggaggccttcatgattaccgtcaagtttgtggaggacacctgtcgcctggccctggtgtactgcagccttataaaggcccgggcccgcgagctctcttcaggccagaaggaccaaggccaggcagccaacatgctgtgtgtggtggtgaatgacatggagcagctgcggctggtgatcggcaagttgcccgcccagctggcatgggaggccctggagcagcgggtaggggccgtgctggagcaggggcagctgcagaacacgctgcatgcccagctgcagagcgcgctggccgggctgggccatgagatccgcactggcgtccgcaccctggccgagcagttggaggtgggcatcgccaagcacatccagaaactggtgggcgtcagggagtctgtcctgcctgaggatgccattctgcccctgatgaagttcctggaggtggagctttgctacatgaacaccaacttggtgcaggagaacttcagcagcctcctgaccctgctctggacccacacactcacagtgctggtggaggcggccgcctcccagcgcagctcatccctggcttccaacaggctgaagattgccctgcagaacctggagatctgcttccacgctgagggctgtggcctgccacccaaggccctgcacactgccaccttccaggctctgcagagggacctggagctgcaggcggcctccagccgggaactcatccggaagtacttctgcagccgaatccagcagcaggcagaaaccacctctgaggagctgggggctgtgacagtcaaggcctcctaccgcgcctctgagcagaagctgcgtgtggagctgctcagcgcctccagcctgctgcccctggactccaatggctccagcgacccctttgtccagctgaccttggagcccaggcatgagttccctgagctggccgcccgggagacccagaagcacaagaaggaccttcacccattgtttgatgagacctttgaattcctggtgcctgctgagccgtgccgcaaggctggggcatgcctcctgctcaccgtgctggactacgacacgctgggggccgacgacctggaaggcgaggccttcctgccgctgcgtgaggtgcccgggctgagtggctctgaggagcctggtgaggtgcctcagacccgcctgcccctcacgtaccccgcacccaacggggacccaatcctgcagctgctggagggccggaagggtgaccgagaagcccaggtctttgtgaggctgcggcggcaccgggccaagcaggcctcccagcatgccttgcggccggcaccgtagccgtagagacacccggtgctgggggtgcggctgctcccctccgcccactctgccctcccgcccctgctgcatctctctctgtacagaacaatttttaaaatggaagct

SEQ ID NO: 470648 - DNA, 789 bp, Homo sapiens
gggaacttgtagaaccttctctttgttgctgatcttcacaatgatatgctttgataggaatctgttttcatccattattctggcttcctgcacggacagaggggatggtggtcgtttggctgagggctcctggtgtggaactgactgccgggggcggtctgcaggggaagatcccaggcaagcagaaggctgtaaagacatcccctactgtgctcctttcaggcactttgaagcttggccccatgactactgggccataacacccactgagaaggtctgcggcttcactcctgaagtcagcaagaccacgaacccagcagcaggcagcaattctggacacatccaaacatctggaagaacaaactctggacacaccatttttaagaactgtgatactcatggggaggctgtgtgtcgagccttacacaagcacacatgtggctgcgtggctgtgggccagtgttattctgcagctcatgctgtttctcatgactctgagcatcatgatctatccctggagctgtgagcaccccgaattcactgcttctcactggcctatggaaccccaaaaggggcacccatcacattctcatttacgtggtgatgggaatctagaatgggagaacatgtctgtaaattatgtcttataagggtcagatatccagaatatataaagaactcttacaactcaacaaaacgataaacaacccaattcaaaaagggtcaaaggacttgaatatacatttcttcagtaatacgtacaagtgactaacaagtacatgaaaagat

SEQ ID NO: 470649 - DNA, 731 bp, Homo sapiens
cacatggttctggaggctgggaagtccaagatgaaggcaccagcagatttggtttctggtgccatgggcagacaggagcagagagaaatggaaaactctggagagaagtttgtccaacatgcccggggcatctccccaggtgttttctagagcacctctagaaaaggaggaaaaggactatgcaccacctagacccaccagtgtaagattctacaactgcaaacctgttctccagtcccctctaaagcgattcttggtagaggacgtcctgcggaaagaccacccagctccatctctcaagtcctcaggctggctgtggagggtcccctctgaagagccttgtgctggaacaacagtgatgcctccagccagccagaaatccccaaccagtgcctatcggcttgttagccgcacctctttgctgcaccaccaaatcgctggcaaacgcccccaacaagggctgctgtgcttggggttccaaaccaaatacgcgtggtgctgccctcaagatgctcacagcatgggaataaagactcaaaatgccataggagctacgctacagaacagatggacaggcattgaggccactgccacaatcattgggtgacttaatgcttaatctccacattttagtaaacacagaaaatattcatcagaccgtagaatgctcatgcactgtgagtgggccaaaaggaggcacgagctatgattcctacccctgaggagttcac

SEQ ID NO: 470650 - DNA, 724 bp, Homo sapiens
ttgtttgcagtcgttatgttccgtaaagtaaccaagaacactggattggaaaacactgaacaaattactcctgggggaatcacagtacaattagtttcttgcaagcctctgactagtgatggtctcctctctttctccccccatttctgcatacaagaaactgcatggaccatcatacagcacaacggctctgacttaacaagagtcagaaatactaatccagagaacccatatgctgggtttttcgagtatgtggccagcatggagcaacttcaggccactattaaccgtgcagagcactgtgaacaggagtttacttattactgcaagaagtcacggctggtcaataagcaagatggaacccctctgagttggtgggtaggaagaaccaatgaaacgcaaacctactggggaggttcttcgcctgatcttcaaaaatgtacttgtggattagagggaaactgcattgattctcagtattactgcaattgtgatgctgaccggaatgaatggtgatttccatacgatttctttatgcaagaaaaagttcatttaaaaaaattaatcactcaaaataattgttgtaaatccaggaaaaaaatgttagaaaaacaactacttgaaataagcagaaagtaaccaaatgttggcagaaactgcccatgtgtttacagcaaagacaatatcccagatatagagataggattgaaaattaagcaaaatt

SEQ ID NO: 470651 - DNA, 1682 bp, Homo sapiens
acaggggatgaatgctggagagtcctattctgccatcgtgctctgcccctttcttaatgactggcagttaaataaggcaagaaatgggagaataaatgtagtagacattggatcaactgaacatctacctgacttttcaagaaagggagatttgttgacctatgaagatgagagaaacggccaggaaggtgggacatatagaggaagattagtttcagcacaaaatcggtacagatgtgggagtctaacaggtcatataagctgtaatgtcatggataatcagattaaggccttcaacaatgagttcattcatcttccctgggtacctgcagtctactactacgtgacaggtagggtgatgtgcattcaaaacacaatggtgaaaattccaaggacaggagagaagaaactactattaccacctacttgagaggctagaaagaaaaatatgtgacagattttcttctctttttttccatatgcaacatgccagttttatatgatttctgtagattattgcattgttgttaaaactttttcttataaaccattgcaaaattatcacacgatacaaaaatgttaattcaaaagaaacgaaaagcactaatattacccagtccataaacttcctagttgatctctttttattcatttaaacaaagtcaagtgttttttttcttccttattattagttatatggttaataagtcagtcacacagttctgaaaaggtccatagaaaaacattccttcatgttgaaggtgatgcactaattatatgtacttcttgccctccatctgaagcagctacgtggatacagattttagacccttaggcttcaattaaaatattcagtattcaataatatttattgaaacaattttaaggtaagaaagtcccttttaatgtctttctgtaaatgggagataaaatgtatcagctcagttattaattggtaaaccacaaggtagttaactctatgagattcaattttttttttgcacaagaatagcctaatagtttgttccgagggctgtattaggcaaagagttctcagatatgacactaaaaacacaatccatagaagaaaaatgactaaatctgacttcagactttaaggagtaagacaagtaacagataggaataaactatttgtaaattgtttatctgataaatgatttgtatcaagaatatctaaagaactgtcataactcaacaatcaaaaaaccaaaatattccatttaaaaattgggggagaaaggaaatggagagtgactgttaataggtacatggttttctggggagatgataacatgttctgaaaatagattatgacgatggttgcactagtatgtaaatgagttgcatacttaatggatgaactttatcatgtaaataacatttcaataaactgttagaaatgggcaaaatatttgaatagacatttcataaaaaagatacgtgaatgacaaataaatatgaaaagatattaaacaaattagtcattagaaaattgcaaattaaaactgcaatgaaataacactttatattcattataacaagcattgacaagcatgtggagaaaatggaattttgaaacattacttttgaaaatgtaaaatggtgcaactatttagtaaaatagtttaacattttttaaaaagttaaataagaggttgagc

SEQ ID NO: 470652 - DNA, 2166 bp, Homo sapiens
aggaaaaaaatctttgataggtggcatgaccttagacttccaccaacaagcctcagctggcccgtcagcctctggcgcgctcgaacttccggcccttggagtggacgtagggtttggtgtggctgtgcggggttcccggggccttgccaaaatgcccgtacacctttcggcccttgagaggaccggagagcaggacggtgctgcagcccttgcgggagtccacggccagctggtcgaaaacttcactcttctggatcatctgggaaagggacagaggtggccggttggtacgactcataaacaacctcttcagcacaacctggttgaatgtggagtcggttcgtctggccagaaaactgcacagcttgaccaacagcctcaggtagatatcctggctcttgggctccttgcgccgaacctttcggtccttgttgtggcagatgtcagctcccatgatggcgtctcctgctcggccagataatagcttcactaatgcattgctacatgtggagaatctattaacttttaagataaaaagttcatttgctaaattctccccatatgttcaaactcataaagtacttgttctgattgatatgatacaaacaaaaaatcatattactcaatgtagcataattttaggaatacttttgtggtcctgcattagcaccgatttttgaacatgctttattaaattctaaaatcttgcacactacatgtcattgtggtagttacagtatatatcaagatttttaggttaaaatcttaaagtaaggcatatttgttcctaaacgcagtaagaggaataagagcactattaatattactattgtgattaaaattgtttatgttaatattttcataagacttatctcattcaattctcataataattctatgaggtagggcccactgttattttgctttgctgaaatattcgtaagtctgctgaaatatatactacaaaataggactgaaaagaaaaacactcaaatttaaaacttattaaattgttaactatttaattaagttctactcatcacaacggattccaaatagacattagataaacctaaaggcttctagtgaagtaaaatattattaaacaattttcatatttcaattttataaaatacgcatgtaatctaacatagtactatataactttttttaataggatttttattttaaaaggttttaacatgattttttttggtctatttcagtaattatttggaaagggcatctcaacaaagtaccaaacagtttttcacatatggtggccttgctcttactgggaaagcttgcaaaacaatggtgtgtgtgcatttgtgtgtaaatttttttttaaataatcatatatataactttcttgaagctacccaatccagaattttttttaaaaaaaacatgaactgctgtctccaggtaacaaatataatttgaaaagaagctttaagattaggattcagtgactaatttctgcaataaaaatgaaatccatccattttttctcctgcattttaatatctgataaaaatttttcattttaaatactaactattcaagtcttttcaagcttctaaaagactggaaagttaattttccaaatgtgctgatgagcaattgcaaagattagtttacataatctatgttcctgctggcagaagcattactttctatttaatacaatgaaactggtatttttaaggcattttttcctttataaaatctgaacttaacacataccctgtgtgaatataaaataaaaacaattgtttgtttctgcaaatttcatctgaagtagaagttttaactgccaactctgaatccaggttcaatagtgaaacatggatacatgctcacaaatattaagatttctggcatttaaaacttccaaagaaacaataatttcatagtcttttagggagctgagtagaaggagtaatataggaactttttggatttggtaatgtttaatctataactaaatgtggaactatatcatgtcttctccaaaataacatattatatcttatttcttaataggaataagaaaacatttttgattttgaaaatgatatctaggaatagataaagtggatacagaagtgttcaggtattttaaaactactattttttcacaatgtaaaaagttgcagaatt

SEQ ID NO: 470653 - DNA, 711 bp, Homo sapiens
agcacctgctctctctttgccttctgccatgattaagcaatttgagaaagagaaagtgaatggcacatattctactgtattcctcacaggggagatagctctaccacaatttgctatgcttctacaaagtgtaatctcagtggaatttagcagctaccccacggagccaatccccctaatgcttcagcttctgctgggttcagctaatgcggatagaaagaggggagacactactcctttcttggactttttggtaagatccacatgggacattgccaggaatgatggaggctggagcaactgtgaaattgctgggagggcagtattctgggtatctgctcaggcagctcagctccaactgtggatccccaggagcactgtgctgtgtgctccagataatctttgccctcccatgaatcatgactggttcctggaaaaatggctgaaaatcttgaggttcaaatatgggtgatctaatctccccttttcagtatttttgaattttaagcatattgttatctctgtttaaggggttaagtgttttgtcttatgctaaatgtatttaaaaccttttggtgaaatcaatgatttattttctcattcctgaaatcttactccaattttatgtatgcattctttttatgtgttaagttaaaccttgatttagtgtcacacttatttttctataccaaagaagacacctaaatcaag

SEQ ID NO: 470654 - DNA, 1296 bp, Homo sapiens
tcgaagctgggaattccttcagggtggtgaggtacgatgataaatgtgtcgcaatccctgctattcagggacccacaagcaaatggagaagacaaaaagggggccggtgttcttacaggcaatgtgctcagaggctgtgctcttacagctcaccctggcttaaagctcagctttgccacttcctggtcctgtagaaaaacagcacagtgtgggatcttgggtgatcctagccaaccagctttcccagggatgaattttccacttcagttcagtttgggccaaagttatctgaatgtgaaagatgtgcttagggtacgagcttggagaaaagactgcctgaacaaagaaaagtcacgaagtcattctgttgctgccatgtggagattgccatgtgacaagaaccccttatcagccccagagggcattccaattactgctgtgctgaaagatgtgcctcacattggtttgccctcatgtcattcctctgcttggaaggctccaatccttcactgtggccttccagtgtcccaccctggaacccaagtgaaatcgaaagtaaagaaaaatggctccatgaaagatgctgaaaaaggctggtcagggaagtttagaaaaaaacccaagaagttgccatgtcctatcgagtcacagaaggaggagcttgcccgaagtgacagaattttggtcatgacttctgatctagatgtttttgctgatgagttttctctcagttcatttattgacgtagaaggatattctacagatgcactggaagcactgctttattatgactcagtggatcaatatacactgggaaccatgaactgtgataggtggcctgacaatccgatgaaaggcctcattggagctggtggctggtctccacttgtgtctaacaaataccagtggttgcagattgaccttggagagagaatggaggtcaccgctgtggccactcaagggggatatggtagctccaactgggtgaccagctacctcctgatgttcagtgatagtggctggaactggaaacaatatcgccaagaggacagcatctggattgaacacaaaattcctcaacatctataataaaaaggttctcttcagtttattgtacatgattgaaaaagtaaacataagttggggaagttactgatatatttttactatactattattatatatttagtttatacatactaacgataaatgatccaaaaaggaaatttaaaacatagtctcatttagaatagtatcaaaaagaataacatacttaggaataaactttaccatggg

SEQ ID NO: 470655 - DNA, 677 bp, Homo sapiens
acagacttttaaaaccactaatttcagaaagcatcttttccatgaggggcctttttcttagagggaccctcggtttactttctgtgactcggagcagtgtggagacacatgctgacagcctgcaacacgttttcaggttgcgatccccatgtaaatttactgcactgtgcagtgaaactgaggggggcaaaaatcacactttcaaattgctgctctttgcaaaggagtcctctcagtctattgaaaagcacaccgtggagctggggccactcagctgcccaggtctgagggatcccagctgttctccctccaagcagcgtctggagactcatcagaccttcgaagccccctggcatcccattctttcccccgagtctaagggcaacaaaggctatggtcatgaaatagcacatgacctgtgctacaaaccatccctgcagatctgtggccacataatagacccagttctcaaatcaggctgatagggaccattgggtttcaacttggacggatggctttttaaaaggctttgtgtgtcaaagcttctctaatatttgtcaaatgggagataagtgttatttattgggggagtcttgtagttttctcattttatatttccatgtctgtttttttcaaatttaaatattatcctgttaatatgagaaatgaatagagct

SEQ ID NO: 470656 - DNA, 509 bp, Homo sapiens
cttccacatgtaccaggagcatgtgcagaggcttctggtgatcaaggaaaagagctgggtcaggaggagaggaacgggcggctcccgcgtaaatccccgcgtaggcaggagctctgggccagagcggcctggagacgctgagcggcaccccaggaatgcacagaagccccggaacctggccacagaggagggacagatacagataaatggaggagtttccctgcacaagctgcctctctcatcggccgccacgtcagacatgcgcgactgtgagacctgcccggacacatggaactggctgtacacacagcgtgggtgcctctcccaggctgctaagcagagaagggagcagctgctgggtgggggccctggcccggagcacgagggcagccgaaattcttctgtgctgtgagaaactaggaaagcagctgcccttggggaagggggtgaccagaggggcctgagggggcttctgggggctgcgatcttctgttcttcctcagggtgcc

SEQ ID NO: 470657 - DNA, 1989 bp, Homo sapiens
aagctcatgtgagttcacgctggtgcaggtggagcggggacagtgctaagctcatgtgagttcacgctggtgcaggtgggccggggacagtgctaagctaacgtgagttcacgctggtgcaggtggggcggggacagtgctaagctaacgtgagttcacgctggtgcaggtggggcggggacagtgctaagctcatgtgagttcacgctggtgcaggtgggccggggacagtgctaagctcatgtgagttcacgctggtgcaggtggggcggggacagtgctaagctaacgtgagttcacgctggtgcaggtggggcggggacagtgctaagctaacgtgagttcacgctggtgcaggtgggccggggacagtgctaagctcatgtgagttcacgctggtgcaggtggggcggggacagtgctaagctcatgtgagttcacgctggtgcaggtgggccggggacagtgctaagctaacgtgagttcacgctggtgcaggtgggccggggacagtgctaagttcatgtgagttcacgctggtgcaggtggggcggggacagtgctaagcgaatgtgagttcacgctggtgcaggtgggccagggacagtgctaagctcatgtgagttcacgctggtgcaggtggggcggggacagtgctaagctcatgtgagttcacgctggtgcaggtgggccggggacagtgctaagctcatgtgagttcacgctggtgcaggtgggccggggacagtgctaagctcatgtgagttcacgctggtgcaggtggggcggggacagtgctaagctcatgtgagttcacgctggtgcaggtgggccggggacagtgctaagctaacgtgagttcacgctggtgcaggtggggcggggacagtgctgagctaacgtgagttcacgctggtgcaggtgggccggggacagtgctaagctcatgtgagttcacgctggtgcaggtggggcggggacagtgctaagctcatgacatttagcctgggcttggggcatcggggattaggtgtctagaccaggggtcggaaggtttgagggtcccgtgtttgaagccctcctcctcctccttcctccctcctccctccttccatctcccttctccaccttcatcctccttcttccctcctcccttctcctctctcctccaccctccctcctctattctctctccccaacccccacttccctccaccctccacctgcctcctccctccttcttctgtccctcctccctcctcccccctcctcttctgtcctctccccttctctctcctccactctccaacctcctgttctcttccctactccctcctcccttctccaccctcctcttctgccctcttccctcctccctccatcccttctcactcctccattctccaccctcctttattctcttctctctgccctcctcccacttcccctctgtccccagcctcctctcttcagccccactaggttcctctcggcttccctcagcatgttcacagtagggtttgcgctcctgcgagggtctaatgcagccgctgctctgacaggaggggcagctcaggccgtgacgctcgcccggccgccgctcactcctgctgtgtggcctggtccatggcgcggcaccagcccgcttccccgggaattgggaccctgtggtggcaggtcctcaccgcagacggtcccctccacagtggtggcaggtcctcaccgcagacggtccccctccacagtggtggcaggtcctcaccgcagacggtcccctccacagtggtggcaggtcctcaccgcagacggtccccctccacagtggtggcaggtcctcaccgcagacggtcccctccacagtggtggcaggtcctcaccgcagacgtcccctcaacagtggtggcaggtcttcactgcagacggtccccctccacagtggtaacaggtcctcatcgcagccagcagtgcatgggagctcttgttctgcct

SEQ ID NO: 470658 - DNA, 796 bp, Homo sapiens
ctgctcagaaggttccctctgtcttctcccatgcggacagtctacactggctgcgacgagtacaagctctcaggccaggtggaaatggaattgagaaacctaggcgctgcccatcagaccacaggcaccgaacagcagatctgttcactgggatggcaacacgtttatcagctcagacgtgttccggtcccctgcagtacatggcagcaccagagcacacatggccatgttcctacatggtggtgccagcacgggatgccacccagggctcatctcgtcctcctcctcctcctcctcctcacaccaggaccagcctggctcactagtgggcatgggccgggcacaccatccccccaggtcagcctggatcaccagcgggcacgggccgggcacaccatccccccaaccagcgtgctgcctcatgccaggaccagcctggctcaccagcaggcacgggccaggcacaccatccctcccgaccagtgtgctgcctccacatctaggcgccttggctgacggctaataccgttccggttacaatgaaggaaatctcgccacttttctcctgtgcagaagaaaatgcacacagtccccatggctataacccaccagcaggcacgggggacctctggtgtctcatgttggtgcccagtgcctcagcctggcctccccacgcgacctgcaggggcggcttcacggcaggccagctgtggtgccctgcgcagtggttactgcaggaggtgatctcttcactgtagctggacaagggtggccctctaccgacttctggtgttct

SEQ ID NO: 470659 - DNA, 662 bp, Homo sapiens
gatgggtggatgggggaaggagaagttcctgggcatcctgaacaaatacatggagatccatggcaccgtgtactacgagagccagcggccccccgaggtgccagcctttgtgaagaaccacggcctcttaccgcagcctgagtttcagcagctgctgcgcaaggccaaactcttcatcgggtttggcttcccctacgagggccccgcccccctggaggccatcgccaatggttgcatcttcctgcagtcccgcttcagcccgccccacagctccctcaaccacgagttcttccgaggcaagcccacctccagagaggtgttctcccagcatccctacgcggagaacttcatcggcaagccccacgtgtggacagtcgactacaacaactcagaggagtttgaagcagccatcaaggccattatgagaactcaggccagagacagccttgaggtggagtcaccggtgacggagggtggggcgctgatggccctgctgcagggagaggttgtgtgaccttgtaatgctggatcctagcaaagcaccggcctagacagagtggggagggataaaaagctcccttgctagctctcaacgcagtgttgtcccctgtcctgggctggtggcttaagttctggcaaggccttgtagagcaaaagcaact

SEQ ID NO: 470660 - DNA, 1377 bp, Homo sapiens
ggaccctgggggtggcgagaatgctgctgcgggtggaggattatataacagattatataactgcctggccttgggcaggtcacgaaacctcagtgtccatctacctccccatctgtgaagcagagatcatgacagcatctgtggtgaattctggaaactctatgaagggagagtttccaagagcacagcgttcccagccagtggaccctcagaaaatagaagttgaccgagagtctaagatgggcttgagcaaggcagtttatcagggctttcagctggagcagcaagggggacagtacaggaagagacctgcagctggctccccaaagctgaaacatctccatggtgaggaaatggctgtggccattcgggtggtggagcgggagccctacaggcccaggtttgtgtgtcagggcaaggagatgggagtgttccttgcagaccagagagagaatcacaaggggctacccaaggaccctaccagtggggccgtctggaaggggatggggcagtgcccagaaggatgctcgggggggcttctgctggacgtcacatgggactactcaggatttgaggagcatcccccagggtcacagggacccagagcccagcagggaaccttccaggagcccttggaagccaagaggggaagctgtccaggcgagcaaacagagggagtgcagagcttcctgcacctgcttcttcttaactgcccgcagctcaacagcctgatgccaaaaggtgcacattttggggcggcacatttctgatcttccacaagctgaatattctgaagaccaaattaagactgtgtttgcaacccagcgtggccacgagctattacctaagagaaggagctggggccatgcatttgctaatgtttgcatccagggccccaagcacagagaaaaattgaaaatcaaatttaccaagaagggataaaagagaaagctgacttgcattataatgatttctttttttttttttttttgccacagctaaaatttcccttttaaatagcgagcacccctggggcagtggaaatggaattcaacttacaaaatcaggggccttgggccaggggagggggcagtaaagggctctgcctgctgggagccgagcaggatggaaggtctagtccagtgaccaggggagacaccatgaccaggagcgtccttgcacccaggccctgcttgggccccacactggagagggccctgtctgactaggcctcaccttgaggctcctggcaaccaccattctactgtctgtctctaattttaactattctaagaatctcatataagtggaattatatagtatttgtccttttgtgaccagcttaatttatttaacataatgtctccaaggttctcc

SEQ ID NO: 470661 - DNA, 595 bp, Homo sapiens
tatttcatgagtttacataagaatgaaaggatataattgtataatcagcttaactggagtaaacaggtttgtaaacaacgcaagtggcttcaggcaggcattgggctcacctggttggagcagaagccgggtgccccaggaggggagcctccaggtttcttttgtgtgggtgatccccgtcagtaccacttggagtgggagagggacttttctcaaaggaagcaggggtgaaggcgtcctggacaggcgaaaactacaggcgtctactacatggccctacctctgccccctggtggtggctcttggtggcgctgctgaccacagacgagagaggatgaatcccccggagctgggagggctgcaggaaacagagatacacatctccttcctggccagatgcttgctacatcacagaccctgccagcaggtcctggcactgctgccagagagaatgtgtttctatttggtttccatgtcctctgcatggacttcggtgtctaaatgttagtgtgaaattttaaggtcccagatgtcccattctgtcttaaaagcagaagtttcccccagaatggtcaaataaatgacagtacattcc

SEQ ID NO: 470662 - DNA, 730 bp, Homo sapiens
caacatcctgacttggcagctgcctaatccgggtgaggtggcagctccatcggttaatcctgccgggggcgggaatgtgtcctgccacgatgcttctgcccacctgtcggtgcctatgcaggtgtgaccaggctgctgacactgcgtcctgaggtcagctcgaggcggccaagtggaacggcagcttcagactcaggctcctaatgggggcttgtctgagcaactcacagtgtcttgctatggactcttgggaatcctgtgcttcggtcccaagggcacctggtatgtgtagcctttacgcggcacccatcaaggcttccattcaccaaatgagaggcgacaacagacagcctggtgaattcatgtctagcaaggacaccagtggccctcttattaccgaagcccaggagctatcttatttctcgttctgttacccatcttttggctctattgaccccataccacttgacactgttggggagcagggcatcacttctctctcctggttctccttccacctctctgcttatcagcatccttccctggttcttgttcacatcctgactcttaatagaatattagactgtaaaccaatacgtgctttcactgtttgcctcaacaaattcctgaaaaagcatttattgtaacaaaagattgcttatctttacatataacccccttctctggataacagtataaccacccaaggggttcaccttccctgctgcct

SEQ ID NO: 470663 - DNA, 1519 bp, Homo sapiens
gctggcctcctgcctgcatccccctggggaagagccggttctgctccctgaccgggaacgggtccctcagtgctgaggatggcagttaatgagcccgccgaggggctgcccaccgggtgcacaggcaggagcagtgggcatatcccctgcttgccaggccctgcagaggggctgccttctcccccaatgccttctgcccccttctaggactggtttcgtggaaggcaatttttccacggacccgggtggggtggggggtggtttcgaggtgatgcaagcacgttacattgatctggcttgccgtggcagccctcgacaacaaatacagggtctgttgaaccaaatgaatccaaaatgtatgcccaaagatagccgccaggtctatgaaaacacctgctctgatatgaggggacgtggaccacagaggagcttggaggggacccaggtgctggtagtgaccttggcacattcacagggtgacggcagagacaatggtggtgacgatagttgggatagtaactcagactcacagctgcaaggttttgtgatgatgccaacaaccaggactgcccttgccttccttcagattgccagagcagtcaggaatcttctgcccttagagtatatcgcggggtcctccctccacatccttgctgatagagctctggagagggcctttggggagcgtgtgactatccccggcatatctccggtatgtcattatcagcagtgtgaaaatggactcactcccaccctgtctggatctggacaagagcccaccaccccgttggcagtagtcaggcagctctgcttctaagaacctgcagcttttggaagaaaggcaccctgtggtttcagaagcccaagagtccctgcagctcagcacccccagcctggtgcttggcagatgactgcctcctcacttagcagagggagcagaaaactgtgtattcttcagaacatcatgataacctggcactcatgggtctatggagagaattcagggggtctgggagcttggatggaataaatttgcatctttattttcaggaaagttttactgaagtttagcattttctttcattataaatggaatcagtataacccaatagtatgagcagttacttctccgcaacatcaaagtggctgcagatatctcaaaatagtatttacatttatcataacttagaaatttgggtggtaattaaaccagcaactattctttgtttaatgcattaagaaagaagtatgtatactatcatatctcaattaaaaatattttaagaactggattttaactttattggtttcctttgtaactctctgtatttcattttaggcatttaaaaatattattttgagaagggcttccgcagatgtcagaggtgtccatggcagagccatgattaagatccgctggtgtagactacagcagtttcctggatcctcttcaataaagagcccccctccacggttctgccccttaccaatgttgtttctagctccatcccatccttct

SEQ ID NO: 470664 - DNA, 2979 bp, Homo sapiens
gagggggactcctctccatggtgggattttcagctcagctcagcgtccctcacgcaccaggcaatgcaggttcacacctgggctgcctgcagtgacaggttccagtaacccatgctcctatcagatcgccagacagaactggggccaagagcacgaagaggatggggagtgggcgggagcgctgttgctgggaaatgtctgggacacttgccctgcctcacagagagtgtccggccacctctgatgcgggacaggagcgctcaggggaggaaggcgaggaccttagggcctgtgcaccctcctctccaggcataatcttgtctacatggaagatcatccctgagcaatgagctgcctgctgagggggtgtggtgagttgcacagagttgaggcaccaaggtcgggggcagagccggaccagccaccccagccctcttcaaaacacagcaggtctgggcttctcgcatagatcggctgccttgttagaataacctgaatataaaccaaggtcttgtggggcccagtctccagacactcaaagaggctggatctggcagccccaagaggattaaaggggattcatgtcccagcatccttcctctcctccctggctctcttagatgttgtagcatctaactcaccaatggcaaggatcaggctgtgagtccacttggccagtctgtagcacccagttatttgatcagacatgaagccaggtgttactgtgaagctgctgctgctgctgctgctgctgctgctgcttcttcttcttcttcttcttcttcttcttcttcttcttcttcttcttcttcttcttcttcttcttcttcctccttccttcctccttcctcctcctcctccctcctcctcttccctcctcctccctcctcctcttccctcctcctccttcttcctcttcctcttcctcctcttcctcttcttcttctcctgctttcttctttcttcttcttccgaagacgaagatgaagacaaagacgaagacaaagaagaaggaggaggaagaggaggagaggaagaggaggaggacaaggaacaggaggaggaggaggaggaagggaaggaggaggaggaggaagaggagtggcagcagcagctggttgtaaagtttgtggcagatgaactgataaaatgcaatgaaagacaagaagccagtgtcagcacgtaacacgcatctttgatgtatgatcaggaacaaaatcatgggcagcccaagtggctgttttaactcagtgtggggacagctgtaaggagcaaaggtgattgttttatgtattcagccatcggagagccttgctttcaaatgctcactttctaattaagaaacaaagtatcctgtttgattggcagccacagtggatgaagtccccaagagggaagtaaatgccacctgtgatctgggagagaaagagaatcaaaggacacagaagctgctgcctcctgcccttaccacagccatcctgggaacatcgtttgtttgtttagtctttagatcattcactggctgattcagtcattccctggttcattatacattcattcattcattcattcataactcattctttgtttctctcatacatcaactaactcacaacttgccttactcactgtgacagctgacattcattgagatgctgtgtgacagacacaggcattgcagatgaattttgtagtttgtactaaaaactacaaacattactgagagaaaatcaagaaggtctaaataaatgaagtgatagactctaattttgaattggaagacttaatatcttactatgtcaattccttttaaattgatttgtagataaaaatgtaacccctattaaaatcctagcaagattttttttaaaaattgataaacgtattataaaacatttatggaaagccaaagggcctacaataaccccaacaatcttgacaagaacaaatttgggaaacattttctgatgtcaagattttttcaagatttgctaataggttgagtacttgtgtgtagcctgttgctccacaggagtccctacaagctgatatggcagaaacaatgctgtatgtgaaataaagatcaaggcaacagtcttgccctcagtaggctcccagaaatttgactccgatatgcctagcagaagttccttcgtgtttatcctgtttgaagtttgttgagattcttggatatgtggattgatattttaaatcaaatttgaaatttacagttactatttcttcaaatattgttttctgccccattttttttatcctctctgtttgggactcctgttacatgtattttagattacgtaacattgttccacaaatcacagcgattctattaatcttgttcactcccacttccctttgtacttatgtttggagagttcctattggcctgccttcaagtttactgatgctttcttttgcaatgtatctgctgctgttaagcccattcagtgaatgttacaatttcagatcttttatttttaagttctacaagttccattcagtttatatatatataatatatatatatatagtgtctatttctccgttgagattccccatctgttcactttttacatatatattcattttatttatatatatattttacatatttattcattttacatatattcattttattcatatatattcattttataagtcatgaacacatttataagggctgttttaaaaatcgtgtttgctaattcccatatttatattatctctgggtttgtttctattgacttggtgtttctcttgggtattttgtcacattttcctgcttcatatatctagaaatgttttactatattccaaatattgctgacacattattgatcatttggattattttgtctttatttaaagagtgttggatttttttctggcaggtagttaatttgctggtggatcggctgaatcttgtcttggcttggttttaagctttgttaacgtgga

SEQ ID NO: 470665 - DNA, 1308 bp, Homo sapiens
ggaggggatgaggacggaggacgtttccctggcatcctgcctaatatgtgtcggggctggggacacaaagacagtttagggatgatcgtcctgcccatgaggctcttggtcttgcagaggaggagtcgtggaaatgggataattgctggagggctctgtgagcaagagctgcacagcaaaagcaaaggggatgcagcagttctgcccgtgtggggggatatacacccggatacatattaccatcgagtacagccccatggccaggggacacccacccagatacatgttaccattgggtacagccccatggccaggggacacccacccggatacatgttaccatcggatatagccccatggccaggggacgcacacccggatacatgttaccatcgagtacagtcctatagccaggggatatacacccggatacatattaccatcgggtacagccccatggccagggaacacccacccggatacgtgttaccatcggatacagccccatggccaggggacacccacccggatacatgttaccatcgggtacagccccatagccaggggacgcacacctggatacatgttaccatcgagtacagtcctatagccaggggatatacacccggatacatattaccatcgagtacagccccatggccaggggacacccacccagatacatgttaccatcgggtacagccccatggccaggggacacccacccagatacatgttaccatcgggtacagccccatggccaggggacgcacacccggatacatgttaccatcgggtacggccccatggccaggggacacccacccggatacgtgttaccatcgggtacagccccatggccaagggacacccacccggatacgtgttaccatcgggtacggccccatggccaggggacacccacccggatacgtgttaccatcgggtacggccccatggccaggggacgcacacccggatacgtgttaccatcggctacggccccatggccaggggacgcacacccggatacgtattaccatcggctacggccccatggccaggggacgcacatgcagatacatgttaccatcgggtacagccccatggccaggggacacccacccagatacatgttaccatcgggtacagccccatggccaggggacacccacccggatacgtgttaccatcgggtacggccccatggccaggggacacacatgcagatacatgttaccatcgggtacagccccataaccaggggacacacacccagatacatgttaccatcaagtacagtcctat

SEQ ID NO: 470666 - DNA, 536 bp, Homo sapiens
cagaagtgccctgagggaatgcatggtctccaagtgccttccattcactggccaggcaccgctgtctcagatcacatccccaacttacctcttaaatgttccctctggaaaggtaaaaactccatgatgtcagagtccactctggtttactggtgtggcccacacctcctagggttcccttacatccacacctgcgttggcctggacgatcatgccctgaacaacctcgccctgaacagcacatcagggagctgctcaccagggcctctgcggctgctgtggacactggtgcgcaagtgtgtgtttgagtccctgctgaagtctccttcatcccagggtggctgggagcactgccctcccatcctctcctccatggggtgggatcttcccttcccctgagatctgtcaatgactctggccagctccgtggactctcctaaagagcgccacttgtaagctgcccaaaaacgaaacaaaacaaacactagccaggagcaaaagtaaagcttcattccaatgtttaaaaaactctgaaa

SEQ ID NO: 470667 - DNA, 1333 bp, Homo sapiens
tgctctacccagtgccccatgaacagtaaaaagttcctgttccaatctgactagccgatggtggagcaggctcccgaccgggccctgggcctgggtccctggctgtatacagcccatgggtggcactggccagagatgatgggcagcgaggcaggtcggctgagaggcctctgtcaacagcgctcagccggcatcggcttttcggcagggctgagcggaaatcctggctgcagggcactgcaagtgacagctaaactgagtgccagcgttgggggaccaagcccctacccccaccaacctgccgccagcggccgcttccctgattgggtctcctcccctcctccccgggagcctgctgtggagccgcggttccgaaatgatgatgtatttttggcaccctggctgggtcttgttcagttcttgttcctggtatctgccctgtgtctgatgttcagctggggctctgggaacactgaacactgaaatgaacgagtcctggtagcagttgcgggtgcatattttggggacttgacgcgaggcctggactgctggtgaagacacagcttcccttgtggaatctgcagggctgtggatccaggtgcccccccgccgcgtccttccccttcctgggcaccagacgtgcagatggagggtggtagggcactcctccacatcacctaccccagccccatctcttgaagggcaactggcagaacaggacaagagccacccgacccttcaattccataatcccgccccgggaccatatccctgagaaataattcaaaagatgaaaaaagctggacgtgccaagatatttatagcagcagaagaaacccctctggcatcatcttacctgtccgccgtaaagggatagttacgtgaagtatgcggcgggcactcgatgggatattgtgcggccgtgagacctgatgggtaggaagtccccgtacaagggaagccgtctctgtatatcatcaagtgaaaaagcaggacccctgattacagcgaggtgaaaactataaccgcatggagatgaagagcagatgcagccagagagaaatgaagacggtggcattagcgtgaagacgccgggggtccaactctgaaaaaacactgaagaaataaaaaaagttcacaaaagaatagcctccctccttgaccaggcacctgcccattgccctaaccgggtggccccctgcactccccactccatatccctccccccaggcaggtacactcttccctcgggctccagaggttatctagccagggcagaagctgagcctgtgtgtctgttgtttttgcaggatttgctaaggcgcctctgtgc

SEQ ID NO: 470668 - DNA, 1201 bp, Homo sapiens
aaattcacatgactcatcactgcttccatgccctgggctggaggccagcttcggggagagaacagggatggcctgagggaaagggccctggcactgggtgtaggggagtggatgaggaataagactggggaatcagactcttacacgctgatggggactccccagaacccactcgccactggaagctcagcctccgggtggcatgactttgccccttgcatggggcttccctggttggggaccaggcagctgaccagggtggcaggtgttggctcagggaagaggctgctcactcttggcatcttgacccctttgtccaggatcctgctctgcaacatccacttcctgctcccgatctccctgaaggggctgctgctcgtgggcctgctctgcactgtgctgcaagtgagcagtgctaagggggcctccagggggaaataaagtcacagcctgagccggggaaccgcagctcccacaccatcaacaccctcggagggggcaagcagaacctctggcctcctatcaggagcagataaaagaaaggacatcccccttgcacactgattccttggaggcatctgcatctcaccttcatggatcctccctcaggcctcctttccttgtggctccaggatgaccctgtcagagatactggactatcgttcagttgcagaggccccagggcctgtctggacttttccatcccaagaggggctcggctctatcccctttgtgcctgtgaccctctccatcccccacccggctcagaactggcacagccaccaccaaccactcctgattcaacccaagcttcgccctttccacctctcgagctgtgcaacaacaaatgcaggatgctcagccctcatgtgtcagtcccctcaattcacttgtaattaaataacaacacacctctttttctaattttcaaaggtgtatatatttcccctcaataaagttgttaggattatttttctcttccacttacattcttcctgaactctgcctgctcttttttcttccatattttactttaaatacttttttttgaattactatatttcttttcttagctcctttttttggagagatcttgttgtcttaacttctctaagaaggaggggaattttccatctgaactcttcctctattgccttgagcacttcctctcctgagacgggttcttcaactgccatttgct

SEQ ID NO: 470669 - DNA, 1098 bp, Homo sapiens
ctctgtttttttttttttattcactcgatcttgagttctgagaatgcatctgcagagctccacccacggagctggctttaggactcctcgactgttttttttttgtttgtttttttcctcctccatgcttttgtgcaaactgatgggactttagctgtcaggggacagagggcaaaggactccagaggtgtagcaggagagccccaagagtgaagatgctgggaaggacctttgggggcattttgacccgtggcctgctgtccccgctcaagagcacccacttcctgttcctgttcctcctggagctgcctctgctcctgagcatgctggggaccgtcctctgggcactgttcaagtacaactatcaccgaaataaagaaaaagacctgggacatgagtccaccatctctttggtttgctggcttgtaaagccatcttccttgccccaacagcttgtctctcgacttactggctgttgcttggcaagcagtttgagctttggactcggctacactagaaggactcagaactcagaaaagctgttatatgcatggttatggtttattacactgaaaggatatggattaaaaccagtaaaggtaaaaagtgcgtggtgcaagctgccagctgtcctcttccagcgggattttgcagacagtgtttaattctcccatcctagcaacaatgtgtgacaacacacacaatgtgctccatccagggatgctcacccaagccttggtatccagagagttcactggggtcagtcacatagtcatgaaacacctgtagaactgacctcagtgcctaagtcgccagagatcaaattaaaactacatagctcaaagttccccctacccacccatgaattacattgatagcatcaaccatctagcatggctagaagcccccaccataatcacatggttaacatgagctatccagcatggcatcaaagcccccagataaacaaagacactctaaccaggcaggatattccaagggtttagagcttatctcctagaagcaaagcaagggctaaactttttttgggaaggtgcaggctttggacaacctaagcctgctgagttaatatttttc

SEQ ID NO: 470670 - DNA, 947 bp, Homo sapiens
agtcccccggtgacactgcctgatgaactaggggtggcgttgggctttggctgactctgtgcctagctgacccctgaccatgcatgcctggtgtctccagcctgactgtgctgtccaggggttgtggtggctgaagtatgtcccccacccatgtgggatggctctgggaccccagcaggagttgtgtaactctggacccttggtccccccacagcccgtggaagccaccgatgatgccttttgggaccagttctgggcagacacagccacctcggtgcaggatgtgtttgcactggtgccggcagcagagatccgggccgtgcgggaagagtcaccctccaacttggccaccctgtgctacaaggccgttgagaagctggtgcagggagctgagagtggctgccactcggagaaggagaagcagatcgtcctgaactgcagccggctgctcacccgcgtgctgccctacatctttgaggaccccgactggaggggcttcttctggtccacagtgcccggggcagggcgaggagggggagaagaggatgatgagcatgccaggcccctggccgagtccctgctcctggccattgctgacctgctcttctgcccggacttcacggttcagagccaccggaggagcactgtggactcggcagaggacgtccactccctggacagctgtgaatacatctgggaggctggtgtgggcttcgctcactccccccagcctaactacatccacgatatgaaccggatggagctgctgaaactgctgctgacatgcttctccgaggccatgtacctgcccccagctccggaaagtggcagcaccaacccatgggcaatccagagctgagtccattcgccagctctgggtctcgtttgaggggaggtgctgccccctggtggtgatgaactttaacttaccagccacacctcacact

SEQ ID NO: 470671 - DNA, 1247 bp, Homo sapiens
gggtccgcactgcctttatgagctgtaacactcaccgcaaaggaattcccagatgtttctgtgccaagcattgccctaggtactgaagacagagcttgggcaaaacgaggacgtctctacggcactgagggtccgtctgttggcagagacagacgacagcatgtgtcatgtgtgtcacctcatcggcctggctcctccctccgcggcggttctgatgccgcctgccagggtcgcgcgcctgagccgggcctgggtcgccagcgcccgcagcagaggagccagggtgtctcgcaccttgaccccgggggcgggtgtccccaggcggcgcgtgactccgccccggcccgccccgcctcgcctgcaccgcagacacacgccccagtcctccagtcctccgtgcgcgtcgggcccgagcccacagagtccatggaacccacggagccgatggaacctacggagcccatggaacctacggagcccatggaacctacggagcccatggaacctacggagcccatggaaccggcgcggacgcacctgtgggggcgaggcgctgctgcgggagctggaggtgctggtgcaggacgtggtgaggacgagctcctggtgggagcgccacggctggactgcgccatcctcgcgctcagcctcttcgccttgccggcaggtgaggaacgcggggacccggcgtcccggccggctgcgggtgggggcggggtgcggcggaggtggcggcgcggggtctgcaacagcagccgtgggagtgcagcctgcgcagtggactggcggcggcagggaggcggaggtggtcggggccccgcacccaaggatggagggccacagtgggacctgcctcactccggccagtggcagcccccagagcctagcccactttagcctgggctcccagggcttcctgtgcctgcgctgggagaatgccctggtctttgcatccggcatcaccatcttgggtgtgtgccactacacactcactgtcaagggcagccacctggccactcatggggccctcaccgagtccaaacgctggagcaagatctggctgcttttctttgtggaggcagataaacccaagtttgccaacaaaggcagtaaccccagtggccagctgctgctgctactgcacagtgaggaggaggtggggcctggtgggaggtgactggatcatggaggggtttctcatgaatggtttggcagtatccccttggtgttgtcttggtgagagtgac

SEQ ID NO: 470672 - DNA, 1227 bp, Homo sapiens
gtcacctccacaaagagcgactcgctgtataccgttggcatgctagctttatctgttcgggcaatacgatgcccattgtacttgttgactggtctgatattcgtgagcaaaaacgacttatggtattgcgagcttcagtcgcactacacggtcgttctgttactctttatgagaaagcgttcccgctttcagagcaatgttcaaagaaagctcatgaccaatttctagccgaccttgcgagcattctaccgagtaacaccacaccgctcattgtcagtgatgctggctttaaagtgccatggtataaatccgttgagaagctgggttggtactggttaagtcgagtaagaggaaaagtacaatatgcagacctaggagcggaaaactggaaacctatcagcaacttacatgatatgtcatctagtcactcaaagactttaggctataagaggctgactaaaagcaatccaatctcatgccaaattctattgtataaatctcgctctaaaggccgaaaaaatcagcgctcgacacggactcattgtcaccacccgtcacctaaaatctactcagcgtcggcaaaggagccatgggttctagcaactaacttacctgttgaaattcgaacacccaaacaacttgttaatatctattcgaagcgaatgcagattgaagaaaccttccgagacttgaaaagtcctgcctacggactaggcctacgccatagccgaacgagcagctcagagcgttttgatatcatgctgctaatcgccctgatgcttcaactaacatgttggcttgcgggcgttcatgctcagaaacaaggttgggacaagcacttccaggctaacacagtcagaaatcgaaacgtactctcaacagttcgcttaggcatggaagagtcggtcagttacagaaggaggaaggatgctgaatggaaagaacagaaagaccaaatacacaagaaagaaagtgtgaggcacactggagaaatgatcagcgtgtatcagtgttaaactaagagtgcactggaatcgcttggaggcttgttataaacacaggttgctgggccaaatctcttagggttcggatttagtagggctgtgtgagactgagaatttgcatttctaatgacttctcaggtgcagctgatgcttcttgtccagggatccactttgttgggagcctgtggtgtatatgagagcatcctctggaaagccccacagc

SEQ ID NO: 470673 - DNA, 986 bp, Homo sapiens
ccagtttaatcatgaaaacagacaaacccaagagcacatgctgctatgcaatgtaatgcccaaagtcgcagccacattccgtctctgaattcactcttgggtgcctacatcatgacccgtagatgtctggatgatcaaatttggctttgtcatttttatcctccacctcccaaagatcttgatactcattccccatggtgggcatttgccaagaaggctaaacaatccgcaatgcacaggacagccctgaagagcaacaagtgttgcaccgaaaatgccaacagcacctcctttgataacactagagaatgccaagaaagagatgtgtttgcatctgttccacggggctgctgtgaagactcagtgggagatttaccctggcaggagctccatcagtgagatgtcactctttcctgaaaaactctggggtcttcacagatctatgcaggtaatgctcctgctctaaaactgaataatcttctcagagaggtccatcagaacaaatgataagttcaactcagctcctctcatatgactggttcttcccatctgaacacatgggctcgcttcttgtttcatattagttgctgttcaccttttatatctgaaacaatgtcaagtacaaaaatcactgatatttggtgagcgccttaaaagcccctccttctccctgaatcccacacaattctatctccttgcaattccaatcactcttggtttaatcatttcatccatatcgtgacaagttagaaaatcttgaaagtgctatggggcaatgtataatagttggtgcattggcacagaacggggactttatataaagacatatcatctttccagagtgttccaaaagaactcgaatattgatatgtgtgtgtggggtggcgaggggggaagggaattaactaggatttaactagctaaggcttgaaagaatatttgcctttttcatccttttcccattcctctccatttggcctttctgc

SEQ ID NO: 470674 - DNA, 923 bp, Homo sapiens
agcatggtaatgagaagatttagaaaaaaagtgacaacacgaaaccaagcccacctattaatgaaaagtccaattggtgaaaatctgacagattctcccagagctccccattgcaccgctgtaactgtccagtggggttgggagtatccacaaggccttttggagagagagcaagtcccacctcacagggacttgagagtgcagaaatctcagacggtaagaataactgggccttgcctctccacctgttcccggcctctgctgccctctggtggcagcatgcagccctactccattattactgccctcgcggggactgttttggaagcagaaataaagagcgagaaccagggaggtctagaaagggagaagttggaggagcagtgtaaggttgagtatgtgaggttctcctacagattctgtaagggcatcttgagaagcacagagaaaatgtatcggaattgtccaataggacaggaggctggagcatttatcaccagcttccactcctatggtctaactctgcccttatagcctgacactgaaatgtttatcttaaaggcctggaagaacaatgctttctttcactataccttgattctgtactcttggctactcttgatgtgtctgaatttttgccagaaaacttcccatcctgttgctaagaatcacctattccccttatcaaggaaatgtcctttcattctgcacagttctctctgctttcttctaaaaggttccttgttttacattttacatttaaatctctgatccattcaggcaatttttgcatagaatatgaggtttaggtgaagttcatttttttgttcagttactccaccaccatttgaacaccacctatctggcaaaggattaatatctagaatatttaaactctcaaaactcaagttttttaaaaagaa

SEQ ID NO: 470675 - DNA, 1046 bp, Homo sapiens
gtcaggagctatgagcagcacggggcatgcatgatcgtagggagtcaattatggttgctttaacagcatggcctggctactgtactgagaatggactggagggggcaaacatgggaagagggagactagtcaggatgccatggcaaatgatccacacaagagacaacagcagctttgaccagggtggccgcagtggaagtgtcataactcttggcctcaagccgcagaaaacaactctacacagaaagggaatattctggaagaagcagatgggcgtcaagggcttggaaaatgatcaggaaacaggactgcggcagaggactagggaacaggaagataaccactatttttcagcagaagccatttggtcaggatgctactaccaatgccaccacagggtacctctgctggacaccaccatccctgtgaatgatgcccaactgtttgtctttgtgccacttgttcaagattctgtgccccaggaaggagaaaagtgagaccctgtctcaaaaataacaacataaaataataacataaaattaataataaaattttttttaaaaattaactactgtacagaattgggccatatatattttttttaattaagtccaaactttacaaattaagcaatatatatgtgtgtgtgtatatatatatatatgtatatatatgtatatatgtatatatgtatatatatatgtatatatatgtatatatgtatatatatgtatatatatgtatatatgtatatatatgtatatatatgtatatatgtatatatgtatatatgtgtgtgtatgtatatatgtatatatgtatatatatgtatatatacgtatatatatgtatatatgtatatatatgtatatatatgtgtgtatatatatatattgcgtttgtggtacacagatgtcacaatcaatttgtttcattgtagtatttttgtaaacttttttccatgatctttcacctatagagatatgaagaaatagaagagtagaggtaggcagttgaaggatgaacgagacagtcacctgcagatg

SEQ ID NO: 470676 - DNA, 1727 bp, Homo sapiens
ccaagaagcagcttctctgctccttctggaatctccacttggttcagcctgcctacctccactctgcctccactatgtccatcaaggtgacccagaagtcctacaaggtgtccacctctgacccctgggccttcagcagcctctcctacacaagtgggcccggtgcccccatcagcttctctagcttctcccgagtgggcagcagcagcttccggggtggccagggtggaggctatgctggggccagtggaatgggaggcatcaccatcatcacagtcaaccagagcctactgagcccccttaacctggaggtggaccccaacatccaggccgtgcacacccaggagaaggagcaggtcaagactctcaacaagtttgcttccttcatagagaagagctacatcaataaccttaggtggcagctggagactctgggccaggagaagctgaagctggaggcagagtttggcaacatgaaggggctggtggagaacttcaagaacaagtatgaggatgagatcaataagcgtacagaggtggggaatgaatttgtcctcatcaagaaggatgtggatgaagcttacatgaacaaggtagagctggagtcttgcctggaagtcctgactgacgagatcaacttcttcagtcagctatatgaagaggacatccaggagctgcagtcccagatatcggacacgtttgtggtgctgtccatggacaacagccgcaccctggacatggacagcatcatcactgaggtcagggcgcagtatgaggagatcgccaactgcagccaggctgaggctgtgagaccatgtaccagatcaagtatgaggagctgcaggcgctggctgggaagcacgggggtgacctgtggcgttcgaagacagatctctgagatgaacgggaacatcagccggctccaggctgagattgagggcctcaaaggccagagggcttccctggaggccaccctcgcagatgccgagcagtgtggggagctggccgttaaggatgccaacgccaagctgtccaagctgggaggctgccccacagccggccaagcgggacatggcacggcagctgcgtatcaggggctgataaacttcaagctggccctggacgtcgagatagccacctacaggaagctgctggagggtgaggagagccggctggagtctgggatgcgtaacatgagtatccattcgaagaccaccagtggctatgggggcctcacaagctactgcctgagctccagctttggttctggcgccggctccagctccaccaaggccgtggttgtgaagaagcttgagacccgtgatgggaagctggtgtccgagtcctgacatctgccaaagcttaatgtgctggaaacttaatatttgtagtatgaggacaaaataacttatgcagttcatttgaccgcagtttgtttttgattactgtgaaagctctgaaagttacagctataagcaaccttaacctgttttgcaagttactcttgcttgttacttgatttctggggggatgttttgtctttgactttgagaatctgctctctagacttacataaatatgacagcttgtgttactaatgttaatagattagttaggtaatatggttagttttaataggtaaaacacaacccaaagagcactgtctgtggtcttaggcagatctggactccagtcctggccctgcagcttcaaacctgtgcagcctt

SEQ ID NO: 470677 - DNA, 3399 bp, Homo sapiens
tgaagagcagtgcagcagcttctccccttgtttcctcctcagagtccatgccgaggtggcgcagggtgcgcccgcaggccttgctgactgccacccatagcagcacactggtggaggtggtggtggcactgctgtgcacgctgcactccctgactcagtggaatgggctcatcaacaagtacatcaactcccagctccgctccatcacccacagctttgcgggaaggccttctgaaggggcccagttagaggactacttccccgactccgagaaccctgaagtggggggcctcatggcggtcctggctgtgattggaggcatcgatggtcgcctgtgcctgggcggccaaattgtgcacgatgagtttggagaaggcactgtgactggcatcaccccgaagggcaaaatcaccgtgcagttctctgacatgcggacgtgtcacatttgcccattgaatcagctgaaaccagtaggtgaacttgtgctcagttactgtatgataagggaaattggctttacactaggacccagcaccaacattagcacttgaaagaacttgattctggtacttcaagtttgccttctaggaagctgtgtgagcttgcgcttctgtggtgagcagggcctgtctcacagggcacctaaagcagtggttcctgtgtttttcagcctcagagacatgaagagggctttagcaacctagaagaaggatgccaagaaaaaaagtgaataagtatttttggttcatctattacatcatttcatttcattatttcatttcttttcatcatttcatttcatttcctcatttcatcctttcatttcatcatttcatcatttcatttcatcctttcatttcatcatttcatctcatcatttcatctcattttatcatttcatttcattctttcatttcatttcatcatttcatctcaacatttctcatcatttcatcatttcatctcatcatttcatttcatctcatcatttcatttcatctcatcatttcatcttttcatctcatttcatcatttcatttcatcttatcatctcatttcatcaattcatcatttcatctcatcatttcatctcatttcatttcacttcatttcattgtttcatttcatttcatcattgcatttcatcacttcatctcaacatttcatttcgtcatttcactttatctcatttcatcatttcatctcatgatttcatttcatttcatctcatcatttcatcttttcatctcatcatttcatcatttcatctcatttcatttcatcatttcatttcatttatttcatcattgcatcatttgatttcatgtcatttcatcatttcatatcatttcatcatttcatcttttcattccatcatttcatcatttcacttcatcatttcatttcctcatttcatcatttcatttcatcctttcatcatttcatctcatcatttcatcctttcatttcattatttcatttcataatttcttctcattgttgcatttcgtcattccatcatttcatcatttcacttcatctcaccatttcatcatctcacgatttcatttcatctcatcatttcatctcatttcatcttttcatctcgtcatttcatttcatcatttcatttcatttcatcttttcatctcatttcatttgatcatttcatcaattcatcatttcatcatttcatttcattacatcatttaatcatttcacttcatttcatcacttcatttcatttcatcatttcatatcatttcttcatttcaccatttgatcttttcatttcatttcatcatttcatcatttcatttcatcatttcacttcatcatttcatcatttcatttcatttcctcatttcatttcaccatttcatttcatcattccatttcatcatttcatttcacttcatctcatcacttcatcatttcatctcatgatttcatttcatcgcatcatttcatcatttcatttcattatttcatttcatttcatcatttcatctcaacatttcatttcatttcatcatttcacttcatttcatcatttcatcatttcatctcatgatttcatttcatctcatttcatctttccatctcatcatttcatttcatcatttcatttcatttcatcttttcatctcatttcatttcatcaattcatcatttcatctcattatttcatctcatttcatttcacttcatttcattgtttcatttcatttcatcacttcatctcaatatttcatttcgtcatttcacttcatctcatttcatcatttcatctcatgatttcatttcatctcatttcatttcatcatttcatttatttcatcatttcatcatttgacttcatgtcatcatttcatcatttcatatttcaacatttcatcttttcattccatcatttcatcatttcatttcctcatttcatcatttcatttcatcctttcatcatttcatctcatcatttcatcctttatttcatttcttctcattgttgcatttcgtcatctcatttcatttcacttcatctcatcatttcatcatctcatgatttcatttcatctcatcatttcatctcatttcatcttttcatctcgtcatttcatcatttcatttcatcttttcatctcgtcatttcatttgatcatttcatcaattcatcatttcatttcatcatttaatcatttcacttcatttcatcatttcatttcatttcatatcatttcttcatttcaccatttgatcttttcatttcatttcatcatttcatcatttcacttcatcatttcatcattccatttcatttcctcatttcatttcacaatttcatttcatcatttcatttcatcattccatttcatcatttcattacatttcataatttcatcatttcacttcatctcatcatttcatcacatcatttcatttcatctcatcatttcatttcatcttttcatctcctcatttcatttaatcatttcgtttcatttcaccttttcatctcatcatttcatttcatcaattcatcatttaatttcattttttcatcatttcatcattcacttcatttcatcatttcatttcatcatttcatatcatttcctcaattcatcatttcatcttttcatttcatttcatcatttcatcatttcatttcatttcacttcattatttcatttcattatttcatttcatttcatttccccatttcatgtcatcatttcattatttcatttcatcattccatttcatcatttcgtttcatttcatcatttcatctcattatttcatttcttcatttcatcatttcgtttaatttcatcatttcatttcatcatttcatcatttcatttcatttcagtgatacatgtatttaattgctaatgc

SEQ ID NO: 470678 - DNA, 671 bp, Homo sapiens
ctgcccaggctcgccttgactccaaatggttgaaaacagatatacagatgatagtgtcaaaccaagtggaacaaagaaagaagatctggatgacaaagagaaaaaagatgaaactcctgcacctgtatatagggccaagtcaattctggagagctggggatgttcacggaacgccagacaccaaaaggccagaagcatgcccctgcaggaccagcacttggctctggccatcctgctggagctggctgtgcagagaggcacgctgagagagtcattttttacagttcagaactgtagaaataatgaggaagtgacacttatatgcaaagctgatttggagaaccataataaagatggaggcttctggattgtgattgatgagaaagtgtatgatataaaggacttccagacacagtcgttaacaggaaatagtattcttgctcagtttgcaggggaaaacccagtggtagctttggaagctgctttcgagtttgaagtcacccgggaatccatgcacgcattttgtgttggccaatatttggagaaaagaggttaaactttggtcttatgtagaaatttggaatggcttattatcttgagagtttgatttttgttagaataaatttcatttcctctacctgtgtggtcacagtccactaatacttgtcatc

SEQ ID NO: 470679 - DNA, 4506 bp, Homo sapiens
gactgggcagtgggtaggtgaagggtgatggcagggcagggcagggcattggcgcagccgctcctttcacctggtgtgccagcttgcagtttgtgcatttgtcccttttggctgcacagagaaggcagggaaactgcgtgggaatgcaaggtcgggaacggccgggggtgcgaccaaggggacttggagaaccgccccacctccccaggttcccctggcagagcgcaccaccccccgcccccgcgatttttcacaggcccaggccctgtggagctgggcctctgtggaaggggtgggggcagggcagaggcaggaggacagaaagagctgggcagggaagggggccaagagagcctttctcaacatccagatgatcaaacaggtcttcatcctcatccttttcatgggcagggtgtggagaaggatgtagaattcttggttttgctaagtggacctgcacagttcaaacccttgtggtgcaaaggccatctgtatagccattgaatagcaatttatttttagaaattaaactcactaaaatactcttagaaggatgccaagaaaaaaatcaataagtatttttggttcatctatttcatcatttcatttcatttcatcatcatttcatcatttcatttcatcatgtcatttcatttcatcctttaatttcatcatttcatcatttcatttcatcatttcatctcattatttcatttcatttcatctcatttcatcatttcatttcattctttcatttcatcatttcatcatttcatctcatgatttcatttcatctcatcatttcacttcatttcatttcatctcatgatttcatttcatctcatcatttcatctcatcatttcatcttttcatcttgtcatttcatcatttcatcttttcatctcatcatttcatcatttcatttcatcaattcatcatttcagttcatttatttcatcatttcgtttcatcatttaatttcatcatttcacttcatttcatcatttcatataatttcatcatttcatttcatcatttcatcttttttcatttcataatttcatcattccacttcatcattccacttcatcattccacttcatcatttcatttcatttcatttcatcatttcatttcatttcatcctttcatttcatctcatttcatcctttcatttcattctttcatttcatcatttcatctcatcatttcatttcatcatttcacttcatctcatcatttcatcattttatctcatgatttcatttcatctcatgatttcatctcatcatttcatcttttcatctcatcatttcatttaatcattttatttcattttatcttttcatctcatcatttcatcatttcatttcatcgattcatcatttcatcatttcatttcattatttcatcatttcatcatttcacttcatctcatcatttcatttcatcattttatatcatttcgtttcatcatttcatcttttcatcatttcatttcatttcatcatttcacttcatcatttcttcatttcatttcctcatttcattgcaccatttcatcacttcatcatttcatcatttcatttcatcattccatttcatcatttcatcatttcatttcatctcatcatttcatttcatcatttcatttcctcatttcaccattacatttcatctcatcatttcattttatcatttcatttcatcatttcatttattcatttcatcatttcgtttcatcatttcatcatttcctttcatttcatcatttcatttcatcatttcatctcatcatttcatctcatcatttcatttcatcatttcatctcatcatcatttcatctcatcatttcatctcatcatttcatttcattcatttcatcatttcatctcatgatttcatttcatctcatcatttcacttcatctcatcattacaccatttcatctcatgatttcatttcatgtagtcatttcatttcatctcatcatttcatttcatcttttcatctcttcatttcatttcaccgtttcatcttttcatctcgtcatttcacttcatttcatcatttcatcaattcatcatttcatcatttcatttcattatttcatcatttcgtcatttcacttcatttcatcatttcatataatttcatcatttcattttatcatttcttttaatttcatttcatcatttcactttatttcatcatttcatatcatttcatttcatcatttcatcttttcatgtcatttcatcatttcatcatttcatttcattctttcatttcatcattgcatttcatcatttcatcatttcatctcatgatttcatttcatctcatcatttcacttcatctcatcatttcatctcatgatttcatctcatcatttcattacatcccatcatttcatgttttcatctcgtcatttcatcatttcatttcagttcatcttttcatctcgtcatttcatttcatcatttcatttcatcatcatttcagttcatttatttcatcatttcatttcatcatttaatttcatcatttcacttcatttcatcatttcatttcatttcatatcatttcatcatttcatcttttaatttcatttcataatttcatcattccacttcatcatttcgtttcatcatttcatttcctcatttcatcatttcatttcatcctttcatttcatctcatcatttcatcctttcatttcattctttcatttcattatttcatctcatcatttcatctcatcatttcatttcatcatttcacttcatctcatcatttcatcattttatctcatgatttcatttcatctcatcatttcatttcatatcatttcatttcatcttttcatctcgtcatttcacttaatcattttatttcattttatcttttcatctcatcatttcatttcatcatttcatcatttcatcatttcatttcacttcatttcatttcatcatttcgtatcatttcttcatttcatttcatcttttcatttcatttcatcatttcatcatttcatttcatttcatcatttcacttcatcatttcatttcttcatttcatttcatttcctcatttcattgcaccatttcatcacttcatcattttatcattccatttcatcatttcatcatttcatttcatttcatctcatcatttcatttcatttcctcatttcaccattacttttcatctcatttcatcattttatcatttcatttcatcatttcatttcttcatttcattttgtttcatcatttcatcatttcctttcatttcatcatttcatctcatcatttcatctcatcatttcatctcatttcatttcattcatttcatcatttcatcatttcatctcatgatttcatttcatctcatcatttcacttcatctcatcattacaccatttcatctcatgatttcatctagtcatttcatttcatctcatcatttcatcttttcatctcgtcatttcatttcatcatttcatttcatcttttcatctcgtcatttcatttcatttcattttatcaattcatcaatttatcatttcatttcatttcattatttcatcatttcatcatttcatcatttcacttcacttcatcatttcattatttcatataatttcatcatttcattttatcatttcttttaatttcatttcatcatttcatcatttcactttatttcatcatttcatatcatttcatcatttcatttcatcatttcatcttttcatttagtttcattatttcatcatttcacttcatcatttcatttcatttcctcatttcatcatttcatttcctttcatcatttcatctcatcatttcatcctttcattatttcatttcatcatttcatgtcatcatttcacttcatcatttcatcatttcatttcatcatttcacttcatctcctcacttcatcatttcatctcatcatttcatctcatcatttcgtttcatctttccatctcatcatttcatttaatcatttcatttcatcttttcatctcatcatttcatttcatttcatcatttcatttcatcaattcatcatttcatttcattttattatttcatcatttcatcatttcacttcatttcctcatttcatttcatttcatatttcttcatcatttcatcttttcatttcatttcatcattttatcatttcatttcatttcatcatttcacttcgtcatttcatttcatcatctcatttcaccatttcatcatttcatcattccatttcatcatttcatcatttcatcatttcatcatttaatttcatcatttcaccatttcacttcatctcatcatttcatttcatttcatcattttatcatttcatttcatcagttcatttcttcatttcatcatttcctttcatttcattatttcatttcaccatttcatcatttcatttcatcatttcatttcatttcagtgatacatatatttaagtgctaatgtga

SEQ ID NO: 470680 - DNA, 649 bp, Homo sapiens
ggcttgatgtggggatgtcaacatggctcagattgataaatttacctctgaggcaggtatggctgaagctttatgaaaagagatggggcctgtgccaggccttagatgtaggagaaggaggacgtgtcaggaagcagaaacagtatcatcaaaggtgctgctgtgaggcatgtgggcagtgtttggagaagagccagggactttctgtgtcaaagctttatgaaaagagatggggcctgtgccaggccttagatgtaggagaaggaggacgtgtcaggaagcagaaacagtatcatcaaaggtgctgctgtgaggcatgtgggcagtgtttggagaagagccagggactttctgtgtcaggtttacagcatctgtgggaggccgcattggataggctcatctgtacttttttgatagaggatgatattgatgatgaaatgtcctacaatgatcatttagaggtttattttgaacaactggcaattccaggaatgatggaataaaacatatgaagtagaaggactggaacctccagaaaaaatactttaagttacctgcaagtgatcctagtcagaaatgtttttgttactttcctttttgatttcttcactgaccattaccattatttatataccatgtacttggagag

SEQ ID NO: 470681 - DNA, 503 bp, Homo sapiens
aacaacagcaaggtgggtgtcaatggcatgccctatgtgactgtgcttaggttagctgctgctgcttgtcaggagcatggggatggcatgccgatgctccacttcactaaactctaccatcattatagaagttttggagtagcctatgaaagacagaatcatgtcattatccaagagacaaaatcctctagagctgcagagctcaccaggggatcagctttagcaggcaggcatccttctcagcactgccatccaggactctttcccttggacacaaacagcaaaatgccaggaagacgggaccaggaacacagtgtggtcagaagcaagactgatgcaagaagcaaccacttggaaatccaaagggagcattttggccctctcctgtgggcagccctcaactttggtgctcacttcctaacctcagtgacggtttctgagcttcatcctgcctctggagtccacatgggctccaggtggtgaacagtttcactgaatcctga

SEQ ID NO: 470682 - DNA, 751 bp, Homo sapiens
ttcgtgttttgtgagtttggttttacctacgtattatgattttggatgtaaatctgcaactctatgtacatgttaagtcaatgtgatgtttaatcaaaatatgaatcagccatatctaccaccaataaaatcgtgtgtttgtttgcctctggtgaatgcaggaataaaagacaagagacaaaggggtatatttggaaaaaggggtcaggggcaccttgcctctagtgaacaagtttctcccaaggtcacagaattatccagaccaaccaataacaacttcctgtgggaaccaggtgcatctcaccctcttgatactacaaagccttccccaacaccccctgtttgttctctctgctcccaagtgcaatccctgtgtgggaaaggcccagggatggttttttgtaaaattgcaaaaaacaaaaaggacttttactttggagagaattatgcacgtcactcagttgctctaacaagtgctaccgtcatgggagcaagaacagtgaccttgtctttcctgagctgccgcttcctttgctcctgtcacatgcactctcacgatgaggggctcattccttgtgccttatggttcaggcactgatgagaaataaaaaagagaaagataacttaatattagtccctcccaaaacttactgggtaattctctcatcctaaatcccctactcatcgtgtaggcttttagcactgctgcttaccagtatgctaaaggtgcagacttaggatcagaagtttg

SEQ ID NO: 470683 - DNA, 973 bp, Homo sapiens
gctgcctcaaccctttttggattcttttctccccagactgtcccagagttcaggtcttctcgctttttgcggctttttgcccccgccgccgcccctttttgccgccgcagatttttgctcccgccaccgcggcttcttgcccccgccgccgcggctttttgcggctttttgcccctgcggcattttgctcccgccgccgccggtttttgccgccgtggctttttgcccccgccaccgaggctttttgtccccgccgccccagctttttgcccccgccgccgccgctttttgccaccgctgccgcggctctgagggcgggagcagcacactcggctgccggctctaccggcgtccttgttcaggcggcgccggggggcgctcctggtccagctctcccggctcgggggttccttgcctaggcgcccgcgccccgggctccccgccttggccgctgcggcctgcatagagcggcgctgcgcgtagcggccaggggagagaagaaggagggcggtggcgggggtgatgtggcggcctctttgggaggcgcaggggccgcagccagccagacgctgcagcagtgtgggcagctccagaagcttgtgggcagctccagaagcttatccgcatctccattggcagcctgcgccggttgcgcaacaagtgcgctgtgtccaaggacctcacccagcaggagatacggaccctggaggtaagggggtcgtggacccaggctgggctcgaggagcggcccagacacctccctccgtgcccaagttcactcctggccgagttgcatccttgagccccagtcgccccgttggaggcttcccctccctcctgcactcgctgatgcggcagccggaggacccgggaccagccctcaccttgggcaggatctgtggggcggcggacatccccttaccccctgaatttccatctggtccagccctctcatcttgtgggtgaggaaacc

SEQ ID NO: 470684 - DNA, 1144 bp, Homo sapiens
gaggcggacgcggcccggacccggtggatgtggagcagtcgccgctgccggcgcccaagccgaccccagggccgacccccgcaaggagctgaaggaggtgggagccccagtcgccgcgggcgtcggcgccgagggcgacccactcttggtcattctggaatgcggcaggcacgcagcgtttgcgtgggaatcctgagcacggcagaacccccacacccaccatggttcctgggcctgtgcactctgggcttttctggctttgcccacccagctgctccatgccaggaggaggaggagacacctagagcctgcgacaccacgacttgcctcactgcgggccctgcccctgctgctgccctggccctggcctggaacctggtcctgtcaaggacctgccctgactctgtcatggccctggccctgctctgccttgtcctggccctgaccctttcctggctctgcactggcctttccctggccctgagctggcagtggtctacccctgctctggccatcaccctgccctgctgtgctctggatgtgtcctcaccctgccctggccctactctgcctttgaccctgccctggccttaccttggccctcaccctagtgaccctggccctgcccctgcccttgtctttgccctggcactggccttggacatgtccgtggtcctaaccctggccctgccctggagctgccactgtcttggccctgccctggctctggccctgccccggccctggccctgccccggccccagccatagacctgccctgccctggatctaccctgactctgccttggtgttgccctcccatctctatggcctggctctggccctgccttgcacaggccatgctctgccctgcatgtcccagcctgggcccagcccttgccctaccatatttctgaccccacccgtacccttgttctggccttgaccctgccgtggcattctcctggcccttccttggtcctgccctgcccttccatgccctggcctttccctcaccctgcactggtcctgccctgccctggcagtgccttggccctggccctgcctctgccttctccctggccttgctctttccctgccctggcctgaccccaggcctaccgagtccatgaaatgaccctgga

SEQ ID NO: 470685 - DNA, 1588 bp, Homo sapiens
ccgtagccatgacttttgcaagtcctcctagattaacactgaacttgggggtggttttagggaccctgacagtggccgcaaacccaaaggtgcgggagcaagtgcggctggagctgagcttcgtcaactcagacctgcagatgctcaaggaagagctggaggggctgaacatctcagtgggcgtctatcagaacacagagtatgactccctcactggggttctggtcagccagcagaacctgctgctggagaaggccagtgtcctgttcaacactggggtcctctacacccagattgggacccggcgctatcggcacacgcaggctgggctgcagagtgccatagatgcctttcagagagctgcaggggttttaaactacctgaaagagacatttacccataatccaagttacgatatgatccctgccatgctcagcgtgcttgtcaaaatgatgcttgcacaaacccaagaaagcgtgtttgagaaaatcagccttcctgggatctggaatgaattcttcatgctggtgaaggtggctcaggaggctgccaaggtgggagaggtctgccgacagctgcacgcagccatgagccaggtgctggtgaaagagaacatcccctactcctgggccagcttggcctgcgtgaaggcccaccactatgcggccctggcccactacttcactgccatcctcctcatcgaccaccaggtgaagccaggcacggatctggaccaccaggagaagtgcctgtcccagctctacgaccacatgccagaggggctgacacccttggccacactgaagaatgatcagcagcgccaacagctgggtgcatgtccctctgcacccagatgtgggtcccacttggtgaccagctggtcctgctcacagacagccacagagaggtccctgaagagggcccgggagaggggggtgttccaagtcatcgtggccactttgggttcggaagtcatgaggcacagtcctgagcctcagagggcttcccaggctgtgttctcatgggttccatagcacccaggcctccccctgtggagccaggactttaaccatctcccttggggtccacagggtggcctgtatcatgctaacagggaaggagacgtttgttgatttccttatgcatggctgaattcccaagaacacctaatgactggtaatgaagtgtcctggtttggtctctgccatgtctcagtgtgaatatctcttcccatgtgcagacctcacctccaccaccctaatctgcccccacgcacacatacgcagcttccccgtctcagtgatggcaactcccacccctctaggtgctcaggccagaaaccttggactcactctccagtcttcttttctttcctcctctttcccctcccctcccctctgctcccctctcctctcttcccctctgctcccctcccctcctctcccgttctctcccctcctcttccctcccctcctcttccctcccctctgttaccctcccctcctctcccattctctcccctcctcttccctcccctctgttaccctcccctcccctcctctccccgtctctcccctcctctcttctc

SEQ ID NO: 470686 - DNA, 7973 bp, Homo sapiens
ctctgcgcctcccaggcagtatggcatggcagtgggaaattagatttcaagtgaaattaaggttgcaaaggtggcgggagcaaaaagccgcagcagcaaaaatccgcggcggcaggggcaaaaatccgcggcggcgggagcaaaaagccgcggcgggcaaaaagccgcggcggcaaaaagccgcgtcggcggggtggggggcaaaaagccgcagcgaggcaaaaagccttggcgggcaaaaagctgaggcggggtggaggcaaaaagctgcggcgggtaaagagccgcggcggtgtggggggccaaaagccgcggcggcgggtgggggcaaaaagccagggcgggcaaaaagccgcggcagcggagggcaaaatagtggagatggggtagaaggccggcacagcttggcgttgctggagtgtgatgtgataggaaatgtgcagccaaagacaaaaaaagatgtaagtaggcttgactcattgcagctaagaacccagatgttatcttgagggtattaactaataagcagtttaaatcagaatggcacattctgatttgttgtttgacaagaatgcttcagctcttaatttaaaattatgcttctccctcctaggttgagtgaacttagaatgcattctctgacatatccaagtttttgttaatatgaatttggggaaaaaagcatacttaattagctaagacttcttattctaggcttgaccctgtgtttgacgtcttttgaatttctagttgcatgggctgctctctgacactgagttaaacctttcttttgattcagcaatttggaaacactgtttttgtccattctacaaatggacatttgggagcttgatgagggcaaaggcaagaaagccaatattgaaggataaaaactagaaggaagctatctggaaaatatctttgtgatgtgtgcattcatctcacagagttaaacctttcttttgattcaattgtttggaaacactgtttttgtccattctctgaatggacattttgaaactcattgaggccaatagtgaaaaagtgaatatctcagaataaaaactagaaggaagttatctgaaaaaccacctggtttggtgttcattcaactctcagagttataacatacttttcattcagcagttctgaaaaactgattttgtagaatctgtgaagggatatttgggagcgcattgaggcctatggtgaaaaagaaaatgtcttcagataaaaacaagaaagaagctttctgagaaactgcttcatgaggtgtgctctcatctcaaacagataaacctttcttttgattcagcagtttggaaacactgtttttgcccttatgcgaatggacacttgcgagctccttgaggccaatgccataaaactgaatatcacaggacaaaaactataaggaagctatctgagaaactgcttcgtgatgtgtacattcacctcatagagttaaacgtttattttcactcagcagttgctaaacaaagtttgtgtagaaactgcaaaggtatatttgggagcacatagaggcctatggtgaaaatgaaaatgtcttcagatataaattataaagaacctttctgagaaactgctttgtgatgtgtgcttttatttcacagaattaaaccctcctcttgactcacctgtttggaaacactgtttttgtctattgtaagagtggacatttgggagctcattgtggccaatggagaaaaagcaaatatcccaagataaaaactagaaggaagctatctgagaaactgctttgtgatgtgggcattcatctcacagagttaaacctttcttttcattcagcattttggaaacactgttttgtaggatctgtgaagggacattttcgaccacatataggcctatgttgaaaaaaaatttttcagatactaactagaaagtatgttactgagaaaccagtttgtgacatgtgcattttctcacagagttaaacccttcttttcattcagtagtttggaaacactgtttttgtacattctgtgaatggacatttaggagctcactgaggccaatggcaaaaaaggagtatcccagaaaaaaaacaggaaggaagctgtctgagaatccactttgtgatgtgcattcacctcacagagttaaacctttcttttcattcagcagtttggaaacactgtttttgtagaatctgcaaagagatatttgggagggcattgagagctaaggcaaaaaagcaaacatccgaggaaaaaaactagaaagaaattatctgagaaatggcattatgaagtgtgcattcattttacagtgttaaacctttattttcattcagtagtttggaaatgctgtttttgtcaaatcagcaaagggatattttggagtgcattgaggccaatggtgaaaaagaaaatatcttcagataaaaagtagaaggaagctttctgagaaactgctttttgatatgtgcattcatctcacagagataaactttccattgatgcagcagtttggaaacaccagtttgtcttttctgtgagtggacatttgggagatcatagaggccactggagaaaaagcaaatatccagacacaaaaactagaaggaaactatctgagaaaatactttgttacgtatgcattcacctcgaaaagttaaacctttttttcattaagcagtttggaaacaatgattttgtagaatatgtgaaggcatatttgggagaattttgagactatggtgaaaaagaaaatacagataaaaactagaaagaagctttctgagaaactgctttgacaggtgtacattcctctcacagctaaacctctcttttgatagagtagtttggaaacactgtttttgtccattctgtgaatgtacatttggaatctcattgagaccaattgtgaaaaagtgaatatccctggataaaaactaaaaaaaatctatctgagaaactgctttgtgatgtgtgcaatcatcttgcaaagttaaatctttcttttaaatcagcagttatctgcaaatggatatttgggagcactttgaggcctatggtgaaacagaaatcatcttcacataaaaactagaaagaagctttctgagaaactgctttgtgacgtgtgcattcatcttacagactttacctttccttttcatacagcagtttggaaacactgtttttgtccattctgggaatggaaatttgcaagctcattgaagcccgtggtggaaaagcgaatatcccaggatataaactagaaggaaactacctgataaataactttgtgatgtgtacattcaggtcagagttaaaccatacttttgattcagcagtttgggaacacattttttgtccaatgtgcaaatggacaattgggagctcattgaggaaaatggaaaaaggggaatatcccaggttaaaaactacaagaaagctatctgagaaactattttgtcatgtgtgcattcacctcacaaagttaaacctttcttttcattcagcattttggaaacactgtgtttgtacgattggtgaagggatatttgagaagttaaactttcttttcattcagcagttggcaaacactgtttttgtaaaacttgcacaggtatatttgggagcctatgatgaaaaagaaaatacctttatgtaaaaactagaaagaagctttctgagaaactgatttttgatgtgtgccttcatctcacagagttaaacctttcttttcattcagcattatggaaacactgtttatctagaatctgtgaagggatatttgggagcacattgaggcctatggtgaaaaagaaaatatcttcagtgagcagttttgaaacagtatattttagaatctgcaaagggacttttaggagtgcattgaggactatggtgaaaaaagaaatatcttcagataaaaaccagaaagaagctttctgagaaactgctttgttatgtataaattcctctcacacagttacacctctctttacatacaaaaatttgtaaacactgtttttgtccatttctgtgaatgtatatttgggagctcattgaggccaatggaaaaaatgaatatgcttggatcaaaactacaaggaagctatctcagaaactgctttgtgatgtctgcattagtctcacagagtgaagccattcttttcattcagcagtttggaaacactgtttctgtagaatctgtgaagggatatttgggagcgtattgaggcctatggtgaaaaagaaaatatcttcagatgaaaactagaaagaagctttctgaaaaactgctttgggaggtgcgcattcatctcacaaatttaaacctttcttttgattcggcagtttggaaactgtatttctccgttggataaatggacatttgggagctcattgaggccaattgtgaaaaagcaaatatcccaggataaaatctcgaaggaagctgtctgagaatctgctttgtcatgtgtaccttcatctcacagagttaaacctttctattctttcaacagttggaacactatttttaaaaagtctgtgatgggatatttgggagtgcattgagacctattgtgaaaaagaaaatgtcttcagaaaaaaaccagaaagaagttttctgagaaactgctttgtgatgtgtgcattcctctcagagagctaaacctttcttttgattcagtagtttggaaaaactgattttgtccattctgtgaatggacatttgggagatcattgaagccaatggtcagaaataaaatctcccatgataaaaaatagaaggaagctatctgagaatccactttgtcatgtgtggattcacctcgcagagttaaacctttctattcattcagcagtttggaaacactgtttttaaagaatatgcaatttgatatttggaagctcattgaggactatggtgaaaaagaaaatatcttcagataaaaactagaaggaagctttctgagaaactgctttgtgaagtttgcattcatctcatagagttaaaccattcttttgattcagcagtttggaaacactctttttgtcaattctgcatatgaacactgggatctcggtgaggccaatggcaaaaaagtgaacatcccaggaaaaaaactagaagaaatatatctgagacaccgcttcacaaagggtacgttcatcccacagagttaaaccttttttattttccattcagcagtttggaaacactgtttttgtataatctgcaaagggatatttgggagcaccttgaggtctatggtgaaaataaagtaaattcagataaaaactagaagaagctttctgagaaactgctttctgatatgtgcattcatctcacagagttaaactttctttgattcagctgttttgaaacactgtttttgtccattctgtgaacggacatttgggagctcattgaggccaacatcaaaatattgaatatcccatgataaaaactacaataaagcagtctgagaaaccgttttgtgatgtgtgcattcatctaacagagaaaaacctttcttttgattcagctgtttggaaacaccgtgattgtccattgtgcgaatggatatctgagtgctcattcagtccaatagcgaaaaagcaattatcccaggataaatagtggaaggaagctgtcttagaaaccactttgtgatgtgtccattcatctcccacagttaaacctttcttttgatacatcactttggaaacactgtttttgtacaatctgggaaggggtattttggagtgcattgaggtctatggtgaaaaagaaaatacgttcagttgaaaactagaaagaagttttctgagaaactgctttgtgaggtgtgcattcatctcacagtgtaaaacctttctttagattcagcagtttggaaacactgtttttgtccattctgccaatggacatttgggagcacattgaggccaatagcaaaaaagtgagtatcccacagtaaaaactagaaggaagcaaactgagaaaccagtttgcgttgtgtgcaaactgcctcccacagttaaacttttcttttgattcagcagttggagacactgtgtttgtccattctgtgaatgcacttttgggagctcattgaggccaatggtgaaaaaagcaaatatcccaggatgaaaactggaaggaagctatctgagaaactgcttcatgatgtgtgcattcataagtcagtgttaaacatttctttacatttagcagtttggaaacactgtttttgtagaatctgtgtaaggatatttggaaatgcattgaggtatatggtgaaaaagaacatatcttcaaataaacttagaaagaaactttctgagaaactgctttgtgacatgtggatttatctcacagagttaaaactttttctcatacagctcttttcaaacactgtttttgtccattctgcaaatggacatttgggagctcattgaggacaatggcgaaaaagtgaatatcccagaataaaaacaagaaggaagctgccttagaaaccataatgtgatgtgtgcattcatctcacatagttaaacctttcttttgatacagcagttcagaaacactttttgtccattctgcaaatggacatttgggagctctttgaggtccatggcaaaaaagtgaatatccaaggttaaaaactggaaggaatctatctgagagcctgctttatgatgtgaacattcatcttgcagagttaaactatttttgattgagcagtttgtaaactctgtttttgtccattctgtgaatgaacacttgggagctcattgaggccaatggtgaaaaagttaatatcccaggataaaaaccagtaggaagatatctgagaaataacttagtgatgtacacattcgtttggcagaattaaacctttatatttattcagtagtttggaagcacggtttttgtagaatctgtgaagggatcttagggagcacattcaggccttcagtgaaaaagaaaatatattcagataaaaaccagaaagaagatttcagtgaaacagcttagtgatgtgtgaattcatctcacagagttaaaaaaattctatcattcagcaatttggaaacactgtttttgtagaaccttcaaagggatatttgggaacacattgaggcctatagtgaaaaacaaagtatattcagatgaaaattagaaagaagctctctaagaaactgctttgtgatgtgtgcattcatctcacagagttaaacttttcttttgattcagcagtttggaaaaactgttattgtccattttgtgaatggacattttggagctcactgatgtcaatgatgaaaaagcaaatatcacaagataaaatctagaaagaagctatctggaaactgctttgtgatgtgtgcattcacatcacagagacaaacgtttcctttcattcagtaatttggaaacactgtttttgtccattctggaaatgaactattgtaagctcattgaggccaaaggtgaaaaagcgaatattccaggataaaaccttgaaggaagctatctgagaaaccactttgtgatgtgtgcattcatctcacagagttaacctttctatatgtttagcagtttcaaaacactattttgtagaatatgcaaagggatatgtgggagcgcatcaaagcctctggtgaaaaaaaaatcctcagaaaggaaccagaaaaaagctttctgagaaactggtttttgatgtgggtattcatcttaaagagttaaacctttcttttgattcagcagtttgcaagcactgtttttctcctttccacgaatggacattttggggctcattgaggccaatggcgaaaaagcaaatatcccagtataaaaaggagaaggacacagatttgtgatgtgtgaattcatctcacagatttaaattttcttttgaatcagcaatttggaaacactatttttgtaaaacctgtgaagggatattt

SEQ ID NO: 470687 - DNA, 685 bp, Homo sapiens
tgatcgacgcccccagtgttgttggtgagtaacctagactgtgttccctctgtgggggtgcctgttctcgcatgactgctgtagcatgtatgcccccagatgtgtcatttgtccctgaacaaggccaagtggcaggagcccgggaaggagattatattgtctccattcagcttgtggattgtaagtggctgatggtgagtgaggttatgaagctgctgaagagctttggcgaggacaagatcgagatgaaagccgtgagcctcctggactccacatcatccgtgcataataagagtgccacatactccgtgggaatgcagaaaacgtactccatgatctgcttagccattgatgatgatgacaaaactgataaaacccagaaaatctccaagaagctttccttcctgagttggggcaccagaaagaacagacagaagtcagccagcaacttgtgcctcccatcgctgcaggctgcccagagcctgcaatgtgtgaatgtgtgtcataattgttcacaaagggctccatcatgttaagcatttcctaattatttgaccatagaacttcttttttcatggcaagtctactaatagctcctagaacagagttccaacgatcattatgtgatgaacactgaaggcctttttcaaaagctttgaaggttcttgtcaaaagtacatgcatt

SEQ ID NO: 470688 - DNA, 711 bp, Homo sapiens
gtggcctcaatatggagggcagtcaccatctcccagtgtctctgactgctgcacgcacacttggcaacctgtgctcagaacctaagaggacccctgagagccttgtggaggctgggcaaacgtggtggagtctgggacaggaggggaaccagagtctgagtggaggaggccacacagcacaacccgggccagactgcagctctctgctccagggcccacctggagctgccatctgccagccctgctttcctgtagaagatcccacccataccagccccaggaatctaggcaaggccagagcacctcaggagcctcctggaaatcgcagcacagacaacggatgcaagaagaaagggagtgacagcttcagatgcgagaggaaaggaccctggaacccagggctgcatcctgctcaccgccatgaaacatgggcatgcaggaagccatcctcagtcctatcagcccccttgagagtcaaccccaaaaacactctcggagaaatatttcagcaagaaaaaggaactggggagtatgctgccagattgcggtgagaactaaaagatttatgtatgcagatcatattacctgtcacgtagtaggcactcaaaaattattacttgtcttcttagggttgttatgttaaataatgttatgttaataacatatgtaaaactgcttcttaaattataaagtgctatgcaaatgtgagtt

SEQ ID NO: 470689 - DNA, 530 bp, Homo sapiens
tttttaagataactatagtagtagtgagctccccaggttggtagtactccatgtttattgctgtacaacaatgacagcagcacgggagcttgttactgggcatgaagtgggaagaaaagtgaaaccatgctgtagagttaaagcaaaattatgcttttccctgagccccttatgtcttgaactgctctccatatttcttcttcccaatttcaacgtggggaagtctataatcttactgcaaagatcatgttccagacaagcagcattaacgtcacccaagaacttattacagatgaagaatctcaggcctgctgaatcagaacgtgcagcttcgaggagccacacccccgccccggctgatttattcggggaagagaagttcttttctattttgactgaacatgacattaaatgtgttttgcaaaattacctgtcccagattgttgtccatcctttatttctgtggctatattcgaaacagaatctttctcgtcactggtagcctgaatggggtttgaagcaaagtaatc

SEQ ID NO: 470690 - DNA, 776 bp, Homo sapiens
tggtgcagttcagcctggccaatgtggcaaaaacccatttctacgaaaaatacaaaaattagctgggcatggtggtgcgcacctgtaatcccagctacttgggaggctgaagcatgggaattgcttgaacctgggaggtggagattgcagaaactgaaactggaccccttccttacactttatacaaaaattaactcaagatgcattaaagacttaaaagtaagttctaaatgtgtaaaaaccctggatgaaaacctaggcagtaccattcaggacataggcatgggcaaatacttcatgactaaaacaccaaaagcaatggcaacaaaagccaaaattgaaaaatgggatctaattaaactaaagaacttgtgtgcagctttatttgggagtgtgcgtggggtacctctgagttgtaaaaatgaagaaaaaccctgaatttgcagtgtctcagaagcttcccaagtagaaataagtgttattacctttgtgctatcactgtttttattgacttgaattgtagaaataatgaattgtgtctttctgcttttgtttgtttttataaatttcttttttcacttgataaataaataaaattagtattttattcatattatcagattttccagtatagaccttatgaatttatagacacagaaaatgtttcttgaattactgactgagtagtaaatataacattttctgaagatttctttttttttttttaaataggaatgaaaagcactaccagcaactggacaaaaagcaaatggtat

SEQ ID NO: 470691 - DNA, 1663 bp, Homo sapiens
tccctcgtggcactacgcatcctccaaggtgcctgcattttgggggtcaaagacacatcattcacatgcggaggaaacaccttctttggcccagacatctgctggtgacaactcaggatgaccaaggagccttgcagatggatgacccctacatccctccagactgctactatctcagctacctggaggaggttcctctgtccatggtcaccgtggacatgtgctgtgggggcctcagaggcatcatgaagctggacgaccttgcctatgaaatcaaacccctccaggattcccgcaggcttgaacatgtttctcagatagtggccgagcccaacgcaacggggcccacatttagagatggtgacaatgaggagacaaaccccctgttctctgaagcaaatgacagcatgaatcccaggatatctaattggctgtatagttctcatagaggcaatataaaaggctacgttcaatgttccaattcatattgtcgtgtagatgacaatattacaacttgttccaaggaggtggtccagatgttcagtctcagtgacagcattgttcaaaatattgatctgcggtactatatttatcttttgaccatatataataattgtgacccagcccctgtgaatgactatcgagttcagagtgcaatgtttacctattttagaacaaccttttttgatacttttcgtgttcattcacccacactacttattaaagaggcaccacatgaatgtaactatgaaccacaaagttattgctgccgaagtgactgtcgcttaacaccggggagcatctgtcatataggagagtgctgtacaaactgcagctactccccaccagggactctctgcagacctatccaaaatatatgtgaccttccagagtactgtcacgggaccaccgtgacatgccccgcaaacttttatatgcaagatggaaccccgtgcactgaagaaggctactgctatcatgggaactgcactgaccgcaatgtgctctgcaaggtaatctttggtgtcagtgctgaggaggctcctgaggtctgctatgacataaatcttgaaagttaccgatttggacattgtactcgacgacaaacagctctcaacaaccaggcttgtgcaggaatagataagttttgtggaagactgcagtgtaccagtgtgacccatcttccccggctgcaggaacatgtttcattccatcactcagtgacaggaggatttcagtgttttggactggatgaccaccgtgcaacagacacaactgatgttgggtgtgtgatagatggcactccttgtgttcatggaaacttctgtaataacaccaggtgcaatgcgactatcacttcactgggctacgactgtcgccctgagaagtgcagtcatagaggggtgtgcaacaacagaaggaactgccattgccatataggctgggatcctccactgtgcctaagaagaggtgctggtgggagtgtcgacagcgggccacctccaaaaataacacgttcggtcaaacaaagccaacaatcagtgatgtatctgagagtggtctttggtcgtatttacaccttcataattgcactgctctttgggatggccacaaatgtgtgaactatcaggaccaccactgttaagggatggacagttactaa

SEQ ID NO: 470692 - DNA, 583 bp, Homo sapiens
ggcacaggatttcaggaagttcaggtgacagtctgggtgttacccttcaggaggtttgtccacaccatgaggtctggatctgggattcccttctcatcaccctcaatattatggtcccttgtgaatcaggtccagctgtggctgctcctcatgggctcttctcagttggcttcctctgtgtttgcagaagtcctgaggagagaggagtgaactgcatggtagatgctgctcacaaccaccagggggcgctcaggacacgagggggcggtcaggacaacaagggcgggctcaggacaacaaaggcaaactcgggagcgcaggagatgctcagaacagccgggagcattgagaaccagcaggaggtgctcaggacaccagggggtgctccagacaccagggggtgttcaggacaccaggatgcgctcaggaaacaaggaggcgctccggacaccagggtccctcagaaccaccagggggcgctgaggacaccagggggcattcaggatcaccaaggaatgcccaggaccattagggggcgctcaggacaccaaacggtgctcagaaacaccaggtggccctgagg

SEQ ID NO: 470693 - DNA, 711 bp, Homo sapiens
ctgagaactgggaagacgacaggatgaccagctgcagagaggagctaccatttctcctgagaactgggaagacgacaggatgaccagctgcagagaggagctaccctctctgctgagaactgggaagacaacaggacgactagctgcagggaggagctaccttctctgcttagagctgaacactcaaccagtcaacctgcctacagagaggagctactcactgggggtctcctctgagatgctcgaatgcttcatgaagctagtctttgccttgctcacccaccacatggctgcatacctcattctttccagatgtaggacacgaacttgggcaaagtcgccgctggccacagagggttctggccagaaaaagcaacaccccagtgatcccgaaacaactatgcagtatgagaagaaaaaaatgcactcttttggtaccaccgagagtaaggcactgctataaagatacctgaaaatatggaagcaacattggaactagtttgaggttgtagtacaaaataatatttttctatgtgtctgtctgcctattccaatattaaaatacaaacatatttcaattcgtgttttggcaaaactgaatgtaaatgcaattattggcatatatgttatttaaatgtataatggtatttaattttaaatatcagtctgttattaatgaatagaataataagacaaacttcactttttaaa

SEQ ID NO: 470694 - DNA, 720 bp, Homo sapiens
atcttcaatactatacaacgagtggcacctgctccaggtgggacatcctgaaaacctcactaggcatgtcccacatcgccctggagctgtctcaggggagcagtctcctccagtgtttagaggcacagacacaggttgtctctgtgtttgcaggtgcccagtgtgaggtgcagctggtggagtctgggggaggcttggtacagcctggggggtccctgagactgtcctgtccagactctggattcaccttcagtaaccactacatgagctgggtccgccaggctccagggaagggactggagtggatttcatacattagtggtgatagtggttacacaaactacgcagactctgtgaagggccgattcaccatctccagggacaacgccaataactcaccgtatctgcaaatgaacagcttgagagctgaggacacggctgtgtattactgtgtgaaacacacagcgaggggaagtcaatcaacatattgtcatttattcaattcgtagactgactctgatatgaaacctcaaagttttcacgtacgtatggagagagagagaggaaggagaaagattttatatctgagtcagtccattaagtaaataaatgagaatattttgatttattttcctgttgatgtactttaaatttgtttccattttatgaatattataggcaaagctgtttcaaatatattagtgtaggttttcctatatt

SEQ ID NO: 470695 - DNA, 2849 bp, Homo sapiens
gagaaccctgaagtggggggcctcatggcggtcctggctgtgattggaggcatcgatggtcgcctgtgcctgggcggccaaattgtgcacgatgagtttggagaaggcaccgtgactggcatcaccccgaagggcaaaatcaccgtgcagttctctgacatgcggacgtgtcacatttgcccattgaatcagctgaaaccacctcagagacatgaagagggctttagcaacctagaagaactggaaattgtcaagagaatccgaacccagctaccatatgagagagttcaacttatgttcaatgtgaatgccatggcaatattaaaagatgatcaaacaggtcttcatcctcatccttttcatgggcagggtgtggataaggatgaagaattgttggttttgctaagtggacgtgcacagttcaaacccctgtggtgcaaaggccaactgtatagccattgaatagcaatttatttttagaaattaacctcactaaaatactctaagaaggatgccaagaaaaaaagtgaataagtatttttggttcatctattacatcatttcatttcattatttcatttcttttcatcatttcatttcatttcctcatttcatcctttcatttcatcatttcatctcattttatcatttcatttcattctttcatttcatttcatcatttcacttcatctcatcatttcatcatttcatctcatcatttcatttcatctcatcatttcatttcatctcatttcatttcatctcatttcatcttttgatctcatcatttcattatttcatttcatcttttcatctcatttcatcaattcatcatttcacctcatttcatttcacttcatttcattgtttcatttcatttcatcatttcatttcatcacttcatctcaacatttcatttcgtcatttcactttatctcatttcatcatttcatctcatgatttcatctcatttcgtctcatttcatttcctctcatcatttcatcttttcatctcatcatttcatctcatttcatttcaccatttcatttcatttatttcatcattgcatcatttgacttcatgtcatcatttcatatcatttcatcatttcatcttttcattccatcatttcacttcatttcatttcctcatttcatttcatcctttcatcatttcatctcatttcatcctttcatttcattatttcatttcataatttcttcttattgttgcatttcgtcattccatcattttatcatttcatctcatcatttcttcatctcacgatttcatttcatcccatcatttcatctcattttatcttttcatctcgtcatttcatcatttcatttcatcttttcatctcatttcatttgatcatttcatcaattcatcatttcatcatttcatttatttcatcatttaatcatttaacttcatttcatcacttcatttcatcttttcatatcatttcttcatttcaccatttgatcttttcatttcatcatttcacttcatcatttcatttcatcatttcatttcatctcatttcatttcacttcatttcattgtttcatttcatttcatcacttcatctcaatatttcatttcgtcatttcactacatctcatttcatcatttcatctcatgatttcatttcatctcatttcatttcatcatttcatttatttcatcatttgacttcatgtcatcatttcatatcacttcatcatttcattccatcatttcatttcatttcatcatttcatttcatcctttcatcatttcatctcatcatttcatcctttcattatttcatttcatcatttcttctcattgttgcatttcatcatctcatcatcatttcacttcaactcatcatttcatcatctcatgatttcatcatttcatctcatcttttcatctcatttcatcatttcatttcatttcatcttttcatctcgtcatttcatttgatcatttcatcaattcatcatttcatcattacatttcatttcattatttcatcatttaatcatttcacttcatttcatcatttcatttcatttcatcatttcatgtcatttcttcatttcaccatttgatcttttcatttcatcatttcatcattccatttcatttcctcatttcatttcacaatttcatctcatcatttcatttcatcattccatttcatcatttcattacatttcatcatttcattacatttcatcatttcacttcatctcatcatatcatccttcattgctttatttcatttcatctcatttcatcatttcacttcatctcatcatttcatcacatcatttcatttcatctcatcatttcatttcatcttttcatctcatttcatttaatcatttcatttcatttcaccttttcatctcatcatttcattagttcatcatttaatttcattttttcatcatttcttccttcacttcatttcatcatttcatttcatcatttcatatcatttcctcaattcatcatttcatcttttcatttcatttcatcattttatcatttcatttcatttcagttcattatttcatttcattatttcatttcatttcaccattttatgtcatcatttcatcatttttcatcattccatttcatttcatcatttcatctcatttcatttcttcatttcatcatttcatttcatcatttcatcatttcatttcatcatctcatcatttcatttcatttcactgatacatgtatttaattgctaatgcgatgcccaggaaacaccctatttccctttgtaaaacacctccttcaacaaaaggcaacttctcatggctggttaagtctacac

SEQ ID NO: 470696 - DNA, 710 bp, Homo sapiens
aggacaaggggctcacaggacacaacgatgtgcttagtaaaccaggggttgctcacaaccaccagggggtactcaggacaccagggggtgctcaggaaaccagggagcagtgtccagtgtgaggttcagctggtgcagtctgggggaggcttggtacagcctggggggtccctgagactctcctgtgcaggctctggattcaccttcagtagctatgctatgcactgggttcgccaggctccaggaaaaggtctggagtgggtatcagctattggtactggtggtggcacatactatgcagactccgtgaagggccgattcaccatctccagagacaatgccaagaactccttgtatcttcaaatgaacagcctgagagccgaggacatggctgtgtattactgtgcaagagacacaattgatgcttacagagatgaaaagccctcaaccattgtcaccaggatcagagtattgaggaaactcagggatacctgtaaagaagctatttaggacatttttaacatcctgttgaatatttctgcatagcacatcgatcccctaaaatacttcgctgtattggcatgtgataaatcagagtataatgctgaagaagatatttggcagtaaggacagggtagcattcgtgtgatactgatgacttagagaattattttgtaatttctcctgtaaggtatgcacattgctcactc

SEQ ID NO: 470697 - DNA, 670 bp, Homo sapiens
tcctgcctaaccctcacaaccatcggtgagacggggtctccctctgtcacccaggctggagtgcatgattacagctcactatagcctcaacttccctgggctcagcatcacttcacttccatccctgaaggtagtgaccgtgtcctggagccacaatcttccagtcatcacaggggccccagttgcagtttcttctcctaaagacctctttggagacagagggcagcaacctgtctactgtctgcagggaatgcccctccatgaaatcactgcactcatgacagttcaagatcaagtaacaaacggaactatccgctgcacacctggaaggaggccggcactcattcagccgccagatgcctatccaggatgcactccctgtgaggcactgctcatccactccttggggctggggctctgtctggcaggggagctgccaggacagccagcagacagaacacagacacctgagctcaaccaaggcaggtgctgggagcacacaggaaagaggccagtgacagtctaatttgtctcacgcttgtgtagccaccctagctctcttttaataactcctcacatggtttctttttgcatctttctactttcaactcttgtgtctttgactctaaagtaaatctctcacagatcattttattttattttatccatt

SEQ ID NO: 470698 - DNA, 461 bp, Homo sapiens
ggtcaggcatgtgggtcaccatgtctgtcatgttgtcctcagacgtcctcaccagtgtccgcccaaagaccagggccaggttccggggttccatctgggcagcagggaaagcaggtcactgtcaacatcctgaactcagtcctccctcactctggcccctaaggcctctgtccccaactacatcctcaccagtccccagcttagagggtggacacccccttgtatgggcatggagatgcttgatgagtagagcacaggccagatttcagcccctttcatccccaggcccagcagccatgagcagtgcccaacctgcacacctatacagggcagccctgagtgctaagttggaggatggcaatgcatcggatacggggagccggggttccctgcctctggaaagccctcagaaactcaggagatggctctctgggggaaagcactgaccagcatgtaggagc

SEQ ID NO: 470699 - DNA, 470 bp, Homo sapiens
cagtatgtacattgccacctaccggaatgagaactcctcaaccatgggcaccagcatcagagtcgtgaggaagctcaggggtgcccgaaaagccacaaccttgcacaaaggcaaccacaacaataaaagaattatttctgtgaaaatatctgcacagcaactgcctgtccaaccttacactgatgtcaaccttgttattgatgcttctagcctgggatcattctcatcaaaatgtcattcagatgctgcgtatgacaaaaattgtgtttttcagtgcagtcatgttctagtaaagccctcagagaccctctccttcacctgtgccgcctctggatttctgatcataaccagtacttcctcctggagctggatctgccagcccccagggaaggagctgaagtgggtcaggtgttttccatgtagttgtgcagttttgagtgaatttcttcatcctgagttctaatttgatt

SEQ ID NO: 470700 - DNA, 607 bp, Homo sapiens
agtcttttttattttctagtgtggaccctgttcagggcaatgggctcccatctggcccagggccaggtctataaatgctgtccaagagcctacgcctggacgtggggacccacgagcccacttggaccctcagctgcaggtctgttggagtttgctagaggtccactccaaaccctttttgcctgggtatcagcagcgctggctgcagaacagtgggtttttgtgaaccgcgaatgctgctgtctgatcgttcctctggaagttttgtctcagaggaatacccggccgtgttcaggggtacatgtgcaggtttgttatataggtaacttgtgtgtcacaggaatttggcatacagattcttttatcaaccaggttcttgattctaaaaatgcttcattaggggtattcaatggcaatattctgcaccttttttgccatgtcatgacatgcactatcaatgctcttattactactggaaataattaatagtgtctgaatttaatcaaattattgagcccaatacagaaacttcagaaccaaaaaataagatttatccaggtcattcctataaaaccactcttagtaccaaaatctgtattagccaaga

SEQ ID NO: 470701 - DNA, 1037 bp, Homo sapiens
tgggattaggaggtggggccttcgagaggtgatgaagttaagaagcagagccctcattaatgggattcgtgctttataagaggccctagaaagcccccttaccccttccgccatgtgagggcgcacgtagtcgacatgacgagacctgtgtctataaaaaaaaccacacatagccgaggaatagatgtggagtaaacacatgaagttccttgtcacagagctaaggagtcatggaatccaagttaaaggtatgggaagacatagaggcacatgcatgagaagaaggatgagaacaatgaccatgatgatgatgatgataatcatggtagtgacagcagcaatgataatgactgcgaagaagcaggagaagacggtggtgatgacgatgatagtaatgacggcgaacctggagacgatggttgcggtggtggtgatgacaatgatggtaatgatggtggtgatgatggtggtgatgatgatgatggtaatgatagtgatggtggtggtgatggtggtggtggtggtcatggtggtggtggtgatggtggtggtggtggtgatgacaatgatggtaatgatggtgatgatggtggtggtgatgatggtggtggtgatgatgatgatgtggtgatggtggtgatgatggaggatgatggcgccggtagtgacgccggcggcgacgccggtggcgccgatggcgccgccgtcatcaccatcaccaccatcatcactaccaccatcactgccatcatcatgtgatgactctcaatactgtcctcatcatgtgtgacttggactgtggaccagcccctcgggctctgctctgctgacctatattctttgtctcttgttcctgagaagctgggagttgagacccagtaaggtgttgtacagacacttgtgaccccaaattccatgagacagaggacctcccattttcttttccttattaccgcatgtcatcttcctgcacaaagtggataagaccttgatgtctgtctccgtttcccaaaagagttaccaagggggtgttttcc

SEQ ID NO: 470702 - DNA, 1223 bp, Homo sapiens
gagtctgttctatcagtaattgcaaaagggaagcagcttctccaagagtttgttctccgtgactgattcactgtctagtctgtaggttctctcccaagggtgaatctgaaaaaactgccctagtttactcatcctggggactcagtggcttttgcctagaagggtgggccttaaactgtgctaacattaaataatgacatcgtgttctcaatccgcaagaggaaaatgcaccataagtgtgcctgggtggcccaggggctgttggcacccacgctgtgtccttggagcccagctctgagcagtgtactcacccatggggccaggcttggggtgaattctagggacagacagcttgctgtcctcagaactgccctctgcttcaaccaccaaatattgccagaagcatcctgctttctcatccctcaggatgagtctcctcccagagggtcacagtcccctgaatggagacatattcagctctctcatgagtatgcctgtactccagcagtgtccagagcccagtgtcagatggcagtcacgttacaagcgaagcaagagaaaggcctgtccttggtggaggagtcagggcaggctggggtgtgctgcagtaatgggaggctcacaaatctcagcggctttgcacagtctagaatgttcttgaaatcctaaccctcaatgtgatggtgttggatggtggggtctttggaagagctgccttgccatgctgtgcaaaaaccccgtctcgttggtgagcttgtttattccttttatcctccatctcccctcccactcttcactgacaatcattctaatatattcaatgtaaacctttttatttgtagcattcagctaaaaggcctggggtctgggattcctggatttgaatctcagatctgttattgattagctgtgggacttggagcctcagtttatgtcataacgaaccttaccttagagggtggctgtgttctatttattgagctgggaatgtggggaaactaactctgagttttaaaagaatttgagagtgtggctagagaacagacagtgtctattactcccactggtaaggatcccttgacccttgacagtatattagttggaatttgctgcagggttttgcaagggagaggcaaagtataccgggtggcttgcctgagatgaactaggaagttcaaaaacttaggaaggggccaagtgatgaggggtcctgaatgtaagct

SEQ ID NO: 470703 - DNA, 522 bp, Homo sapiens
aggccacatgaaggggcggagcctgtcatcccacccacgtgggctccctcagttcagcaacagcaggctgagggttggggagctggaaccaagggcacagttcaccctacacctgtgtacatggacaatggcttcacctccgtggttcagcctgttgactgccatgggaaagcagctctgcgtctcaggcagggaggagttctggttaggcaatactgcagcatcagcaggtgctctggtgcgcaccccatggacagattcagcaaggcgcacaccccagcaaccacagatcaatttctatagctacagattagctcaacctgtcctagaacgtcatagaaatggaatcacgcagcatgtaccctattgcatctgacttccttcacaaataataatgttttaaacttcatagacagtgtttcatatatcaggaatgtgctcctttttattgttgagtagtgtcccatgattaaagattgcaatgagtgcaattgcctgcaatgcccataatgtggcttttac

SEQ ID NO: 470704 - DNA, 3294 bp, Homo sapiens
cctccaagatcttccctccttagagcgaatattccctgcaggattttaaacccccattgaccgagggtaactgaaacctcggaaagcaaaactgcagataggcggggactactgtagatttatctttcttggcttttaatttttttctttcttttaatttttacttaattataagttgcaattaaaatgcatcttacatacaggaatagggtacagagtacacaaaccttaaatgtatagcttgaagactgtcacatatgtggacacccagagggtcctccctgcaaatcctgcacccacctcagaatactatcccagagatggccacacttccaatttcgactctcagtgtatttggaaaaacaccagattcctaaatcgtgttcttgacgtggatgccctgacctgctgtgatggcaaattcacagtgtttgccaccgccttcctcctggcagacatcactagtccctccttcagctccctcctgcccaggctcgacaaaacatctaaatcaccggttttcagcctcagctgcacattaggatcacatgggagctttgaagaaatcccgccccggctaccctgtgtggttccaggaccagtgactctggcctcccttgtgctagtcactgatgagaccctcagccccatccagactcgctgaatctgaacctgccctttagtcagatccgcaggggttccgagcacgccgctgggctggaggcattccgaggcccctcgcagccctcagtctgtgatttcggctccacgagctccctccactgcgaatgcataggggttttaagagatgatgcggatcagggactggctgtttttatattaatatggccatttgtgtgtttccctttatttttttaaagtttgctgttaattaattagcagacatgttttctctgtattatctgtaaacaattctcttaattctaatcttatccataaagctattctccccaaagaacttgtgacaattaaaaaaaatcttcatgaactccacttcccagtaaaagttcatgcagattcaagtcagaggcaaagacccatccgtggggtcatttccactgaactgcgacctatagggggctgcctgagtgtaggttctttatgtccgcgaggggaggctccgtaataagtgacactgagctctatcaaggatcatccgatgtggatagccttcgactctcatcactactgggaatctgtcccaatgaaataacccaaaatatggtaaaaagctctacaggggaaatatttctgtaacagagatcaatttaacaacgcgaatgcccaaaaataggaaggaagatggttttgtgttagaatattgttcagcactttaaaatactcatgtaaaactgcatcgaggttccaactacgtgtatatggaaagaaattcacagaaaaagttgaggaagaaaaaacataagacattaataaaagatgtatcacagaaaagaactcaaccacaatcctgccactctatttttcaagttttttatatttgcaaaacgttaatattttaattatgaatgtatagatactttaaatgtaagaatagcctaatgccactgggaacggcatgtttgtttatattacagtgatttttcagtgattgaagattttatttagtaattaaaggaagaaagtaggaagaaaacctatggacaatactgtttcctgatggcagaatttcctccaaagcttgctgtggtgtcactagggaagctggagggaatttaagcccctccaaaatcgagctgcagatgttgtcttgaactgggcgctgctgttcctttgctgggaaaggttttcttccttgagcggctgatctcttccttcatcagaattaccaaggttctggtcagccaggtcctctccaaaaccacagccattttcaggagacaaaagcagcctcggtttataaggcaccactgaatggcttcatggcatgcttgggaattacaaatgtcaaatcaaacaacatgaaattgtgcccttcttttgtgtgcgttcattagaaggacttggaaaaccaaatcatgatgtatcggtatttgttttttatacagaaacaatattgaaaaaaaggcccctcgatgaattcgtaaattaaggcaaggagatgcttacttgaaatgttgaaagcccccacagatctaatactccaaaccaaaaattatatgcagcactgatagcagatgttttcgtcctatctaaatatgaaaaagtattatatgttatgttgacatttaggctaaatctttcccttataaggtgtttgacataaatagcttttgttatgtaactcttcaatagaaggcatacacacacatttcttaaaggtcccagctgctattgttatcactggaggcataaaattggaatcctaacttccaatatcaaatttgagcacaaaccctataaaatgtatcttgtcagaatgtgccagaaccgctaagctcttttcggcggaacaaattgcagctggtgtccttaaaggtcgagaatcaaacttgctgtatcctcagggtttaggcagcaaattggtcccagttttcaccctgccgcagggctggctggggagggcagcggtttagattagccgtggcctaggccgtttgacggggtgacacgagcctgcagggccgagtccaaggcccggagataggaccaaccgtcaggaatgcgaggaatgtttttcttcggactctatcgaggcacacagacagaccatggggattctgtctacagtgacagccttaacatttgccagagccctggacggctgcagaaatggcattgcccaccctgcaagtgagaagcacagactcgagaaatgtagggaactcgagagcagccactcggccccaggatcaacccagcaccgaagaaaaacaaccagaagaaattattcttcagcctgaaatgaagccgggatcaaatggttgctgatcagagcccatatttaaattggaaaagtcaaattgagcattattaaataaagcttgtttaatatgtctcaaacagaaaatgtcttttgaagagcattttaaacctgatattaaaatctggccgagcgcatgtcccggggcgtaattggtgggcacaggaatttgggtcctttgcaagaagtgtggtattctcccttcacaaggtatttcttccccaatgtataaaatgaaagcagaaaggtttttaggtagctatttaaaactgttcatgcaacataataaatataagacaattgacccgtgttttaatgtttatccgtaagac

SEQ ID NO: 470705 - DNA, 579 bp, Homo sapiens
ccttcccccatgagaatgcaggttccattaagcaggtagtttttgcctgttaggtctgttaatggtggagaatccgtatccagaaggtggaccaacgagtgaacctgtgccacccaggatgggcgggggctgctgtccattctctgctgtgcccaagcgcatggctcctccttggagcttgggcaatgtccgcagccattaccccagtgacatcacagcctcaagggagatatttcatctccacttcccagttccaaatacaggcattaacacgaaaggagtgacgcatggaagtttcacatcaaggttccaagctcctggcgggaacttccacatcacccttagaaaggttgtaagtggagaaccttctggggcctggggagttgtctgtagtgcccacgtggtctcaggaagggctgaggagctcatggcttccgtgggttggatgtttgtgaagttggtcccctgtggaagacacagaggctcagtgtctgaccactgcgctgatttgtctgaagtgtcccttggccacaatgggaggaagagacaagggccctaccctgtgaaaaaatgaagaca

SEQ ID NO: 470706 - DNA, 492 bp, Homo sapiens
ccttcaaatgcgattggccctagcatcaggtctgcattcccctcccctgccctttatccttaccaccattaccaccaccaccaacatcatcatcatcaacaacaccaataacaacaccatcaccaccaacaccaacaactttatcactactaactacaataatatcaacatcattaatatcaacatcatcatcaccaacattgccatcatcaacaccaatacaacaccagtcaccaacaccaataacaccatcaccctcaacaccaacaacaccatcactaccaataacatcaccagcaccaacaccagcacaacaacactatcatcaccaacagcaacaccagcactgagctgagagttttaagtgcattattttgtttgagtctcccgaaggagaaccgtgagaggggtactgctgtgacagacacccccattttggagatgaggaactgagttgtagaacactcctgttaatctttccgggctagaccc

SEQ ID NO: 470707 - DNA, 817 bp, Homo sapiens
ccaggtagcagatgcctcacagtcaagttccgtcttctagctaagtcagcttgcccagccttcttgggacatccgtctgttccaccctctgataccatgcatcaaacttcagatctagagtcccctgacttcttcaacacactctatcctggccgccagcatatgagtccctggagccccacagctgcctacactaatacaggaggcttcattgatgacaacagtctgcaagtaggacaggggttgggcaccggagcacgggaggggcactgctgcgctcgcatggagaagaccccagggaagctcgcaggacagaccagcagcttcctggctgtagaggaagggaagtgtgctcagaatgggctggcactgggactgtggaagaaccattcccaccggccgtcacaggcatcattgggctttgctgggcatcactgggcatcactggacatcactgaacaacactgggcaactctggacatctgggtatcactgggttttactgggcatcactgggcttcactgggcatctggatatctctgggtatcattgagcatcactggaccttgcgtcattgacgggctggcctggtatcgggatcatatcaccatttggggagcaatttctatgattatttccttccttcattttactgcatttagtcaaccttcaacctgtttttgcccagtggaaactctcctctgctttctactttcttggtatagctctttagtatagaaaaattaagggtttataaatgtcattgcttgctttcttgtgacataattctctaaattgaaaaaaaaaatgcagaag

SEQ ID NO: 470708 - DNA, 669 bp, Homo sapiens
ggtgcccctgttacctccatttcacagatggggaaactgaggcacggtgactcaaggtcacatgctgaaggctacaagctcactgggctcgttctcggcggctctcatccccaccttccccatggcccctggatttcgccctggtgcagacgcttctgcaaaggtcctcaaagaattgaactctgctcctcactgggagaaagttgcacagcagctgctttgcatggaggaccttctgctcagacctgcagcctggatggggcagtgtctcaaaatgattgtcccttttatggatgaggagatggaggcccaggaagtaatctgccaacagccctaccaagcccaggcagccggctggacctccgtgtctgcatgtgaggtcagagatggtcccactgactccgtcctgctggggccactggggacatctgatagggagggatccgtccacagctctgcccagagtgacctctgacatggttcagtctgcaaagctccagcatgggcagccataaagctgagagagtgcagattccagggaagattgagccgtttatcgcaggaaagcctccatcattgttgtcaacctaaacctctggcaccgtgcgtgacccgcagctccagattctgatctgagcctctaggctccgggatggagaaaggggaccc

SEQ ID NO: 470709 - DNA, 901 bp, Homo sapiens
agtgaaaattagttaaaaggttttccaggtgtggtgctgactcagcgccagccaaatcctttctctgggggcacagaatctgagacagaacgagaaggaaaggttggtagcagaggcaggagctccaggtcgtgtcaggagagacagaggcagagcaggtgcctcatgccatgccggagaagtcaaggggccggcgactttggcttgtggagtggggacaggcacccgccgggggctcctgagtggctgtccagcccctgcctccctgaagccgatggaggttcctgagttgggtgctgtgggggccaccatctggcatcactcaggaccccctgatgctggggtgtcggtcatgtgatgctctgcagccacggcacccagatgaaggcacggcctcatgctgactcacagcccccacagcccatcaggatccaggaactgggcacaagggtccacgtgctttgtccctcagcagacagcctggagggccatcccaggcccagagctccccccggggtcggctgaggctgcttgtgaccacattccagccagctcctccctctgcctggccctgcgtcccccacacccagtggtgctcactcctacttacctttcacacacgagcatcccagaggggacacagccggcattgctgccccctccctgtgtcctcctgagccctgtgcttcctgtgtcagaccttggcttcttgagggaacccaggaagtccctgatgtttacagacacaagagctgagctcccagtaagggaagaaggggacttcccctctgagatggcggcggagccagagtgggcttgttaattcctccgctcaacatcgccatgcttctgtagcttggtctggagccaccatagctgcactcttggtcacagccttctg

SEQ ID NO: 470710 - DNA, 848 bp, Homo sapiens
caatgtccttttctgcaaaatgggcatcataataggagtgttcaacaactctagcatcaaggatactttattaaaaggttttcacagattagaaagtgggttaccagagattaaggaggtcgtgcaaaggattgacgaggatgatgatgacaacaaaggcaacaatcataatgacggtgatggtgatgatggtgataatgatgatgatggtgatgatcaaggggatgatgatggcgatgatgaatgtaatggtgatggtgatgatggcgatgatgatggtaatggtgatggtgatggtgatggtgatggtgatggtgatggtaatgctgatggtgatagtggtggtgatggtaatggtgatggtgatggtgatgatggcgatgatggtgatggtgatgatagtgatgatgatggtagtggtgatgatcatggggatgacgataatagggatgatggtgatgatgatgatggtcatcatggtgataatgatggtgataatgatgatggtgatcatggtgatgatcatgatgatgatggtggtggtcatgatgatgggatggtgataatgatggtgatatgtgaggccattgaacataaagttgggaagcagtgtgcaagctcatcgttattccgtatttccaccaaagtggaaacgtgagtatccttaagggcagggaggaaagtaaaatgtggggaaataattaggaagtgatgacttttgagtgtttattacgtttgttttaaatatagtttactccactctaagtgtgcataatgtaatgtttaacgatggcaaaattctttaagctttaatagttagctcttgccggagttggctccagccctca

SEQ ID NO: 470711 - DNA, 1378 bp, Homo sapiens
ccgccggcggatccagcagctcctcggggagggcgggcgggagcgcgggggcgggcgcgccgcggctcgctcgggagaagtggccgccgatgacggcagaggtgcagccagccccgcgcgcgcagccccctccccttcgccctcctcccccccgtcgtcctcttcctcctcctcctcctcctcctcccggcccgtccgcggcgcagagcagcggcggcagcggcggcggcggcagcagccacccgatgtcttcggcgcccgagaagcagcagccaccgcacggcggcggcggcggcggcggcgggggaggcggcgcggccatggaccccgcgtcgtccggcccgtccaaggccaagaagaccaacgccggcatccggcgcccggagaagccgccctattcctacatcgcgctcatcgtcatggccatccagagttcacccaccaagcgcctgacgctgagcgagatctaccagttcctgcagagccgcttccccttcttccggggctcctaccagggctggaagaactccgtgcgccacaacctctcgctcaacgagtgcttcatcaagctacccaagggccttgggcggcccggcaagggccactactggaccatcgacccggccagcgagttcatgttcgaggagggctcctttcggcggcggccgcgcggcttccgaaggaaatgccaggcgctcaagcccatgtacagcatgatgaacgggctcggcttcaaccacctcccggacacctacggcttccagggctcggccggcggcctctcgtgcccgcccaacagcctggcgctggagggcggcctgggcatgatgaacggccacttgccgggcaacgtggacggcatggccctgcccagccactcggtgccccacctgccttccaacggcggccactcgtacatgggcggctgcggcggcgcggcggccggcgagtacccgcaccacgacagctcggtgcccgcctccccgctgctgcccaccggcgccggtggggtcatggagccgcacgccgtctactcgggctcggcggcggcctggccgccctcggcgtccgcggcgctcaacagcggcgcctcttatatcaagcagcagcccctgtccccctgtaaccccgcggccaaccccctgtccggcagcctctccacgcactcactggagcagccgtatctgcaccagaacagccacaacgcccagccgagctgcaagttgagttgggagccgaggcgcctgtccccggaagtcgagtctgatgcagcggaccagctgggcgagccctccacttctgtgttcgaaccccaagctgaggggagcacagctcccaagtgttctgcccactctcccttcgaagagtgactacgctc

SEQ ID NO: 470712 - DNA, 1099 bp, Homo sapiens
cccgatccaacccagcctctctacatgtggaattccacacggcctgcaatcagatgttcaccaaatcacactttttcattgccaaacgccttggcagagacgtcactcccatttcagaaaggattcacgttcccaatctcatttcagacatccaggaactgtgatttgggagttgggtcccctgcccctattttactgcaggggagactgaggcacaaggagatcccgtgtctaactggtacatggaacggaaccagttaatgccgaagaggactgtggtcatgctttcctgaagttcagagcttgccctttccactaggtagaggatcctgggtgttttcacaaaggaagacagagagtggcgtaaagcggtgacttctcaactttcctgatgtcaccccgagggtctggaaggtgggagaccaccttccccagccttcacctcttgccagtagccccgagggtggagtcagctcctgccatgcagataattgtggctgttcttcttgatactagaccaaaactcaacaagtggcagtttcttaaagatgcttctggtccagcaaaggagccgagcaccaatcaagtcacctcccttctcaatgtggtcagatcaatgccagggaatcaagggaagaaaagtgagaaactggagctcgagggagaggaggagccaagaggcagaggacatccagccacttcccagggcatcgactatgacctgcacatgcaggttcagccattctactatgtggtccacaagacacattttgtgcaagatttgaaaggcagaggagcagtcacattcttcctgcttggaaggtccacacaggacgccaggtgctacatccggcagctcgtgcatgccacctgccctgcagactcagctaggtggcttggggcggccaccgccctaagcctcttttctcacctgactccagggggtagggatctgtcctgtgcaagaaggaatggaatcgttgcttgtcaagcacccattctattccagttctgcctctatgcacccataaacctctgtgcctaagtggtttactgcttaactctttaactcttttcagcattcctctgttgattaatc

SEQ ID NO: 470713 - DNA, 965 bp, Homo sapiens
caccttcccccaggtggctgcataacttgctgcctcaccttctcagacaaggtggctcaaaatgtgttctgtgcaggtcgggtctggtttttatagacttctgtggactaaagtgaggactgtgtggggctgggctgctcgttggaggggtgcacggtggttttctgggtgggccgtgcaattcctgctggcaaacacagtcatggtggaagctctgccagaaaagcacagagtggtagggcagagtgttcctgcatggcctcctggtcagaagctcacctcttcctgccataacctggccaaggagaggagagctcagtctttggtaacttccccagaggggcctggaccagccatattctcaggatatggcttcttactgggagcctttgctcttgtggccatgggtcatcaggtctcattagacttaattgttatcacgagaacagcaggggaaagacctgcctccatcattcagttgcctcccaccgggtcccccccacgacacatgggaattcaagatgggatttgaccatcttgatatggtcagccaaaccatatcaggaatggagtgagtacagggacaactgtgatcactggcgctcaccccctgcccccctcccctctccccgccatccccacaccatgaggaggccctctgcacaaagcatgtctgcccagactgtgctcaacaagactttcctcctgttctgcctcctgtctggtctcttttgtctctgccttttgccaagttttgttccacagccttcccagcaaggtgggagctccccagtttcctcctccttcagcagagagtccctgtctgctgaaatgcacccagcctatttctgtcactgccagcactgtctcctgttctgctggcgaactctgcttacctgcctatcaaggccagatgcccctctctggagccctctggattcctttccctgagctgctctaacaaa

SEQ ID NO: 470714 - DNA, 884 bp, Homo sapiens
gaaggccccttccctggtcggtgctggcgccgggtgctgggtgcagactgggaaaggccgggtcgcttggttcagtccaccacagagctcccaaacctcgttcgtgccggcctgttgtggggcccaggagctgggcagagggcgggaagaccggcgaggggctggcagggagacgtctgtggagggggttcagctcgtagaaggcagccatcgttatccaagaatgccactgcgtgtgctccaaaattctgtcttccgagggcgcgtgggaggctcacccttggctgacacgctgggaactcagcggatgatgtcgtctgggctggcacccacagtcccgataaacaggagagagggagggagagatgggagaagggcccgcctcctgcccgatggggcacgaggggttaaccgcaggccatctccagcctggaagtcccctggactctcctctgatccacccagtcctccaactgggggcctccagaaccatgagaaagtaagactctgctggactgtggcacgcacccggaacacccatccagccgccctgaaggatgcaggcctctccgcctttggttctcctgtgcctcttcaggggaccctgcgcttgctatttgactggattctcacggcagctctcagaaatctgcaccatgactccgatttgactgatggagacccagatacccagagagattaagcagctccggccaggccatggcttacattccagctccctctcactgggtgacaactggctccctctgtcccccacgtgacaacttggggaaagtggacaaattgcttgaaaggcacaaactactaagttaactcatgaaaaaatggataacctgaacagtcctatctatgaaagtaactat

SEQ ID NO: 470715 - DNA, 1645 bp, Homo sapiens
ctcaccttgtcttcctaaggacacaggatgagaaaggtgaggagcttccccggtcacagggccaagctcctgctgcagccacggctctctgaaccaccccattcatacctacatggctgtacccccaaaatgccccctggagcctgctacacacagatgccaaatcagaatcgccgagagagtgagctcctcatctggtcattaccacccttccgctctaggcttcagtgtcacctccaccaggaagccctctgctctctgaactcgggacccccattactgggtgctccctctggattgtgtcaacctcatccgctgtgtgaacagctccatgagggcagtgattgtctgtccctcacatcccagcaccttgggctcccccacctggacttcctgaaggtgcccaccagctcctgtccccgctggtcaggggtcggggcagcaggagcaatagggccctgcagtcttgcgagcatccctggtaaaatcaggattgcttcccgggaggaggagacagttaccatccccatgaacccatcagcttctccctgcaatgcccttttcactctggtggaacacgatcatccccttcacgcctcttcctgctccggggcctcctcccagagtcttgcctttgaagtgcgtctgagccctggcagctttcaggtgaagttacacctcttcttatcttcccagtgtctctgggggaaactgcccggatactcactctggaggaggcagaatgcgggcggccgtgctgggaacaaccccggcctgctggctgtggccggcctgcagatccctgaatctgtagggcttgaagggaaactctgcgctcaaagcacttacgcgaaaagcacatctgtcttcaaccgcatccaaagtgctggccaccggtcttccatatggtctcccggagtggggcgtcctggcctgaggaacaggacccgaggctgcggtggggtctctgcctccttttgtgtctgccgcccaaccgtcttccgacaggagcagcacctgctgcatgcccgcagggtgcgtgcacagagggtacatcagggaacagaatggggcgggtccgtgccctcccagcttgtgagggtgggggtgggtaatgaggaaattagtgcgatggcctcggagggcgctgagaaccacgggaaatcaactcagggagactatgggagaagggacatgcgggaacagtcggagactccagctctgcagacaggggttgaagctgggagagagacacatcaatgcatgccggctgtctatacggatgggctcagcaggaaaactggctgttccatcacctcctatgtcaacctccgtggctccgtctcctcagctgtcctgagtgggcacttccccagcaaaggcagcaagctgaagaaggctggaataagattgatgacactggttagtagcttcaatgcatggcggacttactgcatacagggccgaacagcacctgtaggaatatgtcgcgagtaaatatattcagactagaccgaaaagtcctgtatgcaaagatgtttatcagatgctgtcaataatagcaaaattaagtaaattaaacaaatagatgacaacccagatgtccatttgtcccatcagtagacacttggttttgaagtcaacc

SEQ ID NO: 470716 - DNA, 668 bp, Homo sapiens
tgcagtattgttaatttgacatcatcgtgttaagttataagatgtcgggagtgaacactcagggtcttaatctcctctctggggaagaggctggtgtatgtgcagaacaagcccccaggggcctctactattccaagcgacaaggccacccggatttcattcttcctgggagacgggagcgctcatttctgctcctggtggtcactcacctccacgtgacctttggcatccaggctttctgggtctctggctccttgatgatgccatgcagaggtcctgaggttgagatgtccctgcttgtggctgtggctcctgggcacacgtatggcatatttcaggaccgacactggagtgagtggaattttcatggttcagtcattggaataaccaaaatacttattgtgccaactggatcgtcaccaaagtatttctttttagtggactttgttgtcaaaagtttgctcattgacaacctggcagctggcccagacatttctatgtttggcacatgtccgaaagctgggctgccagatttagtaaatttagtataagtatgtgttgtgtagtatttggaacatgcttatattttaaaagtattaatttttaatctgaaattaaaacgtaactgggcatcctgtgttttatctgggcatttcacagaagcattt

SEQ ID NO: 470717 - DNA, 728 bp, Homo sapiens
cccaacagctcattgagaacgggccaggatgacaatggcggctttactggtggagttcaccaccttgtggaaggccaagcagtggacgagttacgcaggtgacacattcctctcagtgcacggaggccacataacccagctgcagatctcctttgaaggtggagacacttccacacgctcaccaagagggcacagaaagaccttccacgcacacagcaagagggctgtgaaagacctctacaaggaaaactgcaaaacactgctgaaagaaatcacagatgacaccagcaaagggagacacatcccatgctcatggatgggcttgggggtaggtgcagggagcatctgtgtctccctaaggggacagggagcctgcctcagcgactgggggctgctcatttgcccggcagaggaggaggaggagcaccaagggcacaacactgttcctccacgatgatctcatttccagatccttgtattcatatgtctgcaaagaatcttttatccaaataaggtcacatgtgcagggggcatacccttcgggtgagggggggcaccattcagcttactacatagggtgagggacagggctgcctgccagggcaggtacttcatagaaaccagctctgagttaggaccccgcccccatgtgagggtgataccggccttggggtcagccagggcccccatgtgggttcagagttctgtggagcctttcacctggagag

SEQ ID NO: 470718 - DNA, 1324 bp, Homo sapiens
tccttcgggctcaccctgcaactgtgggatatgctcatcttggagggcgagcagctgtggcctcctgtgcacagctggaccccagggtggccaagaaggaccacacaccacccagtgggaggtgggcctggtggaaatggggtgcaggcactgatccccccacaagggaatcctcctggcctgatacccgccctgtccctagagtgcctcatgaagctttcctggagcaccatctgggagtttcaggagcgactttttcagagctgggccccggaggacaacgtggtcctcaggaaccttcaaacctccgtgaaggaactcacaaggaaacactgggacctgccacccccaggtgggctccagcaccaagtctcctcccaagtcaccctctggggcagtcagtggtggggagtgccctggccctaccagccctcctacctggccttcctcctgcacctcttcctcctctactctaagaaagtaaaatgggtctgccactcctcagggcaggcactgagcgtgtgtgtgcgggacatgaggtgcagacaggcaggggctgtgggcaggaccccccaacttccctccccctctttccacattgtccccatcaccccctcaaagggccctgaagggcactggggcagtcagatccaggtgtggaagaccccacccctgcctccaagcagcaggatccctcattcttgagtgcccctccaagcctgtcaagacaacaagccaggaggacaagagagaatcagtgtcccagatccagagaggatttgggcagagggcacggggggaagccctgacccagagccagaaccaagagttcagccgggcatgggatttgtccagccctggcatggggtggacggcctggagggcagagggaaacccgtgcccttcacttctcacccactgtggagacagaccccatgcgaggtggcaagggggctgggtgacagtgaaggtccctttcacctgagttctgagtcagggctgctgaacagccctgaggtgagggagggcgtgaggcaggaagccctgagccagcctgaagcctgggagccgtttcaggaccgacctgaggttccctgaaagctcccccaccccaggctgcacacagccctcaccctgggatcagcagcttgcagaggtgtcctcagtgtcaggccagaggacacccggggaccccaggactccagaggcccagggctgtgggcccagccctggagaggcccctgaggcctctgaccccacctgtgggtcagagcctgtcccccagggcctgagtcccaggcccagagggacctggcttcaactc

SEQ ID NO: 470719 - DNA, 1904 bp, Homo sapiens
tttgttctggctggcatggatgccctgctgcggggcctgtcttggggtgcctgaatgtgcagtaggctggcctggagccaggtgctgcctgcagtgagctgagggtggtgctgggaacagagccctcagtgtgggagtgaggtgtggagctgaggtttttggctggagctgctgggggcccgaagggggtggccactcgcactgggaaggcggagtggggagctggcttaggcaagaccagagcatgattgtgggtcaatcagggtggaagcgtcctccagtcacgtctgggggccctgggatgggggtagaggagcctggagccaccagcccagccagacatgctgtcctctctgttccaggagccgccctgcctggagctagcctgggggtgagccagggtcccccaacccccgggatgaccgcggccagccgggccaacccctacagcatcgtgtcattggaggaggacgggctgcacctggtcaccatgtcgggcgccaacggcttcggcaacggcaaggtgcacacgcggcgcaggtgccgcaaccgcttcgtcaagaagaatggccagtgcaacattgcgttcgccaacatggacgagaagtcacagcgctacctggctgacatgttcaccacctgtgtggacatccgctggcgctacatgctgctcatcttctcgctggccttccttgcctcctggctgctgttcggcatcatcttctgggtcatcgcggtggcacacggtgacctggagccggctgagggccacggccgcacaccctgtgtgatgcaggtgcacggcttcatggcggccttcctcttctccatcgagacgcagaccaccatcggctacgggctgcgctgtgtgacggaggagtgcctggtggccgtcttcatggtggtggcccagtccatcgtgggctgcatcatcgactccttcatgattggtgccatcatggccaagatggcaaggcccaagaagcgggcacacacgctgctgttcagccacaacgccgtggtggccctgcgtgacggcaagctctgcctcatgtggcgtgtgggcaacctgcgcaagagccacattgtggaggcccatgtgcgcgcgcagctcatcaagccgcgggtcaccgaggagggcgagtacatcccgctggaccagatcgacatcgatgtgggcttcgacaagggcctggaccgcatctttctggtgtcgcccatcaccatcttgcatgaaattgacgaggccagcccgctcttcggcatcagccggcaggacctggagacggacgactttgagatcgtggtcatcctggaaggcatggtggaggccacagccatgaccacccaggcccgcagctcctacctggccaatgagatcctgtggggtcaccgctttgagcccgtgctcttcgaggagaagaaccagtacaagattgactactcgcacttccacaagacctatgaggtgccctctacgccccgctgcagtgcgaaggatctggtagagaacaagttcctgctgcccagtgccaactccttctgctatgagaacgagctggccttcctgagccgtgacgaggaggatgaggcggacggagaccaggacggccgaagccgggatggcctcagcccccaggccaggcatgactttgacagactccaggctggcggcggggtcctggagcagcggccctacagacgggggtcagagatctgagccaaccttggccgacatgcagcatccacccctggccggggagaggccccgcggtcgctcaggggccctgggtttgagcagaacgggcccagtgccctgggttgcagactcagtagcgttttagtcgttttatgtttctttgcaaaggcctcagaaggttggccggagagggggcagccagagc

SEQ ID NO: 470720 - DNA, 747 bp, Homo sapiens
tcttaggaattcagaaattcagcccccatgactgtggaagattcagcgtggctggtagtgagaagtaaggccatcattttgctgaaattgaggatggaggaggactttctgggtgactcaaggaaactgccatgtgtgagcatggcccatggccctgctgctctggtccgggctgtcaggatctggctgagaaaacattccctagaagcctgggagtgggtgactgcaaggttgcttggtttctcggacgctgcctgtgaccttcttattgtgtggagctctctgacactcaggcgcacagagctgcagccctctgccctctgctgtgctcggggagaagaagaaatcactgacactaagttcctcttattggaccccatggcaggaactggggtgcaggacctgctcatcttcctgggcgaggggtcttgagtcctgtacacctatttctccctccactgctaagggtctctggctgctcttgagtcgatgacagattctcgtcctgtttgctgccctctgtagcctgtgagcagaaccagaagggacactctcacagcctgttcgccacggaatccaggaggcaggtccatgttggtgcaaaactaaataaaaaataaatacatacatacatatataaacattgattttaaaaatatggtcttctgatccttctccaccaatctcaaataaagagttcttttctacatggatttctaaattgtggggcatggaatctcagctgtt

SEQ ID NO: 470721 - DNA, 563 bp, Homo sapiens
tcagagactgcacacagcagcctgggcctggggtgaatgctgaaggaccaggtggtggtcaagatgcagcctctgggtccctgtggctcaccagctgtggaactttgcctctcagctcagttttgccatctgcagaatgggctgctgctgttccctgccctgtcagttaggcataaagcattgagaacgagccctgcacagcatgaggaccacacgagatttgtcagcactgccagcttcttggccagtgacacccataaacagagagtcccttctgggcaggccctccctgccaccaagggggcatccccaagggttcgagccacatgcctcatcctgccaggctggccagccttggctgaggcccacgcaatgagcaaccaggccagggagctcagtgaggggacaccaggttggtgtgtgggtagacgccgagcagtcagtcatgtaagcctggctgtcctctctgccggacttgggtgagcgggtcctacctcaaggctatctcttgtaaactgtggggatgtcccagctgcccactgcctcgccagagacccagtgcc

SEQ ID NO: 470722 - DNA, 693 bp, Homo sapiens
ttgtatgaccttgaagatgtcactgcacctctcagagactcagtttcctcatctgcaaattggggcaggatctggcaggattgcaggtggtttcaacagaaccctgcagcatggaacaggctggcacacatcttgctgggaagaaaacaaaggagatgcagccttcagcttttccttgtcacctggagaggaagcctccaatgtcttccagggtggggcctgccccagaggaagccacagacactgtgggtgtcttctggatggcaggagtgacaatggcagcagcagcagtcacagggacagcaacgtttgccaggcactgtcctggccttgcctctttgaatcctcatcatgtccccaaataggtgttattaagcctgtttcgcagatgaggaaatcaaggcatagaaaggtgaagtggattgcccagattcacacaatgagtaaagatgtagccctgggaatgtctgatgccagcagccctgctgtcttcagcaagttggcagcctcaggagccagtgggtaccaggctcaggagcccagtgggtaccaggctaactgctttgtctatgtcatggccctgaatctccacaaccaccacacctagggctgctatcatctactgtcttggagatggggaaacgggggcacagagaggcaaagcaacctgcccaaggtcacacagcaggtagg

SEQ ID NO: 470723 - DNA, 664 bp, Homo sapiens
atgctaatgggtattgcctaggtgtaagatgtgtgactttggcatcagtggctactgggtggactctgtggccaagacaatggatgccggctgcaagccctacatggcctgccccagttgggtgataagctcatggaccacctctgcggaggacactggtgggctgtgcaggtcccgccccgccctcattgtcaggagggccttaggggcctgctcccagcctgagaggatcaacccagagctgaaccagaagggctacaatgtcaagtctgacgtctggagcctgggcatcaccatggtactgtgtggggccggggcctgcccttggtggtcagtggattggagggatgggaagaccaccaggatgtgtcccccagccagggctaggaagctgtgcaggagacgcgtggaaggacgatgccatcagcagcgccaagtgtttgtgctgaggtctcttccgttcatcatggtgatgacggccggcagtgagggcccttgtgctggagcctcagaattctctgttcttccaggccggggccagggctgacatgacttgttttttccatccagtcatcatgattggagcccagagttggttgtaagctagctagtccgtcccttccatgatgacttcctgccaaccacagggctgggagcttggagc

SEQ ID NO: 470724 - DNA, 731 bp, Homo sapiens
gggaaaaaacggccctcagcttccacctctgtgaaatgggctgtaacagaaccaccctcacagagctctggcaggaagagaaaagacaaagggacaggaagtgtcacctcagcctctcctgcccaaacagctgcttgcatgcggagatcagactccagacttaccccaactggggttcagatccaaattccaagagctaccaccaaggagacttttggaaagttctcaggctcctcagagcccagtcccttcatgagtgcaactcctgcttccgaggtgaaacactggaaattatcaaaatcccaacaagagggaactggatagatcatgaacatatccctgagatgaaagaatcaacaactgagacaaagatgctgtattttgaaattacccagatagccatcggtaaaggactgctgtatccaggagaatggttaggatctttcagctgagagactgctaagtgatatgccaacttgtgggttaaaagtgggggggaaagaaatatatatttgtattcacttgtatttatgtgtggaaaacactggaagaattcatgagaaacaagtaaaaatgcttccctgtgtgaagtggaggagctctgggcagaaggcagatggcagacaaaggcagtgggtagattttttcttggtacccacatacacttcattttagtttttgaaacatgaatatattacctaatcaaaattatcttttaaaatattcttttt

SEQ ID NO: 470725 - DNA, 1761 bp, Homo sapiens
ctatcaactgtccatttcttggactttttcccactcttctctggatgctcggggaccatatgtgacacttggctgcctgacagtgggccaagtggaggcactagtgtcaatgtgtatatgaaatatgtgaggcttaattttacatttttagatcagagtaatgtcaatgggaattctcattttatcttctcagctctcattggatcatcttgtatactccactttggaaactaccaaactgcagaacatggagaattttataggacgcatttcaaaggaggtgcttggaaaataccccaggatgaagacaggctgaaaggtcagggaaaagcaacagtaaaagcaaagaattcacacagccctgggcgcatgcgagtgcgtgtggagacctgttgcctggtgtcacctaacaagagtcagcaaaaaggccacaattggcaggtcttcccctttacatttcactactacccgggttgaatacgaacccttttgaaaaatattggatttctttaactttataactcttatatttgtgacctgcttgctgcatttggagttctcactcttttttattttattcattctgatagagggatagtgatcactcattgtggttttaatttgcattttcctaatagctaatgatgtcgagcatttttcatgtgcttatttgccatctgtatattctcttcagtgaaatgtctctttataacttttgttcattttctaattatattgtttttcactatggagttttgagagttctttatatattccaaatactaatactttgtccaatatgtaatttgaaagtatttcctctcattttgtaccttgtctttttaccctcttaagagagtctttcaaatagcaaaagtttttaattttgatgaaattcaatttatcaattttttctttacggaccacactttcagtgtcaagtctgaaataatttatctatattttttctacgtttcatagttttaccatttatacaaaagtctctgatccactttgagttaatagttaaagtaaggcttaggttgaggttcatcttttggcctatggatatccacttgctccagcatcatttgttcaaaatttaccttcctttactgaattgcttctgcaattctgtcaaaaatctgttggacatatttgtgtgggtcaatttcttggttctttgttctgtttctttaatatgtgtgtctattcctccaccaatactgcacagttttgattaatgtagctgtgtaatgtcctgaaattcagaagactgattgctaccacttgatcctctttttcaaaataatttcagcaactctagttactttgccttttcatacacatattagaataatcttatctattcctaaaaaaatactaggattttcatagaaattgcattaaacctgtatgtcaatttgggaagagttgatatgtcgagtttttcaatccgtgaacatggtatgtctctccatttttcagatctttgatttctctcatcagcatgtgtagttttgaacatacaagtcagtcctgtacatatttagattgtaattattttattttttgagcaattgtaaatattttattctgcatttcaatgcccatgtgtttattgttagtatatagaaatacagttgatttttgtatattgatcttgtcttgcaaccttgccgaattcacttattagttgtagacggttttgttgtggattctttggtactttatatgtagacaatcacgtaatttcaaata

SEQ ID NO: 470726 - DNA, 958 bp, Homo sapiens
agctctcttctcccgataactgtggccatgtggcctcgtctgctgcccagtgtgacctcagcctcaaagccccactcctaccttagaaaggtgctcctgcagaggaacctggtgtcttccccaccccaggctgcaggagctctctgttcaatgcagtatccactggccacatgtggctttgagctcctgaaacatggctggtctaaactgagatatgctataagtgtacagtacacatcagattttgaagacatccacaaggtattaaaacccagcaggatccaggctggaatgaaggcaactctcaagggcacaggccgtgggcaccgaggaggacctgacacaccccgtgggatgcaaggaggacaccctggaggaggcaaggccaatgctgccaatttcccattgcctaccggggagttcagtctgctcctcatctataaaatggggacatgcaagtccctaacccagaagcacaaactgccagaagtaggcttctggtacaaagcagatgatgacttttagggctggcaatttctgtcctttgtgggcaacattgccattaacttactgatgacttggggtttccagagtcctggataaagaagaaaggagtttcctagggaacaagcctaaatctcctgggaagaatcagtgagagcctttaagtttatttcctccttttctggcctggtttgaatagagccccagggcaggagggtttttctgagctacctgaactttaaatacctgcctggggcttcctttactgaatcttatattttcctccctgtgttatgccaaggtctgggagtttggagggatgccctaaacgggacaaaaaggggttactggggatcagggagtaggaagctgggccagcaccagagcccctgatttcttcagctgggggctccctccttatccaccttcaagttcactgccccctaccacaccc

SEQ ID NO: 470727 - DNA, 2139 bp, Homo sapiens
ggctcattgagaacgggccatgatgacaatggtggctttgcaaactgttcctggctctctggacaagaagtcccagttccgttgtcaagcggtcggcaagtccgtgacagacaatacagctgccaagccgtgcaaaacatccacccccagaatgtcttcagagaccagtggattgccaaatccacatgtggctctggttttccagtgccccgcaagccggcaccttggccagttctcttatcaagcagaaaaggctttacacttccgccaactgcagcaggtgattcagcgccttctccacactcataggggatctgtacactgcctcccatgtttccactggggctcatccaagcagcaccactgcgaccgggtaccacagctcatgctgcggccacgtagccgtcccgggagccctcaggggctgaagacccactcacctccttccatcctcgtcgccagttgttagatcctggggtctgggtccagcccatgctgaagtctaagggcaggtcagcagcttaactctttttctctctggacacgagcaagctgaactgcgtcatggctccctcctatcagtctgcaagacagacagctttggctctctctctctttgggcgtcaacacacgctccatgtcaagccatattgagccgagcccagagcccctgtatagcgttagcagggcaattatacctttttcagacaatagtggctcagagccaagtgatggtgaagtaagctccagcaggacaagtggagcatggagtataccttcaattagaaagccaaaacaatgtgaactgttgaaaactgctgtcactgattctctccaagctgagggaatacgcaaggtccctgcctcccacgaaaagccgctcttaatattcatccagcaggattgtatggaaatcaagaaatccaaaagggctgtgaaatattgatgttctgttcagtttcaagacctctgaaatgcaaagtgatatgtacactaaacacacaagaaaatgcaaatacctttataacacttttctcatagttctattttcatccctattggaagcaagtcgttaacattcattttatcgtaaatataatggcaatgaattttaatgtgcacaaattaaaatattttataaattttaaaaatagcattttacattattcaacttatggaactatttgactctagattatatgattgtataacctgaaaaaactaattataaaatattttatatcattcaatttagggtattagataaaaaaattaactcatagtgactaagctggttaattattgcccttaaatggatattaaaagcgaatttttctctttgataaagtaactagcaaatgattaaatgttgtgaaagtgtttcctggtgtatggattcactgaattcctttgacccacttaaacagaacatgtgacattcatgaaatagtaacttaatagctttaaaacagctgttctgtagctccaaattaatttagcttttctctctcaacatgtctactttatgagaaaaaagcgtgagaaatgagttgttcttttgctttcaggccctgtcctaccatgagctgaagaggcagcaacatacgtgtttggagtttagtagggactgagaagcggggaaaagaactgcctaaccaaaggtattgtttccacctgacttccaagatgtcagaaaattctccctagtagatactcttttatacatggacattagctattgttgttaaaatgaaaacaggtgaaattatttttaataacatatttttgttaacccaatatatctaaaacattttcaaacataaatcaatataaaattattaaagagatattttgcattctttttctgtactgtctttgaaatccagtgtatgttttacacttacagcacatcttaatttgaactagacacatttgaagttcttaatagtcacatgtggctaccatattggacaagcaggtctaagtcagtggttcccaaaatgtggtccctggagcagcaggataagcatcaccctaaaacttgttagaaatacaaattctcaggctccaccccagacctactgaatcagaaactctgatagttgggctcagcaacctgtggtttaacaagcctttcag

SEQ ID NO: 470728 - DNA, 1832 bp, Homo sapiens
gaagtctgttttcagtggtttttagcttgtgccaatggatgacaaatctatacagaaacctgggtttggtgcacctcgatttggaggaagtagggcagggcccttatctggaaagaagtttggaaaccctggggagaaattagttaaaaagaagtggaatcttgatgagctgcctaaatttgagaagaatttttatcaagagcaccctgatttggctaggcgcacagcatgtttggtgctggcaccaactcgggaactggcccaacaggtgcagcaagtagctgctgaatattgtagagcatgtcgcttgaagtctacttgtatctacggtggtgctcctaagggaccacaaatacgtgatttggagagagagtgtggaaaaaccaatctgagaagaacaacctaccttgtccttgatgaagcagatagaatgcttgatatgggctttgaaccccaaataaggaagattgtggatcaaataagacctgataggcaaactctaatgtggagtgcgacttggccaaaagaagtaagacagcttgctgaagatttcctgaaagactatattcatataaacattggtgcacttgaactgagtgcaaaccacaacattcttcagattgtggatgtgtgtcatgacgtagaaaaggatgaaaaacttattcgtctaatggaagagatcatgagtgagaaggagaataaaaccattgtttttgtggaaaccaaaagaagatatgtggaagatgtgaaatttgtcatcaattatgactaccctaactcctcagaggattatattcatcgaattggaagaactgctcgcagtaccaaaacaggcacagcatacactttctttacacctaataacataaagcaagtgagcgaccttatctctgtgcttcgtgaagctaatcaagcaattaatcccaagttgcttcagttggtcgaagacagaggttcagacataattgatcaatttgcaattgttttcttgacaggtcgttccaggggtagaggaggcatgaaggatgaccgtcgggacagatactctgcgggcaaaaggggtggatttaatacctttagagacagggaaaattatgacagaggttactctagcctgcttaaaagagattttggggcaaaaactcagaatggtgtttacagtgctgcaaattacaccaatgggagctttggaagtaattttgtgtctgctggtatacagaccagttttaggactggtaatccaacagggacttaccagaatggttatgatagcactcagcaatacggaagtaatgttccaaatatgcacaatggtatgaaccaacaggcatatgcatatcctgctactgcagctgcacctatgattggttatccaatgccaacaggatattcccaataagactttagaagtatatgtaaatgtctgtttttcataattgctctttatattgtgtgttatctgacaagatagttatttaagaaacatgggaattgcagaaatgactgcagtgcagcagtaattatggtgcactttttcgctatttaagttggatatttctctacattcctgaaacaatttttaggttttttttgtactagaaaatgcaggcagtgttttcacaaaagtaaatgtacagtgatttgaaatacaataaatgaaggcaatgcatggccttccaataaaaaatatttgaagactgaattaagtggaaattgtactttattttatataatgtcatgtaaaactttgcttaagatggtctggttttttttttgtttttgtttggttttttttttccatgaaaacaaatgactgttcctttttatttaat

SEQ ID NO: 470729 - DNA, 951 bp, Homo sapiens
ggatggcaggaggatgggggtgggggaagcaagggaagaactggaaggaagtgtgactttgcgctatatcggagcagggacgctgggagcgcgcgcggcccgccggctagtcagtcccctgacccggaaccgcactggtgccgccgctagccggctgcccacgtgcctgcaacagtggccacgtggggccctgaggaaacgcctttacaaaggtttgtcccctgcgctgcccagtagggaggaaaaccggaggagagcgcaggaggaaacagtaccggctggaggccggtcttgcaggagcgggggactgctgggggcggggcttggtggtgactgctggcggggcggggcctggggctcagaggggtgggctttggagatcagagggtcgacgctgcttcgttgcctggactctggtttccgccctggagcaagccggggcctggtcggcagctgggccgccatggagtccacgctgggcgcgggcatcgtgatagccgaggcgctacagaaccagctagcctggctggagaacgtgtggctctggatcacctttctgggcgatcccaagatcctctttctgttctacttccccgcggcctactacgcctcccgccgtgtgggcatcgcggtgctctggatcagcctcatcaccgagtggctcaacctcatcttcaagtggtgagacagagaagccctccggcatcctggtccccacccccgagggccctgagtcatgtgtaagccctggtctctttcagcaactgtctcaagggccttcccacccctactctgtagtccctgattttttttccccttgagcatctttgtgcagcttggactcaaacctcagagtccaaccatcctactcattagaccagtgttcttcaaactggtctgatggaaaaatcacctaaggggcgtgtctaaaatgtaaatatcccatcctca

SEQ ID NO: 470730 - DNA, 804 bp, Homo sapiens
gcctccatgctgatgtgaccatatgcacgttacagttggggcagcgctggcagaatatcccgtctgtctcctggtccttacccaggagccatggacttacctagcagaggagctggtgagggaagaagcgccccccaccgacctgcaaatttttgccatgtcccaacctgcccatgtggcctggacatgtggaaatgtgtcaacaatcatgacagatctgagagcagtacctgtcccagtgcgcaggcagccaatggctggggcctgcagcctgcgatggtgcctgcagcctctgaggagacccatcaccaaatggccttcctgctccagtgagaagcccctgggccatgtgaagtctgggggagccaggaccagagtccctgagagacatggtctggaaactgctcaccaatgtctgctggatgctttctggacctggggtagtcctgatgggattgagagagataaacaggaaggcgcaaaggattaaggtgtctctctgaggaaggggctagggacaggccgggagttgggtgacgcctctgtgtggagccgagggatccagatgtgagctgctttgcccaacgcatttttccatctgtgcagagaaaataaaacaaagagaaaagaaaacaagctgtaaaatactttgcagaagtctgagcatgggcatttgccacttgatgtctcctgacagctccaagaagcaggggagggaagggagccctgccttttgatgtttgcctcagagttttcttttgtgtgaccagttgtttaggaagaaccttttgttggcgtaaggtg

SEQ ID NO: 470731 - DNA, 1777 bp, Homo sapiens
aaggccatctgccctgggataccccaatcccctccccattgctgctgcccaggatctgagctttaagcctggctggccccacccccgccaatctttgcagccctgcaaagcgcccagcccggctgcggtcccgccagcggggagccatccatcaccgcctgaatgccagccaacccgagcagccccgccttcctgccagccaatagccggaaggcagggggcgtgcggggctctaagtggtataaaaggggtccgagggccaggccgcgctacctctgcgcccccagttggctctgcttgttgctggcgtcctgttccgtgccagagcccccgggccggtgtttctgtgcgtgccgtctggctgggccctggctcctggggtctgggtttcagacgtgccccggtgcccattctgctggaggaaagaagaggccctgaggcccccttcccttatacacttggggcccgcagggtcgcccacgagggcaagggggtggaggaatgcagaaagatgcagaggggccctggggatggcaggacactggaaggcaggccctggctgctctcccgcacggaaccgccggccgcccttcccgaaaaccagtcctccgcgctcccctccgcgcccgccggctccggcctgtggcagcgctaatgaggcagtctggaggaagccggtgccagcgggcaggactctgggcggcaggccaggcttgtcatcctggcggctctgccgagctgcgggcgccacgtgggagctgggggcacagcagccggcggccctccacccccagcggggtctccgcctcagcccccggaaagctgggcctgcaaactcagggtcctctggaaggggcagcgcccttccttgccggccctcccgggtcctctggcagtgctgcgcagcccgctctgcgctgtcctctccgccgcggcgtgggtccgtcggctgcttcgcagccgcgccgctccccacaatccctcagccatcgcgggcgaggacacctttccggtcgcctctcggcattgccatgccccctcagccccttccttttaacctacactagcagggtgggtcacgcgtgcaggttgctagggcaacgtcctgtcgccggcgtcggaaaccaaccagtaactctcaggagccggagtcgggtccgccctgggggcggagttagtcagcaggtcggtccggcgggagcgcgtttcctgccggtccctgcaggtggcaccataggatcgcggatgctttcctggggcggggctttcctggggcggggcttcccgcagtgctcagcgcactccaggggcggggccggggtggagccggggtggaacgtgagccaccagctgcagtccgcaaaggatcgagggaaacgagctgtcccgggacgcaacgctagacaagctcagggacgcatttacagggacgcagaaagtgtacgcgtcagagagtggaaaggagaaaacaggttctgggacggcgacagagaagggaagtcgtgtcgcccagaaaggctatacaatctccacccttcccgtttgtccctgcgacaccctttcaccctcctgtccctccggacctgcaattcttcacaccctctgcagcgcacagggtgctcaggacacatgtgcacggtgggggctggcgatgcttcctcgcccccaccacccgcaagcttgcagagagctgtagtgcccaggatgtatgccaggataggaattccacggttccaggcatgccaagaaaaatagccatgctgtttctcggtttgtt

SEQ ID NO: 470732 - DNA, 672 bp, Homo sapiens
cagctctgcctgccccaggggtttctccaaggctgagtcctctaactttctaaccaacccctctttccagatgttctcacagggggaatagagtggggcagtggagtgtgctgatgacctgtccgagcaccccactccctctctcaagcccctgactggcatgtgttactgccattggacaagctgtcccacagccactgcaccttcagtgcggggagcctggagcccatcatctccacatcctttgcaagaattctctgtcctggataagcagcacctcccattcgctcaagctgcagatgttacatgctgccttcctcccctcactgaatgtgaaggtgatggaagccttttgctaagtctgtggctgtatgaagctcagatcgctggagcatatggcattatctactgtgagaatgaggctgatggagagccactgggctcaggcttggaaatggtgagctctgatcggaccgtggggaaaacaggacatttcccttctgaaggtcccccagcccagggcaaatgccagggcatgaatgtgtctgcaccccgcgagattgagtaaatatttgccaaaggcctgaattgtaacaataatctgccaatgtcaggccagctgtgggggagatttacagacccaaaccagggacaaaagacattctttcagga

SEQ ID NO: 470733 - DNA, 867 bp, Homo sapiens
gaggacaccactggccatttgctgccctgtcctgaccagagggcctcaagtcgcatgggaaggagggggtggggacacagctgctcccacccggagcatggccctccttagcccaagctgggacccacaagcccagacccagaagcagagatgtgagggaggaggagccggatgtttcctctttccaaaagattccagaattggcttggctgcgtggccccttgcccctgctgacagcccccacacttcctgattaagtctggcttccccaggtggctgctgcccaggactcccagatgcagctgtgggtggcaggaagcaaccagtgtcctggcatcaccccagacacaaacctggtccctgatttgacagcatcgcgttgccctccacccactgatgggcctggatgtcctcctgctggcggggacatcacagccagagagctgaccatgttccactatcagtacaagcggactctggcagcagatgtgcttctcagtgaaggtgtggcgacatctctccgcgtctccttgcaaatgatcagctcccacctccaccctggcaccaacctgggctgcaggaagctgaaatgcatgttgccccttatcatgaatgggagcatcatctttgcagaaagtctcccttctttatccttgcaaattgagagtgcaatccaggatggaaggagaccacattcaaccatcagcatcaagcgggcgaatgaggcctcctgaattgagcattgggctcaggaggggcatgaagttccacaaagcacagaccaccctttgcaatgagcagcaaggtgggtgtctctttcacaggtcggggtgaggtggggtgtttccatccagggagccccagtca

SEQ ID NO: 470734 - DNA, 1190 bp, Homo sapiens
gaggccacctggactcaagattttcaacccagggtgcgactctctgttgtgtccccaaatgtaaggtggtttgttgtgaagaagagttcagagagtgcccactgatgtgtcctggcaattaaccagagacctgtgggaggggtggcgagggcagcaggacagccaggctggctgatgcggccatgtgccccatcccctcttccgtggggggtgctccttggcccccatccacctttggagggttggcaaaggacatcggcagacacagggatgctctcacagaagtgtctatttggactattgcttttgacttgcccaacaatttaatctcccagggggtagagaaaatgaccagtggatcagccactctgaaatcaattctgaccatcaaagaactgaccagccaactggaaagtcatctgagagtggcccaatcagaagtgcattgtcatctgagagtggcccaatcagaagtgcattgtgaggagaggccgtgtgaggaaacagtggaaaaggtggtcatctacaagccaggaagagagccgtcaccagaagccagaacagtcagcgccctgatcttggacttccagtttctagaactatgagaaaataaatgtctgttgtttaagccacccagtatatggtattttgttatggcaaccacagcagactaatatagggggtatccctagaatcacccttgtgatgccctcagaggtttttaatcgagtccttatgttaatttatctctgttcacagagagctctgcttctggtttcctgatgagaccctgactgatccagaagagacggtgcctatactagtcaagggcaggaacctccaggctgaggagctggactctgtacctgtcttctttgtctcactgcatcgggctgtgccctgagcctcatcttcagaaaatggagggaagtaagtcctgggtgaccgcaggatccctgtagcacagctcccccaaggtcttaatgaagtgccattacacctctcagctaatataatccccaggaaaggggcagggcagacagatggcagagagggagactgagtcatactcactagctaggccacacagctagttagaaatagaagcaggcctgggactcttcctcccaatattccgcccccttccacaaagacccagaggctccctgcctcctccctacttttaattc

SEQ ID NO: 470735 - DNA, 904 bp, Homo sapiens
ctgtaagtggcaaataaggaagaagtcgcagaccggttctggctttcaggtctctcagacagggagtcaaaacagttgagactctgatcagccaaggctagggacacggtcatgtgttatggaaagagggccatgtcttctggaggtcagggcccagcagaccctgattctcacctgtatctagtccacgtcagtgtcccacctgtatatggtctgcgtcagtgtcccatccgtatatggtctgtgttgtatacagtccgtgttggcatcccatgcatatacagtttgcatcagtgtcccatccatataaggtccccgtcagtgtcccatccatatgcggtccgcgtcagtgttccatccgtatacggtccgagtcagtgtcctgtccgaatactgtccgcgtcagtgtcccgtccgtataaggtccgcgtcagtgtcccatctgtatacggtccgcgtcagtgtcccgtaagtatacggtccgcgtcagtgtcccatccgtatacgtccgtgtcagtgtcctatccatatatggtctgtgtcagtgtcccatctgtataccgtccgcatcagtgtcccatccgtataccatctgtgtcagtgtcccatctgtatatggcccatgtcgtatatggtctgtgtcggcgttccacctgtatacaatctgtcggtgtctcatccgtatacggtccacatcagggtctcatctgtatacagtctgtgtcagtgtcctatcggtatacagtctgtgtcagtgtcccatctgtataaggtccgcatccgtgtcccatccatatactgtctgcgtcagtgtcccatctgtataagttctgcatcagtgtcccatccatatatgatccatgtcagtgtctcatctgagtctggcctgtgagagagtcactgt

SEQ ID NO: 470736 - DNA, 777 bp, Homo sapiens
catctgttgacagttccaaatgcgtccttttaacatggcagctgacttcacccagaggagggacagatgtattacgggaatgagcactctcctcctgagaggcaatgtggaattttctgtgggtagagctgcagcaacttcactggaaagtattctgtctttaatgtgtgcaccaggcatgttgaataacctgccaagagtcatcttgaagacctaccagtcgctacctgcttttggaaaatccctcgataagcagtttgcaattgaaggttcctgctccttgcttcttgaaggtgcatgggtccaactcatgacaatggatatcaaccttcaaggaggtttcttacaaagtgccagcagctctaaccttgatccttcagatgatatctggagtatcatattcaatttggggcatcagattttgggaatggcattgatgaatcagagtgtgctcagagatagactgcttaagatgaagaaagttcaagaaattatgtggtgtgaggagaggctgaaggatcagagaacattctgcctggaaatgcaaacaggatttgtgagagagatgcatgccattgaggaagaagctgaggtagaactaaaaccaaagggtgcaagatatagggaatacaccttcctgtaaataaagacaacctttctgatcattataatcaagagaaatagtgtcagttgtataccacttacaagtgtcaaaagcaggagcccatttgtaaggtgagctattatttccatgctatggatccaggtaattggaac

SEQ ID NO: 470737 - DNA, 4061 bp, Homo sapiens
tggacgccagcgatgatttagtgcgccgcgccggcgctcgcaccagcagcacgtggagcgcttcctggggggttatttttttagaaaggagaaggggtggctagaacttaatcccatggtggagagagagagagagagagaaggaagaagaggaagaagaagaagagaagaagaagaggaggaggaggaggaagaagaagaagaagaggaggaggaggagaacaagaatgagaacaagaacaagaacaagaagaacaagaacgagaacaagaacaagaacaggaacaacaagaagaggagaaaaatgattcggaccaaaatgtccatgatgcagagggtgagaaaccctgagatagaccgtaacagggagctatccacagacacaggagcaccaccagaagccagggccatgtcgccatggtggcccggcctggcatggccaggtggccttcacccctttgggccaagcagagaggagcacgtagctgctgaacctccagaggtctccaaaggttctaagtgcaggagccaagagcgcttctgaaaaccctcattctgcacagcctggcccaccctcagccttctcttgtgcatgtggctgcctggagagcttggcagaaaggcccagagagtggggtgactgagccgggggcgggctagggtgaaggtatccatcctagagaaatactggcttgtgtacacaaaggggcattccaagcatgttcattacagtttcaaaacactatatatgtctaccaatggggaagtcattacataaattatggtacctccatactgtggagagctgtgcagcaataaaaaggcattaagttgaccaaacatgttgaaatacatcaaaagtcagaaaagaaacaagtcataaagtcaaagaacaacagggcagaatggtacctgctgtttggcccatttgtgcctcaggaccaaaagtacactgaagactcaaagcaaaactatgtacctttatatggatataaatgcaaagaacagcctggaacaataaagaaaggtggcccagtgtggttattctaggaaagtggaaggaacttcccttcaactctttggtttgatctaaaaaatatataaatatattgtaacgagaaaataatattcatatatctgttttttaaaggaagaaataattttaaaggaagaaagttaattgtcttggaagtcctttctggatatatttggcttgtggttatttcttaaaacaacaacaacagcaatattgttaaaatatgatatggctatgtttaaaatggatatattgaagactctgaagcttcatggctgtgaaaactccatagctgctgtccctgtctcaatactgtcctcaggtgcttctaccagattaatcttccaaaaactcctctttgatcatgctcctcttggaggaaaaacatcttggcctgcaaaagtggccccaccctacctggccaactttatgttcacctgcttcctgacacaagagtctcttccctaggcatgttcattccctccactttccataaacatgctgtccttgtcctactgcttctttgcatttgttcatgttactcagcaggcctgggatgcagtgccaggtccacatcataggaatgcttgactttacataatgaatgggttcccggtttgtcatttaaagcgtacgcgcatgtgtgtaaagctaatcccacttccacaatgctgggtgtttagcttcagaagttagtcttgatttgtgattcgtccttgattggctgtgagcccaattcttagttttatatttttctgcctcttagttgctgccaatttataaaccaacacttaaatccttcaaggaagttcctttaataaaagcatcatttttgatagaaagtgaggaagtcacccctgcatttaaaaaatttgtggttaaaagcttggattattgccaactggattttcttcaaatggggcctacttctatatgtcaaacaacttctttccaatttgagattcccagggtgctatgcactaaagccatctttagggttttatgtagccacatcctcaaagactttcctcctcacttgacttcacttgtgcaggcctgggcttcagccaattcatatatatctggtatacaccagaggggtggccaggtgagtctactagggttttgctttgttttgttttgtcttaatgggaaaggcttatgtgccttaacattttggggctgataatgagcttttggactaagacttcttagatagtgataaaaaagggttaccttgtcctcctaagactttgtactggatgtggggaatgggaacagtttggtgggagaagatgtcataacttgatgtgtaaatgacttaggaacaagtttggggagtgctagtgatactctggcctggttcccatgaaataagttccacagtcctctgggggtgggagctgtgaaaagagagaagaacactcttcgtggtatcagtggcccaaagaccacttgtgacccagcataaaatggatgggttgtgactatagcagaaatgatggcatgtgactcaaggcttggctcttttggaaggctaactcctgggatccaggcaccatgatgtgaggaagcccaagcagccacatggaaaggccatgtgtaggtgttcctgctgacatccactgctgaagtcccagtctacagccagcattacctaccagatacgctttaagatgattccacctgccagccttcaagtcagctccaacatgaatcttttcggctgagaccctagagacatgaaaaagagtcatttactctatgtgtcctttaaaaacttctgacttagagagaatccctggacataacaaaaccattggtatttttaaaaagctatatataccactgagcttggggagatgtgttatgcagcaacagtaagtgggacagagaactacttctctgagatggacagaagggatttggaaggcatacgtataagatgtaagatttttgaaacagatattacatatgtgtatatgtattatatacatatttaaatatacaaatatatattacagatgtgtatatgtgtgcatacacacatatatgcatatatatgtacatatacatataatcagtgtaattatacatccagacatgtttttctgctaagaatatcgaaaatccagaagccagtctgaccagagccccattaggagtctcaaggggaggcagaagaatggtggagaaagcaaggacttttagaatctggccaaactccagggccacctatcatgagcagccttgtttgctggcaatttgcagagttgcaaggggtaaaggactggctttgactattcagtctttcagtggctgctctgcaacagaacacacccagaggcatagaggatgtttcttatcgctccaagctctgcactgggcctgaagggggctgggatccagttttgatgaagggacacgaggcccttgccttgctggctgcagaggcaggaagagcccaccggggtggggctccccatgaggctgtctggaattgaggaacacagcccactgcggattccaagagccaaagaaacgaaactctccaagcttacaactgtggagaaacacttcttcagtctgttttaaatcaaaatccccacgctgacacttggactccattcaaccattaaaaagttccactagcaaataaacacttagccaaatatttgctcctatgtgttttcaatagtaaatgccagctatattgctcatctctgtatatcaccctggtggcccacccctggttgtctggagctaagtggcttctttaaagacaggtggaaactccttccaaacttcccaccatggcagccaagaggggtggactcagaccctggtggaaaagaaaaagttccctcccaccctaaagggcagaccaacttaggatcgttccgtgagatttgtacttacatgtagcacagaccccacagcccccgggccccagaaacgtatttctgctttcccctcctctcgtgggtcgtgctcctaccttccccagtgctcagtcaccagccct

SEQ ID NO: 470738 - DNA, 513 bp, Homo sapiens
atctaaggcatggatcctactggtcaatcaaccaatttctgcctccaaatcttgcttgcattcctttgcaccacattacctagcccactctcaggtagaccaaggcccatttgtgcctccaagatggctctcagtgatccccccttctgggttcatatgctagtacagtcttctcccatagcgaagaggacagacctgaatagccaaaaggatattgtggaagtgacagcatgtgacctccaaggcgagatcataacagacatcgctacttctaccttgctctctcgatcactccccatgggggaagcctgttggtacgacactcaagtagccctatggagaggttcttgtgtggccactgcagtcatccaggcaagatgtgatgaactaagataaggaaaaagaaggaacaaacttgaaagacatttagagcagaaggttggcatactttacctgtaaaaggccagataataagtatttcagattttgcagaccaaacaacctgccgcaact

SEQ ID NO: 470739 - DNA, 568 bp, Homo sapiens
agaagctgggggtgaagtcatagaagaatagagccaaggggacatgagagcaaagtggttgccatttgtcccagtcattgcttcattacagaatgtgccgattagacctccactgtaccacaaatgtcagagagacatctgtcatctccaaagccctgaaagctgtgagaggagcccagaaggcattgaaagaaccagtactctgcaggttcctaggaccaacaccttctccttgcaggccagacggcagtttggctgtcaaagacaggatgttgtcactcctacccttaaacatttccaaggatacaaccttcctgaggctgggaaatcagtctacctccttaacctcctcatctatgcaatagcagtaacattatttatcttacaaggttactgcaaggataaaggcaggagcacacacgtggccacatcaatatacacactatagctttttttttcttctgctgctgtctttgcttccctgaatttggtatccatagcaacgcatcccagcagcaatgaagaggtgacacagttgctgtttccctcacacccctattttgctgat

SEQ ID NO: 470740 - DNA, 681 bp, Homo sapiens
cagttcctgagagggtgttctcaaagtcacccttgctttcttgcgggtcccagcataagccactcgacgtctctaagcttcagtcttctcatctgtggaatggacccagtattacctgttttggagagctgtgaagtaaagtctgagactgaaggcccgagaattccaggggccaatggtgtaagtctgagtctgcctgaaagctggagaaccaggagtgatgatgaccaagggcaagagaagatggatgtctcagtacaagcagagagagcaaattcaccattcagccaacaccataactactttctttgcctgttgactcagaggcatgaggagcccaaagtggccaggtggcaggcagtttcaacttcaagttcaatggaatcactgttgtgtctcctggtgaaagtattcctgtctctggaactaagacctctaggccagcaaggcataaaagaagcaatgctgtgtggaatccttgataagaagcaatgctgtgtggaatactatgacagtgtgtaaggcattctgtaagcccacggatggtagttttggcagaagcatttcatgcagagaagacaaagtcgtaaccagagtaagtgtttattccagtaaggacaaaaaactgcctcttccatgatggaagcagtccagtgtaatcaacctgatgctggatagctc

SEQ ID NO: 470741 - DNA, 537 bp, Homo sapiens
ttctgaggggtcttgaaagtttgaccacccagcgtcattttgaataggagagaataaggcaatatgcggaaaaagcatcagtaccaagcaacggggaaaaagttaatatttttggagtgctgtttaagttcaggcttggtgccaggtggtcctaaatccaatgacaagtgttctcataaaagacacacagagaagagacacagagagaaaagaaaaagaccatgtgaagatgaagacagtgattggagttatgcagccagatgccaaggatgcctgaagccactagaagctggaacaggcaaggaaggattctcttctagagcttttggcagccaacagcaattacaagaagaagaggaagaagaagaaggaagaggaggaggaggaggagaagaacaagaagaaggaggaggaggagaaggagaaggagaagaatcgttaagtagcagctttatacccaggcttcttgttacataatggggaggtgagtggttaccctacaattttataggagttaatgaactatttgggcttaca

SEQ ID NO: 470742 - DNA, 599 bp, Homo sapiens
atcaaaccaatgcctggtgtgtcactggcaaatgttagccagaaagaaagattgttccatcctgccaggtcccttataaagggggagaaaataaaatttatcaatcagacttttgatagtgagaatgggtgctacctgggcagaatcctgggacactggcttaccagggactacctgggaaaactgggacataggatccccttcttttatagcctttcaaaaagttcctatttaacactccatcaagatgcccaactgtccaatgtgcctagcattgaggacattggactttcagttttaaaaccagaatggtcctgggcacaccaaggaactggttgcctcaatgaaagaagaaaacacctgaaaagtatacaaggattccttagcacgaaaccagcaaacagcctcaatctatcagcaatcatctttagacccattaccaaaaccagacagctccccaaaagaaagagagatacctaatgtaaatgacgagttaatgggtgcagcacaccaatatagcacatgtatacatatgtaacaaacctgcgcgttgtgcacatgtaccctagaacttaaagtataataataataataataat

SEQ ID NO: 470743 - DNA, 1129 bp, Homo sapiens
cagctgaaaaaggttctcttgtcatgggactctacatagccgttatattttattacaaagacaatatcttagtcaccaatgaagatcaagtaccaattgttgaaatagatgactctcacaccagttctattacacaagattttctgtggttcacgaagctgtcttgtatgtgggaagatataaggtggctgaggcaaagcataccaatatcctcatcctcatccacagtgctgcaaactcggcagaagatgctcgcagcaacagcacagctacagaatttacttgggacacacaacttgggaagagtttactatgagcccattaaagatcgacatggaaacatactcatagtcaccatcagggaggtggagatgctttattcattttttaatggcaaatggatgcagatctcaaagctgcaaagccagagaaagtctctatcaacacctgaggagccaacagctttagacattctactgataaccatccaggatattctatcctatcacaaaaggagtcatcagcgtctctttcctggattatatctgggttacctaaagctctgtagctctgtggatcaaatcaaagttcttgttacccaaaagttgcccaacattctctgccacgtgaagatccgtgaaaacaataatatttctagagaggaatgggaatggatccaaaagctttctggctctgaatctatggaaagtgtggatcatacttctgactgccccatgcaattgttcttctacgagctccagatggcagtgaaagctctccttcagcagatcaatatacctctacaccaggcaaggaacttccgcctctacacacaggaggtgttggaaatgggtcacaatgtgtcctttcttctcctgctccctgcctcagacgacgtctgtacagccccaggacagaataatccttacaccccacactcagggtttcttaacctccctcttcagatgtttgaacttggtatagtagcttgtttcacctagaaatattaacccagcctccttataataaaatcacaaagttatatctgttcccccttgtcccagtggagggtcaataaatcacatgatggctttggcaacaacccttcctagaactgtgtacaagtctg

SEQ ID NO: 470744 - DNA, 682 bp, Homo sapiens
gtcttcagtttcatcttacactatggtggctcctccaagctcactgtcttcaacacacttgccactggaaagtttctgcaaaggtgattatgtcaccaacttagtagagcagcttattcctccctcttccctgtcatacacccctcgggaactctggagccatgaagccttggcggagatggaggcccaccaggcagctctttattgccatgcaactgtgagattcctctccacacttcctcctggggaaaagtcagcctgccagtggagatttaacagtggagtagtgcatagtgacttgccaagtttcccctgccccccagctaccgccatccccaccatccctacccctggactgaacaaatggcatcacttatcccctgggagcctggcagttgctgagcccatacgcctcagggactggtgagcttccagtggccacagaggcaggtctccactcaaggcacatgcagactcaagcagagctgtgtctgtgactacccaactggacacgcagctggcactggagatgataagccgctttctaggtcaccttctccctgcagagatttttctcttgaatcatttttggccagatccctttgcagcattatagtttgtcaataatactttgtttttagtgtatggaaaaatactaatttttttaaatttgattttgtaa

SEQ ID NO: 470745 - DNA, 576 bp, Homo sapiens
gtttggacctggctgttccctagtgttgtttaaaggagagagaatcagcatgaatgctagggaaattagactgctggaaatgccagaggaaagcagatatggagctagaaccaagggaaaggacatactgggacatcctggctatggaaaggaagcacagtcattcacaaaatctggaacatgtcagttaaagaaggataaattcttggcaagtatgccatcaccttcccctagtgtgcctatggcagacatgactctgcccttctttttcaatagctgcgctgtggctttaggatcatttgaaccactgttgcagtggattgtagtgctcatggccctctatgggtccatgtctgagatctctatcctagtccagcatccctgggacaatacatactaccttaatggctgcaacttggtgcatgcaccaaggcttctcatactctgtatcatgagataaaacagtattactataagtgtttgctatcagctttaaaatattactgatgaaattttagaattgctatcaagtcacagttcatatgggatttagggtttaaagttagcatgtaaggt

SEQ ID NO: 470746 - DNA, 729 bp, Homo sapiens
cagctccactattcattttgcatgagggctacccgacattgtccaacagcaaccagcagacatgaaaggatagggcttgtcattgcttttgagaatattaattatgatatgtcttgcatgagaaatttgagagatgttatgtttagagaaactggtggggctgttgctgaaaaatcagcggaaatcggatgcctgcaagaaaggaccctggaaaagccagcggtacacggtgacaggcaacaggtattctggggaggggtggtagcctacggcaggctgaatcctgatggcatctggaccaggaagaggtcaaggaggcttccgatggtcccacaggacatctatagctccatgccaggtagtatttttttcattactgaaaatgaaaaagttttcctggaagtaagcagacataacactgacttcatgggtccaagcaaagaggacaatgtagagacaaaagaatacaaaccgactagttgctaaaggagctagaaagggggattatttaagaaaaaaagagacaaattaaataaataaaatatcatccttcatggtacagcagtgctgcggcctggggatagaactggaaactttgtgtgacaacctaaataggatgccgtcactttcaccctacaattaatactccctgaagaaatatctaagtgtcatgatcttttgctaaatttgaagcatgcaagcaaaaattcggtcatttccgtcagcagt

SEQ ID NO: 470747 - DNA, 760 bp, Homo sapiens
ttcctgtcccaggcccctgaggcatggccccagcttcatgccccaggctcagcccccgcactccatgtgcaagcagaggactgcccttggcccatctctgcttcagagtccctctctgcctgaccacactgctcccctattggcaggcaacttggcccagccccatttcagtggcccccagggtggcaggttgtagggggttcgcaggggtgggctccagggccgtctgcctccttcccacactctccctgcagtggcagtgggcgagagcagaaatgcagggccagggcccagagcaacagaggctctgggactggaagtggattccaccccgcagtgagagaatggggccacacagttggccgtcttggttatgcagggcacaggggacccactgccaccactgccacgcctgcagccattcctgctgctactgctcacacctccccactgcagccagcatgatggcagcagctgccccagatggcctgccactgccctcattttatgcctcagttatctgtctaatatggccagtggggtgttgaagtctcccactattattatgtggctatctaagtttctttgcaggcctctcgagatttgctttatgaatgtggccactcagatgtcaatgagtcctctatttggtccctttacctaatcccatatttctcagaggttttgttcattcttttaaattcttttgtctttacttttttcccagttgagttaattcagagacccagactttgagctc

SEQ ID NO: 470748 - DNA, 1310 bp, Homo sapiens
attgcctcactcgggaagcgcaaggggtcagggagttcccttttctagtcaaagaaagggtgacagacggcacctggaaaatcgggtcactcccgccctaatactgcgcttttccaatgggcttaaaaaacagcgcaccagaagattatatcctgcacctggcttggagggtcctacattcatggagtcttgctgattgctagcacagcagtctgagatcaaactgcaaggtggcagcgaggctgggggaggggcacccaccgttgcccaggcttgctgaggtaaacaaagcagccgggaagctcaaactgggtggagcccaccacagctccaggaggcctgcctgcctctgtaggctccacctctgggggcagggcacagacaaaaaaaagacagcagtaacatctgctgacttaaatgttcctgtctgacagctttgaagagagcagtgattctcccagcacgcagctggagatctgagaacgggcagactgcctcctcaagtgggtccctgacccctgagccccaagcagcctaactaggaggcaccccccagtacgggcagactgacatctcacatgtccaggtactcctctgagacaaaacttccagaggaacgatcagacagcagcattcgcggttcacgaaaatccgctgttctgcagccactgctgctgatacccaggcaaacagggtctggagtggacctctagcaaactccaacagacctgcagctgagggtcctgtctgttagaaggaaaactaacaaacacaaaggacatccacaccaaaaacccatctgtacatcaccgagctgatggagctgaaagtcaaggctcaagaactacgtgaagaatgcagaagcctcaggagccgatgtgatcagctggaagaaagggtatcagtgatggaagatgaaatgaatgaaatgaagcgagaagggaagtttagagaaaaaagaataaaaggaaacgaacaaagcctccaagaaatatgggactatgtgaaaagactaaatctacatctgattggtgtgcctgaaagggacgggggagtatggaaccaagctggaaaacactctgcaagatattgtccaggagaacttccccaatctagcaaggcaggccaacattcagattcaggaaacactctgcaagatattgtccaggagaacttccccaatctagcaaggcaggccaacattcagattcaggaaatacagagaacaccacaaagatactcctcgagaagagcaactccaagacacataattgtcagatcaccaaagttgaaatgaaggaaaaaatatt

SEQ ID NO: 470749 - DNA, 1157 bp, Homo sapiens
gcatcagccttcccaagatggcagctgctgaagacgagttcctgccgccgccgcggctccccgagctgttcgattccagcaaacagcttctggacgaagtcgaaggagcgactgaacccaccggttcccgaatagtccaggaaaaggtgttcaagggcctcgacctccttgacaaggttgccaaaatgttatcgcagcttgacttgttcagccgaaatgaagatttggaggagattacttccaccgacctgaagtacctgatggtgccagcgtttcaaggagccctcaccatgaaacaagtcaacccccgtaagcgtctagatcatttgcagcaggctcgcgaacactttataaaatacttaactcagtgccattactatcgtgtggccgagtttgagctgccccaaaccaagaccaactcagctgaaaatcacggtgctattacctccacggcttatcctagcctcgttgctatggcatctcaaagacaggctaaaatagagcgatacaagcagaagaaggtgttggagcataagttgtctacaatgaaatctgctgtggaaagtggtcaagcagataatgagcgtgttcgtgaatattatcttcttcaccttcagaggtggattgatatcagcttagaagagattgagagcattgatcaggaaataaagatcctgggagagaaagactcttcaagagaggcatccacttctaactcatgtcaccagaagaggcctccaatgaaacccttcattctcactcggaacatggcgcaagccaaagtatttggcgctggctatccaagtctggcttccatgacagtgagtgactggtatgatcaacatcagaaacatggagtgttaccagatcagggaatagccaaggcaacaccagaagaattcagaaaagccactcagcaacaggaagatcaagaaaaggaggaagaggatgatgaacaaacactccaaagagctcgagagtgggatgactggaaggacacccaccctaggggctacggcaaccgacagaacatgggctaatcttcccacaacaccgcaggactgcagggtgcacaccttccccgccaaggaaaaccatgcagccttcccctccctgagctcccctacagctgtgtaaaacgaaggcaaagatgctta

SEQ ID NO: 470750 - DNA, 1866 bp, Homo sapiens
tttggtgatggccatcggggctcccagatgaagtgacattgatgttgagacttggaggacctggaggcatgagccaagccgcatccctgctccttagagatcgccgtcttcagaaactgccaggcccctgctctttcaacatctttcatcctgacgtgtggccaaagcatgacaaacctccatgggaaagctgtccggcagcatcggtcatcacagaacaattagaagcaaatctttccaaaaataatcgagctttgagtgttcttcgaaggataaagagtgggagtgtagtcgccaaccgagctaaccagggcaaggaaaattctgaaaacatcaccacccctgaagtctttccaaggttgtaccacctgatcccagatggtgaaattaccagcatcaagatcaatcaagtggatcccagtgaaagcctctccattatgctgatgggaggcagtgaaaccccactggtccgtatcatccaacacatttatcatgatggggcaaatgccagagatgaccagctactaccaggagacatcatcctaaatgtcaatgggatggacattagcaaagtctctcacaactacgctctgcatctcctgcggcagccctaccagaagttctgcagcaggaacagtggacaggccctggatgcctacagaccccaggatgacagctgccatgtgatttgcaacaaaagtagccccaaggaacagcttggaataaaattggtgtgcaaggtggatgagcctggggtgtttatcttcaacgtgctagatggtattgctggccctcttcaccactgtatggacttatgcaatgccaagaaggtagaaagctgcactatgatccagtgtccagctctgaaaaatgctgctccttgtgtggtggcatgtttgactcctacctctctgctcttggaagttgctggcctatgttgcatcctgatggtaccagcagtttttatcagccataacaatggcagcagcgggctgtctggagtagctgctgccatcacgctggctgcagcagggaggcacagctgggactgcacactccatggagctggtgggaacctgggacaagtggaagccccgccccttctgagttggtggggcaggagttccctgggtgcagccacaactgcccaaactgtggctgcagacctgggcctcccgggccatggagcaggcaggggcccaaccccaccagggcagctgcagtccaccccaaccactgctgtggacccaggcatccctgcactcttaggggcccaggaaggctccccctgccctagcaggcttggaagtacctggcttccccctgctgttggcacccactttgatcttggagcaaagttggggccaagcccaggcactgtcaaggcctggccaggccagaaagggcctgaaggctcggggccaggctaccagttccatggaccaaagtgggaacttgtggtgctttttccagatccccccatggctgcccatggaccaattggcactcacttcctccctctgagacccataaaacccccagactcagccagagctgagcagatgttgggaaaaccagctgcagagaggagctacccattccagggtctcctctctgctgagagcttcagagaacgatgggatgacctgcctgcagaaggagctacccattccagggcctcctctgagctagtctatcactcaataaagctcctcttcaccttgctcactctccacttgtccacatacctcattcctcctggatgtgggacaagaacttgggacctgttgaatggcaggtctgaaaggtctataacacaaacagagctgaaacatgccccttgtttgtgacattgcaggtgaggag

SEQ ID NO: 470751 - DNA, 676 bp, Homo sapiens
atggggctgttgcaaggataacatggagacaatgggtgcagggtggcatccgggtaagagtccagacctggcatcaggctgcctgcgctggatcttggctctgcaacttccaacttatttagctctccagatctcagcttcctcatttgtaaaacgggtttgtagcaatgactgcttcaacagggctttgatgttttgcctgatcaataaagattgcaaccggccagataaggacataaccaaacacaccctgccactgtcagtcctcaccagaggactctgtggccataaaaagagctggacttccaccgctcataacagctgtcttgataagcgcctggcatctgcctctaaagactctgcctacatcaaagactcttccttgcaaagctgtgatgctgctgagctgcccaagccagaccagaatattctttttgttcacatcgctctccctggactggcttattaaccctttttcctatcccttttctcatgccatgttactttgtttgatgcgtaattttcaatctataatgtttatatattgataagtatgttatgtatggcttgcaatactgactgatctgtgaagtggcttgagcctgtgtgaatgccaagtgctaaaaattgtctcctcctctttgggaactccatagagctggtggcttttatgatc

SEQ ID NO: 470752 - DNA, 714 bp, Homo sapiens
tttgtgctgtcaagtgtccaagtagttcgtggaacagcaggacactaaacaccaacctgcggcctcacaatgatgatgatgattgcccctaaaagggggataatcgctggctgccatcatctgaaggttcgcctggggctggaaggtctgtctccaagctcatctgcatggctgttagttggaggttcagttcctctcaacagggtgcttgaatgtcctcacaacacgtcggctggcattctccagggcgagaatccaaaagatgcaggagggcactgcaatgccttcggtgacccggccttgggagtcacacaccatcacctccaccttactccactaggtaaacagaccacaggcgtcacagggcatgaagactggaggaaggccagggaaggccgaaaggaaaagctgcctgtggggagagacctggtggctgcagggaggtggctgcgggtcacctacttccatgggaagccagctccagtcagatacagggatggcggccccaacgcgggaggatccagggctatctgaggaacaagaataggcagtgtggtgggggatgttcagatgtgttcggagtttcttccttgtggtgggttcgtggtctcgctgacttcaggggtgaagccacaaaccttcgcagtcagtgttccggctcttaaaggtgtgaagctgcagactttgccatgggtgtcttacaatcagggcaga

SEQ ID NO: 470753 - DNA, 642 bp, Homo sapiens
agctgctcggagtggacttaggatgtgcgatcttgtttctgaccttgttggcttctctgagatgtttaaagttccagctaaacaatacaaatctatacatcccactttggaaatagacattgaaggtgaattacaaaatctcaaggaaattggagaattattacaaacaaagggtagagagtttggtgtaactattggaaggaaaagaagatgtggctggttggacctcgttttgctcaaatatgctcatattatcaatggatttactgcgctggaagttaccaagttgaatattttggacatgtttatggaaatcaaagttggagttgcttacaagttagatggtcaaatcatacctcatattccagcaaatcaagaagtcttaaagttgaagttcaatataagactccatgagaatggaacacagacatatcaaatgcaagggcatttaaagaactacctgttaatgcacaaaactatgttcgatttattgaagatgagcttcaaattccagttaaatggattggtgttgaaacaaatgatgaaaacataggggttctgtaaacttttgtaatgctatgagttctgtttaaattgtggactgtttattttctgctgagaccattgcaaaatttgaaagtc

SEQ ID NO: 470754 - DNA, 2184 bp, Homo sapiens
aaggtttatcagcttctgcaaggagctttgtcccaccatgcttccattcccagaaggaggagcttggagcgagtcagtcctggggcttgctgacatgggtgacccattggaaaggagaaccagccccaaggagcagcaggcatgggtccctccatccttgggcttcctgggcccctgtgatgggggaaagggctctcttataccacactcaaggagaccacttctcaggatggagtcagatggagagacctctcgggagaaagacatccccgttgtggaagttgggggcgtagaaaatgaagcaaaacaattccagggtgtctcccgctttactcttcaggaatggtgtcccaagttggaggttttgtgtcagctgcaaatcctaccagttatgtccaagaatggctttccctcgggcaggtggcagtggtcatctcccactgggaatatggcgtagtatctccggtccattccttggatgctaaggactgtgggaatgagggggtcagataaagaacaaacctcaaaacaaacaattaaattgaaatgttatgtgcctgacccaatggtaggcacatagtaggcactcaactcatatgtttaattgaattgaaaatatcccttaggggaaaaaaaaaacacacacacacacaagcaaaaaaccacaagagcctcagccagtttactccaggtagatttccacaatatgcaaagtggtggtggggtcaagacaggtgacaccagcactttaaattctttgtgtgggtatgcgtgggtgtatgtttgggaagaaaaacgaaggtgcagactatcttccttttttcttcttcaacctccatccctggcttcctcccctcacacacactggacttggtacaaaatgtcagtgtggtcctagaggaagcattggggtgggggagggagagggagctttgtgtaaagtgcctactggaaatgcactgtggggtttttcctgtatgggaaaccatttatgccaagctttcccctatttcccaaatttatatcatctggttagctgcctctgcttccagctttgtataattctctttgccagctgcacaaagctgattttctccaaagtctaaagactgagctcacctggctagattgttgtgtgttttgttgaaattgttcataatgtaatgccgtatttattgttttaaaaatgaaaggaatactaataagtcttaaaagttccttcatgcctaagattttttccagttactgggcttaactggtgtacattaattagatgtccatactgtattttgtttgcatcaagtaattttctttttgacttagtatctggcacacaaagtgggttagtactacagtatttgcattactttaagtacaaagttaggtatgtgcttatatgtacagagttgtgcatagcaatcattttatgtaagttgacatgtagtctactcacattttcatttttagcagttttgtacaaaaatagcaattaatttgtaaacactaccagaatactttctagatggcatgtaattttttaagagtgttattttgtttttgtttttgttcttagttgtggttcttcttttcatttttgttgtacgtgtagatctgtaaataaaattgcagtattcaaagcttaagctttcgggaaaaagaaaataagaattcagtgtgtgcatgacaactcgtgtgtatgagaaggagggatttgaaggaagatgacttgcagagtaagtcgggtagcagttgtcagagtgtgggaatttattttcctacggggtacgtgattttgtaaaaaggaagtatttctcccaaaattgggagtaggcaaattactaatcggtttagctttgtgttgtatgctagtttaaaaaagaaaatatgtaatataatgtaaaaaaaaaacaacaaaaaagcttttatgatggattttgtaaacagatttgttacagggtgacctgttctctagctgtgatcttaccacttcaaatgggtgtaatttgaataacttttgtatggtaaaggatcaataaaatgattttttaagaaaaaaagaaatatccttaatctgttaaagattatttataaaataaaaacttttaaaaaatcacactcagtgaggaaatattaaaaactgtcccatgagttttaggaatgaggcaaggatactctttactttca

SEQ ID NO: 470755 - DNA, 3877 bp, Homo sapiens
ttttttccataaaaggccaaagacacggcgacaggggcttcccctttgccgccgccgccggccaagctccgccgccaccggccaagctccgccgcgcccgcggcccgcggccgccatgcagtttatgttgctttttagtcgtcagggaaagcttcgactgcaaaaatggtatgtcccactatcggacaaagagaagaaaaagatcacaagagaacttgttcagaccgttttagcacggaaacctaaaatgtgcagcttccttgagtggcgagatctgaagattgtttacaaaagatatgctagtctgtatttttgctgtgctattgaggatcaggacaatgaactaattaccctggaaataattcatcgttatgtggaattacttgacaagtatttcggcagtgtctgtgaactagatatcatctttaattttgagaaggcttattttattttggatgagtttcttttgggaggggaagttcaggaaacatccaagaaaaatgtccttaaagcaattgagcaggccgatctactgcaggagaaaacagagactatgtatcacagcaagagtttcactgggtttaagaaagcgtactagaatacctgctggagtactgacacgcatcgaaatgtagtagggtatatacattcagtttgtaatgacaattctgtcaagtttgttatttatattttagcattacctgaaaagtctaattacattaaatcccaagggatagtcccaattacttcattaaactggtattttcatagggaattttgcttggataatgatccattattggggcttataatttattttttacacagaatatggaaatagcttcagaggttcattgacaaaaaagcattcattaaatactgtgaatcactaatgccattgatacagaagaatttccctatgaaaatgagagcttctgtgagaaaatgaagtagttgggagtttaatttcttactaatatgattttaacttgctgcttcattccactatattctgagttgggggaaaagggcagctatctctttaaaatatttaggaattctttgaggattaaaatgtaactggcttttgtcctcagatacgtttgtaattaatggttgtgtaagtttagggatttgttagatatttttcttggaacagtttacatgattttgtagttcaatatttcaaagtttcaaattgaataaatattaaaatgaggatactttaaagacactcaaataagcaattttaaacttgctttctggtggggatataatccctttgagagtccgaaagatgatgggccgtcaccccaggaaaatttgtacatcattttgtttctaatttcagggaactctcggagcccctagaagtccttctgtagacactcaaatctggagagtttgttaaaatctgtcttgaggatttttaaaaaagtaatatcctcagtctcagtcaaattctttggattttttgcttttgtaggtataagtaaacagttaaaaaccttcattgctacttaaaataccagatgagtgactacttttccagtttttttgggaaagatttttctctagtttctttagtttatgtaatacaaatgtactaatgaatttaaacactggtggaagggaaatattctaattgaatttttggtcaactcagtattgaccagatgacttacactgaaaatcttttcataatattagtagtaaatatagtgttttaggattttgtaaaatttctggaggatgtctgtcatcattttgaacactgtatgtagtaaagttagaaaaaaatgaatctaaagtcttgggcattgtttagaagttaaatattcagccttaaaccaaagaaggaaagcaaacagaaacttaagttttagttatctttactgtgaactaaatgttctagaaatctgattgtgtctgtgtcagtttgtatactgtgtgtaagaatatatgcatttcttttgtagccacgtcatgaatattttaatgtccctgtgtactaaatgactactcatcgagtatgcagaatttcacagaggaaatagaatgctgatatacatatgaaagaaaatatcctcagcatggtgatttattgtcttgtataataatagtagaacattttagaactagtacttttatgattgtatttttttcctgttcacattccaaacttttctgtattttcattctatatgtgatcttgatacagctcattcctctctgcaactgatttaatctcatcttgataaaatatgacctagaagtgttttgagtaatattaaatcttaaacatatacatattattaatgaaccatctgtgatttatcttataagaggaaaacatgacaatcattaaaatgtttaccaaagaaaatatagctgaagtgctaggtcaaaataagcagtgccataatatatagtgtggtttggtcttcaaatattgaggttaaaaaaagaaactattttgtgtgattatcttacaatctgtatgagctaatgtgttctaatgtatcacataaaagtatatgtgaaaatattacaagaaactaaaattaatttgtaccattatataatatttaaggttaaaacattcagtattaagaaattttgtagtgccacatttattgaatcacatttgtgctatataataatatcaaacaatccctttaagaacttattagagagctatgtctgaagtctgttctgcagtatctgttgctgaataataactctttcaaagcattaatgctgagtttatatagttcaaaaattctaatattcattcagttttaatacctaaatacttatattttactagtgatggcattctaatatattaagtcctcatttaaatacttaatactttgttaactgtggcattatatttctgaattttaaaacctttaatattggtaactattgcatattcttttaataaaacatgcagcatatttttttataaaaggaaaagaattcattgtttatatatagacagcataaagcctaagttaagtaagttattaaacaataacttcacaagatgttcaaatcgatttaccactgaaagaagatctatgaaaatgtgttttgaccaaacttagtattaggcaggtacacagataagattttccattcttaacattctcactgtaatgcactacatttgaagcacctggatgtgctatcaggtgggaaatttagcattatatattggaagcattgagaaacattggtctttcatttctatttttcccctcctttcctcctcctgccccataatatattattcatctggttttaatgctacataaatatgcattgtctcatgtctgtttgcgttggatgccttgtgctaagctgtaacaaaatgttgcttcttttgctgtctgtatacagctgcttgctttaaattagtagattctgaaatagctttccttgcatgtctaaaataaaagtattgcatataaaaaaaaaagaaatgacatggcatgtatgcaggatatttagtcatcatatagataatccttgtgcacaagggtattctacattctttcccaataagtctacatctgccagagttgaaataaaacaaaacaaaacaaacctatttagcaccttctgtatagcaggcccattcatatatgttattgtatttaattctcagaattcttatgacctaggcatttaaattaaaaaaaatttagttgacaaggattgtatatatttaatgcatacaacatgatgatttcatatatgtatatattgtgtactaattatcacaaatttattacatccattatcacctatgctgtacattaaatctccagcatttgttcatcttacaactgaaagtttatagcctttg

SEQ ID NO: 470756 - DNA, 1135 bp, Homo sapiens
aacctacttaaatctctcccccaaaaatggttttgcaggcttaacaggaagcatgactgggaggccccaggaaacttacaatcatggcagaaggtgaaggggaagcaagacacatcttcccatccatggtggaacaggagagagagaagggggaagtgccacacatttttaaaccatcagatctcatgaaaactcactcactatcacaagaacagcaaggggaattccacccccatgattcagtcacctcccaccagggccctcccccagcacttgtaaaggtcttcccacattcaagagatgagagctccttgactccaccccttgatggagcatcgacactatatagggaaaagagcgtgtgggaagaggaatatattgatgcggccatctttggaaaatacaatcctgctacacagataaagcatttggctgagtataatgagatgggctggaacaagtggcaaaggctttctaactgttgggagcactcgaggaagaatatagaggcccagaaaacattcaaagggcagaccccgtgtggccagggcaaactctacctgaaatgggtaaatgagagctaattaccgaagtgtgaacagtgttaaatgccttactcaggggaagaacttttccaggaatacacaaatgctatttttctgtagaacaattattggagcagaagaatatattaacaaacctagagggtacagatttatctcaattttagatccagttttcataaatgatggactaagtaaggctgagaaataaaggaaaatgtgtctatgttcaaagtattagcaaagcagatttagaagaaataacaaaaaataaaaagtatagtaaatcatatttttctatacttagaaactttttcacttccacctctccctctgccttacctttaatatgctaagtggagataaagaaatagccatctttttatctaaaagctataaaaatctcaccaattcagcccatacagccttctttttttaattaattcattaaacagtatttttcaagcaactactaagggctgaacaatgatgccaaagccacgagctgtgttaataacctattcagaaagaagacacattttcaaaagactatagaacagccatgcatgtta

SEQ ID NO: 470757 - DNA, 513 bp, Homo sapiens
attatggttcatgggtctcttcaaaagtcaaaaattacccaatagtgcacctgaattatgcgcagtttgttgtatgccaactgtgtctcaatagagctgtttcacaaaaaagggactgcctctgagagggttttgtgccaggagaaagaggttggatgtggaagatggagtggaggaaaggaagatcagaagtggttagccacgccaggcgcggtggctcaagcctgcaatcccagcactttgggaggccaagaaaattgtcgagagagcccgcaattatcccaaggtgcctataagatgccatttgccctggcaggtctaatgtttgctgcacgattgggtcaagaaacttggggtgctgaggatatcaaggacttagatgagcctaatgcaaagtccagtgtggcgttccagcctctgccaccgatgcctcacaattaccctaagattttcagcagctgcacaaatctgaaaacggccccttgattctgttccctagtagaaaagatgtat

SEQ ID NO: 470758 - DNA, 1613 bp, Homo sapiens
gaaagcctgttctgaaggctgtcaggactgggcttagcatgtagtaggtggcccataaatatttgttgaatgaacacatatcgtcgggaaaaaggaggttgttgtaaggacacgcagaagaaccagaactggaactggaagtcagagcggaagtggccccagggaccacctccttcgccagctcaggtccactgccaggctggtggggttcctcaagcgctggcccagggcccccttgctgtccacgctgtactttctcagtgggcagttgtctatgagcaaacaggtccagttagaaaatcaagtgactcatccagggacagacagaacgaggggcagagctcagaactcagacccagccagctgttgtgcactgaatggacaccgctgggctctcaggaagatgacagctccttggttagatgcagaaacatgaaggaccacccgttggggactggtaggccccttggcccttggctccttcttccgacatggctatgagaagggaggagagaatccaaacaggactcctgcagaaagtctatttactgtcctaagagttggttgaccttgaactctggaagtacagggtgtcacaaacctaggaaggaactaatgactcccaagtctgttcctatggctgacaaatgtctgaagttcctccagtagatgaaaaacagctcattcctaagccatgatttcttcagaaatcattttattatctctaagacttgtgaagtctaaagagagtagaatttgaaagaatgttgaattccatctggttcaaagagctttagtgttagacataaacaactttaccagtttgaaaaaccaaagatgagcaaaatcaaatcaggtggtagagcttcctgggtaggggtgtaacatacaacttaaatctaggtgtcctggtctatgtggcactttgtttgaattatggggtcattgacacagcaagatagataaggcagagtagttgttacgtaatctcaggagagtggagaaggcactcccaaaactggaaatgatgttacattttccttggtgagaatcttttaaccccaggagggtttaaaattaagtatagaaagtttaagggaatcatgatattaatgttttcatgtaaaagaatctaggcatgtttatgtatatataatgcttactagaatttagcctatttacagaaaaaaatgtcaaaattccagttgaaaattagtaagtatttaattgattcagacttatgactttaaactgaaaacttcctaagcgtatatatagtattggaacatttaagagaaccctaaggttgtcatatttgcaagtttaatttatcgcatgaataatctaaacttaaacacttgaaaaggttttgttgttaagtcaggccattaaagtacataaaaggaaacagaacacagtaagtgtctcaatgcaattttaaatctttaaaaggaatttaaccttataattggaaccacacatccaaaatccttttaaaagtgataggtaaaatatgttggacatcaacgggataagattagaaagctgaagcttaaagaagagctacgattttgaattgtaatttcaataaatattaattttaaaagtcagct

SEQ ID NO: 470759 - DNA, 750 bp, Homo sapiens
ggtcttcagcggtcccactctggagcctcccacaccacactgtgggcactgtggacattcatccattctccgtgaaggagctagagccatctttgccaagagcaaacctgatcataatcctccccggcttaaaaccgatatgcagtatagcctgctgatagcagtgcagacctcgcttctgctaggacaactggatgccatcatcctgaatcggacacctcacctgacatcaaacagcgggacagggcccaaggcccttggggtgacatcatactctggttgcctccgagcctggctcatcattccgcactccatggcctacactgggagcctcttcctggtgtttcaaagagccctacttcctgcctttgctgatgagaaccattcatttctggaacaaatcagttatttctgctctctacaagagaagccacaaatccacaaacttactcaatgcctgctgactggcggcattggtgtgaggcggtggccaggcctgcatctgcccgccctcccctggaacctccttcagtctcctgcccctgggccaggcgtatgtgttcatttccaggacgaaggatcctggctttggcaggacgcccacaccaccaatttcagaagcaacaagaactgacgtgggtttctgtctgcctgtctgtcctcgggtctccagcctgtgctatggattctgacttgtccttgatctgccccactttacctccatgcttccttcccaaccatctcccctgc

SEQ ID NO: 470760 - DNA, 791 bp, Homo sapiens
agggattcagccattctagagcccttcattgccaaaagaatgaaacaccctcctcacacagtaggcacaaagattgccatggcactatggacacagcaggaaccagacagacacagtccctgctctcctaaggtttacggtctacagggaaaggcaggcagatgttcaataaactgtaacacaaacagctgtgcaattgcaactatgatgagcattacaaggaagtgcaggggccatgtgacagagtataacaaaggctggagatggcaaagactacgctgtgagcacacctttgatatgcaaaccaaccaatccagagcccacacccaaactctcacgacttgtcctagtcaccccagggccaagtgtcagacaactagagaaatcccctataccttggagcccgccaaaattactcacacttgccaatcctaaaccttgccttgcctgcctttccctccgaaaccatagttaaggcccctgccctgatttcctcttgttccttctgcctcttgcccaaccctgggctcccccgtgtggccctgtgtggcatggcatgtcccttccactccggaactgttcattcacattgctgtatgtatcagtacttcatttctctttacaaccaagtaatatcccattgcatggatatacattgtatttatccattaatcagttgaaggacatgtgtgttttttcagttttgggctgttatgaataatgctgctataaacattcatgtacaagtttttgtgtggacatatgttctcatttatcttgggtatatacct

SEQ ID NO: 470761 - DNA, 533 bp, Homo sapiens
tgcgctgtcagtgtggccaggtacgactggaatgatcagtagcagtcctcctgaggacgtcattcaggccttggaagagaaaaagcccacccccaaagagtctggcaatagccaagaactggccaggggcccccaggagaggaccccctgtgggcctgctctgcgggaaggcgaggctgccgctgtggagggcccgtgcccgagccaggagtccctgtcccaggaggaaaacccggaacccacggaggatgaaaggagtgaggaaaagggaggggtggaggttttggaaagttgtcaaggctctagcaacggagcccaggaccaagaggcttctgagcagttcggcagcccagtggctgaaagggggaaacgtctcccaggagtggccggacagtacctgtttaagtgtttgataaacgttaagaaggagtttagcacttcaaggtaatattattttccagcctatgatgaacgagtgacatgtagtcagtggaattacttagaattcttcatttatgctaccaaatcttcac

SEQ ID NO: 470762 - DNA, 1074 bp, Homo sapiens
gtgtgattcctctggctccaggccacctctgagggtctcccaatggctgggagggattagaggactgtggcttcttgggccttgcacacttgcttccctgtcctagacagctggggctgttcctgctcttcgctgcccctggcactcacagagcagctgactgactgacctaccaacttagggagaaaagtggggaggtggggatggaggacactctggggatacagcctcttcgtgatttccttcctggaggggagaggcggccagggcaatgcaatgctggggctgcagtgcctccgctcagccacagcactggctgcagggcaaaccctcaggaccagatgaggggagctcagcctgatgtccaggttcgctggcatgtgagggacgtggtcaggcacagctatagccatgggtctatggacggttcctggatcccaggaattgctggtggggtccctgatacacacctcacgtcttcaacctctgccctctctgatggcctgttggcactcctcctgcctatctctgcacactcagcgactttcccctttgatggggacaggagtggaggagggcagggcaggatggagacaccatacacattcctgctcaaggctgcaggtgactcagggtcttcgtcggtggctccggaagccttgcaggtgccctgccacatggccgctgtgctgctggctgctctgacgggtcctgccggggctactgctttcctgtcccctcccccgaagctgggagatggatttcctccctgagtgattaattggtctattttaagctcatcaaagtagcctcctgaaggactgcacacttctcaggcttccaaggcaggagcttcggcagcaggaacagggttgcaaggtagttagtctgggtgtctgtcgtcctgggttgggacatctgggagctggggcaaggcctctgggccctagtgccagagagcagtttggtggcgttgcctgttctttaaaatgggttaggtgtagccatgagcccccccatgcagcgggtgtgcaggcctctccctcagtcagaacaccctcacccacccctccc

SEQ ID NO: 470763 - DNA, 801 bp, Homo sapiens
tgggacctacagctttgcaaaagcctataaggggacaaagaaaaaaactaatggttttacaaggggctcttctcccttcgctcggcgcttctacttcctgccaccttgtgaagaaagtgccttgcgtcccctttgccttctgctatgactatgtcctcctctgtcaggggcctcccctggccccgcatctcacctgcttatgtggcatccagcctggaattaactctaacagcctcgggtaccacatggccaaggcataagcggaatctgatcgtgaagaaacctcagaccaacccaaatcgaggaacattcttcaaaataaccagccagacccttaaaaatgtcaagttcatgaaggacgacgaaaacactgaggaagcatttcagattaaagggagaagtgacaacagagcacgacccgcgattcaggactttcttttgctattaaggacgccactgggacaaaacccaatgacctttcaaaattacaaatctgatcttaagtattccagatggaccatcgtttgtttcactgttcacctactgaaggacatctgggtgtctagtttttactataatgaatacaagtaggcattttggataacttttgaaaagctttgtatagctttttaggtagtgctgtaggtattacattatatatacataacccattatagtctactagtgtcattattttgccagtttaaatgaaatatagaaattgtgtttccctttaaatcctgttgccctccactatttataatacaattgtcttaatatttcctctgcatacttttagaa

SEQ ID NO: 470764 - DNA, 874 bp, Homo sapiens
tgcctccaggaaaactcgtagttttgctcactttattgaaacggcagtgaaccaggaaggattaaggtggggctatgtttggacatttcctccccccatgtgaaaggctagagggagccgaatttgggtatttctcttcctacaaattggatgggaaagatgacttcaaagatctttggagacagcagatctgctgtctctttggacaccagatctcactttcacttttgaatgaaattttcactggatataaaatactaagctggcaagattttccccccaagaactttgaagatgttgtcttctggcatctgttgttattaaacaaaggctgtacaggaagcacgatgctggcatctgcttggcttctagaaaggcctcaggaaactgacaatcatggtaaaaggcgaagtgggagctggcgcacatcacatggccggagcaagagcaagagagagaggggggagatgccacacacttttaaacaacaacatctccatcaattgaaatgaccatatgatttttgtccttcattctgttaatatgatgtatcacactgattgatttgcatctgttgaactatctgtgcatcttttgaatgaatcccacttgatcatggctaatgatctttttagtctgtttttgaatttggctaaaggtctttctattttgcttatctttttagagaaaacaaatttttgtttcattgatcttttgtatttttttatttagattttatttatttatactctgatttttattattttatttcttctactaattttggcttgtttgctcttgcttttctggttctttaagatgcattgttaggttgtttatttgaagtttttatacttttttgatataggagctt

SEQ ID NO: 470765 - DNA, 703 bp, Homo sapiens
gaccctccagcaaactccaacagacctgcagctgagggacctgaatgatagaaggaaaactaacaaacagaaaggaatagcgtcaacatcaacgaaaaggtcatctacaccaaaaccccatctgtaggtcaccaacatcaaagaccaaaggtagataaaaccacaaagatggggagaaaccagagcagaaaagctgaaaattctaaaaaccagagcacgtcttctcctccaaaggattgcagctcctcaccagcaactgaacaaagctggacggagaatgactttgacaaattgacagaagtaggcttcagaaggtcagtaataacaaacttctccgagctaaaggagcatgttcgaacccatctcaaggaagctaaaagccttgaaaaaaggttagacgaatggctaactagaataaacagtgtagagaagaccataaatgacctgatggagctgaaaaccatggcacgagaacttcatgatgcatgcacaagcttcaatagccgattcgatcaagtggaagaaaagaagagcaaccctaagacacataattgtcagattcaccaaggtggaaatcaaggaaaaaatgtgaaggacagccagagagaaaggtcgagttaaccacaaagggaagcccatcagactaacagcggatctctctgtggaaaccctacaagccagaagagagtgggggccaatattc

SEQ ID NO: 470766 - DNA, 2585 bp, Homo sapiens
gcatctgagaaatggggcacacagacccacctcgcagggtcatcgtgaggatggtgtgcacgaggtgctggcacagggaaaatgctcgaggacatgtgtcatgcatctggccactgctggccaagtgtggctgcaggggcctttggccccaggctctacagcttctctgatgctctcttcctctataagtcaaacgaggccctgggaccatttgcatctaaagatgctgaggctaatcctgtggaggtgtgtacctggtggaggagtgtaccctgcggaggtgtgtaccctgtggatgtgtgtaccctatggaggtatggatcctatgaaggtgtgtaccatgtggaggtgtgtaccctatggaggtgtgtaccctgtggaggtgtgtaccctgtggaggtatggatcctgtggaggtgtgtatcctgtggaggtgtgtaccctgtggaggtgtgtatcctgtggaggtgtgtaccctgtggaggtatggatcctgtggaggtgtgtacccagtggaggcatgtaccctgtggaggtgtgtaccctatggaggtctgtaccctgtggaggtgtgtaccctgtggaggtatggatcctgtggaggtgtgtaccctgtggaggtatggatcctgtggaggtgtgtatcctgtggaggtgtgtaccctgtggaggtgtgtatcctgtggaggtgtgtaccctgtggaggtatggatcctgtggaggtgtgtacccagtgcaggcatgtaccctgtggaggtgtgtaccctatggaggtctgtaccctgtggaggtgtgtaccctgtggaggtatggatcctgtggaggtgtgtaccctgtggaggtctgtaccctgtggaggtgtgtaccctgtggaggtatggatcctgtggaggtgtgtaccctgtggaggtatggatcctgtggaggtgtgtaccctgtgcaggcatgtaccctgtggaggtatgtaccctgtggaggtgtgtaccctgtggagttgagtaccctatggaggtgtgtaccctatggaggtgtgtaccctgtggaggtgtgtaccctgtggaggtatggatcctgtggaggtgtgtaccctatggaactatggatcctgtggaggtgtctgccctgtggaggtgtgtaccctgtaccctgtggaggtgtgtccctgtggaggtgtgtatcttgtggaggcatgtaccctgtggaggtgtgtaccctgtggaggtgtgtccctgtggaggtatggatcctgtggaggtgtgtacccagtggaggtgtgtaccctgtggaggtgtgtatcctgtggaggtgtgtaccctgtggaggtgtggatcctgtggaggtgtgtaccctgtggagatgtgtacccttttgaggtatggatcctgtggaggtgtgtaccctgtggaagtgtgtaccctgtggaggtgtggatcctgtggaggtatggatcctgcggaggtgtgtaccctatggaggtatggatcctgtggaggtgtgtaccctgtggaggtgtgtccttgtggaggtatggatcctgtggaggtgtgtacccagtggagttgtgtaccctgtggaggtgtgtaccctgtggaggtgtgtatcctgtggaggtgtgtaccctgtggagatgtgtacccttttgaggtatggatcctgtggaggtgtgtaccctgtggaagtgtgtaccctgtggaggtgtggatcctgtggaggtatgtattctgtggaggcgtgtaccccgtgatggtatggatcctgtggaggtgtgtacccagtggaggtgtgtaccctgtggaggtatggatcctgcggaggtgtgtaccctatggaggtatggatcctgtggaggtgtgtaccctgtggaggtgtgtatcctgcggaggtgtgtaccctgtggaggtgtgtactctgtggcggtatggatcctgtggaggtgtgtactctgtggaagtgtgtaccctgtggaggtgtggatcctgtggagaggtgtgtaccctgtggaggtatggattctgtggagatgtgtatcctctggagatgtgtaccctttggagctatggatcctgtggaggtgtgtaccctgtggaggtgtgtaccctgtggaggtatggatcctgtggagatgtgtaccctgtggatgtaaggatcctgtggaggtgtgtaccctgtggagatgtgtaccctgtggaggtatggatcctgtggaggtgtgtatcctgtggagttatggatcctgtggagttgtataccctgtggaagtatggatcctctggaggggtgtacacttgtggaagtatgttcacctatggaagtatgtaccctgtggaagtgtgttcacctgtggaggtatgttcacctgtggaagtgtatacacctttggaaatgtgcacacctgtggagggtgtaccctgtggagatgtgtacacctatgaaggggtgtactctgtggaggtgtgtaccctgtggagtctgagagatcagccctactgggttcttcctactccttagatgctccttgacagagacctcccacctaagcatcctcggcctccagggatcttttgctcttacttgtgggtgtcatt

SEQ ID NO: 470767 - DNA, 689 bp, Homo sapiens
gactttctcggtccactccccttcaaaatgagaatctagatactacctcctggggccccagcgggaagagatgagggaggagcgggctgcctcgcccctttctcccgcctgggaggagccagctggcgtctccgggggcccgggaccgctgcccgcctgcaccaccaggggtcagcagagtgtcgtggctgcagccagtgcaggggagggggctggcgcggttgaggggcatctaggagtggccgggagcatgcctgtgcatttccttattaaattcaaagcccaggagtccgaggacagggggagttcaggatggattgtggggagttgtcgattgtggggaactgtcccctgggcggccgtgttctttttttgccaggcggcggtagacactgaacccaggtcgcttgcgcttcggcccgcgctctcagctgccacgtgctcgagacgcgcccacacagcggagaaacaaagacagccaagcggcagggctgccagcagcctcctcgacatttaataaatgaaattccatagctgggggtcgatcgggggtgaacgggcggccaccgctcgtggactgagcgcctggcacgggctgcctggccactcctcccgtctcactccccccgccccttacccccttcccgctgaggccaccaagcccatggactctggtgagagagcagctc

SEQ ID NO: 470768 - DNA, 601 bp, Homo sapiens
gatgtgggtggaggacgcaggtatgggttcctctcggaccaccctctctcagggatggtgtgttctggtggggctgagaggtgccccagctgcagggctggggctgtcatccattggctgtgctgttgaccttctgtccctggagttagaatcgtgttcgggggtgattccaggcaagctcaagattggatttcccgtgctggagtggaggcaggaggatggtagtcacgagcaggggaccttgtggttggaaggcaacaaagatggcaggcaatgtcaaggggaagagaaaacccaggagttgagcatctttagaaactccagttctgtggctgcacctgaccttgtcatcactcggaatggttcaccaatgaacgaagtcggcttcctctcacctttcctgccaccacatatttcctcccgatgatctgacgttgaagatctgacatttgggacccactaatgcaggagacacactgacacatctgtttgttgtcttggtcctttcttgtggtgggtgggaagtgcagaggggcaaggactacgggggaagggggaactctccctatgtgccagtgcttctgccagccaacccaggttc

SEQ ID NO: 470769 - DNA, 651 bp, Homo sapiens
aggtggacatgccggggaggagactggcctcctggtggcgggggagggctcctggggaccccaagtccgcggaggaggagacaggagggagcagggagatggaagacccaggagcacgggcgggctccgcgcatgcgtgggaagagaccttggcgtcctcggcgtcgccaaggcaaccggcgccagccatggcctctggggcgggcggaagctggggtcgctccccaccgcagagcgcagtcccgacgcccctctcgtgggccgtcccacctgcgcccccgcagccaggccgcgtgaaggaagacctgctggaactgatgatgctgcagaacgcgcagatgcaccagctgctgctgagtcgcctggtggctggagcgctgcagccccggcctgcctcgccctgccctcaggggctcagctgatatttgttgaacgagtgaatgaataaatgaatggttagggatacaaagccaggttggctgtgatggcacatggagaggtacaaagcacaagtgcacatagggttgggggatggggacaggctccttggaggagcagaggatcttagaaccagcccttgaaagccagacagaaggagaccctgaggagctactgccacccctcacccctgggtcctcagtgatgacacat

SEQ ID NO: 470770 - DNA, 2158 bp, Homo sapiens
gaaccactcagggtcctgtggacagctcacctagtggcaatggctccaggctcccggacgtccctgctcctggcttttgccctgctctgcctgccctggcttcaagaggctggtgccgtccaaaccgttccgttatccaggctttttgaccacgctatgctccaagcccatcgcgcgcaccagctggccattgacacctaccaggagtttgaagaaacctatatcccaaaggaccagaagtattcattcctgcatgactcccagacctccttctgcttctcagactctattccgacaccctccaacatggaggaaacgcaacagaaatccaatctagagctgctccgcatctccctgctgctcatcgagtcgtggctggagcccgtgcggttcctcaggagtatgttcgccaacaacctggtgtatgacacctcggacagcgatgactatcacctcctaaaggacctagaggaaggcatccaaacgctgatggggaggctggaagacggcagccgccggactgggcagatcctcaagcagacctacagcaagtttgacacaaactcgcacaaccatgacgcactgctcaagaactacgggctgctctactgcttcaggaaggacatggacaaggtcgagacattcctgcgcatggtgcagtgccgctctgtggagggcagctggacctgggggagccccccccccccacacccacacccacccccacccccacccccatccccacgccccgcccccgcccccgccccaaggctcagggtcctgtggacagctcacctagcggcaatggctgcaggctcccggacgtccctgctcctggcttttggcctgctctgcctgtcctggcttcaagagggcagtgccttcccaaccattcccttatccaggctttttgacaacgctatgctccgcgcccgtcgcctgtaccagctggcatatgacacctatcaggagtttgaagaagcctatatcctgaaggagcagaagtattcattcctgcagaacccccagacctccctctgcttctcagagtctattccaacaccttccaacagggtgaaaacgcagcagaaatctaacctagagctgctccgcatctccctgctgctcatccagtcatggctggagcccgtgcagctcctcaggagcgtcttcgccaacagcctggtgtatggcgcctcggacagcaacgtctatcgccacctgaaggacctagaggaaggcatccaaacgctgatgtggaggctggaagatggcagcccccggactgggcagatcttcaatcagtcctacagcaagtttgacacaaaatcgcacaacgatgacgcactgctcaagaactacgggctgctctactgcttcaggaaggacatggacaaggtcgagacattcctgcgcatcgtgcagtgccgctctgtggagggcagctgtggcttctagctgcccgggtggcatccctgtgacccctccccagtgcctctcctggtcgtggaaggtgctactccagtgcccaccagccttgtcctaataaaattaagttgcatcattttgtttgactaggtgtccttgtataatattatggggtggaggcgggtggaaagcaccccagacttcctacaactactagacacatctcgatgcttttcacttctctatcaatggattgtctccctggagaataatccccaaagtgaaattacttagcacgtcaggttaggtagatccttgtgtacttcttggttgttcagagatcatcaaccagtgcaaacaatccccccatcaatacacagcggtgcctgccccttgcctccccagaccttccgaggcccttcctccgtgcctgaaccccctggacatatcatgtggcaaactgaagggtccaacgacatacaggaagcgaaacacgatgtacactgaaacgtgcaatacaaatatgcagcatgaagtgcctcggttcactaacccgagctacgttgggtgcctcttttctaccacttttcttaatgcctatggacacctcattctgtggctgaagttccttgtgttcaattccccccatcttcattgaacatcctctgtgcagggacttgacccctgtcctgctagctttgcactgaggcaagttctgtccatgcctatt

SEQ ID NO: 470771 - DNA, 624 bp, Homo sapiens
ttaagtcatgcctggcctgggggctgaggccgtcccggcttcggccgtcgtggtctccgtccgcctaatcctcctcgtcacggctcaggaaggccagctcgttctcgtagcagaaggaatccttcgcgctgcagcggggcgtagagggcacctcataggtcttgtggaagtgcgagtagtcgatcttgtacaggttcttctcctcaaagagcacgggctcaaagcggtgaccccacaggatctcattggccagataggagctgcgggcctgggtggtcatggctgtggcctccaccatgccttccaggatgaccacgatctcaaagtcgtccgtctccaggtcctgcctgctgatgccgaagagcgggctggcctcgtcaatctcgtgcaggatggtgatgggcgacaccagaaagatgcggtccaggctgttaacctcctatgcacccatcccctactcaatcctaagcaaccacaaatctgttttctgtctctatagattttcctattctattttcaatctaaatagaatcatacaataggtggccttttgtgcctggcttctttcagttggcataatgctatcaagtttcatgtttagtttgctattctttccagtgcctt

SEQ ID NO: 470772 - DNA, 624 bp, Homo sapiens
agggagagggagatgggagaggctcttccatttctttgtatcctcttttatttccttgaggagtggtttgtagttctccttgaagaggtccttcacgtccctttcttgctagcgggcagacctggtgctgacaaaatcagcatttggttgtcctcaggaccctcagctgcaggtctgttggagtttgccagaggcccactccagaccctgtttgcctgggtatcagcagcggaggctgcagaacagcagatattggtgaacagcaaatgttgctgcctgattgtacctctggaagttttgtctcagaggagtacccagctgtggaaagctttacaaaaacccacagaggtaactgtaccatatgagaagatgctacaagaccagtcagctttgatagtacaggggcttccagaaggtgttgcctttaaacaccctgagaattactatcttgcaaccctgaaatggattttggagaacacagccgggatttcattcattattaagaggcatttccctggaagtggcagctgtgacagtaaaggaagaatcagaagatcctgattatgatttatatcacattcagagtcaagaacttaaagctctataaattcaaattttaaggtt

SEQ ID NO: 470773 - DNA, 517 bp, Homo sapiens
gcaatgctgaaaatatttactatctgaccctgtatgaaaaatgtgtgattacgcctgttctggaggaaaactacaaccatcagcccccatatcaacctcttactggtcccatctaaaagctgaggggaagttcattatttcagttcgcctgcggtatctcgggggtgtgggctgggctaggaggggtgtcagaggagactcactcaaagacgcaaagatccagccaggaaacaaacttgctccaggtacctcgggatcagcggaatcatggagtattggtccttttgtgacgggctcatttccctcgactgctaatgcctttaaggttcatttgcacggtaccagggcaaaattcatgcttctctcctatttgacactttgttcatatttctaatacttacctcattgtagtatagctcattgggccacatgctttgttgattataaattctttgaaagtaaggcctgtattttctgcagaatcatcctgccagctagaatcaccccctccccacaa

SEQ ID NO: 470774 - DNA, 1380 bp, Homo sapiens
cctcccagagctggggagccgttagatcattcaggcagtgtggggtggagaatacaaaggcttgtaaccagaaaacgactttagggaatggttagcagcttacatggctggagtgggaagttcaagaggaggaatggctgaggtttgaaggagagggagtgtcctcagccttgaatcgggctcctgtggggctcccagtcccgctagttccacctcactagcagtgagagcggagcctcctccccgctttgccccagcagccagcagccagcagccctcatcagagcaagccgtcatctttctcaggaacagcagggcagcctcgcactgctgcaggggacaggaaggaagctcccactgtcagcagggagaggaatgaaccccatgatttcgcatctaggagcgtttcactgttttctaagtgtccatgctaatctgtacatggcttgttcggtgccttccaagacagaggggcagagccaagcggcttgtgctctgagcttctccctccccgagagtgggagaagggctttccggtcatctccccacatgctcttcactcctccaagatctagggagagatgacaacagggggcatgatagtgcacaaggcagccgtggaggttgcccctcaccaagggtctcctgggagcctcctgatgtcaaaggtgggtcccattgtcccagcgttggttggaaaataaggtcactataatcaaagctcccttggcacaggacagccaggtctgccctggagggagggaattggctttccctgtgctgcctgctgtcataggacctgagacccacagctgtttcaaggaatattctggtctttgccaagcagaaggctagcacagtgtgagatcatgaggatggaccatgcagatcctagctcacgggcagtgtgaccttaggcaggtcaccttacctgcctctgtgagcctgagggctctcatctgtaagatggagatcatacacctggttccagagctttccatacaccgtctcattgaatcctcgaaactaccctggaagacaggcatcttcagcaaacttcattttgcagttgagaaaagtgatgttaaggcagtccttatggctgctaaacagccatgcagaaatccagcccagatctgtctggatctagaacctgggctctgtcccgtcacaggcctttccactaacacaaacattcattcattgggaaagggtagtccacttggcccgcaggatgaggacaataatgcctactttgacagttgctgtgaggattaaatgaaataatgtttgtatggcaagataacattgttgatgtgttctccagaatccattttctattcctgtataaaattcacccctgaatttggtagcttaaaa

SEQ ID NO: 470775 - DNA, 1199 bp, Homo sapiens
ggggtgtggtctgatccagtactagcaaactgctcgctgctccactttatacgggcgagggaaagcagcgaagagctattcatttaggagaaaatcattactctggatttagacacaagcagacaagcatatgaaaagaacacatttctttgatgttgccactgataccgaggagaaggtggtgcttggagcagaacctgcacctgctgtctgcatctctctccctgccctgcactttcagaggcagccactcatcaaagcaggaccacgaatgtgtggccacagcaagactgagcagcgctttggcggcctactggggcagacaattggaaatgcaggagccatgtccaccccagaaaggggccagaagaataacaacatgaatattcacgacttccagatttgtgtccaaaaaaggaagatgaaagagtggcttctggaggggggtgggcagatgctacatgtggatgttattgccggaaacgatccctgtgaccctacactggggcctggggccttccacacagcagagcctgtgcagctcctgggtggaatgaggaccgaggcacagaatcctaactacagatgctccttgtcttactatgggattacgtcccaataaacctgttcagatgggagttatcctaaagaaaatgtgtgctacacaatgtccaaactatgtatggaatcgcttgtcccattctgttccaggaaaatatgttaaagaagaggaaaataataaattggccataagagggcagaattgttagcttttttccctgataaaattgggggacatttggagattttggttgccacaagcagaggatacgaatgctactggcatcctgtgagtaggggctagagatgctgctgaactttcctgcaatgcaaagatcagcacccacaacaaagaatgttctggctcaaaatgtcaatagtgttgagactgaggaattctgggctgttttagcggggatgggggacacggggagtatgaactggagcatctttgctgaagaacaatgagaacgtgttggattaaattaagtgcaaacatagcctgcgatgcattacatccaccccccggtgtagccccaagaaatggttgccagatctgtaaggggagacggacagctgtattttcagcagtgctgtttggtgcgtgtgttgtaggggagttggaagcaaccctacct

SEQ ID NO: 470776 - DNA, 1369 bp, Homo sapiens
ctgtgggtcacctctgcgggccgtcgccatgtcctccagccattgaagagtaagtgtatggagtggggccctcgccacatccctccttttcccaccacctctcaattcggtctgagctgttccccacagcccctcccagctagcgtccctctcctctccacagcccactaagggcctcatcagggctcatatgtggcttcctaagaaccctatctcttcctcattgagagtgtgcggtctcctgttccggatgcatccgagtgtgaagcctgggagagttcacacagccatccgcgtccctgccggatcaccaagcagcagctcggattcccactggctgttctcccagctgcccttctggctcccctaagaccagctgttcgtcctctgctctcatcatttttccccttagtaactggatgattgcttataaaacagttccaagggcagggctcccatcagcaaaatgaagactcttctccattttgactgctgagaaagttatagggtggtaaaggaaacgacacccaataaaagccccagatggagcagaatacatcaggaacagggaggaaaaaaccttggcggggaaggtctgaaggcggccgaggaagctgcgcttaaatgggtcagcatctggacagctccctgcagggctaaggcaccaggtggttaggggagactctttctaagaggcgattacagccttgtaagacccggacttttccttgctctttactggaccccataaaactccagtgactcgtgcccatgggcctcagggagattaaatctcatctgatccgttcatctgtgcggatgtcagcacggattcacatgggctatggtgttacacacgagcggctccttagagaacttcgggacgctcagcccgtgagaagtgtggctgctgtggccgccagctcagcaggtttctggatggttgcaagggaagagaggtcaaatagctgccgccttccacagggcacactgcacagggcagacatcagtgacatggtgtggggagggcccccaaaacaaagccaaaggccctggaaagtagggacggggataggagtgaggagaaagggaggccaggaaatgagagcatttccatgtatttcagaacaaataaagcaggaccaggctcatgccacctccccaatttcctggttcctgggatgacagaaaataacatcttaaatagccatttcctagctttgacgttaatggaaaaaaaaaagctttgaaagagtggttttctaggcaggcagcatctgggaaggaaagagtgtatgccatggaggtgccagccagtagggatgggggccagaagtgtcccctccagccatgacagtgtcttccagcc

SEQ ID NO: 470777 - DNA, 715 bp, Homo sapiens
atttctcaaagaactaaaagtcatgaccacaggtctacagatttaacctccatgccatggattggccttggacctagagttctcttagatctggtataccacagcttcctggaacttctcctggtgctttgcttctacccacatggcttctggggcttccggcagttcttggcttgtggcagcataatcccaagctttatctgtctccacatggccttctctcttgtcgctgtggcctctcctcttcctgtaaagaccccagttattggatttacagtgcattctaaatctgccatgtggctccatttacgcgagggagtggggcagcctggggaagatgtttctcagcaacagtgctaccctgctggacagctggtgatttttaccataaaacaagatagtaataaggatagaatgagaaatccagtggtaaaaacccaatacattattttgactccaggaagcccttgataacaagagacatcattatgcaatgtggcactaagaaataaaatggttcattaaaatatgatatgccatagattttaagaggcataccaatatcagagatgttaaaatgtgaaaaatagttgcatcttaatgtggaataaatatggcatacacttgttaggtatcaattagaattaaagtcctagatttgcttgataattttttgactctgttcaaagggtaaggtgaccaatgaaatactaac

SEQ ID NO: 470778 - DNA, 1153 bp, Homo sapiens
gccccattgaggaagtgaagcataacgtcccaccgtgtaagcatgagatgcaccgactggccctcacaccagtcactattagtgtctgcactaatagtgcagacactctgctctgcccagcccagctcactgagcccagcccacctggcagggcacctgggccagctggtcaacccctgggctcagctcctgctctggtgcaagcagggtggggcccagggatactttgctccccagatgatgccctccagagggcggaaggggggttgtctggagccaggctcactgcagaaagcctggaggaggagtcctgggtaccctgagctgagctgcacctccctcagtaccactgactgtcccttgggctctgctcccagcgcaggcgctcagctgccagccagaggagtggcctctggtgtgggcatctcacaacccctgacccccaggaggcacgtcctagacactgtgtgggtggaatccagggcctgtctgctcatttgtctggccagaggcactggctttgggcttctggtcaccttttctaaaaatggtcgtgtctcctccttctgtctcccctgcctcaaagcaagccttgctccaggcacgagggtgctgtttctgcacgaccccatcagcactattattttaatgtatttgtttctgccagtttgataggtgtgtaatggtatttcacatcttgtttacacttgcatttttaattgctcatgagactttgcattttttccatgttgctatttactcttggtatttctttctgcataaactgtcctatcgatcttttttcagcatttatcaaggggaatttttgttttgccctttattttaaaatagagcattgttctgttaaaaaaaaaaattctttccttccaccccccttttctgagtatcactatgaacttgtggctccttacctccccagcctgtcataccttgttaccttcattctttttaatgctcaacagttttttgttttgtttttaatgcaacattataacattttgagcattatgacttggaataatgtatttttaattgaaacaagccaatcattattaccttttaaaaatccttctgatagtcttcattatttatggattttgaagaatgtaacacatttttcagggtctgtaac

SEQ ID NO: 470779 - DNA, 892 bp, Homo sapiens
gtactgagctccctgtcccaggaaggatcccagccacctgaagctgattgattcccatcagggatgccatgcagagccttctgcacaagcagctggttggtctgcatgattttccagctgtgagattctgggaggttgccattcttcggagctgctgcctgctgtgtggaaggcggaggaggaaaggaaggaggccaggaaaggagcagagagagagcgatgcagcctacgaaatcacaggccccatccaggatcacccagtgattctggacagctttggaaggttccttctgggggtccgagggtctgtgtctgttaccctccaggctcctgccctagaggccctaacattgcagtggaggaatctgaggaagatcttggagaggcaactggcatctctctttgcaatgacagtccacttacttccatcccacgtggacctgcttccccagcttctgcccttggcgccaatggtcctggccacagatgggttaaggaagccatcttgtggagtttgaaagggaaactcagctaattctctccttcgtggacactaatcctgctgtgtacagctcccgggttctcttccccagaaaccacagctccttcccttttgaccccactgccctggcaattgttggcgttgctgcccctgtcaataccctcatgtgaaaccaaagaagacacaagaaggagaccactggcctgggagtcaggcacacgggtcttaaccctggctttataactcctcccctctctggactttggttttcccatctttaaaacagaaatggttccaggtgagaggggcctgaatctccctgccagcccttgtcccatgtttctttgactttaaggatcacacctcattgtgaagccctctgtgccacag

SEQ ID NO: 470780 - DNA, 4909 bp, Homo sapiens
gctgtccccttgtgcactgaggccattcaataggcttctgcatctttcagaggctatgccttctacaaaagggagactgagggcattacattttgtttttgtgaacacaatcaccatcatcactattgtcttcctcatctcaactctcatcaccaccatcaccattgtcaccattattaccagcatcaccaccaccatcacaaacatcaccattatcaccaccatcaccaccaacattaccatcatcataactctcatcactatcatcaccaccatcacagctctcacccccatcatcacgagcatcatcattgatgagggtacctgtgctaccttggaagatctcttcttcatcaagtccctactgctaaataagtatctgctgttatatatcattgctgtcaccatcatcaccatcatcatcatcaacataatcaccaccatcatcactatcaccaccaccatcatcattgtcatcaccatgaataccaccatcatcatcactaccagcatcagtatcatcatcataatcatcaccatcatcttcatcactaccatcattgtcatcaccatcgtcaccattattgtcatcatcaccacaattatccccaccactgccatctttattatcattcttatggttctggacatatcacttcaactctctgggcctcaatttccttacctgtgaaatgggcactgtaaatatttgcaaaccgtataataattatagggtttattgagtgcatttcatgtgcttgataccattctaagttcatcattcattacctcgtttaattctcatgagcacctccgagatcagattataaatagcagaactgggattctaacccgggccatctgactccagagtaagtctcttaattactaccatataaactttatatggtagtacaacgtttgtgttttaagctgttattacaagagtctgaaagttaaaaaaattaaaaagagtttacaaactaaacaagttacagtaagctaaggttagtttattattgaagaaaaaatatttttaataaatttaatgtagtctaaatgtacagtgtttatacttatagtctcaagcctcctgagtggtgataagtggcatatgcaaggtagcatgtaatgctgcaggatgtttctcgggcctttaataagtaaactgatgtgtgagctatgtgagttcatgagtgttaaatgtctgtgtgtgcacacttatgtgtgagtgtgacatgctatttaaagtatatgcagtcatgcgttgcttagtgatgaagatacattctgaaacatgtatcattaggtgatttcattgttgtgcacacatcatggagtgtacttacagaaacctggatggtatagcttactacacacctaggctatatagtatgacctcttattcctaggctacaaacctgtgcagcatattaccatgttgcatactgtaggcaattttaacacagtggtatttgtgtatctaaacatattcaaacatagaaaaaaggtagggtataaatacagtataaaagatagagaatggcacacctgtatggaacacttaccatgaatggcatgtggaggactggaagctgatctgggtaagtcaatcagtgagtggtgaatggacttgaaggcctaggacagtactgtacactactgtagactttataaacactgtacatttaggctacattaaatttattaaaaatatttttctttcttcagtaataaactaaccttagcttactgtaacttctttagtttgtaaactctttttaatttttttttaactttcagactcttgtaataacagcttaaaacacaaatgttgtatagctgtacaaaatatcttctttctttatatccttaatctataagagatttcctatttaaaattttttatttcttttgtacttcataaagttttttgttaaaagtgaagacatgaacacacacattagcctgggcctacacagggtcagcatgatcaatatcactgtcttccacctccacatcttgttgcactggaaggtcttcaggggcaataacatgtatagagctgtcatctcctgtgataatggtgctttctcctggaattcctcctgaaggacctgcctgaggctgttcctgagctatgtgatcctgttccagttccaacaattcctccttagtcaattcttcattaaccacctctgagagctcctcaatgtcatcctcatccacacccgggttgaagctgtttgccatttcaaccacagccttgttgatttttaatccccttatgcttggaaaatcctttgaagcttggataaacctcttgagtgtcttcttccagatgccattcatacactcattgatgacatcacttaagcccaagcaaggttcacgatgcaaagatgtaatttttccagaattgcgtcaatatcttctcagtgccttccttagttgtagcaatagcctgaacaaagatcttccctgagcagtaggtcttacaagctgctataattcgtttctccattggttgaatcaaagaggtggtgtttggagacagaaagaccacgttgatattgaaatgaagatcaccaataaaagagggatgtgtgggagcattatcaacaataagcaaaatcttgaaataaaatgctcactcattccttaaagctccatgaaatattatctgtctggagaagtttccaccgagtctccttggggaggaggactccctgccctctctgggttactgtgcattccctcaattgtgagataccatcgattgtgagatgcaccatcgatttaataatagcttttgggggaacagaaaccctgctctaaatgtatgtatttccatctcagaaatgagtaagtgtttttgaaaagtgcattttggagtcagggagaagcagtcagtgcttctctcatcgcacaaaggccacaagtattgactcaggcattcactcatccaatcaatcaacaaatcaatcaatcaatcaatctttattgacctctgttgcaggcactgagggggagcagttaacgaaatcaaatctcatgcagcttatattgcattgggagaaacagatagtaaacaaataaaaatataattgaatctaaataatctaaaagaaaggtcatactctcattctgttcccagccccactgaactctctgtggttcttgggcaatgccacatcctctcttgctcccctgctctgcacatgctgcccctttggtctagaacattatcctctggtcagtatcacttgccacacccaggtctaggctcctgcgagtctggttaacacttaattgctcttcagaactcagctttaagcaaaccccttctgaaaccctttactcttcccacccttcactgctggcctggccaggcccccttaggctggagtcatctctgttattcgtcctttggcactcagtttctagatgacaggaatcttgttcatctctgtacctgcagctgttctatttccaagcaggcagcttaacttaggcctcctggttgggcctttaatttggatttattgctggctgtgattgtatgttaaacaaactctaggcgattattaaaaacatgattattgcggtttatggtcctgcttggtcctcagtgggttttctggttctgagagctggccaagactctctgatacagtgcgagagctgttcaccaatgcaagatgcaatgggtcttctgttatttagttgttttttttttcatttgaaaagcaatctacataccagtccctggacacatagaatttccactgataagacacacagtccctgcctttctggagaacctgtcctagagctggagagagacaacaaagcagtttattatgctgcactctgctaggtgttccaaaacaaggcagccagcatggttaactgtccattatccttatggcgaccacattttcccagccccacatcaggacaactgacccggcaagcactcatgtacctagggagacaacagaatggaatatgggaaattgtgatggccagcaaaagtctgggctatttgggcatcttaattatagcattgatctcaatttacctgacatcagatttatgtgtgtgtatagatggagtgaggattaaaagaacaatagtggatgtatttcagagggcatgctcaggtatctttgatgtcttgaccttttcatcagatgccaccaagaatctgtatttttgttttcttctttaataaaattttgggaaattttaaccctgttacagagcaaatagaatcagatttccgtctttgcaataatacccacagctgattccatgcacttgtgatagttgtttatgttgctgactgctaccctgggcccctctctggggagtagggctgtgtaagggtgtctagcttcctcattggcaggacaggaagttccttgagagcaggaatggagtcttatttatctttatttttctatcccctccagtgcactgtacagcccttagaataaggtagagcttaagtagggcttgttgaattgaattattgagtagacaggcttgcgatgggaaataaacaaacaaaagaaccaacgccttataattcaatgctgctcaatctgtcacttgcagaccaaatccccagctccctcggatggctggagaagggagctcccagacatggagagagggatgtacctggcactgcactgtgcacacaggatcacactcatccttcctgcatctctgggatggaggtgctcttactaacaggttagggagcttcagtctcccagggaggacctggagagctgggattgggcccgtggcctgcctatcccggctgtacccttttcctcccagacagtgctgtctgggtcaatgttgctatgactcctcccctcccctggcccctcac

SEQ ID NO: 470781 - DNA, 1191 bp, Homo sapiens
gtgactgctgacagctggccctctccacacagccccttctatccttgggttctaggaatcagctaaagacacctgtagttacctacccccagcgggtgaagtggaaaataacctggctattagaggaatgcacgtctctgctcctttctctggctgctaatggaaccagcagctgtccccagccatgtgtggctgccctgaccctctgagattgtgggtggagatcagccatgggagaagactttgctcagttctgtttcccacagggcatggagacagagcagggcctgagcaacactgaatgtccccgggggagcagcacaagattttccgcagccattgctcccagcatccctgacagagcaagctccagcagaggactgatggaggagccaccggaccccgctctgctatcttggaagaagcaggcccctctggttcagcactgtctcactctctttccaatcatcgaccctggggcttggggtgtggatataaagatggacactgtcctcaccctcagaggcacctgttttggtggagacagtccatgtgcacagagtcatgggacggtttgggtgtgcatgcctctggcacctttgaagatggccaatgggaacaccaaactgaggtgtgatgattctgcttgcgataaatggggtagacggggacacaggagcacagagaggcagagcctcctgaaggtcacacagctggccacacacagcctagtgtgctccagctcctcaaggctccgggaaccccttccaaggatgcagctcagccagtctggccttgagctgcccaagccacctagaggccccacacccccaggtccagaggtccagagagagaacggggctggtgcagggtcacacagcaatcactggggggaaagcaggtctctgccggccagttttatgcctcttgcctgtgctgctgacaatgggggcatgaagccatggctctgtggagaacttgcagacatttcagcgtcctccctgagcaaacgcttatatcaggggtcactggcagagttccctctcccaggagatccggcgaagtgaagtgggtgagacgacagcagggagggatgaaagatgtttctggggtcccagagagttggcaggctccagggatgggaagtagggtgaacggagtactattcaccaccacgtgctcaggaaagga

SEQ ID NO: 470782 - DNA, 772 bp, Homo sapiens
tgtcattagaatctatgacctggaatgtgtgggggtgcagtcagtggccctgctgagcggggcactggaattctgaaggggactagagggagcttagaagcccctaaaatgatagcaaactctgcaggggctcaggccttgaagacaccaggtgcagggaggaactggtccccaattaatggagaaaatacaacaaagggaattatcaaagaaataattcaaggcagtttcctagcactaaaaaatatgaaccttcagattaaagggcctaccaagtggtcaaaacaaggggtctttgtgagatcttgcactacaaactgcagccaaggggatcccgaatgggcaagacttgatcctcatactggtgaaacctcctgagtccccagggaccctgtcagaccaggctccagcctccctgcggtctctgagagagaatgtggctagttctgccccacggctccctggcagtccagcggtcagaagtggccacgcagaacccaacattcagcctgggtgcagacactgcctctagcctcctccccaagcactctcctagtatggtaagagaataaactgaagtccctagaggccaagggtctcacctaagtggtcatatcctacagttttaagtctggagcatttctccttatagtttctctgtctagaatgttcttcccccatttcttcagctaaatcctactgctcctttaatatctggtcgtagttttgctgcctttcgaagtcagttgactctaactaggtcaccccattt

SEQ ID NO: 470783 - DNA, 1237 bp, Homo sapiens
agctccttgatcccacagtctgtccacatcccctgccttgctcacaccatgggggccaccgaccacatgctgattgatgacagaatctgtgagctcgggcaggaagaggaacgcaggcagacatgaggcagaacgttccttaacaagggctgagatgttccaggtacccaagataagtgtcctctgcagcagcttaggccttccagaagggtctcaggtgtccttggttgtccaagttctggatgtttcacaaggatggtagaaccatcacctccttgccctaaattctgcctcttcttcaatcccagcagcaaatctcagcccacacccgccaggccacatttcctgggctcagcacagtctggaagccttcccgtccctgcaggcaactgcctggagctgaagtcagagcttgcacagcaggtcatgggcagcaccaggcacaagggtccaggcagctgcatgtgcctccatggcaatgggcagcctgctcagaacctctgtgcactcacaggattcctctatagcaaagagtctggaagtgtgagggtgaagccctcccccaacctgcctggatttgctagagcgttctatttgctcatcctcatggccaacagatgtttgtggagggagatgtcagcaagcagggggctgccattgctactggttaactatgtggctttggtcaagtctcataattccttggaaccttggttttctcacttgtcaagagggggactgatgtttaccctgcagattcctcaggaattttgtgagggttggatgatgcaatatagctgaaagggcttcaagaagaacaaaacactatttatggaaggattatttcaggcttaaaaaaaggaggcctggggatggcagtatggaaaggcaacatttattgagcatctacgatgagtactttatagacttgtctcataccaccttccacacagctcttcagagaggtactatgggagtttttgcttctgattccagctgagaaactcttaacagaccacacctgccacagataatagctgtgaactctgaacaaaatatttaaaaaatcgttctcagaaggagagtaacttaaagtgggcagattccagaagggttcgcgtgggtgtttattggcacttgggagaagggaagggcactgagtaaatttcactttcttaataagtttagccggagggcaaaccccagtactcctcatgctaggtgtcttagatgggtc

SEQ ID NO: 470784 - DNA, 1149 bp, Homo sapiens
ggacctgcaaacaggccactatactacctgccaagatttgatgcagcaaggctctgggacaataggagttgtaggtttgatgctgactggctaaaagaggggcagcctggaagcagatggaggttaatgctaatgtcgctcagcacctactcagtgcagacatccggctcgcccgaggaggctgccattcaaacagccaccaattctccctggctggcgagacccaagtgtataatagcatcatgtttctaatggtcacagcaaagaaggattcagtcagagtcaaagctgatggccacagtttaaactgtttgccatctgagctgctggctgctttgccacctttagctaagggcttccaaggtgaccccaaggttgtctttatttcaggcagcccagagaggaatacgaacaaagaggagtcaaccgtccctcaagtccgggtacaaggccctcccctggttaccaagaatcactcccaaggcaaaggcaaggggcataagccctggagaagaatttttggatcagtgcaccccactttttgctcctcacacacaaacactacacataacctgcagacatcatgatagaatcatctggatacattatgaaatttcaacccaactgctcaggaggtctgaggcttgtagggtgagagaaagtgtgatttgtcactcagagacagactgaaactggaggatggatttctgataacacagtgtgatcaatgtatagcattttctgacttcggttaacaacacttcagctgttgttactcaatcttggcagctcacttcacattaacgttcatttccaaaggatcatctcagattcaagtatctttcacagactcttagcccattcagctggcaataattattgccttgttgctcaaggtgaagttctacttgttgctgcgtgacaacttccacaagtgggggctagcttcttaggtgggcacctctcacccccacttctgtgcaacatggccccccaaagcattattggtctcataaaacattatatctctccaaccacgaaaggcttctgactccgatttctcccctgaatctattcctggtcttctgagaatggcagtgagggagggctgctttcatttggattgctttgcttgcttcctggttatgc

SEQ ID NO: 470785 - DNA, 544 bp, Homo sapiens
gaacggtggatccactgacagcttgcactgtgcgtcttgaaaagctgtggacactcaatgccagcccatgaaagcagccgggagtgagactgtgccctgcaaagctacaggggtggagacgcccaagaccatgggaacctacctgttgcatcagtgtgacctggatgtgaacactcctgagcatggctccaggttctgtgggagcatcaaaggaagcatcactctaaacattcgccaggtccagaaaaagccattattgatatatcaatgcttggattcctcattttttgcctctgtcttctggacctctttggcccagtttatctggcactgggagcctgaccttgtgttctctccagcatttaaggggacacctggcttaaggcagcccctggttcttctgatggaaggtgcaaaattaataccaacactatataaaatacattcaagggtttattacttacagaccttggacagggagggtgcaacgagtcaaatggaaagagcagtcctccatccctgagtcatgtgaagcagaaataaa

SEQ ID NO: 470786 - DNA, 1895 bp, Homo sapiens
ccaacagaagaccaaagagagaagagacagtgtaagatgtttattcacatttctcccacctttccaggcctggtttcagcagtgactatattcttctactttagacaagaacttctggtgaatggaggctctaccacagctacaacttttacacagttgtgcagaggaaaccagaggctgtctttggcaaacagtgttgaaaataacattctcaaattgctacaggaagaaaatcaatgtctaattcacacattttattctcagcccaaccagacattttcttatatttatgaagaacttgaggaaacacagcagcccttcactgttctcttcaccaagttaactcatggcttccatggtgcttatatgatgcatgtgtgtctaataaaaagtcaatattgtgctaaatacagtttagcctatttttattttcatatgcattatgttaacaaataagtttatgttagtatattaggaaagtatggcattcctgacatttaatatacagggttatattcttttggtgttataatttctgttcaagtttgatttctgagaatacaccattggcctccctcaagaacaaaacatctctatatcctcagtgccttctacaatgtctgccaaataataggaattctgtaaatgctagctatgctttttttgttgatagccagcatatgcgtatagtttgaaatcatatttatttattttaaagtaaattcataattttgtcctaagatatatccagaagcaagcaataaaactaggctgactgctaagaatcaaggttgaccctcaatgtataagctttcagaatcagaatataagtaggaggtccaggaatttcattgtaaatgcctaaatctcaaagaagagctgtgtttggatctcctcccctgtattggtatatatctatgagctctgctcttgaaggcagacaactgatactctgattgctttccaaattgaaagcttcacctgctgtttgcaaacgtgttctcttctcttctgccctgttattgaacaaacaggcattgatttctatctctctcttaaaagcaacaacatcccacagataataaagacagccctgcctgcttagtgaagaatttaactgagactgatattaaaaaaaatatattaagactctgattgtttcacagtctgttggtagatagattcctgttatgaaaataatgaatctgatgtgacagatggaacaggtgtaactcactaactattaatacatagattcccagagagaaaagtatgtggaagatatttatgacagtgttacagctgaaagcagttggctaaacagacatatcaaaggtggccaatgatacttgtgcttagtaagcagaactaaactcttcttttggatgaagatcagcacttccataaaaagtaaagaaagggaaaaattttacattgctgtcaaaaataatagaatagatcctgcttaaggtgctgaatacttagtgagccatacactgaatagcctgttattaatatctatttaaaatatgtgtttcacttggattgtcagtgtcctatttatgtttatttattttaaaataccctttacatatgacctcgaaaataagtgcatgggaaatgaataaaaggagacagagagattgattctgattcatgatggaaagactcacactatctgcaaattctctgaatttatttaaaatttcgtgattaatcaatcaactaactgatccattgaatcaatgacttattgatttatttatgccttttgctcttcctccaatattatgttttatagtctttctgtcccaggaactctgataagtttacagatatacagatataaataaatcattatagggatctatttattcatgacaaatatcaattac

SEQ ID NO: 470787 - DNA, 485 bp, Homo sapiens
agccagcagtcaagcagcagccagacacattacaagtgggagttaaataataacaacttatgaacacaaataaggagacaacagacactgcgatgtacttgagggtggagggtaggaggaggaaaaggagcagaaaagataagtatcagaaatctgtacatgatgtcgccaagtcagcagaggccgagctgacgaggcaagtcagccctctggcaggcttcagcatcagagcactacgagttgatgagagttcccaggggacagtctttgtttggaatggtggtggcaacactgctgtcatagcaaagatctcagaagattcaggacctgctcctggatcagtgccatatgatcaggaagagatgtcccaacatgccagtttcactagaggaggggaggggaatgggaaaaagcattcaacttttccaagggacctccacagaggactgacttttttcttgccaatcctggagctctgatataat

SEQ ID NO: 470788 - DNA, 902 bp, Homo sapiens
taatctttctctctctctctctctctctctctctctctctctctctctccatatatctaaactagtctggaagacaagggatatgaaagcatgggagaattttcaggcccctcagctgcaggtctgttggagtttgctggtggtccactccagaccctatttgcctggatatcaccagcagaggctgcagaacagcaaatattgctgcctgatccttcctctagaagcttcgtcccagaggggctcccaccagatgccagccagagctctccagtatgaggtgtctgtcagcccctactgggaggtgtctcccagtccggctacacggggagctgtcaggcagggacgtttaagtctgctgaagctgtgctcacagctgtcccttcccccaggtgctctgtcccagggagatgggggttttatctataagtccctgactggggctgctgtcttttgttcacagatgccctgcccacagaggtgcaacctagagaggcaatcggccttgctgagctgtgactgctccactagcagcgagaatttcaagccaatggatcttagcttgctgggctctttgggtgagggacccactgagccaagcaccagagggaatctcctggtctgccaattgcaaagaccatgggaaaagcacagtatctgggcaggagtgtacctttcctcctggtacagtgtctcacagcttcccttggctaggaaaggaaaatcccccaaccccttgtgcttcccagattccagtatatcctacagctttggcatccttggcagtgactacctcacaaactcaacgtgataactctatcttttgttcaaaaaccacttatgaaggtgtcagctgggtttggtgactcatttgtaacaaataaagtaggagaagaaaactc

SEQ ID NO: 470789 - DNA, 890 bp, Homo sapiens
cctccacctgacctcagaggacagaggggactcagagcccttcccagggctttgcaacacttcccagagcccatctgttttctttttccacatgggcttttaggagctgaaaattttcgcctattggaaaatcctggggaggggaaggggtatgattttcatgacctttcctctcttttttcatgttgaattagttgtaagtcaccttgaaaaaaaaatggccctggactctgaaggccaggagatcccctctagtcacttctgtctgagcattggcagttgcgctgtgccaggcagggaacagcatgaagcaagggaggagccgacgacaaacagctggtctacccaggtcactgcccaggaagcccctgtggacttagccacagctcagggccctgagatgaccaggatggtgtctcccactctgtgtgtgctggatgacagtggagggagtagtagaatggtgttaccaaagtccctggagagctggagccatgaaggaggggtggtcctaaagaggctgcagttccgccccatctgggaggtgaggagcgcctctgcccggccgccccatctgggatgtgaggagcgcctctgcccggccaccaccccatctgggaagtggggagcgcctctgcctggccaccccatctgggatgtgaggagcacctctgcccggccacccttcgtctgggaagtgaggagcgcctctgcccggccaccccatctgggaagtgaggagcgcctctgcccggccgccccatctgggaaatgaggagcgcctctgcccggctgccctgtctgggaagtgagaagcgcctctgcctggccgctgtgcaatcttccaagtgtgaagtgacagcctttctgcaggtgtacccaacagctcc

SEQ ID NO: 470790 - DNA, 1277 bp, Homo sapiens
cccatctggactcaggaagtcctgccatttcagcaggttgaggttcctgggcccccaggctccaagtagaccagagactgcagagtggtgccaacacagccgcctgggctctatccgggctgctggcatccgtgccaggttctgtagaggtttctgcagccccaccctgttctcttccagggattttgtggggtacagcctccttcagcagtaatgtcagccctgagggtggtccctgacagcaaaagtggtggttggcccagtgtgaccgaagggtctggaaaggagcctggaaagtacccccggcccgacaatgggggcttcagaggagcctggatggcaggacacagccccctctgtgaagcggagttgaccgccaagctggagcacacacagcatcacctacagacacccagcatccctggcacacagcgtgctgtggcaccaaacccacccccaggaaggcaggctctgtggctggtccccacccagcctgctgagtgtttaagtgccctgggggtggacccgcccctccacactcccaaccttggtggcctcaggacagctgtactccctacccatagcactactgtcctccctggccagcccccagtcatggttggctcccgccatagctctgtctctcctcctcataggcagctgctccaagagccgcagctctcaggaccgcccctgccaatggcccgtctctgttgtctctgtcttcggcccatcctgatgacggagcctcctggaagcccgtccatcgcagctcctcagcgatgctctggctcagactctggtcctctggctcctccaggccacagacgcctttcccctgccttctgcctccccgactgtgctgtcctctgggctctgaactctccgtctctcagggagcccttcatctccctgggggaggggcccctgggacaggggaatcctgtttaaggcccttccctgcctgccgcaccagtctccttcccttcaagtgttccttcctgtggccctggaaaatcccttcatggggacagtgagggatggggttgaattggaatgggatcctttccctcagtccctgtttctctttggaaccaacctggaaaacagatttgtttccaacataaaaatctagttgagtcactccccttttcaacaaccttcagtggctccctattggcttcaggataaaagcatctttagaatgacataaaaggtccttggtgatccagcttctgcctactctccaagcacctctcctgcctcttggccacatt

SEQ ID NO: 470791 - DNA, 1517 bp, Homo sapiens
cacgagtcagtggcagggccaggactaggacccacaggaggggacaagtttggatggcaggagttggcctgggtgatccctggagcccggtccagtgctcctatttcttaggacctggcaacgcaggtctagcctctgctcgggaagatgaaggaaaggggcaggcgccctgctccctggctgcgctaaggggtcactggcggggtcttttctcacggtgaacctgtctggagggtggacggggcaggtgggagggcccgtgtcagggagcgtccaatgccctcgcgccatgcaaatggcacgcaaatgacccgcatgcggccctgcccaccgcagcttcccggggcgagggtcttcgcagcggttctgaatagaaagggcgctggggacgggggaggccgtccagagagaagcagcactccccaccctgccagggccaggaccccacttttgtggaagggaggagcgagtcggccctaatggctcatgattcatcgctgggctcttgtctgagctaattggctgggccagcgactgattcatggcagggagccgggctctcggggacccccgtgtccctcccccgcgcctcccgcccaggaaaggctgcgtgaggcttttagacccaggatccgttccaagggaccgctgcccggcatccatcacggctgacagactggggatcggggtgggggaggggacgccgacacggagctgccatcggatgcgacggaccccaccgagcaccccagccacggagcggcttccgcgggcagcctggggcctgggcggggtcctagggagtgacactggggacatccaggcagcctccgcagagggagccctggacttgcaacagcaggggatgaatggagaatgcagcccgcagcgaggcaccaccagcctctccgtggctccagccaaaagctcaggcgtcatctctactcctccctttgaccctcagcgacagtcagttgaagccagctgctatgttgtaaggacactcgagcagtcctatggggaggcccatgtgctgtcaggatcacagccagccaggaatggtgtgggatttggtgctgctactcagttttcggatggggacccgaggctcaaggagcgggtagtgatgtttccaaggttaccctcggacagtggcagggttgcaatcagaactcaggtcatcttaactcccagtcaagagctcagtctgcaaagactaagtcatcgcaggagtttggtgctgatttctaaagtggcaggagagccaggggaagggcggggcgttttggctcacctgaggcccggctgtcagtccgtgactccctgcctccacggctctgaggaggccccagcccatgttggtgagcgagtgctgtgtgtgaagaatgggccccgtcagcctgagagggagaggctacattgagccctcacacgaatccatgtagtggccaggcgggacactatgggtggggtttggagaagggaaaaacttccagagacagctcttcaggactggt

SEQ ID NO: 470792 - DNA, 1438 bp, Homo sapiens
ttagaggaagaccgtggggtgcggggaacgatggctgagctcgtgccatgcccaatggacagttgctagtacaatcaccccactgtacagataaggaaatcgaggctcagagaggcatagtgactctcccaagaatgataaatgaacattggtctcaacttcaagtcaccagctgcacagttcctatccagagagtcagcctttcctttgaagctttgaacctagacattgacttctcatctacaactatggaagtcctggatggcatcttcttccgaaagaaggctgtttcatctacactggaaatctatttggggcctgttttgccttcatgtgttcactggagtagcacttttaatttccttcaagaacttttcctttacacttacaacttggctgtttggcacaagaggcccagcttttggcctggcttggctttgacatgctgtcctcgctacactccattatttctagcttttgatttatagtgagaaatgagagactctttcacttgaacacttcaggtccattgtagggttattaactggctcaatttcaatattgtcctgtcttggggaatagagaggtccaagaagaggggaagagttggggttttgggcaattataaatcaagctgctgaaaacacttgcatgcatgtgtttgtgtagacatagttttcaaatcagttgggtaaatactcaggagtgggatggttggatcgtatatttagccttatgtgaaacttccaaactgccttccagtgttctgtaccattttgcattcccactaacaatgaatgacagtccctattgcctcatatctttgtcaaccaattgatattgttagtattttaaattgtagccattttgataggtgtgtagtgatatcacattttttgttttggcttttgttttaattttcaattccctgatgaaatatgacatggaacatcaaatgttaatttgccatctgtgtatcttctttggggagatgtctgttcagattttttgctgattttttaagtgggttggtatgtttttatattgttgagttttaagagttatttgtatattttggatacaagtcctttttcagaaatgtgttttgcaaattttttttgcaatctgtggcttctcttcattttcttaacagtgtcttttgaaaagatttttattttgatgaagtccaatttatcaacttgttcttttatgaattcctggttttgttgtcatatttaagaaacctttgcctagcccaaggccaaatatatttcctcttaggttttcttctggaagttttataattttaaattttacatttggcctatgacaaattttgagttaattttcatatatgaaagtcccccaggctctgcccagttctttctccctgtgccacagcctgataactctctaggcaggaagctggagaaatctt

SEQ ID NO: 470793 - DNA, 1022 bp, Homo sapiens
tcctggtcattcaagggcagagtctagatgagaactgctctagcgctcattcctggttctagctgccctgaactctggcctctaggctccctgttcattgttttctggcctgtagctaaggggtctggacagcaatcaaatcttccctcttccctggagggagatggtatatcttctaaggctgtttgctacacaagcatccttgaaaagatagtgtggtacaaaagctgtcaatgtctctgctcagaaggcctgcagaattgtgggagacccacggaaaatgtctggcagatcagcaaaggagaagacattgaaggatgcaatatttgtattgatttacccggatttccttctgatcatcatcctccgcagtacccttcctcacccaaatccttctttctggaagttattatgttctacagggtagcagacaggaacaccacaccctgtaataaaaagtcagtgtggtcattccgtgagaggtggccagctctggtgggggccatgggagagcaccacggattctgcaaagtgaagctgaatttctgtttgggggtccatgtggttcaggggaagttgactgctctgccagctatgatgggggcccatgactggtctacgcttatcaatggattccatgctgctggtcacagttcaggggattttgattgggatggaattgaatctatagatcaagttaggaagaatgctcatcttgacaatattgagtctttctatccatgaacgtgagacatctctccatttactcagttctttgacttctttcatcagttttgcagttttctttatttagatcttgttcctatcttgttagatgtgtaaataagtatttctcttgggggatgctaatgtaaatggtgctgtttttaattttatgttccacttacttatagctgattgtctatttctttttgtgtgagttttggcagattatgtctttcaagaaatcattccatttcatcttgattatcaaatttgtaggcatagagttgttgttagta

SEQ ID NO: 470794 - DNA, 879 bp, Homo sapiens
gatggtgcgagattccagagagaaggtcagagccctgcttttcttcctgccaccctgatactgttctccttcctgcccagctgctgagctgaatgctaatggacccaggctcagtctcagcctccagtgctcttgtctatactcgcagcttctttctgtcctggcgtatgattggaagattgacttcatttgcaggtcatttttaccgtaaaggggaatcgataaaggaaggtctccctcaaccaatctgcacccaggaaatgaacccactggcaaatcccgacatagaagctaaaactgagtttttcattccagcggcagccgggagtcctggacctgctcaccttcagcaggatatacccttcctccctctgccttgggctcacagcttctccaggacccccatttcactcagcgagaaagccaaggcctttacaatggacttcgagactctatgggacctggcgctcagccacctctctgacccttgctactgccactgccccctcccttaccctgcgccggccacgccagcctctcctacgcagggactggatgtgaagttttccttcaatctggttcactcctctcccagtgaggttacccacgaggccacggaaggaactgtgaacataaaccagcaaaactgagaggataaagagtccccagggctatcagcccttttatcttcgcctttattccacccctctttgacctcagactcaagaaatctaggattttccccagccatcctttgcagatgctgttctcatcttgcatgccctgaatttaatgaggatgcatctcatcttctaccatggttttgatttcagctaaactttttaaatggtgctaagaaaatatcagtctgaatcagtt

SEQ ID NO: 470795 - DNA, 5787 bp, Homo sapiens
aaaaattgtcttccacgaaaccggtccctggtgccaaaaagaaacagaatactgattttagcaggacacattgccatgaagaatgtctacttcgaagctaactgtggccacgtgcagcacttcgggtctcctcccaagactgtgggtctttataggaccagagatgttgcacaaggtggagctctcctatttgggaggagccacgatcacctcctggttctcctgctgggacttgctgctggtacctgctggcaggaccccaattgttcccctactccatcatggttcctggcttcagcttgcatgtcctcagctcataagatgttggggtccacgctgggctatggctcattccagaagctgaactcaaggagcaattggtgtctcctggacaacagcatccagctgcactccttccggacctccaggtgcagtgcctggtcctgctccctacagcacgtgttccacttgcccatgagggagcagggtagtcctcatcctagtgcagtatggacagtgctgcctccatcagtgcctactataggcatccgggcactcaggcttctcactgtgaaactggatcttgtagaggttgctggtctccttcttggacagcagggcagagtgggcatccttccagggatccactttgtgaacaaagagggagcagaaccagtagccttcgttgtccttgggatagaaatgcagcacagccgcagctgcaacatccccagcacaggcctgggccttccagtagccactgtgacactgcagagatgctgcacagccacgaagccatgggtaaggtgatatcacattgtggttttgacttgcacttccattataattagtgatgctgagcatttttccatatgcttgttggggccatttgtttatcttcttttgagaattgtctattcatgtccttagcccactttttgatgcaattgtttgttttttttttcttgctgatttgtttgagttcattgtagattctgaatattagtcctttgcctgatgtatagattgtggagattttctcccactctgtgggttgtctgttgactctgctgattattccttttgctgtgaagaagctttttaatttaattaagccccatctatttatctttgtttttgtcacatttgcttttgggttattggtcatgaagtctttgcctaagccaatgtctagaagagttttcctgatactatcttctaaaatctttatggtttcaggtcttagatttaagcccttaatccatctcgagttgatttttgtataagatgagagatgaggatccaatttcattcttctacatgtggcttgccaattatcccagcaccatttgttgcataaggtgtcctttccccactttatgtttttgtttgctttgtcaaagatcatttggctttttttctgggttctgtattctgttccattagtctatgtgcctatttttataatagtaccatgctgttttggtgactatggccttatagtatagtttgaagtcgggtaatgtgacgcctccagatttgttctttttgcttagtcttgctttggttatgtgggctcttttttggttccatatgaatattaggattgtttttttctaattctgtgaagaatgatgatggtattttgatgggaactgcatggaatttgtagattgcttttggcagtacggtcattttcacaatattgattctacccatccatgagcatgagatgtgtttccatttgtttgtgtcatctatgatttctttcagcaatgttttgtggtttgtcttgtagaagtctttcatgtccttggttaagtatattcctaagtattattttttgtaactattgtgaaaggggttgagttcttgatttgattctcggcttggtcacagttggaatatagcagagttcctgatttgtgtacattaattttgtaacctgaaactttgctgaattcatttactagttctaggagctttttgatgagtctttagagtttttccaggtatacgatcatatcatcagcaaacagcaacagtttgacttcctctttatcaatttggatgtcttttatttttctctcctctctgattgctgtggctaggacttccattactatgttgaatggaagtggaaaaagtgaacatccttgtcttcttccagttctcgggggagtgctttcaacttttcctcatttagtataatgttcctcatttagccgtgagtttgtcatagatggctcttattaccttaaggtatgtctcttctatgctgaatttgccaagggtttcaatcataaagtggtgctagattttgtcaaatattttttctgcatctattgagatgatcatgtgatttttttgtttttaattctgtttatgtggtgtatcacatttattgacttgtgggtgttgtatcagtcggggttctctagaggagcagaaaagtaggatagatgtatatataaaggggagtttattaaggagtattgattggctcacacaatcacaaggtaaggtcccacaataggccgtctgcaaggtgaggagcaaggaagctagttcgagtcccaaaacctcaaaagtagggaaactaacagtgtagccttcagtctgtgattgaaggtccaagagtcccaaagctgaagaacttggagtctgatattagtgggcaggaagcatccagcgtgggagaaagatgtaggccagaagactcagccagtctagtccttccatattcctctgcctgtttttatcctagctgcactggcatctgattagatgatgctcacccaaattgagggtaagtctgcctctcccagtccactgactcagatgttaatctcctttggcaacaccctcagggcgcacccaggaacaatactttgcatccttcaatccaatcaagttgacactcaatattaaccatcacagatgttaaaccatccctgcatccctggtatgaaagccacatgaaacatatctttgttagtcaaaataggaaccattacaagcaacacatttttgtcaatgagaaataagtttgtttattcctgtagcgtaaaaaatccttgcttcaggattgaaacgaactcacggaaagcattttctgcatcctgctggttgtggaagccttttccctgcaaaaaattgtcgagatgcttgaaaaagtggtaatcaattggcaagaggtcaggtgaatatggcaggtgaggcaaaactctgtagcccaatttattcaacttttgaagtgttgtttgtgtaacaagtggtcggatgttgtcatggagaagagttgggccctttctgctgacaaatgttggctgtaggtattgccgtttttagtgcatctcaccgattcgctgagcattcttctcagatgtaatggttttgctgggattcggaaagctgttgtggatcagactggcagcagaccaccaaacagtgaccatgacttttttggtgcaagtttggcttttggaagtgctttggagcttcttctcagtccaaccactgagctggttattgccggttgtcatgtaaaatccacttttaatcacacatcacaatccgatcgagaaatggttcattgttattgcatagaataagagaagatgatagttgaaaatgattttttttttatttttgctcagttcatgagcttatcgagctttttcacctttccaatttgcttcaaatgccaaacgaccatagaacggtcgacattgagttctttggcaacttcttgtgtagttgtaagaggatcagctttgatgattgctctcaattggtcattgtcaacttccgatggcaagccactacactcctcatcttcaaggctcttgtctcctttgcaaaacttcttgatccaccactgcactgcccgtttgttagcagttcctgggccaaatgtattattgatgttgcgagttgtctcccctgctttacgacccattttgaagtcaaataagaaaatcgcttgaatttgctttttgtctaacatcatttccatagtctaaaataaacataaaataaacagaataaacagcaagtaataagtcattagaaaaaaaaatgagaaatgcccattaaagtgatgtataacataacacatttatttaagaatgtattccaatatcaaagagcaaattccaacaatgcaaaaaccacaattacttttgcactcacaaaagtaattcactaaatgtgaatttagtgaaattggctcatggtgttcaaaacttctgtatctttattgattttcttaatttttctatcagttattgagaagtgagaattgaaacatctaagattgtggatttgtctattttttccatgaaattacctcagtttttgcttcaagtattttaagactcttattagattcataaaattttaggattattatgttctcttgatgaattgatccttttcccattacaaaatcatcttctttacccctcataatttttttggctctgaaatttaatatagacacataagttttcatttaattaatgttagcatgctatatctttttccatccttttatttttaatctacttgtgtattttatttttaaggtgtgttttttgtggacagtgtgtaattaggccatgttttttattcagtctgaaatgttttaaattggggtgtttagaccatttacatttaatgtgattattactatggccaagtttaaatctgtcatcttactatttgttttccatttgtcccatttttttattttttgctctttttctgccttcatttggtttaagcaagtatgttttatgattttatctcctttgttggtttataaaccatcactttttgttttgttaatcatttcattagtttattttttatatatgtatatatatatttaacctgttatagtccacttacaagtgatatgatgccattttaagtatggtatgggaaacttacgatagcgtagttccatttatccccacccaacttttgtgttcatgttattatacattttccttttgtatatgttacaaaccctgcagtacattgttattatttttaattacacaaacattatctttaaggtttaagtgataagaaaatgtcatatatttacatatgtagttactatttctagtgctctttattctttcgtgtagatactgattttcacttgatatcattttccttctgtccagaagacttcttctaacatttcttagcatatgggtctgttggcaatgaatttttttaacctttgattttgaaagacatgtctgttaagtatagaattctagtagacagtattcatctttcagtattttaatgatgtttctctattgtccccttgtttgcactgtttctggcaagtctactgccatccttaactttgttctctgtatagtaacatctttctctgtagttgcttttaagattctctctttatcattgatttttagcaattcgattgtcatgtaccttggtgtggtgttctttatgtttcttgttcttgggatttattgaggttcttggatgtgagtttatagtcttaatcaaatttggacattttgtgaccattattccttaaaatatttttctgccccacccactactctgcctgtcttttcttctggtgactccaattacatgtatataaagccacctgaaattgtcccatagttcactaatgctatattcatttctttctattttttcttctgtgtgttcatttttatagtttctattactatgtcttcaagttcaataattttgtattctacaatgttt

SEQ ID NO: 470796 - DNA, 701 bp, Homo sapiens
gctcttcttgagactgaggttgccacatccaggaatgctcacggcaaactcgtctgtggggacaccaaacccacccccactgccaagtctccaacccttgcccctggcccctgccaggaccccctaccacaccatgagggtcctctggtaggccttgcaggagcgacacggggcagtgagaagattctggcttctggacagccgtgggtcatgagcttccctggaaaagggatggttgcctagagatgacgccagggtctcttcccccagacatctgccagcgctggcatcagggcgtgtccctgggagccatcgatcagcactgggccaggggattgcagcctgcgggccctgtgccccacacccctagaacaaatctgctcacaaaagaattggcagatgcagcagacttttaccaaagagtcagcgggggaccaccagaggggcttgatgcaggttcacaaaatggtggcattagcatgatggaagatggagatttttggcgctctgacatcaaacgtcacctactggacactcacacagaccaagttgaaggattgatagaactccaaattctccccttctataacccagaggaattcaaacattccccagttaccataccagcaaacttcattcctaacccagccagctttgcagatctgcagatcctctgcaagggagaataggggactctcctg

SEQ ID NO: 470797 - DNA, 786 bp, Homo sapiens
tgcagctgccctcccacatcctgtccactttctctctctctcctcatctcgcttcatgccactgttcaggctcctggggctccacgtggacgactgcgtctgtgttctacggcagttacacacacgcagtggtattcacaagcggttttgtggactcaaaggttttctccctgagaggcataacccaggccagctgattcatcagaatcagctcatagatcgagtgtacaagggaattcccatgaacatccggggcccggtgtggtcagtcctcctgaacattcaggaaatcaagttgaaaaaccccggaagataccagatcatgaaggagaggggcaagaggtcatctgaacacatccaccacatcgacctggacgtgaggacgactctccggaaccatgtcttctttagggatcgatatggagccaagcagagggaactattctacatcctcctggcctattcggagtataacccgagggaggttctggccaaggtgggctgggcagggcactgtgacaccgagcccatcccccacatgacccagatgaaagtcgagagtgtgggcctctacgaagaaactaacaaggaagcaaggggacctgttccacccccagggttcctggagattcctggagtggaagtcaatgccctggctcccaacggacctggatatagggggcccttggttcccccattatgattttgaacggagctgctgggtccgtgccatatcccaggaggaccagctggccacctgctggcaggctgaacactgcggagagg

SEQ ID NO: 470798 - DNA, 549 bp, Homo sapiens
agagctccagcaggacactccaactgagccccaccctctctgtgtgcaggtggaaatgaaggcctgggggcggggggaatggagggaggcataaacttcaaggtcacacagcgaaccccggtcagaacgggcctaaacgtagggtttccgctcggctctctagggagctgggagcccagcccccgcctacccccacagccgcgacggaatgaggtctcaccgcaggccgctactgccccgcgctcgctcactccgctgagagctccgcgctgctgggccgctcgcacagagcccgcagctgttgtcccggtgtcactggcgacgggcatcggccacttccggtaccacgggcggcactccagccaaatcaaggcgcgcgtcgcacatccgctggagagaacaggtggtcagcgcaccgacgcccccttgccttttccggcttgcttttcgccggttctagccctagcccaagttccacgtcgccgccgcctgccgagccggctccctggaacagcaaagtagcacccgatcgatgcccacttcagcccc

SEQ ID NO: 470799 - DNA, 729 bp, Homo sapiens
gaagcgctgagccagcacgatgcacataagggaaggaggaaggtggcttgagggcagtgaccgagcggacagcggaagcccatttcaggagccccggtacccgagctcgggcccctttccaatcccccaggcgtccttcccatgtccttgtctcctagtcctgggaatccacggccactccactctcctgcagtaccgcggacaagaacaccatgtactcttcacaggcaggtgtcttctggtggacccaactctgttggtacttgtcgtctccaaaaagtccccaaatgcgctagaggccagccagcccggtatccgagagcgcaggacctcggcagccgggggttgggctcgagggctgagggcggcgcgccatgcgcggattagctgccatccggcgggtctttctgccggggaccagtggggtcggacgctgagggccgaggaaccccgcccccccaccgcaccgggcgggctctggggcgtccgcggaggctcccgcgtgcgtgtgcggggtggggtcggggtggcagttgggggcaaatcaatgggcctgtacttttgtctctccgcctgctgggatttgcagtttgtgaggacgtttcacatctcacggatatttacggagtcccttccacggcccaggctcttctggacaccaaaccaggcctaatataactatttaatatctaattattacaattaaacttatttgcagtcgggaagcat

SEQ ID NO: 470800 - DNA, 3689 bp, Homo sapiens
cccggtcgtatccctcggactgtctgcccgacgcggttgccacggtgccgccaagcgcggctgtcgcgctgccccggtgtcagcggagatggcggcagggtcgggtgggagtgggggctctgggggaggccctggaccggggccgggcgggggtgggggccccagcgggagcggctcaggaccggggtccaacgggggtctgggcagcggcggggaactgcacccgcgcactgggcgcttggtgagcctgtcggcctgtgggcgtacggcgcggcggcagcagccgggccaggagtttaaccacgggctggtgttgagccgagaacccttgcgcgatggacgcgtcttcaccgtccgcatcgaccgcaaggtcaactcctggagcggctccattgagattggggtgacagcgctggaccccagtgtgctggactttccaagcagtgccacgggcctgaaggggggctcgtgggtagtgtcgggctgctctgtgctgagagatggacgctctgtgttggaggagtatggtcaggacctggaccagcttggtgaaggggaccgcgtgggcgtggagcgcacagttgctggggagcttcggctctgggtgaatgggcgggattgcggtgtggctgccacaggcctgccccctcgtgtctgggccgtcgtggacctttatggcaagtgcacccagatcaccgtgctaccccctgagccaggcttcagcccccctactcccatccccacacctcccctcgagcccttggcccccactgaagactctgccttggctgaacaggggacctctgcagatgaagccttcatggtgtccccagcgcaggcccggccggagacgtttcctaacagccttgagtcgcataatgactttgccaacatggagctgtctgaggtggtgagcaacaccatcctgtctgcctacaatggagggctcctgaatgtgaacctgagctccccaccggcaggggaaggcctgggatctagcggtgctgccacctcgcccattctcacttccaacgatgccctgctctttcatgaaaagtgcgggaccctcatcaaactcagcaacaataataagacggctgagcgccggcggcccctggatgaattcaacaatggggttgtcatgaccaatcgcccccttcgggacaatgagatgtttgagatccgtatcgacaagcttgttgataagtggtcaggctccattgagattggggtcaccacccacaaccccaacagtttggagtacccagccaccatgaccaacctccagtcaggtaccagccccgggcaggggcgggggtgcaggcctggtgttgctgaggggaaggaagccccgtacccgaacccaagtgtccactatcacccaggcaccatcatgatgagcggctgtggaatcctgaccaatggcaagggcacccgccgggagtactgcgaattcagtctggatgagttgcaggagggtgaccacattggcctcacaaggaagtccaactctgccctacacttcttcattaatggtatcgatcagggagtggcaacccccttgacgcccccagtggtgtatggtgtggtggacttgtacgggatggcagtgaaggtgaccatcgtccacaataacaaccacagtgaccgtctccgccgaaacaacgccatcctgcgggcgctgtcccccgagggtgctctccgccgtgctgcccctgccgcccaggcagaacctgagcgcctgctcttccaccccaactgtgggcagaaggcagccatcacccacgagggacgcactgccctgaggccccatgccaccgatgacttcaatcacggcgtggtgctgagcagcagagccctgcgggatggagaggtgttccaggtgcgcatcgacaagatggtggacaaatgggctggctccattgaaattggtgtcaccacccacaaccctgcctacctccagttgccctccaccatgaccaacttgcgctctgggacctggatgatgactgggaatggggtgatgcacaatgggacgaccatcctggatgaatacgggcacaatctggaccgcctcaaggcaggggacacggtgggcgtggtacggcgggaggacgggactctccacttctttgtcaatgggatgactcagggccctgctgcctggaacgtgcccccgggcgtctatgctgtcgtcgatctctatggccaggcggcccaggccaccattgtggacgacgtgggggccgggggctctgacctgcgcttccatcagctgcacggcagtaacgcagtcatcactaacgggggccgcaccgccctccgccacaactgtcgcagcgagtttaatgacgccatcgtcatctccaaccgggccctgcgggatggagagctgtttgaaattgtcattcagaagatggtggaccgctggtcaggctccattgaggctggagtgactgctattcggcctgaagacctggaattccccaacaccatgacagacattgactatgacacatggatgctgagtggtacagccatcatgcaagacggtaacacgatgcgcaacaattatgggtgtgacctggatgcgctgggcacaggtgcacgcattggcatgatgcgaactgccaagggcgacctgcactacttcatcaacggccaggaccaaggcgctgcctgctcgggcctgcctccggaggtgtatgcggtagtcgatctctatggccagtgtgtccaagtgtccatcaccaatgccaccggccccatggacaacagcctggcgaccagcaacactgccaccgagaagtccttcccactgcactccccagtggctggcgtggctcaccgattccacagtacttgcggcaagaacgtcactctagaggaggatggcacgagggcagtgcgtgccgctggctatgctcatggccttgtcttcagtaccaaggagctgagggctgaggaagtctttgaggtgaaagtggaagagctagatgagaagtgggcaggttccctgcggctggggctgaccacactagcaccgggggagatgggacccggggcaggcggtggtggcccagggctgcctccttccctgccagagctccggacgaagaccacttggatggtatccagctgtgaagtgaggcgtgatgggcagctccagaggatgaactatggccggaacctagagaggctgggggtggggagccgtgtgggtgttcgtcggggggcagatgacacgatgcacatcctggtggatggagaggatatggggcctgcagccactggcattgccaagaacgtgtgggctgtgttggatctctacgggccagtccgcggtgtgtcaattgtcagttccacgagactggaggagtcagaaggcacccagcctccttcccccagttcagacaccggcagtgagggcgaggaggatgacgagggcgaggagcatggcctgggaggccagaatgaagtgggtattatacccaccaccctcgagttcctggagaaccatgggaagaatatccttttgtctaatgggaaccgtacggccacacgggtggccagctacaatcagggcatcgttgtcatcaaccaacctctggtgccccagctgctggtgcagaagaaggtgcctttttgctacaaactgaaagatatgtgaaagttagccagctgagccc

SEQ ID NO: 470801 - DNA, 785 bp, Homo sapiens
ggttacatcatggctgttggctgtgttacttccttcctggagccttgatgttactatctccacaggcgtatgaagggagggggcagtgcacagcctccccaaagccaaggcttccttcattggaggaagcagacggattaatcttcagatgtagtccttatcctcccatcatgcccatgccaggagaagctatcagtgatagagaagagaataagagacagctggttggacatgatacctacaacttatcaggaaagaccatgactttctggactcagaagatccatttctttagctataccacctccactgcctctttttctaccgtccaggttcttaatttctggtaccttggctttggaataaagtttaaacacagtatccatggaaccatgcacattactcctctctctgagggaaggaagcatctgtacgataatgcaggaccaatgatctagaagttgagtgttggttgggaaagcattgaatctggagtcaaaagaccaaggatatttgcatctttggagaccctttatgtaagatgtgaacagtaatcctgtgttcttaagaaaattttacactcatagagatcaggagctcagctctggagtcaggctacctgggtaatcttgggcatgttactgtatttctccctgaagtctcaatgaagaggaaataatacccatttcacaagtgtggtcttgagcaataaataagataaagtatgcatggtacttaacatgtacctagcatggagaaaggaattcaatgaatattcgttgcta

SEQ ID NO: 470802 - DNA, 1552 bp, Homo sapiens
caccctgccctgggccagcctacaacatggatgcctctttgtccctcagactccagcatgccacgtctttacccacacggaagcaaccctcagccttcgtgggctctgacactctgcctggggccaccctaccctcacctccccacatggacgtgctcctccactcaggctctgaggcaactgctggatatttcctgaacatccagggacatgagaagccttttctgtacatcatcccatgtggccctcacagacaccccaaggccttgctacggcctctgctctggtggaacttccggatgaagaggagactcacccagcgcttccagaagctggggcaaagaggagcacacacgaccacctgcctactgagcagctcacacttcctccaatggagccaccacaaggtaccggcctccagggcaactgcaggcaatcctggccctcagggccttatggcataaaagggagagaagccatgaccccagcaggcctatgcagacacagtgagagaagaggcccagagaaaaagctatggacgtttagatccagtggagggatctgagtgggcttcctggaggtgactctgccccccgaccccattaaacctttaaattaacttcagctccaccccgagctatagagagtgccccaaaataaatcctaaattacatgctgcttgggggcaaccacagttctccttcctccctctccagcaagcagacccgcccgacaccgtgctgagggggctcccccaaaatgggctatttatacagctcctgctcccctgtttgctctctggccctgttgtccttgagtgaggcccaagcaggctatacagctgtcttgggagggtgaagggagtgggagaggctgcagcctggcccctgctcagtgccctctctggaagcctgctccttggccagcagacctggctcccccaggtccagcctctacctgcccgctcctcccgtccccttgagggggctttgcttcaaaggggtggagctagggctcctcctcccttcagtcacagggaggggagggtggagggggcggcaaggaggtggaccgagaaagagccggccacagagatgtccagggaatggggcagggctgggtggcagcatcacagtgtctggagggccaggctgggcctgcgccccactctagtctaagccccagaccatggaagggctccccttcccatggttgtcctgaatccgcagttcctttggatctgaaaagttcttttaggtctaactacaaccccagtaacatttgggtgacgtgccaaacagaagatgctggccttgtccaggaccctccttcctctagaacagcccttctctgctcagtctaggggggtccatggtgctcccacccccttctgacctcacccaccaaaaatccgagggccctggggccatgatgaatgctaacaggccctggtgttcttggcctggcctgggaccacccacttccaggctcctcatcttgtccccatctgcaggaaggaacgtagggcagtttggtgtcatggaactggggg

SEQ ID NO: 470803 - DNA, 2321 bp, Homo sapiens
ggggagagacacagaggggttaaatataagacagagaacatgactgggagagatgagggagaagggtgagaggcagagagcaaggaaagagaagaaacgcccacgacgtcgggggtgtttttcaggggtcaagacagattggcgacacagcaggaggcgcccaaggacatgacgttgagcctctcagggtcccccttggccgggccagggagcagcgccccacgctccatcaccccctctccccctcccgcggtcctggctgcactgctcctgcctcgccctcgcccagcgcccccagcccacaagccccggccgcgcccctcccggctcccgggggcacccgcgctgggcgacgctgccacctgccggccgctcccggaagctccgcgcctggagtgctggaggcggcggccgcagggggctcagaatcaggcccctccgcactggggcggcctccgcggggtctttccaggaatctggatgggcctgctcgcccgcgccccggcgggcctggcagaggaccagccccagctgcggaccccggggcagtctaaaccctggggccttgagttcccacccagaggtccagataagaaggggcttccacgtccccttcccactcccgccgcccctccctgccccgagtccgcctctcccggtgcagctccgcccccatcccgaggcggggccccataggtggagagaagtgggagaggtcgcagccccgccttctctacacaggaaagctcagtggcccccaagccaggatgtcccaagcttgggtccccggcctcgcgcccaccttgctgttcagcctgctggctggcccccaaaaggtcagccctgggtgttctgaaagcaccgttctctgacccctcatactccatgggcgccagcgagaactggctcttcctggacatgccacgtggcctctttccccgcacctccttagagttggatgaggagtgtcatggccgctgcaatgccccttccccacacctgcctgctgaggagaacgagctcttccctggccccgtgaggatcttcgtcatcatcttcctggtcatcctgtccgtcttttgcatctgtggcctggctaagtgcttctgtcgcaactgcagagagccggagccagacagcccagtggattgccgggggcccctggaactgccctccatcatccccccagagagggtcagagtatccctttctgcgcccccacccccctacagtgaggtgattctgaagcccagcctgggcccaactcccacagagccaccccctccctacagcttcaggcctgaagaatataccggggatcagaggggcattgacaacccggccttctgagtcacctcctgcctggaatcttgccatcagcaacctcctccccagtgcctcctggatcaagctagagactgctggcaccccaggaatgtccctgcccatcctgccgtgtctctgttcattcttggatttaacttattactttttctgcttctgtttccaccccagctgcctctcttgtcctgaggccttttaaaagaataaataggatctgtagcaccaaccctgcaaagcatccatcacttattgttacagagaaaaggcaagttgcggaactgcctatgatctcagtttgtaaggatataacccacacatattttattttatatatgtatattttttctttgcaaatatgtagataagatctagaaggattgatggctgccccggaggtctgtcttggggtctccggtcttcatctttgttcattcccatagtggctgtcatcctgatctgcggcttcacagaccatctctggtctgatgaatctcaagacttaatctcccgccgagacttctccctgggactcagattcacatatttaactacctcacgcctcctcttggatgcctaatgagcatctcccagccaaaagcaggctcgaatttccctccaccaccccctcaaatccagtccttcccaaggtctcctatcataaatagatgtcgctccccattcgcccagctgtgtaggctaaaacactaagaaattattgtgatttctttttccctcactccatcatcctgacagcgctgcctgcaaaatagacctaggcccacttattcccatttcacggttacagccctcgaccaagccaccttcatccctagcccagcctatcctaatgaactacctgatttctgcctccaggcttgtctccatctcaccccctgcagtttatcccacacactgcacttagggagatctttctaaagcgcaaacaagacttgttattcccgtgcttaaaatcctcc

SEQ ID NO: 470804 - DNA, 611 bp, Homo sapiens
tgccaggagtagggggaccacagaggcaagtgggcgatgccctcgagtggaaattttaaaataccgttcactggccccaaagggtttctgtggagtgttttcacagaaaacgcatacatcgcaaagtgcggccgtgggcttggcagcaacttcaacgcagccggcgactctgatccagccacttcccacgtgctccctcataaggggcccagcactgccgtggattctggaaccatgcagcactcgaggcctctgctgatgccgaagcccagccttccgcagtactcctgggacccactgggccctactgacctgttcccttgggtcatccttgtgccctgtgcctctgcctctactgcccacttggctctctcctcctactgccccctctgtcgcaacctatcccagcctcctacagccccaccctcttcctccctggcactggctcagacccttccacaataggaggagacaaggttctaactactaaggactgctgtgtaagtcaccatgtcccacccccattctatgttttttaaaatgtagccataatcctttaaattgagtgggttgtgacctgtagtttgaactacactgatctagaaaaacct

SEQ ID NO: 470805 - DNA, 761 bp, Homo sapiens
gctgattaccctttagacttcatttcagttaattctctctggtttgagtgtgattcacacgccctcctctgggcctggtgtccctgagtaggaggctccttttatgaacacaaggacattatatgttagaaaaagagcgtgtgacttacctagatttatccccaaaatgcccctcagaaccaaggtgaccatacaacttctagaacacttcagaaataagctggaagagggaacagggttacctgctgagacaacagaccgtttttcaaggagaacattcaaaggactctttggcttaaactgttcacaagctctggactcccttctttcagacacagtagaggaaataggctggctctccaaagagcttcacaaaggtttcattgaagatttgacaaaggcgaagaagctgcaacacctttcggatctttgggcttacaccattgacacctctgatcctgatgacaaacgccaatttgggttttgcagggtttctggcacagcaggaaccttcttcttcttctcttctacaccctccatggttctagcctgaaaaagagtggtatctttttaatataataatttcttttcctttgggtagatgctcagtattgagattgctgggtcaaatggtaattctatttttagttcttcaagaaatctccatacagtttttcatagaggttgtactaatttactttcccaccaacaatgtataaggcttctggattttaaagctcaaatggatatgggagatgagg

SEQ ID NO: 470806 - DNA, 620 bp, Homo sapiens
ataggaagaaggacaatttttgaattaattataatattataattaggtcgtattagtggaaggagtgggaactaaaatgaaatctggtgaattggggcagctgaagctagagttcagcttagctcctcccccgactctgtcttacttccctaactcctttctttctgagacctctccttcagctttatctaacctactgggagaaaagaaatggttgtcatccgtgcagcaaatgatgaatcgacggaaagccctagcagggccaagactagcgagaggcacccagggcccacaattcaaggagtcagtgcttaggacttgggagagggtgaatgcctctttaagtcagtaccctcagtgcttcacttgttgtgccgtggagtccagcacctgggaaacattccaggaaggcaccaagagaggaggagaaggaggagaaacttgggctatgaacttgaaacaaataagagccttggaagaagaaatgcgatgaactgcacccttcattttgtgtatatgaatcaccaacagtagttcccagctttgtgactaaagacaaacgtcaatgccaaaatcaccctagttcatcctagctgcagcatcaaacagtcatggccacc

SEQ ID NO: 470807 - DNA, 1097 bp, Homo sapiens
agtggagctccaggctgaagactactggtacgaggcctacaacatgcgcactggtgcccggggcatctttactgcctattacgccatcgaggtcaccaaggagcccgagcacatggcagccctggctaaaaacagtgactgggtggaccagttccgggtgaagttcctgggctcagtccaggttccctatcacaagggcgatgtcgtcctctctgccgctatgcaaaagattgccaccacccgccggctaaccgtgcactttaacccgccctccagctgtgtcctggagatcagcgtgcggggtgtgaagataggtatcaaggccgatgactcccaggaggccaaggggaataaatgtagccactttttccagttaaaaaacatctctttccgcggatatcatccaaagaacaacaagtactttgggttcatcaccaagcacctcgccgaccaccggtttgcctgccacgtctttgtgtctgaagactccaccaaagccctggcagagtccgtggggagagcattccagcagtttcacaagcagtttgtggagtacacctgccccacagaaaatatctacctggagtagccgcgcagccccgccctctgcgtcccccggccctcaggccagtgccaggacagctggctgctgacaggatgtggcactgcttgaggaggggcacctgccaccgccaggggatgaggaagtgggggccgctggctcagggtaggggaggagatctaggtagttcccaaaggaataatgctttacggagtctaatgttgatttattaggtaaaaacagaaaatgacttttttttttacccacaagttccataccaaaaaatgaatgtaaacttcttatgcagtttcacacattgaaaatgcaggttattttaattccattgcatttttcagaattctcaatcgcaatcctctgacaactgttgaagatccgtatctctttaaattactggcattaaaatatctagacgtgggaacaacgcaagtcccacttacaacacttaagaacattctcatgatgaccgttgaactggaaaaactgacaattcccccataaaaaatgatgaccagcc

SEQ ID NO: 470808 - DNA, 3285 bp, Homo sapiens
gagtctgtaatcggagcatgacccagaataaggttctgtacctcggcaaggtgaaagcgttggcgcccactgatgaggcctgctctgagattgtgggctccatgctgagcccaatcagggacccgatagaaatccaaacaccatgtcagcgagtccccaagaaatgcattttgtgccaaggctattcaaggaaggtttgggagcagctcaagggcagacactgttaccctcccccaggtccccagtgcagggcagtgttctgcatgtggaggcagtttggcctaatggttaaggagggccaagcacatagtaactgctcagtaaatggcatcatcggcggtgtcctgtggatgagtgcttgtgattggctgaatgaccagaggggtctaaagatcctggtgatggaatcagttgtacagataaattgttacactgatcccgaatgtggcaagccatggagccttaagctcttctccctccacatcctggaacagacccgccagtttcttccaggcattgcctcagtttgcccctctgtttccagtcacactctcaccagcgataaaatgattttagaccttatcatctcaccctcggatccttatggaaacaataatgagttgttccctgtttcaattccaaaattcatatccaatccaggctacgcgtttcctctcacctgtggcagcgccgtgctccccagtgcctcacagtttccttcttgcccccgcttcctgtgtaggactcatctgcccacaggttgcacgtcctgtgagggcaaggactggcagaccgtgggaagctttcatttccggaatggaccatcaacatcccttggagaagaattctcttctccagacccagacctggtgtcctggcacccattgggcaagtgggtcctagaagacaaacctggaattcagaaatatatgtttgtggatttgtttattcacgtagcaaaccatttcttgagtgcctaccatgggccagtctctgaccccacttcaaaggcagcattcactcagggaagctcccatacaatgctagtcagagtaaaagtttggacaaattgccaggaagcagcttgtcagtatgcataaacagcctttaaaatattactactctttgacccagaatttcacttctaggaatctgtcctaaggaagtagtcacatgcaaaagatttatgtaccaagatgttcatcaaagtgttgttttataacaggaagtctcagaagctggataaatatccaacctctggaaatggttagatagaatagtatgtagccattagaaaattatgtctatggggtttaaaatgtcatgggaaaacacttctgacataaaagagcatgagaactgtatatttagcataatcttaactatgttttagaatgcacaggaaaaaaatgtacaaacatattcatagtgatgtctctggtggtaggattatgatcaaaggacctctgatcctactgagtttaatacccacgggttaataattgggaaaagcaaaggaagcgcttctgtttaggtaattatatgcatgtttttgtctttttctggctggaaagatatccaagccactgggaagccccctaatttctctcacaaggctttgttctgcagcaacctttcctaatgcagtcctggcctcttcgcagcttcattacataaccttccgtggactcctggtccaaggatcaccccagaaagccagtcagagctttgtctacagccattccatcctgaacctgcccaatcttgtctgaatcctggtttcaccactgacaagctgtgtgtccttgggcaagttacttcacctgtctgtgcttcagagtcctcatctgtgagttggggaatctggacagaatctaccccatagggcgtagtgaggatgtgttgaattatcccaagtggctacacagagtaagcactcaaatgatgtcatcgttgtcatgattgctgttaccagagcctagagttcattctgatactcgagtctgtggcccatccagcccagaggatgaaaatagaatgagcccccttaagaggtaatgagctccctgtcattggaaggattccagaagagctaggtaaccactttaggtgctatcaaggggcttttttctttaaagtcctttccaaaagcttctgagattgcataaacaataggaagccatcttggtgctttaacacaaactctccccagtgatgagggttgagccaaagccagattggcaagcagagaggagacttgtgtacaaggagttcctcgagtcaattgctttttccttgttctagccagccagagggctcctgttggaaaacaggagaccggagaggctgaggcctgaccaaaccagcttctgcaggccagctgggaggccacaactcctacctacgggaaaactgaagggcatctctatttttagattagcaaaagaaaataaatttaagtttgagtctcctttgcaacttttaaaagacatctttattgagatgatcattcacattctataaaattcccccactttgagttacaattcagtggttttagtcttccttgatgattttgatggtcttttcttaaggctcttggaagacccagaagcctctcagacacaggtgggtgtggagggcatagcacagaggcagacttctcatttcctgggtctcccctttaatgactctcagagacccctccttccccctgcccctggcttctaccccaggggtgtagagttttgccattttccaagcagaacttcatttcctcttctgtgtctacactctttgtgcttctttcttgccagctttttctcctttgcccgcccttccttccttccttccctccctccctccttccctccttccctctttccctccttccccccttccacccttccccccttccccccttccctccttccttccttccctccttccttccttccttcctgccttccttccttcctgccttccttccttcctgccttccttccttccttccttccttccttccttccttcctggtatgtgactaatttctgtttcaggacataaatgttgtccaggctgttctttggtctttctgttggataatggacatttggcattgagagaggctgctttttctgaaatcatgttcttggggcccagaacctaggtgtgtgcttctgactttgttttcttcctgatccaaattctgatatgtccatttaaattgatctagacccacagggcactgtgggacagatcctcagtggaacatgactctgtaac

SEQ ID NO: 470809 - DNA, 1334 bp, Homo sapiens
cccattggagaccagaaccgcgggccagggggcgattccgctgagtcaccgcgggcgcctggtgcgcggcggcggagcccgggaccttccttggctgccccctagcgagggccgcagcgcagcctgagacacccgccggggccgctccacggccgtcggatttagactggaagctcggtccaggtccccagcttgatgcgcccgcggtgtaggagaccagcccgactcgagcttcccctgagcccctggactcttgactccagcagggcctggggtcgccatcctgcccacctcacaggttacagtgagcctggatgcactgtcatgggcaggtgcccaggaaaatggcagacatgttccaaacagcacgcagcattccccagtgatgcccagggtcaccttggaggtgggcgagatgcctggggtttctcgtccaccccacaacacctcaggggacagccaaagctgtcccttcaggtaacttcccagactcctgggaatcataacacctatgatgatgatgatgatgatgatgatgatgatgatgacacctacctcaaggattgccctgaagggtcacagagatgcctgcaaggcacctgcatggagcaagcgccccttctctggcaggtgctgggtgagcactacctgctgccaggccctggggctatggcactgcgtgaccctgcaagtcctacctggcgaagctgtcgttcttgtgctcagtcagtgttggttgtaagactgagaagagtcacttcattttgctctccagggacatctttctgggtcctattttctgcctatgtcaagtagcacctcaaggatgctcctgaaaatgggcttgtctttcttaacatggcagaaatactggagaagcctaaagaaggagtctaaaaactctggcacgtgggccaaaactgtccttgagctaagaatgattttcacatttttaagtggttgaaaaatgaaataaaataagatgatgttttgtgacacatgaaagctatgggaaattcaaattctaatatctataaatagtgttttatcagaacacagtcatgctcatttatttatgctcgatggctgctttcccgctacaattacgttgagcagttacaacagagaccacgtggcccacaaagccttacaatatttactatctggccctttccagaaaaaaatgtatatctcctaatgctatccctccccactccccccaccccacaacaggccccagtgtgtgatgttccccttcctgtgtccaagtgttctcattgttcaattcccacctacgagtgagaacatgctgtgtttggtttttttgtccttgc

SEQ ID NO: 470810 - DNA, 604 bp, Homo sapiens
aaaggtctcatggctgctgttgcaaaaccaaggtttgtggtgaggagatctgtgtcggatggaatggagtcctccagggcacacggtgactctgatgaagaggcaaaaatgccactgcttcgtgaaaaatggccttgaagcaaaagagaacattctgatcacatttgaaaaggcagatactttgtggcaccagggcttgacttctaatgaatgtataacagaaaagatcaggcacttgtgcaaatgtgtctgttttcatgaatccgcggatttacaaagaattttgagaagcatcaccaattgcttttcaaacaagatcgggcttgttgagggtgtagcggctgtagacaccaattgcttctcagatgcagtgcaagtgggtatgaagtgtgagtcttgtcaacactgagttaatcatacacctaaataaatgccaaaaaatttttgtgcttatagatgaaagatgatgttttactaatgtaaactatgaacttgggtgataatgatatgttaatgaggattcattggttgtaacaagtgtaccactctggtctcagtgcttattctaatgacttgtgtgggctcttaatttatgaataacatt

SEQ ID NO: 470811 - DNA, 761 bp, Homo sapiens
agcctccagaggacaccttgggtcatcagggatgaccctgagcagaagggtgacccagaaagtcctgaggaatgtttttgccttgactgggcgccaagctgtggacttcctgggctttggggtgggacttggccaaggggaagccctttggacccaagagccactcagttctgcacagcctgccggctttctctctctctctgctaagcaaaaggctcatccatcactttgtgtcacgactgcctcatttcctccccccacaataggatttccttgccagggcaaatcacacaatctggaagcagtggtcatcctaaacactgtggcttatagtgggagagagggaaagcacctatttcagaagctgccttctctgttccagaaggctggtagctggaaggagggattcagttgccagggtcctgagcagctgctgacagagaaaggagcagggtacacagactgactagaagcttctggggccaagagagaaccctgccttttcattctgtactcctctcaccagctgtagaagaaagacacccgaattacttgtgagggagaaaaggaagggccctataagaaatggaaaggaaggaaggaaggagcaagggggtaacccctctcctttgccccctccctcccagcctctgccttcacaccacacacagactgcagaaccacccaggttttgccaagaggagagtcaggctgactgaatttcagctctctctacctctgctccctcctccttctcactg

SEQ ID NO: 470812 - DNA, 641 bp, Homo sapiens
ccctggcccgcatgcggtacaaaagaaccaaggcagctctgacaataatcaggtactaccggcgctacaaagtgaagtcgtacatccacgaggtggccagacgcttccatggcgtcaagaccatgcgagactacgggaagcacgtgaagtggccaagccctcctaaagttcttcgccgttttgaggaggccctgcagacgattttcaatagatggagagcatcccagctcatcaagagcattccggcctcagacctgccccaggtcagggcaaaggttgcagccgtggaaatgttgaagggtcaaagggctgacctcgggctccagagggcctgggagggcaactatcttgcttcaaagccagatacacctcagacctcaggcacttttgtccctgttgctaatgaattgaaacggaaggacaaatacatgaatgtcctcttttcctgtcacgtccgtaagaagacatttttggtcggagtataagatatagtcatttagagtggacaatttggcaatatctatcaaaatttaaaattctcataccacttaatctaagaattccacagcccatatttaccctacaaatatatctgtacaaatacccagagagagagagatgtacaggtttgtacattgtaa

SEQ ID NO: 470813 - DNA, 620 bp, Homo sapiens
tcatctcatgtggcgtcagtacagcagccctttttagtcaaaatggctcccttccttgtagccaaatccactgtacagatggctttaaaagaggacagcggcaaacagagaggcctgctgacagggaacgactcaggtataaacagagaatgctggcatggcgttgcacacatccttgcaactgaggtgccaattctcaacacagcagccagagtgatccttttaagaccaaagccagatcatgtcacttctctgctcaaactctgcagtggctatttccctgagcagaaaagccaaagtccttcctatagcgttcatggccctatgtggtctgacactgtctcctccccacctcatctcccgctgtcctctcccctgctcgctcccgccatactggcctccctgctggaccctacacaggccaggcatcctcttgtctcagggcttttgtgctagaatatctagcaaactttgcctttgtgaattcttttactgctgctatagttagaaaggccttccctactttaaaatcaattacatgcccatacaattaatttatgtttttgttaaaacattaggggaattgaatcataatgagcagagagcctttattttataat

SEQ ID NO: 470814 - DNA, 536 bp, Homo sapiens
gcatgcacgcacgcacgcacgcaccacatgccctgccctacctgcttaagagattggatgaacatgactgttccacccagctggcaggagcttagccaaccagatgactgccttgggaagttgaggttcaatgaggttaagtatcttgtccaaggtaaaaacaaaaacctaggaggaggaggggctggcctggttgtctcctggacactagaggaacttgtactcaccaggcagagaggtcccttccagggcccttcctcaacaagtgagcatcaggccaggtctctgtatccaaacaagaggagaaacttactgaggaaagaattggtcaagcctctgcggctgctgctgtgctcaggacttgctccctcactgaaggttccagaaaacggcacagtgcttattttaggtgatggctttcacgcacaagtgggcttttcttctatcaatgatgctgccgaattcagagttgttgctgatgccatgaaagtcattggcttcaacctgaggagatccaacagtggataggattttgg

SEQ ID NO: 470815 - DNA, 1616 bp, Homo sapiens
ccagctccgtttcttctaatttgggctctccaagcaccctccagagctggctttgtgctcctgggggtcctgccccctcacagagggccttggagataagtggccccagggtgcctgcttggttctgactccatttccactgtgtgggagcacactggcactccagtgaggcagatggagcagcatgcaaatcacagagggaaaaaggaacaagatgtgtgcgtgcacgaatgatcagaggtggaatggctacagcgtgcattctcagcaggagggagagctgatagcaggacaaaaaaattgtcttttgggttttgctgtgaagagaaatagacacggagcagctgctgaagagtttgatggagtgtgtgtgcttcatacagatgatttggaaagacctttgcacaccaaaggaaatgatgctagaggaaaggaggaatggacgaccaccgaggtcaataagcaaagcaggctgggccacgactgtgggaaacctgatcggtgcttcccagtctccaacaggcaaacaaatccactagggatcctgtttgaatgcagactcttattcagtagctctgggattgatcccgagattctgtgtttctgaaagtgctgggtgacactcttattactgatctatggaccacactttgagtagtgaagactggagagtctgtggtctgctgaaaggagcggctgcttctcacctgtacctattgttgtcatatgagagagaaggctcactatggtcttctgatttctgaagagaagccagaaatctggatttttatgtaaaatcatcccatttaagaatattggcaaataattaaaaatgtaaaatgctctgtggaccaaataaaacatgtgtgagggttgaattctgcttataacaccactgcttgtgatttctgatggagaggaatccaggcagaggagaatcagctaattctttttctccttgatgttcttagtataaggactatctagcctttggtgtcagaaagcccttgagttgcttatcaaatatgtgacttgacaaggtacttgaattcgacaaggtacttgaattctttaagcctcagtatctatgtcaggaaaatgaggataatactaagatctacatcatagaatgaatctgaaggattcaatggtatttggcccccctcctcccctcctcctctctgactgcccctccctacttccaaaggccccctttctgtttggaggctgacttggtgttggcacagttccaggtctaagcaccatgagcagccccactgtgaatggatggacaagaggtccaagctggccttaggccagacgttcatctcttctcatgctgccacattaagccattcaggaaacattagctcccaggttgagatgtttccccacaggtctaatgatttcccatcttctctcatcagatgtgtccctatttacacagcccccaggtacagagcccactgggcacttttctccatgggatactccctcaaagtgaatccctacctctcagcagcatgctcctctcacacatactgtatttaggtctcatgttttcctacctccaagctgtactcgtgattatgaaatgcttgattgtggtgcctgtc

SEQ ID NO: 470816 - DNA, 1036 bp, Homo sapiens
cccctccaactctcccctccccagcccctagaggccatgggggaagccctgtgaagagatgccttccatcatgatcctgatcaggcagctcccagagccgctccgatcagacctcagtgctgtgctggagctgagcacggggcctgctgggggccttggcagcagttgtaagggagcccggggattcgagtgggacttgaacccggcacatgtcggggaatctaagaaacttttctctcctgaagatgctggccccaggagcattttggagagtgatgcccacgtccttagctctgtgcctctgctcgcagctgggtgcgtggcatccctggaggtcctgacctgccttcgtggtctgcacattgccagtctcttctttcctgcttcttgtctgtctcctttcttcgctggcccgatccatccccccacacccatcctccctcactcacccccctgcctcctcccactctttcctgtgctcatctagagaggcctccgccagctgaggcagggcttgggagcagcccccactcgtcctttctcagcccctgggagacactggtccatcctttagctgtcaccaacaagctgaataaggctggatattttggaaggggagctgcagctggctgggggaaggggtggcactgagagaagccagagggaactgcaggcagctgtggggtgggtttcatctgagtgcatccagacttgctcgagtccctgttaccacccctcacccctccacccaccctggggtggttataagcctgttcccttccaaagcaattagtgcaaggaggccagccaactcggtgctaatgctgtttcattaagtgggagcaatcctaatgataataaaatggcacatttaacattcaaacattgaacagggtttctaagcgagtgtgtctctctctttctttctggtataacagctccatcttcataaggacctgacaatacaccttaatgagagactggggagctgagcatcttcacacaaccagagagggggtgaggaggagacaaagaa

SEQ ID NO: 470817 - DNA, 3903 bp, Homo sapiens
gagttctctgagcaggtgggaccccaacccttactgaccatccccaatgacaccaaagtttttggcacttttgatctcaattacttctccctgcgtatcatgtctgtggattaccaggcttccttcgtgggccatcctcctggatctgcctaccccaagctgaacttcgtggaggactccaaggtggtgctgggagattctaaggagggcgcctttgcatacgtgcaccaccttaccctatacgacctggaggcccgtggcttcgtgaggccgttttgcatggcttatatctctgcagaccagcataaaatcatgcagcagttccaggagctttcagccgaattttccagagcttctgagtgcttgaagactggcaacaggaaggcatttgctggggaacttgaaaaaaagctgaaagacttggattacaccaggacagtgctacacacagaaacggagatccagaagaaagccaacgacaaaggcttttactcatctcaggcaattgagaaagccaatgaactggccagtgtggagaagtccatcattgaacatcaagacctgctgaagcagatccgctcataccctcatcggaagttgaaggggcatgatttgtgtcctggtgagatggagcacatccaggatcaggccagccaggcatccactacctctaaccctgatgagtctgccgacacagacctttacacctgcagaccagcctacaccccaaaacttatcaaagcaaagtccaccaagtgttttgacaagaagttgaagaccttggaggagctctgtgacactgaatatttcacccagaccctggctcagctcagccacattgaacacatgttcagaggagacctgtgttacctcctgaccagtcagattgatagagcacttctaaaacaacagcatataacaaactttctctttgaagactttgtggaggtcgatgacaggatggtggagaaacaagaaagcataccctctaagcccagtcaagacaggccgccttccagttctctagaagaatgcccaattcctaaagtgttaattagtgttggttcttacaagtccagtgtggagtctgtgttgatcaagatggagcaggaactgggagatgaggagtacaaggaagtggaagtgactgagttgagcagtttcgacccccaggaaaacttggactacctggatatggatatgaaagggagtatcagcagtggtgaaagtattgaagttttgggcacggagaaatccacctccgtgctttctaaatctgacagccaggcaagcctcacagtaccattgagcccccaggtggtccggagcaaagcagtcagccacaggaccatcagcgaggacagtattgaagtcctcagtacctgcccctctgaggccctcatccctgatgactttaaggccagctacccaagtgccattaatgaagaagaatcatatccagatggcaatgaaggagccatccgcttccaggcaagcatcagtcctccagaactgggtgagacagaggaaggcagcatagaaaacaccccatcacaaatagactcctcctgctgtattgggaaggagagcgatggtcagttggtgctgccctccactccagcccacacacactctgacgaggatggggtggtgagcagccccccacagcgccacaggcagaaggaccaggggttccgtgtagacttttcagtggaaaatgccaacccttcttcccgagacaacagttgtgaagggtttcccgcttatgagctggacccgagccacctgctggctagccgggacatcagtaagaccagcctggacaactactcagacaccaccagctacgtgagcagtgtagcgtccaccagctcagacaggatcccctctgcttatcctgctggcctgtcttccgataggcataaaaagagggctggccagaacgccttaaaattcatccgccagtacccctttgcccacccagccatctactccctgctcagtgggaggacacttgtggtcctgggggaagatgaggccatagtcaggaaactcgtgactgcactggctatctttgtccccagctatggctgctacgctaagcccgtgaaacattgggcctcctcccctttgcacattatggattttcagaagtggaagcttattggcttgcagagagtggcctcccctgccggtgccggtaccctccatgccctgagccgctacagccgctacacgagcatcctggaccttgacaacaaaaccctgcgctgccccctttacagaggcaccctggtgccccgcctggcagaccaccgcacacagatcaagcggggcagcacctactacctgcatgtccagagcatgctcacccagctctgctccaaggccttcctctacaccttctgccaccacctgcacctgcctacccacgacaaggagacagaggagctggtagccagccgccagatgagcttcctaaagctgaccctgggtctggtgaatgaggatgttagggtggtccagtacctggctgagctgctgaagctgcactacatgcaggaatctccagggaccagccaccccatgctcagcattgccggacacttgagtggcaaaatgaacgagggtgacagccaggtaactgttgtggtttggtggaaaacaggagggcagaacacccatcgcctccttcagacccagatgcagccctttatttgcttcctggagcccactgtcctaggggaggccctggaccagccagtggggagcgtgagcagcaccctgtccgctgtcctcgccacctttacctgggagagaagtgcctgtgagcgggccttgggactcactccccatactctttcaccaggaacgagcagagtgttcactagtcctagtgtgaagcgggcacaagtgaccaaagccaatgagcgcatgagcactgaccttcctcgtggggaaggtctgcagacccgtgtgaacatggcagaggccacactccagctcccacccacataaacctttgcaaccacttcactacctctcactgggtctcgtgggcttgggacagcaacggttctgtttagtcagctggtgcaggtggttggcccagccgatgagaactcaaatagcacggatttcctggatgagctaccacgtggcgctcttcaggttctgcctctgggaggctgtgtgcacctcagtcaccacagctcacggccgtccccagttgagtcccccttctgaggacaagtttgaaactgggaaggagacaccccctggttccgccagcacctatcccactgatagtgatcccctggcctccccgagcctccttaggcaatggccactggtttgtagacagagagtttcttgcagccttgaaaattttattccctaagtggggacagctctggtattactgcttctttaatttgttccacaaaaattatgctgaaatggacctgaatcagccctgggtgtgcttctgttggcgcctgctgctgaggcccggcctgcccatcggcctgtagtacgccatcgaggtcatcatggagccagccagcttctcttctcatcaaggaggcagagacccctggtggaagccaagagtgaccgaagagggcttgcatcacgtcactccagtggttccctccttgtccaagtcctcgttttaagggcatggcccgttggctccagccgttggcttctgttcagggtccttgctcccatcagaggtgtttgattttgctcctggggctgcgatggagaaccttttgtggcagatggtgctgcctacatctcattggttctctgtacctgtgcccgttgcgcatgttcacagacaggagagtcgccagcaataccttggcagcctttaaatgtgaaacgtctgttacttgc

SEQ ID NO: 470818 - DNA, 1836 bp, Homo sapiens
acagggtctcactctcccagaaataaacccacacaattatggccaactgatttctgacaaaggggacaaggacagtctcttcaggctggagtgctgtgggaaaatctgggctcactgcagcctcaacctccgggactcaagtgatcatcctgcctcagccacccagagtagctgagaatacaggcgtgcgccaccaggctcgggcagcttcgaaccagtgcaatgacgatgccagtcaacggggcccacaaggatgctgacctgtggtcctcacatgacaagatgctggcacaacccctcaaagacagtgatgttgaggtttacaacatcattaagaaggagagtaaccggcagagggttggattggagctgattgcctcggagaatttcgccagccgagcagttttggaggccctaggctcttgcttaaataacaaatactctgaggggtacccgggccagagatactatggcgggactgagtttattgatgaactggagaccctctgtcagaagcgagccctgcaggcctataagctggacccacagtgctggggggtcaacgtccagccctactcaggctcccctgcaaactttgctgtgtacactgccctggtggaaccccatgggcgcatcatgggcctggaccttccggatgggggccacctgacccatgggttcatgacagacaagaagaaaatctctgccacgtccatcttctttgaatctatgccctacaaggtgaacccagatactggctacatcaactatgaccagctggaggagaacgcacgcctcttccacccgaagctgatcatcgcaggaaccagctgctactcccgaaacctggaatatgcccggctacggaagattgcagatgagaacggggcgtatctcatggcggacatggctcacatcagcgggctggtggcggctggcgtggtgccctccccatttgaacactgccatgtggtgaccaccaccactcacaagaccctgcgaggctgccgagctggcatgatcttctacaggaaaggagtgaaaagtgtggatcccaagactggcaaagagattctgtacaacctggagtctcttatcaattctgctgtgttccctggcctgcagggaggtccccacaaccacgccattgctggggttgctgtggcactgaagcaagctatgactctggaatttaaagtttatcaacaccaggtggtggccaactgcagggctctgtctgaggccctgacggagctgggctacaaaatagtcacaggtggttctgacaaccatttgatccttgtggatctccgttccaaaggcacagatggtggaagggctgagaaggtgctagaagcctgttctattgcctgcaacaagaacacctgtccaggtgacagaagcgctctgcggcccagtggactgcggctggggaccccagcactgacgtcccgtggacttttggaaaaagacttccaaaaagtagcccactttattcacagagagctgaccctgcagatccagagcgacactggtgtcagagccaccctgaaagagttcaaggagagactggcaggggataagtaccaggcggccgtgcaggctctccgggaggagctgaagtgcaaaacatagatgaccatttttaataagcacaatcaaatttttaaccacagaatgtctacaagaattatagctttaaaaaatacaaccaatttttatatttcaaaaatatttgaactcaaataaattaatttcttaaaaagtacacttctcatactatgtgtttggcattgactctggttaactcttgtgcagcaacacctacgagatgct

SEQ ID NO: 470819 - DNA, 896 bp, Homo sapiens
gttggcattctggtattctgcggggtgctgaggcccctataagatttgaaaatggttcagcgacggacagattttgtatttttggaactaggtagagagatcattgagaccactatcatggccgtgcagtttgacgggggcgtggttctgggggcggactccagaacaaccactgggtcctacatcgccaatcgagtgactgacaagctgacacctattcacgaccgcattttctgctgtcgctcaggctcagctgctgatacccaggcagtagctgatgctgtcacctaccagctcggtttccacagcattgaactgaatgagcctccactggtccacacagcagccagcctctttaaggagatgtgttaccgataccgggaagacctgatggcgggaatcatcatcgcaggctgggaccctcaagaaggagggcaggtgtactcagtgcctatggggggtatgatggtaaggcagtcctttgccattggaggctccgggagctcctacatctatggctatgttgatgctacctaccgggaaggcatgaccaaggaagagtgtctgcaattcactgccaatgctctcgctttggccatggagcgggatggctccagtggaggagtgatccgcctggcagccattgcagagtcaggggtagagcggcaagtacttttgggagaccagatacccaaattcgccgttgccactttaccacccgcctgaatcctgggattctagtatgcaataagagatgccctgtactgatgcaaaatttaataaagtttgtcacagagaatctttgtactttggggttcttttttttttgacttcaaggcattcttatcatcctggaatgttccctcacgtgtccctttacaggcaatcttttccct

SEQ ID NO: 470820 - DNA, 2539 bp, Homo sapiens
gtgtgtgtgtggggtggcgcctgtcgtcatcacacaaaacgccctacgtcgacgctgccaaatattgcttttttattcctcacagctcctcccgtctttccgagactgcggacagagggagctcaacgccattccctgccgggggcggccctcgccgcggcgacgtcacggaagaggcgggatacggaggcggccgcggcgcgggctgcaggactgaccccgggctgcgcggccccaccccgggcggtccgctccgttcccgccggtccccgcagccgccgtcttaggccagctggagcaggccgcgctcggccagcaggctctgggtgcggttgtagacatcctccaaggtgccggcggcccggaccagcgcggcccgcgcctccgcctcggtggctccgggacacgccagctccagcaggcggcggcgacccgggaaggcgaggaaggcgaggcgggcggtctgtcggaccagccaggggtgatgcggacccagggccgcacggtaggcgtcgctgcactgcacgcccgcgtccgggcctcccagcgcgccggtcgccacccggtggaggcagagctgggaccagcgcagcgcgcggtgcagcaggagcagcgtgcgagagcccgagctccgggtcgggtcccggggggccgcccccggctgctccagcagtcccgccctccgctcccacgccgccatggccaccagcgaccagtagtgctccgcgtccgggccgtgcacccgagcctccaggtctgtcaccttggtgaaggcctccctagtggcgaaggcgaagacggagccgaggggagtcaggaacctgcgggcgagacgatttgagagaatggagatggagccgccaaggaggcggggaccggctggggggcgggaggccactcactcgacgagtgccctccatcccgccaggtacggcgacagccccacatccccttcgggtttcagactggcgtggaaccgcctcatcatgcggcccagcatcccccgagggcccagacacggaggctgtttcctctccggggcctccagggttcccgactcctgccggacctggtggggagacacgatgggaagaggtgggagcagattctgccctgaagaaattgttccgaaggtttagctggcggctcttctgctgtgcgctcagcttccgacgggagagggtagaccgggggaggacccgccctttgccggaccctcagcctggctccacgtccccctgttctggtccctcctggagcgcccgcgcccaatcctgcgcctagcgtacctggaagggcgccgtttcccctggaacgcagggctgcgccctgggtccgcagcccgagcgggcgcctgggtagaggagaagcggagcggtgagggctcgagaaagaggcttgagtcgtgagggcctggattccgggcttcctcccggagcaagtgagggaaggggcagctcacctaggctccgaacactgagataaagcagcagcagcgcgaagatagcgagaggaattgagtggctgaaccagtgccgcagggctgggggccgcgccgccactcccatgcctgctgctgggaccgccgccccctcaccagcgcctagccagtccgtgtccctccgcctccaggaggggacagaagcccctctgggagcctctgcctccgggagcaggaaatagggttccgggagtggattagttttgggtttcacttaatctgggaggcccttccgcaatcggagccctcacagaggccaaactgatataaatctgcttaggaggcctgattcacagacgctacaggatggagcggggcgcaggagccaagctgctgccgctgctgctgcttctgcgggcgactggtttcacatgtgcacagacagatggccggaacggctacacggcggtcatcgaagtgaccagcgggggtccctggggcgactgggcctggcctgagatgtgtcccgatggattcttcgccagcgggttctcgctcaaggtggagcctccccaaggcattcctggcgacgacactgcactgaatgggatcaggctgcactgcgcgcgcgggaacgtcctaggcaatacgcacgtggtagagtcccagtctggaagctggggcgaatggagtgagccgctgtggtgtcgcggcggcgcctacctagtggctttctcgcttcgcgtggaggcacccacgaccctcggtgacaacacagcagcgaacaacgtgcgcttccgctgttcagacggcgaggaactgcaggggcctgggctgagctggggagactttggagactggagtgaccattgccccaagggcgcgtgcggcctgcagaccaagatccagggacctagaggcctcggcgatgacactgcgctgaacgacgcgcgcttattctgctgccgcagttgaacggcgccgccgccgccgctctctcccgggccaggaggctagtcccacctcttgctattaaagcttctctgagttgactttggtgcctaggttgtctcctttctgaaccagtgacctaagatt

SEQ ID NO: 470821 - DNA, 2527 bp, Homo sapiens
tctgaaactttttgagtgccagacacaatgctgaaaggaaatgctcattggcgcattttggattcgatttttcaatgctttatcatcgacaaagcacctttgcacgcctgctcgcatcagagggccagcttccctgacatcgagccctgccctggcctgtcccagggagaaagggtgcccgctcattgggccaaacccactcatcaccccacaaagcctgaggcctggcgtccagccagcacagcagagcagggcctgcgggtaatgttacagtcttgtctctggagcacacagccgcggttatctgaattccccgctggtgggtccttgggaacctctggctgccggctgagctctgttcccgggaccgagacaccggccctgtcgcggctgtggggctggctgatggctgggaccaccgttctgacggggcttgtgtgtttcaggaatctggccaactgtgagcgcctcatcgaagtggaggacatgatggtgatgggccgcaagccggaccccatgtgtgtcttcacctacgtccagtcgctgtacaaccacctgcgtcgcttcgagtaaagcccctgagcctggattgccaaagagcagccccaggaagaggccgggggtccgcttgcgattccccagccaggatgcccccaggagccttgccgtttggtgtgagcgcgctgtttgttctgtggcatgtgacggcactcccctttcgagcccagctgtgttactgattaaaagtactgctgagctgtggtccgacagcactgatcacagccaagggcttggaggaaaaggaaaaattatgagagagagagagacattggtgctaagtaatgatcttcctaaagaaatgcttgtgtttatagcttccagaatgctaatctacaattttccctctggtgaattcgatacatcggctttacagggttacagtgattaccaagtgtttttttttatcaaaatacccagagttttttacttcctcacgcgattgtaggttcctctcctccctccctctgggccactgccaggaaacagagagaccgcttaatcagcagcttgacaaagaagacctcaagtcttgggaagaaacagtttaatcactcccaagtcctgggcaacagatgaccttcaagtcacctccgctctccggggagatgggaaggctctcctctcggtcccaaagtcctcctgttcttcccaggaggccccacaagtgtttggctaagcacaggctctcgggaatttaacacttttggggaaggaataggccctttgtgctgagagagagtttttattcacatcttttttaggggatttgctgcagatatttataaaaagtaactccctctgtaccactgacccatttatacataaaaaagatgtgttgaattttgcttggggtttgtcatttctgtttaggagatgggagttctgtgaataagagactttgcacaccttccaagtgaatatccactacattccacccctgttcctgcacttaaatcactggcctggaaagctgaagatggcatttgctgtcatctctgatcatctctgagtgtgcctgtctcccatctccatgttgtggaaggagcgtcaacagaaagttccccttgagatccgtcctctggatgtagaccgcagtgtttgtgataaacagtggcccaagacagcagggtttggggtggtcccgcacttggaggaagcccatcaaggaacgttggtttattttcacagctgtttggtggtaggactttcatagaaaaatcttgagattctatagagctccagccattagcttattctcagccaagaatcattgtataattgggttggattttagccatgcacttctaaaccttccctttaaggagcggatctgtgtcttcacctcatgcagccggctctcaacaccagtgcctgtgtgcctttgtggggtcccacgtgtcccttgggtggtatattggggggtgggcaggagatccctgggggtgtcaggaggaacatggcagagcctgcaggtgggtgagcagtattctccatggattggttggtccaggctgcagtcttgccctctctctcggattctcccactctggaaaccattcccttgctagctctctcgtctcttgtacgcttggggaggtgagacctattattaacaggacacataactgaaggttagggtttcaaacctgaagccaatctgggaacacaagggctctgtaaaaagcatggctatatgttactgagtcctcgcacacgttaaatggagctctcccgagttgcagacatggccgtacgctctgcgcatgaaacagagcagatcctgccagaatgcagaacaatttcttttaaactttaggaatggtgtccctcatgtctcacattcagaatgagacagactcgagtttttaaagttggttccatgatgttcttgtctgtggtctttgttgggggtggggggtgagagatcataagacagtttgtgagtttcaaacatgattttacctct

SEQ ID NO: 470822 - DNA, 1507 bp, Homo sapiens
ccgtgttagaggacagttctgttcattttcacagcagaggggacagccgagcgaaggcccccaggcggcgtgttggaggaggtggaaaaaggccgttgtagcaggagggaaagcggaagatggggagagggctagggaacctgaggtgcccatcctgctgagataggatatgggccccagtcctggggcttgggggacgctgcttccggcccatgagagaaccaagcttcagtgcgctcatcccccaggtgagacgcccctggccctggcagcatgcaccaaccagcccgagattgtgcagctgctgatggagcacgagcagacggacatcacctcgcgggactcacgaggcaacaacatccttcacgccctggtgaccgtggccgaggacttcaagacgcagaatgactttgtgaagcgcatgtacgacatgatcctactgcggagtggcaactgggagctggagaccactcgcaacaacgatggcctcacgccgctgcagctggccgccaagatgggcaaggcggagatcctgaagtacatcctcagtcgtgagatcaaggagaagcggctccggagcctgtccaggaagttcaccgactgggcgtacggacccgtgtcatcctccctctacgacctcaccaacgtggacaccaccacggacaactcagtgctggaaatcactgtctacaacaccaacatcgacaaccggcatgagatgctgaccctggagccgctgcacacgctgctgcatatgaagtggaagaagtttgccaagcacatgttctttctgtccttctgcttttatttcttctacaacatcaccctgaccctcgtctcgtactaccgcccccgggaggaggaggccatcccgcaccccttggccctgacgcacaagatggggtggctgcagctcctagggaggatgtttgtgctcatctgggccatgtgcatctctgtgaaagagggcattgccatcttcctgctgagaccctcggatctgcagtccatcctctcggatgcctggttccactttgtcttttttatccaagctgtgcttgtgatactgtctgtcttcttgtacttgtttgcctacaaagagtacctcgcctgcctcgtgctggccatggccctgggctgggcgaacatgctctactatacgcggggtttccagtccatgggcatgtacagcgtcatgatccagaagggagaagagaacctggggctggagcagaaacagaaggcttcctggaggaggcaggatccagtgttgagccttggagcatcaggaggatttggctgggggaagggagagtggcccaagtgaagagacagttagggtggggggtgggagagggtgggaagcaggaagatcagggtgccgtgaatatgtgcttgcaccttacacttgaattatgtttatttccttataggtcattttgcatgatgttctgaagttcttgtttgtatatatcgtgtttttgcttggatttggagtaggtaattg

SEQ ID NO: 470823 - DNA, 3140 bp, Homo sapiens
cagcagcggctgcgttagaggcgggtggcggcgcgggtgtttacgtcaggtcgcagggtgtcgctggcagcatggcggactacctcatcagcggcggcacccgctaccagcccgaggatgggctcaccgcacagcagctctttgccagcgctgacgacctcacctacaacgatttcctgattctcccaggattcatagacttcctagctggtgaggtggacctgacctcagccctgacccggaagatcacgctgaagacgccactgatctcctttcccacggacactgtgatagaggccgacatggccatcgcgatggctctgatgggaggtattggtttcattcaccacaactgcaccccagagttccaggccaacaaggtgcagaaggtcaagaagtttgaacagggcttcatcacagaccctgtggtactgagccccttgcacactgtgggtgatgtgctggaggccaagatgcggcatggcttctctggcatccccattactgagaccggcaccatcggcagcaagctggtgggcatcctcacctcccgagacatcgacttccttgctgagaaggaccacacaccctcctcagtgagcaagaaagggaagctgcctgttgtcaatgatcatgatgagctggtggccatcatcgcccgcacggacctgaagaagaaccgagactaccctctggcctccaaggattcccacaagcagctgctgtgcggggcagttgtgggcacctgtgaagatgacaaattccgcctgggcctgctcacccaggcgggcgtcgatgtcatagtcttggactcgtcccaagggaactcggtgtatcagattgccatggtgcgttacatcaaacagaagtacccccacctccaggtgattgggaggaatgtggtgacagcagcccaggccaagaacctgattgacgctggtgtggatgggctgcacgtgggcatgggctgcggctccatctgcatcaccctggaaatgatggcctgtggtcggacccacggcactgctgtgtacaaggtggccgagtatgcctggcgttttggtgtgcccatcatagctgatggtggcatccagaccgtggggcacgtggtcaaggccctggcccttggagcctccacagtgatgatgggctccctgctggccaccaccacggaggcctccggtgaatacttcttctcagacggggtgccgctcaagaagtatcagggcatgggctctgtggatgccatggagaagagcagtagcagccagaaacgatacttcagcgaggcggataaggtgaagttctcgcagggtatcttgggctccatccaggacaaagggtccattcagaagttcgtgccctacctcatagcgggcatccagcacagttgccaggatatcggggcccgaagcctggctgtccttcggtccatgatgtactcaggagagctcaagtttgagaaggggaccgtgtcggcccagatcgagggtggcgttcatggcctgcactcttacgagaggtggctgtactgaggagagtggtggaggccgaggtggttgaaggggcgtgccccgctttccccctttgggcacagcctccctccttaactgagtgatccacagatttacactatgggttccccagctcctttccagggagagaggacgggaggccctgagggtactgttgcccctcgctgggcatctcccacaaagtcaggaccgctccctgggccaggctgccctgggaagcccagcccagccagccaggctctcaggccctgcgcctgcctcaggtctttcttgctgcagcctgctccagcccggcccccaccccaggggcaggccgcccctcctggcttctcctgtaggacacctccctgccccccagctccccaagaaatggcactctcctggccctgcctctggcccttcccaggctgctgccccctcagccatgtggcacttctgagctcctgacctaggccagcgggaggtctctgcccgcttctccggcactgggctccaattgagtcctgctcctcaggccactcccctgtccctggccctggggaggacactgccctggtcatggccacctgcccatcgttcctgactcaccaccgtccccaggtgtgccattcctgccctctcctcagctgcagtttaaggctttaactttgcacactttgggatcacagttgcgacattgtgggtattaaataattggaataaatcaagcagatctcaacgcctccaaaaaaaaaaaatctagaataggcaaattcatagagacaaagccaaatagaagttactaaagagacaaagccgaataaaacttaccaaaggctagggagaggggagaatggggagttaatgcttaatgggtaccgagtttctgtttgggtttatgaagttttggaagcaggtagtgtgaaggttgcacaacattgtgaatgtacttaatgcaattgaattgtatgctgaaaatggttaaaatggcaaattttctgtggtatatatgttttactacaatttcaaaaaattaataatttaatataccaaatgccagagacttgtaccgtttaaatgggtgaattataccttaataaagctgttaaaaataaaattgtaaaacataattgtacagtttagttacctttgttgtaaatcaaatttccatatacgcaaagatttgtttctggaccctctattatgccatgctggtttatttttatttcaattattttcagttgtatatactgtcagtttataagtcttaatacagagtagagcaagtctcaatcttcaagcatgtcacagttcttgggactttgaattccacaaactttcagtatggaatttccataaacttttaatttgtcaagttccacaaacagacaaataaaaacaccttttcagattttgattatgattgcattgaatctgaagatcaatttgggaagtatttatatctctatagtattgaaccttccaattctggaacatggtatatttctctctctctcttttttttttttttttgtttatttttgaatatttctctcagtaatgtttaatagttttctgcaggacagcttgtgctttttttaaaaaaagtcattcctgagtagttga

SEQ ID NO: 470824 - DNA, 635 bp, Homo sapiens
aagggctcagtgttcagggagccccgctgggccctcccccagcccctggtggactcagagccctctgcgacacgggctccaaactctctcctgcaccctggcctttaggcttctgagagagggactgtgaatgtcggtgggacctggagctgaggcgtggggtcgctggacttttgactgcaccgatgaaaccaggatccagaaaggactctctaatgatgtaggaaacgtcgagctctgtctcccctgcagctctcacaacacagaacagtccagtgaccccaggtgggtggggttttccctccacacggggcaagcagtccttcggcaaccagctccagctgaaggtcctcacgttcaactcaattccgacatgctccacctggaggtagcatcagccctcacaggtcgaggtctcagtcccacaagactgctcctaacttccgaggcccatcaccagccgccgtgggagagtatgcacaagaaaagccctatgaccacccagaaaaaaatgggggagaaatcactgctttggattgaaatcaatgacagagacataacagcatatacgtaatacattataaccttgaccagatctggtcttttaaaacatacacagcactagaagttcattt

SEQ ID NO: 470825 - DNA, 2059 bp, Homo sapiens
aggagttgaggaagtggagacgactccagcataacccacagcaagattccatcccaatgcccagtcccaccccaacccaatcctaatccccagccacctttcctgacacagtcctagcaacagaaatgatacctacagcgtattgcatatgcattcaagtgctggtccggcggcctcacagcctcagctcagaactcacaggcacctgtagcctcctgggccctgacctccgtccccaggctcaggccaacttcttcgaccttgatgcacgtgtggacactggagactgctacagcaacaaagaaggcggtggagaagacgatgtgaacacagccaggcagcgccgggctactggaagaaggaggaggaggaagacaaggaggaggaggaaagacgaggaggaggaggaagctggcaccgagattgccatcatcctggatggctcaggaagcattgatcccccagactttcagagagccaaagacttcatctccaacatgatgaggaacttctatgaaaagtgttttgagtgcaactttgccttggtgcagtatggaggagtgatccagactgagtttgaccttcgggacagccaggatgtgatggcctccctcgccagagtccagaacatcactcaagtggggagtgtcaccaagaactgcctcagccatgcaacacgtcttgtgagtgtgggggctgcaggaattattctggccatgcccagagtctctgtggcatcactcatggaggaagtggctggccagaaccgcaggagaagagaattagggctccagcctttccctggccgagagagaacagacagcatcttcacctcaagccacggctccaggagaaaggcatccaaggtcatggtggtgctcaccgatggtggcatattcgaggaccccctcaaccttacgacagtcatcaactcccccaaaatgcagggtgttgagcgctttgccattggggtgggagaagaatttaagagtgctaggactgcgagggaactgaacctgatcgcctcagacccggatgagacccatgctttcaaggtgaccaactacatggcgctggatgggctgctgagcaaactgcggtacaacatcatcagcatggaaggcacggttggagacgcccttcactaccagctggcacagattggcttcagtgctcagatcctggatgaggtgctgctcggcgccgtcggggcctttgactggtccggaggggcgttgctctacgacacacgcagccgccggggccgcttcctgaaccagacagcggcggcggcggcagacgcggaggctgcgcagtacagctacctgggccactttgaaggcctgactgggaaggtgccggggccaagagagaggccaggtgggagcacacggtgtgttcacagccacaccacccttgccccaggttacgctgtggccgtgctgcacaagacctgcagcctctcctacgtcgcgggggctccacagtacaaacatcatggggccgtgtttgagctccagaaggagggcaagagaggccagcttcctgccagtgctggagggagagcagtgagcaaattgatatgtaacgacccaaattggatggggtcctattttggctctgagctgtgccctgtggacattgacatggatggaagcacggacttcttgctggtggctgctccattttaccacgttcatggagaagaaggcagagtctacgtgtaccgtctcagcgagcaggataagctcacagatgtggccatcggggcccccctggaaggttttggggcagatgatggtgccagcttcggcagtgtgtatatctacaatggacactgggacggcctctccgccagcccctcgcagcggatcagagcctccacggtggccccaggactccagtacttcggcatgtccatggctggtggctttgatattagtggcgaacggccttgccgacatcaccgtgggcactctgggccaggcggttgtgttccgcacctccctgagctgctgctcacagtcatcccgaagtgaacacgtctaaaaacagagct

SEQ ID NO: 470826 - DNA, 1165 bp, Homo sapiens
cactccatctgcagattgcctgtagagaactaaaccccagaccctgttttccatgaacaggatagcaggagccgggctgagcagtgaggctggctggacttatccctgctggccacaccatggctaatggtatcagggcctctggaagcactggggatgacgatgcaggcttgggagaggcagatctctctttctccagaagaagccgtgaagcccactttgtgggctgtaagaagtttgagtacctgagactgccatgctggggaggtcacatgtacgtgctctggtcacatgggctcctggctgacagcaatgacttccaggccagaggtgagaggaagagtattctggcacgagcaaaggtcctggggcaggaaggagatgctgaaagaaggccagagaagttgcagagtggggaacaaggagaggccagagagagacatggggcccagaccctgcagggggctctggttaatgagcctgggagcactcgcctggaaatggcactcgaaggggaaacagtgtaggtgaacaccaatacccaataggaccaaggttctggcgggggcagctttcctgctgagggtcccagcgccttgctttcctaggaaaggctacaacttcaaattgaattgcacgaccttgggtgggtcatttcacctctccgggaactggacttgtatggatgatttataggtcctttcaaatcccatgaatcaaagaatcaatcctcaatgactttcccatcacgaacaaagcactcgctaaaacttacataaatagattaaatgggccaatgacatgagattagatttaatatgaatcgttatcataatgtgctgtctacagagctgtgtcttttccccctaacgccagccttattttaatggcaacactgggttaggaaaggcagccactgagcaaatgtcccctggctccctggggaaagtctgcctgtgtcaaactgtagcggagaaataaatgttacacacgtgaccatggcctggacatggagctaagtccctgcctggcacgcactcatccccagatgcagacagtgccttgtcagcaaagctgactcaccaggaaagggatgcactccagacaccagtctccagcattcccttaagacatgaactccacacgattgaaaatgcagaaacca

SEQ ID NO: 470827 - DNA, 1433 bp, Homo sapiens
aatcagaagctctggaaggggcccagcaggctgtgctccagcaagccctccaggtgacgctgttgcatgcttaagtttgagaaccaagggtgtggacgctaaatgttacaggcagaaggaacagccagtgcaaaggtcccgaggcaggggactgcctgggttatttgatcatagggcaaggcagccagtggggctgctgtggggtgggtagggcgggcagctggggaaggggtggtcagagcggtcactcaggccacattgcaaggggccctgaggccatggcgaagacccaattctcgttctgggaaaaggaggagcaagtcaagaaaaacatgaaagaatccaaagggctccaggccaagacccaagttgacatcctaaagccgcctgggaagttgagaggaaatcgtctccctgcccctcctgggagttggggcaaatggcaccatgaggaccctagcctccaccggggcgtcttgggccacatctcgctccagcagtcaagcctccgagctgccgatgtacggatgtgtgtgggcccccagcactggcaacattcctgcgggctgactcccccagccctcctccagccctccttcatcctcacccgcctgcctggcctcagcagccccagtgggccagctggaggctttatcccagccacatctgaaacagctcaggagctgtgcctggccgccagccgtttccataaataacttgctgggcctggctccttgccctcctggtgatgtcattggccttggcccagatgatgaggtcacaggcttcccttccctcgccactcccttggggtgggatgggggaagcatgagaccttcttcacagagcctgtctgccgagaacctgcctgtctgcgccccatcctgttccagcccggccaggcagtggatgtgggttctccaccatctgggactgcctgcatggtggtgccagatggcagccttccccctccttgtcaccagttcctgaacagcctcccaacttttccatctccccactgccttctccccttgtcatgatgtgatttccaggggacagtggacttggtgcccggatggagctccccctaggtccaaatcctggctaccccacccactagctgtgtgactccggacaagatgcttcacctctctgtgcctctgttttctcatctttaaaatggaggcactgataggacctatctcaagggttgtcgtgaggctgacatgggctcatacctataaaacagtgcctggcgcattagtagacaaataaattgattccatgatcacacttccctgtgcctgcgtgtgctggggagaggggaggctctcgctttgtgcattttcaaatatgtggcaggcagaggcacccgtgatctcctgtctgtggctctcacatcccccacagtcaccaaagattccattttccca

SEQ ID NO: 470828 - DNA, 843 bp, Homo sapiens
gagggcttgcagatccagtccttgagggcatgaggataggaagctggcagttccctgcccaactccaagattttggagctaacttgggggaaattgcttctgttggactttaaagatgaacaaatttagtgcctttgtggagagattctgggccaaggaataccacaagatttagtattttaaagctgcacccgccaccgcgagttttacatgaggaaggagggaaggtcacagctcgatgtgatggctgtgcatgacgtgatcgggtctccagaggcaaagggattcagccgagggcctgtctgtgtgtgcatgtggtatgtgcagttagagtgtgatctatgggttgccgagccatttctgttaattaaacacttcaatataattttgagaagccaccaggccctgctccctgcagccgcaaagcacagacaatggcagccttccctcttgtgccccctgctcaccccggagccaggctcctctgacttcccctccaaatccaaccctcttattcctcagatcaacatgtgccagagggacccactcagctggcaggacccagtcagaacctcaagcgcttcagaatctagtaagggaagtctgcatatcttgttgctgaagacacagaagaagtttgctctagagaatgagcttctgccaatgcacctgcgcgtaaaagtcatgctgcccacagcccactgcatgactaactcagggatctgaaaagcccacctgcttgtctcaagaaagtggtaattattgtgattatgagctattaatgtaatcataactagcaggcaatggagtggcccaggcagtaccttgggcctctgccgtcac

SEQ ID NO: 470829 - DNA, 456 bp, Homo sapiens
cagtgggggactcatggggtgtaaagatgtgactatcagagaaatgcaaagtgccaaagatagcaggcagccaacggttcagggtattgccaacactggggcactgagaaagagctcaagactgacctgggactcacagctgtgtcagatgctggacattgcctgcagtcagatgctggaccatgcagcattggaaatcctgctgaaccatcattccaagcaaaaagtcatcctctacatgaatgatcccaagagggcaggaccactccctcttaagccctcctctcctgttgtagaaattccagtctatgaggatcccccacagcctgttatggttggagatctggcctctacagctattcctttcctccatacccccaaagacaagtacaggtcctttgcattttaagagttttgctaatgattactgagagaaattctacatggagtaatagc

SEQ ID NO: 470830 - DNA, 1587 bp, Homo sapiens
aagctcactcctcctccccttgcctcagctgtgttctccggaagcaggttctgatatgaagattcctgtgaaagacatgcattaggaaacgttcccaggataaaccaggagaaggctctcgatgaatggtggttttaaaaagagggaagagtgattccataagagcttgatttgacaaaagggtgttgagtgcccacagcggctggctcggtgccagacaccatgcggaatggatttaaaatccatcctgggtcttatgatctaggcttgtccaacctgctggaagtgcctgaatcacttcgctgtggagtgagacaggatgaaggcctgaagggctcgccagaggagacgtgctaccaggtgcgagggatagaacaaggacatgctggagtcctggagggggcttctagagagtcgggggagagcagaaaatacactccatacccggaactgcaaggcggaggtggtcataagctaagatggagtcaggaaataagggcggcaggagccgcatgggaaatgaggacagaagttcatatgaatgtatccaaaagggcttcaagagacagcggtgcaagggcaggtgggagacccccagcatccacttgggcacaatccacagctgtgggagtatggatgccccagggggtgaacctttgaccaacaggggataggagccgtggaaagatacttcctccttccccactgcccactcttccccagaggcagttctgagatggaaacatttcatacagcttcttggtggccccagagaatcaagcaaccagtctcccataagagcggccaagcagaaaatgcatccttatcttggctctcctctccctcccactcttcactccatggtaggctgaataatggcccccaaacagatccaggtcctaactcctgatactgtgattgttacctactggcaaggggggtttcagtcacattttgcagatgcaattgtattaagaatcttgatggagagatcaatcccagcttagctggtaggctctaagtataatcacaggtgtcataagaggaaggcagggaaaatgcaattacagaagaaggcaatgagaggatggagtaagatccagtgccattgactttgaagatgcagaaaggggccacataccaagaaatgcaattataggaatgcagctccagaagctggaaatggcaaggaagtggattctcccccatagtctccagagagagcaaggccctgctgacaccttgatttcaacccactgcaactcatttggcatgtgtgaccaccagtaaactgtaaaagaacaagtgtgtgtttctctaagccaccaagtttctagtaatttgttacagcagccacaggaagctcatccggctccccgtccctcacttcatgctccctaggctcacactgtttgtgagatgctcacacataagcttctcctttggctctgctgtttggggaactcagggtaagatagcatctgattaggaatcaggccccagctttgtgtatacagatagcccggttctctcaggcccccactgacaccaacgtgcacctgccctatccttccccaaaaggcaatc

SEQ ID NO: 470831 - DNA, 655 bp, Homo sapiens
tcccgggaatcttcagagtacaaaaggctcttgccaaggcaccaatttaacaatttgacatggcgaatgaacagctgcttttcaattattggacacagttgtatttcaattctcttttaacagctgtgaaacagaattcctattcagaattttataacagtaaaccacacaaaaagactactatcctagaggctacctgcattccttggcttttatccccaatcttccatcttcggagccagcaacaatatattgatcatgaggagagggctcacccctcacccggagaagtagttggggaagcaatatgcggaaacaaagccatgaatctgacaagaaatgtacttaagattgtatatatggagatgaatacccattgtcctttgcactttctggatgataaattagaaaagaaaaatccaaagaatgaagttgtgctatttgtcctcacttctgatttgggaaactagaggaaattaagatgggaaaagaccatgtgaggacacagtgagaaggagaccatatgcaaagcaggaaggaagatctcactggaaccaaaaaccagccctgctggcaccctgatcttggacttctagcctttctcagaactgtgagaaaataaatttctgatgtttcagccactcagcctgtggtc

SEQ ID NO: 470832 - DNA, 617 bp, Homo sapiens
catgtttatctgctgaccttccctccactattgtaaaaagaattataatggaattagacatgcaaagcattcaagacattattgctaaaaaattaagtggtgggcagaagagaaaactaacactagggattgccatcttaggagatcctcaggttttgctgctagatgaaccaactgctggattggatcccttttcaagacaccgagtgtggagcctcctgaaggagcataaagtagaccgacttatcctcttcagtacccaattcatggatgaggctgacatcttggctgcctccacatgccattggctacaacaggtcacatggggtgtaaccctgcaaagttacatggcaaagtatgtggacaaaggaagaggtgaagaatcaggccatccttggaaagttttgaggcactggattagctatggggaatgcagtgaatttctgaggccttaatatttagaaattagtattttaatatactcattgataattttaattgcgttgacttattactattggctttttagatctttacagtgaccttgataagtgttctgaccagggcataaggaattatgctgtttcagtgacatctctgaatgaagtattcttgaa

SEQ ID NO: 470833 - DNA, 2441 bp, Homo sapiens
agtttgactcaaccagactggacccagtgtatgacttcctggcacagtctgccctgtgaggattgggttatcaggaaagttgacttccaaaaagccagaagagaagcttcttaaggcttaggctccaaactggcacagggtcactgctgctgccttcccttggctaatatgattcaaagagatctccaaattcaaggggaaagggcaataccagacaaattggaagaagaaaagaagaaggagaaggaggagaaggagaagaaggtggaggaggagaaggaaggagaaaaagaagagaaggaggagaaggagaaggaaaataaggagaagaaggagaaggagagaaagaagagaaggaaaaggaagaagaggaataggaggatgagaaggaagaagacaagaaaagaggaagaaagaataagaagaaaagaaaaaaataaagaagaggagaagaagagaagatggagagggaagatggaagaaggaagggaggaagaagaatatccttggggtgctggcaggccactgcacatgcagacagcccacaccaagggaagaatcatggacacaggatactgggagtatgcaaatgcaagttgtaaccatttggaaggctcagaaaaagacatgaaaatgtgggaaagtttggagcttcctacagacctgttgaatagctttgaccaaaagcctgatagcaatatggacaataaggtccaggctgaggtggtctcagatgaagatcaggaacttgctgggaactggagcaaaggtggctcttgttatgttttagcaaagagactggcagcattttgccccttccctagagatttgtggaactttgaacttgagaaagatgatttagggtgtctggaggaagaaatttctaagcagcaaaccattcaagagcctgacaatgtaatagaaaagaaaaacccatcatcttctgaggagaaattcaagctggctgtagaaatttgcataagtaatgaggtgctgaatgttaatccccaagacaatggggaaaatgtctccagggcatgtcagtggtcttcacagcagcccctcccctcgcaggctggcaggctaagggaaaaatggttttgtgggccaggcccagggtccccatgctgtgtgcagcctagggacttggtgctctgtgttccagccactgtagctgtggctgaaatgggccaacgtagagcttcggccgtggcttcaaaaggtgcaagcctcaagccttggcagcttctaggtagtgttgagcctgcaggtgaacagaagtcaagaattgaggtttgggaacctctgcctagatttcagaggatgtatgaaaatgcctagatgcccaagcacatgtttgctgcagggaatgaatttaataaaaatcaaattatagtctagttctagtatatgtttatatcttatgaggaaagtgaatactgagatgttactgttattttgctaacctgggaaaagaaatgctaatgaattagttacaaaatgtaaatccggatgtggagggtagttattgtagttaaagaatacattttaagatcaagtgatttatttgcgaccgtttctttacgtatgaagaaaatccatttatataaatatcaattttgtggtaagaattttccatttttaatgttttttaaatggaaaaggaaaaacaaatgtctaaatctttgctataattcaagtaaactcagaatgatatagttccagcagatgtttacctatatagaaataaaatacggagatgtgtacgcagattgataaagatgtgcacatatgtgcatatgttcaaggccaggtctattagcaatcgttttataaatgtgagagttccagtgttaggtgcatatatgttcaggattgtgatattttcctgttggacaaggccttttagcattatataatgtccctctttgtctctttcaactgctgttgctttgaagtttgttttgtctgatataagaatagctaccccgttcacttttggtgtccatttgcctgaaattcattttttcacccctttactttatgtgagtccttatgtgctaggtgagtctcctgaaggcagcaaatggttggtgagttcttatccattctgtggttctgtatattttaagtggagcgtttaggccatttacattcaatgttagtatcaaaatgtgaggtactgttgcattcatcatgctctttgttgcctgtgtacttttgtttatttggttttttgtttttgctttttaacttgtgtttttgttttgcaggtcctgtgtgatttatgctttaaagaggttctgttttgatgtgtttccaggatttgtttcaagacttagagctccttttagcagttcttgtagtggtggcttgttaatggtgaattctctcggcatttgtttatctgaaaaagactgtatctttccttcatacctgac

SEQ ID NO: 470834 - DNA, 717 bp, Homo sapiens
acactgttaagatcagagacaagtaaataaaaataaagtattaatcatcataaataaatcaaacaaattttcctaactagcatgatccagcaaatcaaggttgaaatccgttgccaaaagcctagggctcagcagggggccatgcctggaagaaaggggggttatctttgcactggagggtgtagttgctgtatcttccctgctgttaaactacacttttcagaggctactgacctgggagctttcatcagccttaaacccacttttaataacaacaagctcagggaatctggggagttgttcaccaatgtctggaactctgacagatatcttctagttctgcttgaccattcaaataaacattataaattctactgtggagatgcttccaacatagatgtaattgatgatgaaatcaatgactgttcaactgctgttctgataagggagataaagtgcagatggagtcagggatcaaagcttctgttgggaagaaatgcttgggttgggtgctacagatgcaacgagagttcagcagaaagcagttttgaggaactctattcccagagcaatctaaatccaaagctgggtggaaacagtactagttggtagaagtaactttggcttaaagggcaagctatgtttgctatgtttacagaccaatggtaaaataaaacaaagataatataagtaaaattttatctgcatctatattta

SEQ ID NO: 470835 - DNA, 1494 bp, Homo sapiens
taatccaatgtgtcaaaaatatcatttcaatataaagataatcaatataaaacactttaaatcagcagcagaactgcatgcttactggaatcaaggtttggatctagagctatggccacgggagaaaaatggtcaccttcccagcctcagcctttcctgtgaatggtcccccttatatgtttctttccaggctaatggtccattatggcaccagccatgtggaaataacatctcagggctgcctcatctgatttcatttttcccaagacaatatgcagctgcatatgccaaagtggagactgtcgagaacacccactacttcatgtgggaacctgagaaaatggaaatcagctcagatgagcagactggaatgttcccaacagtcataaacaaggccagcacaaggccagatttgaaaagtaatacacccacagcagaaaactgaaagacaactaaatgtccatcagtaggggacagggtggttgcattaattgcgacacacttgtggatgcaatactatgcagtcattaaaaagaacaaagcagctctattggtactgaaatagaactatctctaagatgggaaaaaataaggtggctcaagttctacagtatgctgtcatttgtatttaaaatgtatatatgaatatgcactggtaactggttgcttttgtgaattcagtagagggacaagcaggaggcagcttatttttctgtaaccataatctcctcctcccccagacatagaccttgatgtgtgctttctcttccctcttcctattataaaaataaattatgctcattgtagaaagtgaaaatatagtgtgactgtgtacttttgctctggaatgaaacttgagctgaaaatctggttccattgctaaccagctgcattaccttacagaagtcactcatctaatatgcctgtgcctcaggagaaataggatagaggttgggtaaatactaagtgagcacccatcttggaaagtatatatatatatatatatatatatatatatatatatatatatggaaagtatatatatatatatatatatatatggaaagtatatatatatatatatatatatggaaagtatatatatatatatggaaagtatatatatatatatatggaaagtatatatatatatatatatggaaagtatatatatatatggaaagtatatatatatatggaaagtatatatatatatatggaaagtatatatatatggaaagtatatatatatataaatggaaaaaatatatatatatggaaagtatatctatatatatagatagtatatatatatggaaagtgtatatatatatatgtatatatggaaagtatatatatacacacatacttctctttttgagaaagagtcacccatgctggagtgcagtggtgcaatctcagctcactgcaacctctgcctcccaggttcaagtgattctcatgcctcagcctcccaagtagctgggattacag

SEQ ID NO: 470836 - DNA, 1096 bp, Homo sapiens
ggagtgagggctgcgggctgaggaagcaggcaggcttggtagtaacaagagcacacaatgatcaatggttcccaagggggcatgcaattggcttgtttgaataaattcatgggctggcagacagaggagctctatggtgactttgaagacttggaaacaggggacgtgcacaagggaaaatcgggccccgatactcagagaaacaaggaagaaattgaccccgacaaagaagaaagtgccaagaaaaagcatttggataagaagagaaaattgaaggagatgtttgatgaggaatatgatgaaggagaaagcacatattttgatgatcttaaaggagaaatgcagaaacaagcacagctgaatcgcacagaatttgaagatcaagatgatgaagccagagttccatatgagggttttcggcctggggtgtacgtccgcgttgagattgaaaatgttccctgtgaatttgtgcagaactttgacccccattaccccattatcctgggtggcttgggcaacagtgagggaaatgttggagacgtgcaggtgggtccctttgctgcatatttggtgcctaaggctctgtggatttcccctccatcaatcatcttacactctcatccccctcagatgcatctgaagaaacatcgctggtataagaaaatcctcaagtcccgagatccaatcatattttctgtagggtggaggaggtttcagaccatcccgctctattatatcgaagaccataatggaagacaaaggcttctaaagtataccccacagcacatgcattgcggagcagccttttgggaaggagctttccgggccagctttgaggataagctgctgatgagcgatattgtcttcatgcgaacttggtatcctgtttccatcccagccttctataacccagtaacatctttgttgaaaccagtgggtgagaaagacacctggtcaggaatgtggaccacgggccaactcaggctcgcctatggtgtcagactaaaggcaaataaggactctctgtataagagtttaagaagtaaactccaggggatgggagtgactctggacatgggagtgacatgatagtgac

SEQ ID NO: 470837 - DNA, 1684 bp, Homo sapiens
gccgaggacagtcctttcctttcccattgtctttggatgactatccctgggctgggacatgaggcaggcagaggcgcgggtcacccttagggcccccctcttgctgctggggctctgggtgctcctgactccagtccggtgttctcaaggccatccctcgtggcactacgcatcctccaaggtggtgattcccaggaaggagacgcaccacggcaaagaccttcagtttctgggctggctgtcctacagcctgcattttgggggtcaaagacacatcattcacatgcggaggaaacaccttctttggcccagacatctgctggtgacaactcaggatgaccaaggagccttgcagatggatgacccctacatccctccagactgctactatctcagctacctggaggaggttcctctgtccatggtcaccgtggacatgtgctgtgggggcctcagaggcatcatgaagctggacgaccttgcctatgaaatcaaacccctccaggattcccgcaggcttgaacatgtttctcagatagtggccgagcccaacgcaacggggcccacatttagagatggtgacaatgaggagacaaaccccctgttctctgaagcaaatgacagcatgaatcccaggatatctaattggctgtatagttctcatagaggcaatataaaaggccacgttcaatgttccaattcatattgtcgtgtagatgacaatattacaacttgttccaaggaggtggtccagatgttcagtctcagtgacagcattgttcaaaatattgatctgcgacctatccaaaatatatgtgaccttccagagtactgtcacgggaccaccgtgacatgccccgcaaacttttatatgcaagatggaaccccgtgcactgaagaaggctactgctatcatgggaactgcactgaccgcaatgtgctctgcaaggtaatctttggtgtcagtgctgaggaggctcctgaggtctgctatgacataaatcttgaaagttaccgatttggacattgtactcgacgacaaacagctctcaacaaccaggcttgtgcaggaatagataagttttgtggaagactgcagtgtaccagtgtgacccatcttccccggctgcaggaacatgtttcattccatcactcagtgacaggaggatttcagtgttttggactggatgaccaccgtgcaacagacacaactgatgttgggtgtgtgatagatggcactccttgtgttcatggaaacttctgtaataacaccagtgtattctattattttgtgggtgaacgctaatggacagaggttgtaaagtccatttcacctagtctataccacagactatggaaactatatatatatatatatatatatatatatatatatagtgctgtccctctagagaaccctaatatgtatatataatatatataacatgccctgtcattaagatcaatgggaaactacaacagtatatatatatatatatatatatatataatatataaaatatatatataatatagataatatatactatatataatagtatatatactatatataatatattatttatgtattatatacattatattatattatatatgtattatatacattatattataatattatatatgtattatataatatattaataccttgctaatc

SEQ ID NO: 470838 - DNA, 558 bp, Homo sapiens
ttgtctgagctgaagagttcgagatgaatctgggtaatacgaagggagtcttatgcactgtacaaggtgttactgccaaaagctgcaacccaagtaaaggacctgctaatctgcctcatggccaccgcttcagaccttggaaagtgacacgaggctcagcgttatcacataactgcagtgtggaccagcaactgctgagcacaagcagtctattcaccctcctcagtgtcatacctttctgctgtcttctgattgagttctctgcctacactctcctccaggtgatagttgtagcctttacagcaaaccagtggacaagaagcatcagggtctttggaaattttgctgtgcattggaccagtgtccctgacactgttggtccaggtatcatacattgagaagcactggatatgtgcaccttggctgttccaagtagggtctgcaaccagaggcattgacatcattttgggaacttgtaatgcagaatctcaggccccagctcagacctactgaatcataatctgtaatttaataagatccctaaaaaatttttaagca

SEQ ID NO: 470839 - DNA, 769 bp, Homo sapiens
tgggaactctttgcagataagaaaaatggtataatggcgcccctgctggagagtcaaagaattttgtcatatgactcgtgcaaggtcatataaatccctggaacagtcctctttcctagaactgacagaggggagaaatcatttttctctgctgctgctgctgctgcttcttcttgtcgttgtcgtcttcttcttcttcttcttcttcttcttcttcttcttcttcttcttcttcttcttcttcttcttcttcttttcttcttctccttctccttctcctccttctccttctccttcttcttcttcttcttcttcctcttcttcttcttcttcctcttcttcttcttcttcctcttcttttttttttgagacagatgaaaatgctcccacaaccaatgccctttcccccaaagcttcctgcctccagactgacagcaagcaagaaactatctgtcggtgtttaattcctccgcttcctccacctattgggactgacccagagttgacagcggaaacacctacacaataataggtagaaggatttcccagggagctttggttcgtatgtgggcttgcagtatttgggtagctgctttctccagcactataatttcccttgtaccatttttttcacccgggcctataacagagagatggctgcagactgttcccatgaatagcatcaatctcttcaccttctggagcttcagcttgtactcttaagatggaatccagctggctgggtgtaaatgtgctttgtttgtgccaa

SEQ ID NO: 470840 - DNA, 1310 bp, Homo sapiens
tgcccagcagctcattgagaacgggccatgatgacaatggcggttttgtggaatagaaaaggcggaaaggctgacttcatcccgctggatggaattccagccaatgtgatccaaagagggaagcagtaccaggctgcagccctcgtcatgctgaagatggagcctcctgggaagctgctacccatggtcatccaggcagtgagcacaggtggagggggccatgtgcagttgctccattgggcagcggctcagctgacctgctgctccctctgttgtcctgatgacctggctgcctgtggcctgctgggactcccaccgccttctcccctgggcaggtgtgtggagatcgtccacctcctccaccaaagggatgacacggtgagggtggaccctgagctgcaggcctgggatcaggagatcatggaggtggggctgtgccaggcccaggaccgagtgctgcccttctggggacaggaccccaccctctcctcacacctcccttcctccacacaggagagcatctgcatcccattcccacctccccagactcaggacacttctagagacctgaggactgtcctcctcggagaccctggccatcaaccctacccccaccccaccccagtcacagatgcccctgagctgccatatcctggggcccaaccaggccagagccacagctgtgagggggtctgccggtccctgctggggctcatgttctcacttcacgtttgtctgctttttacctaaggatgcaaacagggagattttcccttccaaagctcagagtgacctaccttggctttccctcccttcccctcctgcctgctactgtccagcacacacgaagggcacagacctgctgcacccccgcagcagtgcaaggccagctctagaggccatctcaatactgtatatgctttggctccaacctgaactcaatgccctgacgcttgggtcagtcccttccctaggatctagctgctaccttttgtccccgcccactgcatttttatttatggagaagacatagcctttcttgggcccttcccaggttcattttcctctctctcgcacacatgggccagccaggattgtttcaggtcatccttcagcttctctcccttcatccttcagagcaacaccttgagtcccaccctttgcctgtgtgggaaaacgcaaacacccactggccaggccccggggacgcccatatcaataaattaacccctgccttaaaggggagtcttgccctggaggacctggggctacaccaccttacccatcccaccccaccctttgggcccttc

SEQ ID NO: 470841 - DNA, 804 bp, Homo sapiens
agcacatacatcctcaacaactcatgaaacatttccaggttagctttttcctatcttcaatactatacaacgagtggcacctgctccaggtgggacatcctgaaaacctcactaggcatgtcccacatcgccctggagctgtctcaggggagcagtctcctccagtgtttagaggcacagacacaggtgcccagtgtgaggtgcagctggtggagtctgggggaggcttggtacagcctggggggtccctgagactgtcctgtccagcctctggattcaccttcagtaaccactacatgagctgggtccgccaggctccacggaagggactggagtgggtttcatacattagtggtgatagtggttacacaaactacgcagaaacacacagcgaggggaagtcagtgagagcccaggcacaaacctccctgaaggggtcccagagaccaccagggggcgccaggacactgtgcacggggctgtctccagggcaggtgcaggtgctgctgagggctggctttctgtcatggcctggggcagcctcatcatcaacatattgtcatttattcgattcgtagactgactctgatatgaaacctcaaagttttcacgtacgtatggagagagagagaggaaggagaaagattttatatctgagtcagtccattaagtaaataaatgagaatattttgatttattttcctgttgatgtactttaaatttgtttccattttatgaatattataggcaaagctgtttcaaatatattagtgtaggttttcctatattgtttcatttttgtta

SEQ ID NO: 470842 - DNA, 767 bp, Homo sapiens
ccctgtagcacagctgagctacagagtctggccacctccgagttggagtggcagctctctctccacggggcctgcagaggctgggccacctctgagttggagcgacagctctctctctatggggccagcagagcctgggccaggtgtacatcaggtccagcttctgtcctggcctctgccaggtgttacatccaacaaaccttacacagaggaagccgctgacgaattccaacaagaactcacgagaaaaactctcagaaaactaggtctagaagcgcacttcctcaacctgataatggctgtattgcgtccatttaacattatactggagacattacgcagtgcaacaaagcaagaaaaagaaattaaagacataaacatcggaaataaagaagtcaaactgtatgtattttcagatgacataattacacacatagaggatcttaagaaacctttcaaacagctcccagagccaataagtgaatgtagcaaagttagaggaaatgaggtcactatgcaaaaatcaattacatttctatatgctgtcttaaataatttttaaactgacattaatttaacaaaatatttgcaagatatgtacagataaagctccaaggcaccaagacaactaaatcagtatgtgatgattatggaagatgaagccactatgtgcatgggtcagaagactccatattactaggatggtaattctcctcaaattcatctagatttaatgtaattccagtcaaaatctcagcaggcttctc

SEQ ID NO: 470843 - DNA, 2970 bp, Homo sapiens
ccaagaagtctgtgtcttgtccggtggagagacaaagctcccgtggtccagacgctgctgggtttgcatctgccgtgcctatctcagcctgcaccctgagatgcacgggcgcttggcccaatgcctcctggagcacactggacactggaagcattctgtggttgccgagggagcagtcggacagaggttccaacagcaagtgacaggcaatgacagtgctccactcacctggtacctgtctgccaggcccaggaggaagcatgctgaattccttctttcccaccacactactgggtgcatggacgagtacacaggagagctctttgctttagggggctctgctagtaaccagggctgtgctagtagccaggacagtgctagtagccagggctgtgctcgtaaccaggacagtgctagtagccagggctgtgctcgtaaccaggacagtgctagtaaccagggctgtgctagtagccagggctgtgctagtaaccagggctgtgctagtagccaggacagtgctagtagccagggctgtgctcgtaaccaggacagtgctagtagccagggctgtgctcgtaaccaggacagtgctagtagccagggctgtgctagtagccaggacagtgctagtagccagggctgtgctcgtaaccaggacagtgctagtaaccagggctgtgctagtagccagggctgtgctagtaaccagggctgtgctagtagccaggacagtgctagtagccagggctgtgctcgtaaccaggacagtgctagtagccagggctgtgctagtagccagggctgtgctagtaaccagggctgtgctagtagccagggctctgctagtaaccaggagagtgctagtagccagggctctgctagtagccagggctgtgctagtagccagggctctgctagtaaccaggagagtgctagtagccaggacagtgctagtagccagggctctgctagtagccagggctgtgctagtagccagggctctgctagtaaccaggacagtgctagtagccagggctgtgctcgtaaccaggacagtgctagtaaccagggctgtgctagtagccagggctgtgctagtaaccagggctgtgctagtagccaggacagtgctagtagccagggctgtgctcgtaaccaggacagtgctagtagccagggctgtgctagtagccagggctgtgctagtagccagggctgtgctagtaaccagggctgtgctagtagccagggctctgctagtaaccaggagagtgctagtagccagggctctgctagtagccagggctgtgctagtagccagggctctgctagtaaccaggagagtgctagtagccaggacagtgctagtagccagggctctgctagtagccagggctgtgctagtagccagggctctgctagtaaccaggagagtgctagtagccagggctctgctagtagccagggctgtgctagtagccagggctctgctagtaaccaggagagtgctagtagccagggctctgctagtagccagggctgtgctcgtagccaggacagtgctagtagccagggctgtgctagtagccagggctgtgccctcaacccttgctgccgagggcaaagtagcaaagcctccctcggtccctgtggcttcttctctgcacggcggaacctgcaagagcaccctgccccctgccagatgggtgccttcacccccggaaacattttgttcatcatcagctgctgtgtttctgcttacttctctaatgaactgagtcataagagagagagccttggctaatttcaggagagagacgggaagacaggaagggttccaattctgttaacaaggaggagagggaaagctggagacactagtaagagctgagcataaagtgggtgttattcccagtgcgcaaagacaatctaataaggctggatccagacacatgtactcactccaccttctaaaacaaacaccaattagaaaggaacgtatgtgaagcactaggaatgtgctgcggcatggcaccaaaagctgtgtgtgtgtgtgtgtgtataggtgagtgtgtagatgtgcatgtatgagcatgtacctgtgtgtatgtgtgcatgtgtgtacatgtccatgtttctgtgtgcacatgtatatgtgtatgtttatgtatgtataggtgggcatgtatatatgtgtatataggtgtgtgcatgtgtgtatgcacatgtatacatgtgcgtgtctatatgtgcatgtatgtgtgcgcacatgcatgtgtatgtgtgtgggtgtgtctatggtgtctatgtgtctctgtgtatatgactgtgtgtgtatgtgcgtgtgtttatatgtgtggacatgtatgtatatgtgtgtgtgtatgtgtgtggcatctatgcatgtctatatgcatatatgtctatgtgtgtgcatacatgtatgtaaatgtaggtgagtatacgtgtacatgtgtgcatgtgttgtctatgtgcatgtgtatgtgtacatgtctgtatgtgcatgtgcttatatacgtgtgtgtgtgtgtacctgctcctcctaaacttgattgtgctgtgcgtctgcatccttcctccaaacctggcctctgcacgcatgtgctgccatccccttctggaatgaccaccgtcgatgctccgcctccagccagctcctccccttgtgtaatggatcctgttcccttcacacctacttaagggccgccctcaggagctctctctccctcccacacatcagcttttccctctctgccaggttactcccattagcacaaacacatgctctcataatgtccatgtgacgaaaacaaacctccctcaggagcttccacatggcatcgcccaccctctcttgaacagtttagaatcacatgagagcccaccaccctgcgttgacactgcttttgttaaatccagcaatggccccgtgtgcacaaatacaac

SEQ ID NO: 470844 - DNA, 1268 bp, Homo sapiens
tcctagagcagagaccaactggggccatccatggccctgtgccatgctgcctcctggacgcacgctaggaggtggagatggtccagccccagcaggactgggccacgaggaccctgccggtaacctggtgctcaccgcccacagatcacggggcgtggagggagagactgccagtgctgtcctagtgcagcacagcatggaagtgggtgggggaggagaggagcatgcttcccccaacccctggggacctgtgagcgcagcctgcaagctccggctccaggaggaagcgtgctcaagtgcacctctgaccacgtcacgctgcgagaacgtgggcgctacacctccgaccacatcgtgctccgagaacgtggacgctgcacctctgaccacgtcacgctccgagaacatggacgctgcacctctgaccacttcctgctccgagaacgtgaactctgcacctctgaccacgtcacgccccgagaacgtggacactgcacctctgaccacatcatgctccgagaacgtggacgctgcacctctgaccacatcatgctccgagaacgtggacgctgcacctctgaccgcatcatgctccgagaatgtggacgctgcacctctgatcatgtcacactccaagatcatggacattgcacttctgatcatgtcatgctctgagaacatggacgctgcacctctgatcatgtcacgcttcaagaacgtgaacactgcacctctgaccacgtcacgccccgagaacgtggacgctgcacctctgaccacatcatgctctgagaacgtggacgctgcacctctgatcatgtcacactccaagatcatggacattgcacttctgatcatgtcatgctccaagaacaactacacgcagtacatccctctgtccatatatgacctgcagacgtggatgggcagcccgtcgatcttcgtctacgactgctccaatgctggcttgatcgtcaagtccttcaagcagttcgcactacagcgggagcaggagctggaggagcaaaaatgatcttgagtatgtttcctcaagcctttttgaatatattcaattttaatgtattatgttttcacatttcatcatagaaaaatgctgaaacaatcagtaacaaaatttgaaattctgtttggtagattttcacattaacatgtgtacagttgaatattttataattattaattctttatgtggaacaccgcaaaagagtgactgataagtataatgtggtttatccatgaaaaaggat

SEQ ID NO: 470845 - DNA, 1245 bp, Homo sapiens
agacatgagtgctgatgatgcagctggctgtgtggagccctctctgcacctgggcggcacaggacacagacacgagtgctgacgatgcagcttgctgagccccaggctccaagagccaacctagtgcctcatggctatgacccccgtgagggtgctcatggctatgacccccgcgagggtgctcgtggctatgacccccgcgagggtgctcgtggctatgactccggcgagggtgctcgtggctatgacccccgcgagggtgctcgtggctatgactccggcgagggtgctcgtggctatgacccccgcgagggtgctcgtggctatgacccccgcgaggctggttttcccgacgtctgctcagctctcagcagagaggagaccctggagtgggtagctcctctccgcagctggttttcccgacgtctgctcagctctcagcagagaggagaccttggagtggctggttttcccgacgtctgctcagctctcagcagagaggagaccctggagtgggtaactcctctccgcagctggttttcccgacgtctgctcagctctcagcagaggagaccctggagtgtgcagctcctctctgcagctggttttcccgacgtctgctcagttctcagcagagaggagaccctggagtgtgcagctcctctctgcagctggttttcccaacgtctgctcagctctcagcagagaggagaccccggcatgggtagctcctttctgaaggcaggttatgccatcgtttccttgagtctggctgagtccagggtttttatgggcttcaaaggggaggaagtatgtgctgactgattcatgggcagccatgggcaggcttggaaaaagcactaaaagttcccattctggtccatcagcccagcccccaggcttcaggctgtccctggcttgaaggtggcacttcactggggacctgcccctttctgcccaggaccctgtctgcctcctgccatcatccataacacccaggctgattgtgccaaggggcacctgcaggccagtgccaaactgccctcagtccccaccctcagcctccctcccatgctcgttggtgcccaaagtccagaggggctgacatagcaggggtgtttgtgcagtcttacgactttcttttcttccttatttccttcctgtctgctttactgcctccccttcttggtctcagaccataatgtgtaacaaacatatatttttaaacattattttaaaagacac

SEQ ID NO: 470846 - DNA, 522 bp, Homo sapiens
tgtcctttttctgtcccaggatcccacatgacattgagtcctcgtgtcttcttgggcttctcttggccattgggatttggagaggaagaccacagaggggagtgcccttctggtcccgtcataatgagggtgcatgctgttggaatggcagatccctggtggcgctggcctgggtccctggctgaggtggagcagacccggctgagaggttgtgatatgcagaaaatcaacaagattgcattgctagggagcacgtttgtgaagctggcgtcttccacagaagctgtcatcagcgaggaggggctgttgaggggacacatttgtgaagccagcatctttcacagaagctgtcatcagcgaggagaacccagtgctttttctgttgccctggccctctgggctgagtctttacgtggacggcggtcgatgcatctcagtttatttgtcaaaaccttcagctaaagccagttgttgcttgaaaactgcctgcttaattggcctcctcagctcgggggagcagct

SEQ ID NO: 470847 - DNA, 822 bp, Homo sapiens
agcagtcgcatgaccgcctctgccgggtcctccagccctccccctgcttctctgcatctgggcccccttgctttgccgcctgcctggttcccctggggagcagccctgctctgccagcccagcctgtgcttccagtcccatcccccagcctgcccgaggatgccctccagcagcctttccccaccctccgtgcccccagctggagcgttcttgctgctgatccggggcccagtcagctctccatccttatctcgcctggcccggtgctggtttgtggctctgccctggacgttgctccctggcgtccagacctttgagctctgctttccctccactgccgggccctcaccggccccagcgcggccccagctcatctccttgcacagcccgttcttcgccgagcagctgaccgcattccaggtgtggctcaccatgggcgtggagaaccgaaacccacccgaacagctgcccatcgtcctgcagtgctcttctcccaccacagggaagctcctccctctccacggctccccagggcccatgctcctgactcggtggctcctccgtggaagtcgtgctggccgacccccaggagcttgacccaggtggccgccatctcctctcccctcccccgatcctccaccctcactggcctcctcgtccctttcccctgcctctcttgagggttttcaaactcatcccaaaccttcttttctagagtttgctttccttcaccccttcttctctcagcctctggccagtgctgcagtctcctcctccccatctccgtattggcaccctggtcaaacccacccccttccactc

SEQ ID NO: 470848 - DNA, 2900 bp, Homo sapiens
tggaatcaacaaaagttggaatggaatggcatgaaatggaatgcaatgcaatggaatggaaccactaagagtggaatggattggaatggaatggaatggaatgaaagggaatggaatcaacccgagaggaatggaatggaatggaatgcaatggaatggaatggaatgcaatggattggaatggaatacaccagagtggaatggaatagaatggaatggaatggagtggaatcaaccccagtggaatggaattgaatggaatggaatggaatggaatggaatggaatggaatgcaatggaatggattggaatcaaaccgagtgtaatggaatggaatggaatggaaatggaatggaatggaatggaattgaagagaatggaatggaatgcaatggaatggaatggaatggaatggaatggaatggaatggaatggaaaggaatcaaccagagtggaattgactgtaatggaccggaatggaatggaatggaatggaatggaatggaatggaatgggaaggaatggaatagaatggaatggaaaggaatggattggagtggaatggaatggaatggaatggaatggaatggaatggaatggtatcaatgcaagtgtaattgaatggaatggaatggaatggaatggagcagaatggaatggaattgatttgaatgcaatggaatcacctggaatcgaatggaatggaatggaatcaaatagaatggaaaggaatggaatggaatggactgcagttgaatggaatggaatggaatcaacctgtgtggaatgtaatgcaaaggaatggaatggaacggaatggaatggaatggaatggaatggaatggaatggaatggaatcaacaaaagtggaatggaagggaatggaatagaatggaatggaattggaatggaaaggaatggaattgaagagaatggaatggaatggaatggaatggaaaggaatggaatggaatgcagtgcaatggaatcaaccagagtggaattgagaaatcaacacgagtggaatgaaatggaaaggaatttaacggaatggaatggaatggaatggaatccaatccaatgtaaaggaatggaatggaacggaatagaatggaatggaatggaatggaatggaatggaatggaatggaaaaaattcgagtggaatggaatggaatgcaaaagtggaatggattggaatggaatggaatggaatgaaagggaatggaatcaacccgagaggaatggaatggaatggaatgcaatggaatggaatggaatgcaatggattggaatggaatacaccagagtggaatggaatagaatggaatggaatggagtggattcaaccccagtggaatggaattgaatggaatggaatggaatggaatggaatggaatggaatggaatggaatgcaatggaatggaatggaatcaaaccgagtgtaatggaatggaatggaatggaaaggaatggaatggaatgaaatcaacccgaaatgaaattgagtggattggaatcaatctgagtggaatggaatggaatggaattgaagagaatggaatggaatgcaatggaatggaatggaatggaatggaatggaaaggaatcaaccagagtggaattgactgtaatggaccggaatggaatggaatggaatggaatggaatggaatggaatggaatgggaaggaatggaatagaatggaatggaaaggaatggattagagtggaatggaatggaatggaatggaatggaatggaatggaatggtatcaatgcaagtgtaattgaatggaatggaatggaatggaatggagcggaatggaatggaattgatttgaatgcaatggaatcacctggaatcgaatggaatggaatggaatcaaatagaatggaaaggaatggaatggaatggactgcagttgaatggaatggaatggaatcaacctgtgtggaatgtaatgcaaaggaatggaatggaacggaatggaatggaatggaatggaatggaatggaatggaatcaacaaaagtggaatggaacggatggaatggaatggcatggaattgaagagaacggaatggaatgcaatggaatggaatggaatggaatggaatggaatggaaaggaatcaaccagagtggaattgactgtaatggaccggaatggaatggaatggaatggaatggaatggaatgggaaggaatggaatagaatggaatggaaaggaatggattggagtggaatggaatggaatggaatggaatggaatggaatggtatcaatacaagtgaatggaatggaacggaatggaatggaatggaatggaatggaatggaatcaacaaaagtggaatggaagggaatggaatagaatggaatggaatgcaatggaattgaaagcaaaggagtcaacccgaatggaattgaatggaatcgaatgcaatggaatggaatggaatgcagtggaatggaatggaatggaatggaatggaatggaatggaatggaatggaatggaacggaatggaatggaatgggatggaatggaatggaatcagccagagtggaatagaattgaatggaacggaattgaatggaatcaacccgagtggaatggaatggaatggaaaggaatggaatcaaccagagtggaatggaattgaatggaatggaatggaatggaatcaacccgagtggaatggaatggaatggaaaggaatggaatggaatggaattaacccaagtgaaatggaatggaaaagaacggaatggaatttaatggaatggaatggaatggaatcaacctgagtggactggaatgaaatggggtggaatggaaagcaatggatttcaatggaatctgccagagttgaatggaattgaacggaatggaatg

SEQ ID NO: 470849 - DNA, 901 bp, Homo sapiens
cggaatagaatttaatggaatggaatggcatgcaatggaatcaaccgagtgcaatggaatggcatgaaatggaatgcaatgcaatggaatggaaccaataagagtggaatggattggaatggaatggaatggaatgaaagggaatggaatcaacccgagtggaatggaatggaatggaatgcaatggaatggaatacaccagagtggaatggaatagaatggaacggaatggagtggaatcaaccacagtggaatggaatggaatggaatggaatggaatggaatggaatggaatgggatggaatgggttggaatcaaaccgagaatggaatgaaatggaatggaatggaatggaatggaatggaatggaatggaatagaatggaatggagtggattggaatcaatctgagtggaatggaaaggaatggaaaggaatggaattgaagagaattgaatggaatggaacggaatggaatggaatggaatggaatggaatgcaatgcaatggaatcaaccagagtggaattgagtgtaatggatcgaaatggaatggaatggaatggaataaacctgagtagaatgcaatggtagggaatggaatcgaatggaatggaatggcattgaatggaatcaacacgagtggaatggaatggaatggattggattggaaagttatggaatcaacccgaatggaatgtaatggaaaggaatggaatggaatgcagtgtaattaacccgagtggaatggaatggtatggagtgaaatggaacggaatggaatggaatgaaaaggaaaggaaagcaatggaatcaaaacgagtggaatggaatggaatgtaaagaaatgaagtggaattcaatagaatcaacaccagtggaatgaaatggaaaggaatttaa

SEQ ID NO: 470850 - DNA, 456 bp, Homo sapiens
ccacgtaagatcgtcgagatgtctacttcgatgactggcaagcacggccatgccaaggtccacctggttggtactgacatctttactgggaagaaatatggagatatctgcctgtcaactcataacatggatgtccccagcatcaaaaggaatgacttccagctgattggcatccaggatgggcacctatcactgctccaggacagcatggaggtgcgagaggactttcgtctgcatgagggagaccttggcaaagagactgagcagaagtacagctgtggagaagagatcctgatcatggtgctgtctgccatgaccgaggaggcagctgctgcaatcaaggctcccagggcatctgggagagccctgcccccacgggctttacccttccctgcaggctctctccccgacacatttgttaaaatcaaacctgaataaaactacaagtttaatatg

SEQ ID NO: 470851 - DNA, 2405 bp, Homo sapiens
ccttttcctctcagtcagcccccacctcacgggcctgccctgcagggtgtcggggggctcttccttcttgtttttctagccttcgctcagctcagtcagtcggagcctgaccgtgggggcagctcctctctggggccggagaatcattcctgtctcctgtcgaaatgacccttggtaggaagacatagatatgagtatagacatagatatggatatggatatagatatggatatggatatagatatggatatagacatggatatagatatggatagattggaaatggatatggatgtggatatagatatagatgtggatatggatatagatatggatgtagatattgataaggatatagatatggatagattggatatggatatagatgtggatatggctatagatgtggatacggatatagatatggataggttgaatatggatatggatatagatatggatatggatatagacatggatatagatatggatagattgaaaatggatatggatgtggatatggatatagatgtggatatggatatagatatggatgtagatattgataaggatatagatatggatatagatatagatatggatatagatatggatagattggatatggatatagatgtgaatatggatatagatgtggatatggatatagatatggatgtagatattgataaggatatagatatggatatagatatggatatagatatggatagattggatatggatatagatgtgaatatggatatagatgtggatatggatgtagatatggatgtagatattgataaggatatagatatggatatagatatggatagattggatatggatatagatgtggatatagatatagatatggatatagatatggatagattggatatggatatagatgtggatatggatatagatatggataggttgaatatggatatggatatagatatggatatagacatggatatagatatggatagattggaaatggatatggatgtggatatggatatagatatggatgtagatattgataaggatatagatatggatatagatatggatagattagatatggatatagatgtggatatggctatagatgtggatatggatatagatatggataggttgaatatggatatggatatagatatggatatggatatagacatggatatagatatggatagattggaaatggatatggatgtggatatggatatggatgtggatatggatatagatatggatgtagatattgataaggatatagatatggatatagatatagatatggatatagatatggatatagatatggatagattggatatggatatagatgtgaatatggatatagatgtggatatggatatagatatggatgtagatattgataaggatatggatatggatatagatatagatatggatatagatatggatagattggatatggatatagatgtggatatagatatagatatggatatagatatggatagattggctatggatatagatgtggatatagatatagatatggatatagatgtggatatagatatagatatggatatagatatggatatggatgtggatatagatatggatatggatgtggatatagctatggttgtggatatagatataaatatgtatagactggatatggatatggatgtagatatggatatggatatggatataaatatggatacggacatagacatatcatagatatggatgtggattacaaatgccctctcagactctctcaaggactatccatagacccctcctgatgccgtgcatgcgtatgtgtgtgtttatgtgtctgtgtgtgttcgtgtgtgcttgtgtgcatgcttgtgtgtctgtgtgtgcatgtgtttgtgtgtgtgtgcatgtgtgtgtgcatgtgtgtatgtgtgcctgtgcatctgtgtgtgtctgtgtgtgtgtgtttaggtgtgtgtatgtgtttgtgtgtgtgcgtgtgtgtgtgcatgtgtttatgtgtgcatatgcatctgtgtgtctgtgcatgtgagtgtgtctgtgtgtttatgtatgtgtgtgcatgtttgtgcatgcatgtgtgtgcgtttatgtgtgcatgtgcatctgtgtgtgtctgtgtgtttatgtgtgtgtgtttgtgtgtttctgtgcgttctgtgtgtgtttgtgtgtgcatgcgtttgtgtgtgtgtgcatatgtttgtgtgtgtttatgtgtgtgtgtttatgtgtgtttgcgagtttcatgtgtttgtgtttgcgagcatgtgtttgtgttctgtgtatgtgtgtgtgttttgtgtgtgtgcatgtgtttatgtgtgtttatttgtatatgtgtttatgtgtgtgcacaagc

SEQ ID NO: 470852 - DNA, 847 bp, Homo sapiens
ctaatgctgagcagcactgcggtggaagctggaagcctggattctgggctggctccggctgcttcctcccggtgtgaccttgggcaaggctatctgcgctttgtgtacctcatcggtaaaatatagaacttacccactcacaggtatgtgcaagtcaaatgagccagtatgactgcctcttaggaagcccacggagggtcctccttggcactagttgtgcgctgacctatggacactgggagtcccagatcctttggtcacacccgtccgtaaccatggggagcacactggttttcaatcagaggcaaaccaggacttttgaagataaatccagtcccattaagccggacatctggaaagaagcaggatacatttgtgtgaaagaggacagagaagcaggacccagggacctggggcattcatgcaccaaaccctgctgggctttgactgagggctgctttggctgggggcaggtgttgcttccctggcacttctggtctgctgcgctcgtggccagagaaagaggcgcaggcgctggcagtgggagctcagtcagcaagcccggaaatggaatgggctgcgggcagtgcccgcacctgcaccttccccttcggccctaacatattctatctttgtccttgtcacttattgttaatctgctcaccagtgtccactcccctttggactctgagccccccacagaggcagaaagtggtgtcggaagcatctctgctttcctagtgtctagcagggcctggccctcagggccactggttgagtggaatcgagcaacctcaatccttccccactcctgctgtcccttcgtccctcaaggaggctcctactc

SEQ ID NO: 470853 - DNA, 415 bp, Homo sapiens
atgctccttatgatatcacagaaatgctgaaagtcaaaggatggaaaacagcacaggtttatttctggctcctcattcaatgctccctagaggatgtggccagcattgctgtattcacatttcatcgccaaggcacaccacacggccgccactccctccagggaccaaggagcacagcccttcatgcacagagggagcccagtgccacacggtccctgcaggtggccagcccagggggagagaccaagagtgggctgtggctttcacttttggccatggtcaaagacttcacctcggccggcaagacggtgcctcttgctcagaccccttcccggaccaaaggacaaacagtgaagcacgggctagagccctcctcacccaattgtcatttttattggtagccctggattcttcc

SEQ ID NO: 470854 - DNA, 995 bp, Homo sapiens
gattgcagtaggagagattgagcaccttctctccccacaacccctccagcacccccagctcctgccctgcccccatcccctcccggcatggtttgaatatcctctgtggcctccaccttgatccccgtcccctacttggggctccccagtccctaccccacccccagacagcaccccacctccccgctaggctccccagacctgacccagggccgtctcctccatgggtgccgccagcttcttggtggatcctgtactctccatgcagccacttcacgatgcccccacatcactgccacccttctctggcacgctggaacacgtgctcctcctgtgtggggtttcccttgaggttctggccacgaaggatcccctcttctccattaattgaggcgctgtgtgttgttgaatgcagtcaaggtgctgttgaatgccgtcacggtgctgtgacagtcacagtgttgttgaatgcagtcaaggtgctgttgaatgccgtcacggtgctgtgacagtcacagtgttgttgaatgcagtcaaggtgctgttgaatgccgtcacggtgctgtgacagtcacagtgttgttgaatgcagtcaaggtgctgttgaacgccgtcatggtgctgtgacagtcacagtgttgttgaatgcagtcacggtgtcgttgaacgccgtcacggtgcttgttgttgaatgcagtcaaggtgctgttgaacgccgtcacggtgctgtgacagtcacagtgttgttgaatgcagtcacggtgtcgttgaacgccgccatggacagccagaaccccgatgtgtcatccccgactcatttcctggctgttgctttgagtccagtggctcatctctggagtgaccccgctgaccacactcacagattgacatcaaagaccagaggtcagttctccatttgccatatggagaacaacttggcagacccgctgcctatgtgagctgatctggattctttccctgtaggccagctccac

SEQ ID NO: 470855 - DNA, 545 bp, Homo sapiens
cagtagacaataaagaagaaaatcaaactttttagccttgattaagtggttcgatggagagaagagtggtagcgtgctttcctcgttggctgataatcgattcttttcttggtctgagccttgcgactctgctgcataaccaagcagacagaagcacgaaggtgaccaaactgccatctgccgatttcctcaaggattttggtttttacgaatgtcctgggccgggagatggccagtatggacactatgcagttccatgttcgatgattttatgccatcttgggcttaaacagtctcggctgggaagaagcctggggaaggcagaggatgagcagcttgggactccccagcagcgagaatgttctgctttcttgactcggcgtagcaaccatgggcttgagggccagaaagacctgagtttgaatcgctcctctgagacgtgctgtggggccacggtgacccaggtgattcggatgtgtaagcagccgccagccatttgagttactttataactcgaatccaaattcatcaattaaaaacccagc

SEQ ID NO: 470856 - DNA, 766 bp, Homo sapiens
gtccttgctgcctctctcacaccctcctgtcctcctcttcctacaaacatgctcctgtctccatcccaccttgaagaaacccttggccgatacggcacccacccatggtcccaggataaccccttttcttccctaggctaataaaacagagaaagtaagtgcatcgggcactccagaccaaagccatttgcagaatggagtcacaggctgacatccaagactttagccagctggcttcaggcagcagatgcaaaggagaggtggcatcggggctccccagcactgaagggtgttcagcagcctgcaaaccaactgactcacagagcccagatagtgacgccaacaccagccgctccggggccaacatcagagctggagagctgagccatcaccgcacagctgtctctggagacaggagcacaaagctgccttctgcccagggcactgcttccttggcaagtgaccagcagctgggaccgcacgtgccaaaggcagcagctgccatgtttgacaaactggaacggagctatgtccaaattaaatccccccaaccagcctctgccatactccctttggggacaggggtggtcggtcgttacgcttgcaaaattccaacagcacctagagtcccaggaaatggggctgctggccaatagaggtgggacccagggtgacaggccacatgctccttagagagccaacagtgtttcctgaattccatgggagtttgccgaggggacatggaagctaggattccggaacaccc

SEQ ID NO: 470857 - DNA, 651 bp, Homo sapiens
ctgaacagacaatcaggaccaatatggttaagaccactgctttgggttggctgtgtccccacccaaatctcatcttgaattatagttgccataatccctatgtgtcgtggaggaaccaggtggagataattgactcatgggggcagtttccctcttcctgttctcatgatagtgagttcttgcaagatgtgatggttatatatggggtttcccccttcactcagcccttgttcttcttctcttccaccatgattccctttcctggtgcagcaaagatcctgtggatcagggagcactgcggatgttcatttaacatcatagagacagaaggaagcctaaccgtgagcttccaggatggtgtctgtggccccagcctgtcccttgagcactgagtcccagtcacgctaaaataactgacaccttttcctctctctcagagatcagggtcctgtgatacctgtgactcaatgtctggaagcaattattttatgtatattttttttttattgctatggcgggagggtcattctcctagcagttaattcttcatgggaaaactactggattcaccctctatcttggtcagaggtggggaggggtctagttcagaggcttctacttggtccatgcctctacaacagctctttccct

SEQ ID NO: 470858 - DNA, 1628 bp, Homo sapiens
ccccagagctgcccacgtgcggcaacacagtctggtgctgcaggggcgagctcagcgaccgcagagaggtggggtcgatctccctgcgaccccagggggcccgcgaggccagtgcgcgggcaggagcggggacgtgctcagaagagccgggcgccgccgcgcccgcccgccccccgtcccccggctcccggctccgcgcgccccccgccgcccccggggccctgctacccccgacccgtccccacccgccggccgcccccatggcccggctgggcgcgctgctcctggccgccgccctgggtgcactgctcatcttcgcgctcctggccgccgcggtcgccagcgactactggtacatcctggaggtggcggacgccggcaatggcagcgcctggcccgggcgcgcagagctgctctcctcgcactcggggctctggcgcatctgcgaagggcagaacggctgcatcccgctggtcgacccttttgccagtgagagcctggacgtctccacctcggtgcagcacctcatcttgctgcaccgtgcagtcattgtggtcctgcccctgagcctggtccttctcgtgtgtggctggatctgcggcctgctcagctccctggcccagagcgtgtctctgctgcttttcaccggctgctacttcctgctggggagtgtcctgacactggcgggggtcagcatctacatcagctactcgcacctggcctttgcggagacggtgcagcagtatggcccgcagcacatgcagggcgtccgcgtcagcttcggctggtccatggccctggcctggggctcctgtgccttggaggcattcagcggaaccctcctgctctcagctgcctggaccctcagcctgagccccccaatctgtggtcatctgagtccccagcaggtgggagggagagggggagactgaggcccagagcggcagagggacccacccagatcgcctggcgccagagagatgccgtctcaggccaaggcctccctggcctctgttctgtccactctccccgaagggcaggcttggtggagaagaggctgatgagagggcccgagagcccctccgatttgcaggggtggggggcaaggagctgagcgatccagatgtacccctctgccccctcccttgttctcaagcctgctaggtacttttcactgagcacttccgggaagagcaggcacccagatctctgtccttgtcctggcacaggctgctgctgcttccggcccccgacccttcctctctgcagcaacccgggggaggtatgccactgtgagtgccctggtctctttattgattcaaaggttaaggaagctcctgggggcttgagggggtggcacagttttggtggggcccagtgaggacaaatctgggggtctcattagaggtttatcaattttattactcttttcaaagaactatcttttgtttatctggatattttctcttgatttatctccctcttcactaattctctctccagctgtgtctcatctactattcaacctatctactgagttcttaagttatcatatttttcagttctagaatttccatgtggccttcttatagttccaagattcctgccaaattttttttatcttgact

SEQ ID NO: 470859 - DNA, 1275 bp, Homo sapiens
acgtgaaggtagctatttcttttcctgtgtccactgatagagaaatagagactcagataaaggaacgcttgtccaccgcacgccgctgggaagcggtggagtgaacgtagacaagtccgtagatgacagaccccccaccactggcctgaaggtcggggtgcccagggcctaccctgacagcagcagcctgcacagctttaattacatcccacccctctgggcacagtgtggtcactggaaggtgcatggagttgggctggcaagcctggactcctccccgccggctgctgcctcaagcccgtggcacatagtaggtgctcactagttcccttgtgtacactcatgtccaccctctcccacactggccagaagggcagaggccccatttccatccagatcagccagctgagcagtcttgtgaagtctggggcgaaattcacggtctctgtcgagagaaccgtggcggggcagggagatgatgtgtccccgtatttcaagacagagcctgtgcggacacaggtgcacttggaaggaaaccgcctggtgcttacatgcatggccgagggcagctggccactggagttcaagtggctccacaacaacagggagctgaccaagttctccctggaatacaggggccagcgctgcctggacaggatggtctgtaccacagtgcataggagcagaggtggtgttgggcacagggactcactaacagcagctgtggctgtggctgtgactgtggccccctgctcactctctcgaacactgccatctccaggggactcttgttgtggggcctgggtccaatggaggggtgggctctgcagcaacctgggatcagtgaaggaggggacatcttctatctatgggaaattcagaggagaccacaagtgcaccacagaaccgaagtcagagcttccagaaccttggcagttcctggaacctcaggacttagaccaagagcttgatattgccaggccctctttcctccaagtcgctcagctgtgcccacctctggtgtccttcatggccatggttgttgttcttcttcaacgccggacctaatcggggatcacgtgtgacctttaattgccatgagtcttgatacaccttaaatctagaactattccttattgtttctgtcctacctttcatggctttggcacttctgagagtccagccggctttgcagaatttccctcaatgtgggtttgtccagttatatcctcatgattaaactcatgttaagccttttgggaagcatatttgtag

SEQ ID NO: 470860 - DNA, 1268 bp, Homo sapiens
ggttttgttttcagtttacctaacaccgtgcttaggtttgaggcaggtcaaaatgcggatcttcgtgaaaacccttaccggcaagatcatcacccttgaagtggagcccagtgccactatcgaaaatgtcaaagccaaaatccaagataaagaaggcaatccctgtgaccagcagaggctcatctttgcaggcaagcagcgggaagatggccgcagtctttctgactacaacatccagaaagagtcgaccctgcatctggtcctgcgtcggagaggtggtatgcagatcttcgtgaagaccctgaccggcaagaccatcaccctggaagtggagcccagtgacaccatcgaaaatgtgaaggccaagatccaagataaagaaggcatcccccccgaccagcagaggctcatctttgcaggcaagcagctggaagatggccgcagtctttctgactacaacatccagaaagagtcgaccctgcatctggtcctgcgtctgagaggtggtatgcagatcttcgtgaagaccctgaccggcaagaccatcaccctggaagtggagcccagtgacaccatcgaaaatgtgaaggccaagatccaagataaagaaggcatccccccgatcagcagaggctcatctttgcaggcaagcagctggaagatggcgaaggagtcgaccctgcacctggtcctgcgtctgagaggtggtatgaagatcttcgtgaagaccctgactggaaagaccatcaccctggaggtggagcccagtgacaccatcgaaaatgtgaaagccaagatccaggatgaagaaggcatcccccccgatcagcagaggctcatctttgcaggcaagaagttggaagatggccgcactctttctgactacagcatccagaaagagtcgaccctgcacctggtcctgcgcctgaggggtggctgttaattcttcagtcttgcattagcagtgcccactgatggcattactctgcactatagccatttgccccaacttaggtttagaaattacaagtttcagtaatagctgaacctgttcaaaatgttaataaaggtttcgttgaatggtagcatacttggtgttttgtcatgatattctctagtgatgtgtgggtacacttaaaactggtgaaaatgtctagggagggatttaattttgagattggtaatgtgcccaaagttaagtcacttgactctggtatacacttgggtgggctgagggagatggagtctcaccgagcactgtggctcac

SEQ ID NO: 470861 - DNA, 6056 bp, Homo sapiens
ctgctaagagggtctgaatgtttgtccctcacataagattcctgagcactgctacgagggtctgaatgtttctgcttcacatagcatttccagaacaccaatgctgtgaacactcctgctgtggtatggatgtttgtgtctcacatgggattccagaacagtcatgctgtcatctgagtgtttgtccctcaaataggattccagagccctgctacgacggtctgtattattctccctcacataggattccagaacacggctacgaggaacaatgctacgagggtctgaatgcttgtcccacacgtaggattccggaacaccccagctgtgaagaatcctgctgtgatctgagtgtttctccttcaaataggattcctgaacactgctacgagggtctgaattattctccctcacataggattccagaacactcctgttatgaacactgctacgagcatctgatttattgtccctcacataggattccagaacactcctgctgtggtctgaatatttgtccctcacataggattccagaacactgctacgagggtctgtatgtttgtcccgcacggatccagaaaaatcccagctgtggtctggatgactgtccctcacataggattccagaacactgctgctggattctgagtgtttctccctcacataggattccagaacactgctgttggattctgagagtttttcccttacataagattccagaaaacagttatatgggtctatatgtttatccctcacagaggattccagagcactgctacgaaggtctgaatgtttgtccctcacataggattccagagcactgctacagggaacactgctgttgggatttgagtgtttgtccctcaagtatgattccagaaccctgctacgtgggtctaaatgtttgtccctcacataggattccagaacactgctacgagggtcctaatgtttgtcctgcacataggattccagaacactcctgctgtgttctgattgtgttttcctcacataggattccagaacaatgctacgagaatccagaaccatcctgctgttgtctgaatgtgtgtccctcacttaggtttccagaatactgctgttgggttctgagtgtttgtccctcacgtacgattccagaacactgctacgtgggcctaaatgtttgtccctcacatagggttccagaacactgctatgagggtctgaatatttgtcccacacttaggtttccagaacaccccagctatggtctgaatgattggccctcacataggattctggtacactgcttctgggttctgagagattctctctcacataggatttcaggtcactgctgctggggtctgaatgtttgtccctcacataggattccagaaaactgctacgaggttctgaattattctccctcacataggattccagaacactcctcctgtggtctgaatgtttgtcccttacttaggattccagaacagtgctgttgggttctgagtgtttgtccctcacgtactattccagaacactggattccagaacactgctgttgggttctgagtgtttgtccctcacatactattccagaacactggtacgtgggtctaaatgtttgtccctctcataggataccagaacactactacgagtgtctgaatgtttgttcctcacataggattccagaacactcctgctgtggtctcaatgtttgtccctcacttaggattccagaacactcttgctgtggtctgaatgtttgtccctcactgaggattccagaacactgctgttgggttctgagtatttgtccctcacgtagggatccagaacagtgctacatgggtctaagtgtttctcccagatatgggattccagaacactgctacgagagtttaaatgtttgtccctcacataggattccagaacactgctacgagggactgaatgattgtacctcacataggataccagaacactcctgctctcgtctgaatgtttgtccttctaataggattccagaacactgctgctactttctgagtgtttatccctcacataggatgccagaacactgctgctggggtctgagattttgtctctcacataacattccagaactctgctgctgggttctgagtgtttgtccctatcatacgattccagaacactgttgcgaggttctgaatgtttgtccctcacataggattccaggacactactgctgtgaacactgctacgagagtctcaatgtttgtccctcacgtaagattccagaacactgctacgaggatctgaatgtttgtctcacacgtaggattccagaacaccctagctgtggtctgaatgattgccccacacaaagcattctacaacagtgtcactgggttctgagtgttgtccctcaaatagaattcagaacactgctacgagggactccagaacactgctacgagggtctgaatgttggtccctcacataggattccagaacactgctacaagcgtctaaattattctccctcacataggataccagaactcacatgctggagtctgaatgtttgttcctcacttacgattccggaacactcctgctgtggtctgaatgtttgtccctcactcaggattacagaacactgctgttggattcagagtgcttgtccctcaagtacaattgcagagcactgctacttgggtttaagtgcttgtccctcacataggactccagaacactgctacgagggtctgaatgttggtccctcacataggattccagaacactgctacaagcgtctaaattattctccctcacataggataccagaacacacatgctggaatctgaatgtttgttcctcacttacgattccggaacactcctgctgtggtctgaatgtttgtccctcactcaggattacagaacactgctgttggattcagagtgcttgtccctcaagtacaattgcagagcactgctacttgggtttaagtgcttgtccctcacataggactccagaacactgctacgagggtctgaatgttggtccctcacataggattccagaacactgctacaagcgtctaaattattctccctcacataggataccagaacacacatgctggaatctgaatgtttgttcctcacttacgattccggaacactcctgctgtggtctgaatgtttgtccctcactcaggattacagaacactgctgttggattcagagtgcttgtccctcaagtacaattgcagagcactgctacttgggtttaagtgcttgtccctcacataggattccagaacactgctacaagggtctgaatgtttgtcccgtacataggactccagaacacacctgctgtgttctgaatgtgattccagaaccctgctgctgggttctgatggcttctccctcacataggattccagaaaactgctgcgaatgtctgaatgattgtaaatcacaaaggattccgattccggaacactgctgctgggttcttagtgtttttccttcatataggattccagaacacagctacgaggaacaatggtacgaggttctgaatgcttgttctacacgtaggattccagaacaccccagctttggtctgaatgattgtccctcacattggattccagaacactgctgggttcgcagtgtttgtctctcacataggattcgagaacagtgctacgaggaacagtgctgctgtggtctgaatgtttgtccctcgcataggattccagaacactgctacgaagatttgaatgtttgtctttcacataggattttagaacactgcagcagggttctgaatatttgtccttcacataggattccagatcactactgctgtggtctgaatgtttgtcctttacataggatttcacaacactgctacgagggtctgaatgtttgtcccttaaataggataccagaaaactcctgctgtgctgtgaatgtttattcctcacataggattccagaacactgctgctttggtctgaaaggttgtccctcacagaggattccaaaactctggattccaaaacagtcctgctgtcttctgagtgtttgtccctcaaatggggttcgagaacactgctatgagggtctgaattattctccctcacataggattccagaacacggctatgagggtctgaatgtttgtccctcacatatgattcctgaatactcctgctgtgaacactgctacgagtgtcctaatgtttgttcctcacataggattacagaacactgctgctgggttctgtgtatttctcactcacataggattccagaacactgctacgagggtctgaatatttgttcctcacataatattccagaacactgccaagagagtctgaatgtttatccctcagataagattacagaacaatgctacgaggctcagaatgtttgctcttcacatcggattccagaacactactgcagtgaacaatgctacgagggtctgaatggttgtcccacacttaggattccagaacaccccagctgtggtctgaataattgtccctcacataggattccagaacactgctgctgggttctgagtgtttgtccctcacataggattccagaacactgttacgatggtctgaatgtttgtccctcaaataggattccagaacactgctatgagggtataaattattctccctcacataggattccagaacactcctgctgttgtctgaatatttgttccccactaagtattcaagagcactcctgctgcagtctgagtgtttgtccctcacttaggattccagaacactactgttgggttctgagtgtttgtccctcaggtacaattccacaacactgccacgtgggtctatatgtttgtctgttacgtaggattccagaacagtgctacgagggtctgaatgtttttctcgcacataggactccagaacactcttgctgtgttctgaatgtattttcctatgataggattccagaagaatgttatgagtgtctgaatgcttgtcgcacatgtaggattccagaaaaccccagctgtggtctgaatgattgtccctcacataggattccagaacactgctgctgggttttcagagtttgtccctaccatagcattccagaacactgcgacgagggtctaaatatttgtcattcacatagaattccagaacactgctactgggttctgagtgtttgtccctcacaaaggattcctgaacaatgctgctgtgaacaatgctaccagggtctgaatgtttttcccacacttaggattccagaacacctcagctgtgttctgaatgattgtccctcccataggattccagaacactgctgctgggttctgagtgtttctccctcacatacgattccagaacactgctacgaggaacaatgctacgagggtctgaatgtttgtcccacaaataggattccagaacacaccagctgtgggctgaatgattgtccctcacatgggattccagaacaatgctactgggttctaaatgtttgtccctcatgtaggattcctgaacactactgctggggtctgaatatttgtccctcatctaggattccagaagactactgctgtggattccagaacacccctgctcttgtctgggtgtttgtccctaaaataggattccagaacactgctgctgcgattccagaacactgctgctggtttttgagtgtttctccctcacgtaggattccagtacactgctacgagtgtctcaatgattgtacttcacagaggattaaagaacactcctgctctggtctgaatgtttgtccctcagataggattccagaacactgctgcaaggttctgagtgtttgtccctcacatgagattccagaacactgatgctgtggtctcaatgtttgctcctcaccgaagtttccagaataagcctgctgttgtcttaatgtttgttcctcaaataggattacagaacactactgctgtggtctgaaaagttgaccgtcatataggattccagaacactagtgctgtggt

SEQ ID NO: 470862 - DNA, 2178 bp, Homo sapiens
gattggaatggaatggaatgcaatggaatgggatggaatcaactggaaaggaatgaaatggaatggaatggaatggaatggaaacaacccgagtggaatgcaattgaatggaatggaatggaatggaatgaaatcaactcgagtggaatggattggaatggagtggaatggaatggaacggcatggaatgcaatggaatcaactacaatggaatggaatggaatggattggaatggaatcgaacggaatcaacctgagtggaatggaatggaatggaaagaatggaatggaatggaatggaaactaaaggaatggaatggaaaggaaacaacccgagtggaatggaatgcaatggaatgcaatggaatggaatggaatggaatggaaaggaaacaatccgagtggaatggaatgcaatggaatggaatggaatggaatggaatggaattcttggaatcgaatggaatggaatggaataaatacgagtggaatggaatggaatggaatggtatagaatggaatggaatcaactcgagtggaaaggaatgtaatggaaaggaatggaatggaatggaatggaatggaatgcaatggaatgcacgggtatggaatggagtcaatgcgagtggaatggaatggaatggaattgaatgccatggaatggaatggaatataatggaatggatagaatggaacggaatggaatggaatggaatggaatcaacccgagtggaatggaatggaatggaatggaataaacacgaatggagtggaatggaatggaatggaatggaatggaatggaatcaactcgagtggaatgaaatgtaacgtcatggaatggaatggaatggaatggaaaggaatggaatggaatggaatagaatggaatcaattcgagtgcaatgaatgcaatggaatggaatggaatcaactggaaaggaatggaatggaatggaatggaatggaatggaatggaatggaaggcattagaatcaactggaatggaagggaaagaaatgaaatggaatggaatggaatggaatggaatggaattgaatcaaccccagtggaatggagtggaatggaatggattataatggaatggaaaggaatcaatccgggtggaatggaatggaatggaatggagtggaatggaatggaatggaatggaatggaacggaatggaatggaatcaccccaatggaagggaacggaatggaatggaaaggaatggaaaggaatggaaaggaatggaatgcaatggaatcaacccgaatggactggaatggaatggaatggaatggaatggaatggaatggaatcaactcaagaatggaatggaatcaacatgactggcatggaagggaatggaaaggaatggaatggaatggaatggaatggaatagaatggaatggtatggaatcagcccaagtagaatggaatggaatggaatggaatggaatggaatggaatggaacggaacgaaaaaatggaatggaatggaatggcatggaatgtaacggcatggaatgcaatggaatggagtggaatcaacccgagtggaatggaatggaatggacttggaatggaatggaatggaaaggaatggaatggaatcaacccgagtggaatggactggaatgtaatggaatggaatcaaccagagtggaaaggaatggaatggaaagcaatagaatggaatggaagggaatggaatgcaacggaatgcaatggtatggaatggagtcaacacgagtggaatggaatggaatggaatcgaatgcaatggaatggaatggaatgcaatggaatggaaatggaatggaatggaatgaaatcaaccggattggaatggaatggaatgcaacggaatggaatggaataaactggaaaggaatcaaatggaacggaatggaatggaatggaatggaatggaatagaatggaatggaatcaactcgaggggaaaaatggaatggaatggaatgaaatcaacccgattggaatggaatggaatgcaatggaaggtaatggaatcaacaggaaacgaatgaagtggagtggaatggaatggaatggaatggaatggaatggaatggaattaaccgagtagaatgctatggaatggaatgaaatggaatggaatgaaatcaaccctaatggaatggattggaat

SEQ ID NO: 470863 - DNA, 1002 bp, Homo sapiens
acttatgttcaatgtgaatgccatggcaatattaaaaggtaagaattcgctccatacgtgcttgagaggtggagcctacagaggcaggcaggcctcctggagctgttgtgggctccacccagttccagctgcctggctgctttgtttacctaagaaagcctgggcaatggcgggccccactcccccagcctcactgccgccttgcagtttaatctcagagtgctgtcctagcaatcagcaagactccattggcataagaccctctgagccaggtgcgggacacaatctcctggtgtgccgttttccaagcctgttggaaaagtacagtattagggtgagagtgaccctattttccaggtgtcatctgtcacccctttctttgactaggaaagggaactccctgaccccttgtgcttcccgaggcaatgcctcgccctgcttcggctcccacacagtgcgctgcacccactgtttttcactcccttagtgagatgaacccggtacctcagatggaaatgcagaaatcacccatcttctgtgtcgctcatgctgggagctgtagaccagagctgttcctattcagccatcttggctccacccctcatttcattatttcatcatttaatcatttcacttcatttcatcatttcatttcatcatttcacaccatttcttcatttcatcatttcatcttttcatttcatttcatcatttcatttcatttcaccatttcacttcatcatttcatttcagcatttcatttcatttcatttcatttcaccatttcatttcatcatttcatttcatcattccatttcatcatttcatcatttcatcgtttcatttcaccatttcatctcatcatttcatttcatcattttatcatttcatttcatttcttcatttcatcatttcgtttcatcatttcatcatttcatttcatgtcatcatttcatcatttcatttcatttcagtgatacatgtatttaagtgctaatgtga

SEQ ID NO: 470864 - DNA, 1546 bp, Homo sapiens
tgctctcagctgcctgcagcacatctccagtcaacaagtcaccatgcgacctgaactgcctatcccgaactgggtgctttctgactcatgtagccataaagtgggtcatgcacagcagcattccatcatcaaatggaaatggtgtataagtgattgggctcaagcaggtcctggggggcacaatggtcaaaaactgaagatatttgtaccctgtgtgagtgttgaccaacaagtgacttcagcagaggaggattttgataatcaagtggataagatgacccgttctgtggataccactcagcctctttcctcagacacccctgtcattcaaggtggacttccactcaccaaggctgaactgtctgtggccactgctgagtgcccaatttgccagcagcagcagcagagactaacagtgaaccctttgtatggcatcatttcctggggtgatcgaccagctacccgctggattgatagaatggtgggacggccttttgaggtcgcgattacaacgtcaactaggttacaatactttgccgggccggggcaccatactccagaaggccatgtgtgctctgaatcagcgcccaatgtatggtattgtttctcccatagccaggattcacagatccaggattcaaggggtggatgtgaaagtggaaccactcactatgatgcactggcaaaatgtttgctttctgttcccatgacattaggttctgctttactagtcatcttagctccagagggaagaacgctgctaccaggagacacaataacgattccattaaactggaagttaagatggccacttggacgctttggggtcctcctacctttaagtcaacaagctaagaatggagttacagtgttggcggcagtgattgacccagactatcaagatgaagtcagtccgctactccacaacggaagtgaggaagagtatgcgtggaatataggagatccattagggcgtctcttggtattatcatgcactctgattaaggtaaatgggaaactatacccaatccaggtaggactacaaatggtccagatcctctccgggtcacgacctgctgaggtgcttgctgaaggcaaagggaatacagaataaatagtggaagaaagtagttatcaataccagctacgaccacctgaccagctgcagaaatgaggactggaactatcatgagtatttccttcttcttttgttaaaaacatgtttgtgcatgtatgcacttgtactaagaaaatatcttcatttcatttcccttttctttatcaggtgacatagatttgctgacctcatatcagcatttaagtattgtttactttatgtaagagtatttgggttggggatgggtgcatttccagttgtaggaaggatagtttattatgttaggggtaattatgaccttactattgtctgtattttaagattatgtatgatctcaggagatgtgtgtgggttcaagttcacaaggggtgggcttgtgatggttaataatgagtgtcaacttgattggattgaaggatgtaaagtatt

SEQ ID NO: 470865 - DNA, 1502 bp, Homo sapiens
cggccataggtagatatctggccacaggtggatagccagtcccaggtggacatcaggctccaggatgacatcaattggagcaggtgctgacagcgaggagaacccagacagtgggggcaggcacttccgagcctgtgtggtcacggaggccttcccaggccccaagagtgcagaggtgcctggagcacaggagtgcctgggtcgcagaccctccttgggcagctgcagttgcgcctggggagttcctgccctggcaacttggaaggggctgggctcccacttgtccccagctgccactggctccatagagtgtgcagccttggccgtgactcctcgctgcgttttccctgcagtagtgcatgggcgaggtgcaggtggcatgggggccctggctaatgccgcacaaatgaacctgatgctcctggggccaatcctgcaagacccggctgccagcgctgatgggctcccagatgtggtaggaagcgaaattgaggccgccatggagggtctgcacctggcagtgggtcctgcccagccattagggggcggcggcgcagtcagatgccttggggacacagggaacggggtcctaccaccgccactgctgctcctgctgctgctcctgacaacactgcccatgcggcccaagcgctactggcatgatggcaactgccactccagatggccagccgctcccatcaatagtgtccatatctgagaagaaaagtcaggaaataaattattggtcaataaaaataatagcaataatattccatgttaaattgactgatcaacagtgtttgcttttgtttaggattttgttttttgcttcatatttattaaacacattttattttattgagaacaaaatgttagatttttggaaattcagttagaactttttaatttttatgactgcattgtgaattataggcattttaagcttattttaattgtattttccaaatgcgaattggacaaatatttaaaattgttgtattctcaacacaaaaattgtatgtaaggcaatgcatatgttcattagctagatttaatcattccacaatatatatactttaaaacatcatattgtacacaatatgtacaatagtatctacaaattaaaaatgaaaataataataaattatgtcttaggcaaatattcacagatattggaaataatatttatgcatctcattgactcaatttatactaaaaggcaaatagccgtcttccttaataatagttgtagtattttcatagccatctctgtttatctctgcagtttactgtggagcaaattttcatacttctcttcaacactcagaggaatacttcaaagaaaaattaagatatgaaggttggttgaaggttttattgggtaaactgggttctttgtggatagacgtcatagcacacaaccgtgtagcaacttatactcaagtaccattcagatatctcctcctcacagaacgccttctgctccctcgatccctttcttt

SEQ ID NO: 470866 - DNA, 726 bp, Homo sapiens
tggaatcaacatcaaacggaatcaaacggaattatcaaatggaatcgaagagaatcatcgaatggactcgaatggaatcatctaatgaaatagaatggaataatccatggactcgaatgcaatcatcatcaaatggaatagacggaatcatcatccaatggaagctaatggaatcaaaatcgtatggaatcgaatggaaacaccatcgaattgaaacgaatggaattatcatgaaattgaaatggatggactcatcatcgaatggattcgaatggaatcatcgaatgaaattgattgaaatcatcatcaaatggaatcgaatggcatcattgaatggaatcgaatggaatcatcatcagatggaaatgaatggaatcatcactgaatggaatcgaatggattcattgaatggaatcagatgggatcatcgaatggacttgaatggaatcattgaatggactcgaaaggaatcattattgaatggaattgaatggaatcatcgaatggtctcgaatggaatcattatcaaatggaatcgaatggaatcaccgaatagaatcgaatggaacaatcatcgaatggactcaaatggaattatcctcaaatggaatcgaagggaattatctaatgcaatcgaatagaattatcgaatgcaatcgaatagaatcatcgagtggactcgaatggaatcatcgagtggaatggaatggaatagtcaatgaactc

SEQ ID NO: 470867 - DNA, 1724 bp, Homo sapiens
tggaatcaacatcaaacggaatcaaacggaattatcgaatggaatcgaagagaatcatcgaatggactcgaatggaatcatctaatgaaatagaatggaataatccatggactagaatgcaatcatcctcaaatggaatcgaatggaatcgtcgaatggactcgaatggaataaatattgaacggaatcgaatggaatcatcatcggatggaaacgaatggaatcattatcgaatggaatcgaatggaatcatgaaatggaatcagatggaatcatcatcaaatggaatcaaatacaattatggaatgaaatccaatatggaaacgaatggaatcatcatcgaatggaatcgaatggaatcattgaatggaatcgaatggaatcatcttcagatggaaatgaatggaatcatcaaacaatggattcgaatggattcattgaatggaatcagaaggaatcatcgaatggacttgaatggaatcattgaatggactcgaatggaatcattattgaatggaatagaaagtaatcatcgaatggtctcgaatggaatcattatcaattggaatcgaatggaatcaccgaatagaatcgaatggaacaatcatcaaatggactcaaatggaattattctcaaatggaatcaaatggaattatcgaatggaccgaatggaattatcgaatgcaatcaaatagaatcatcgaatggactcgaatggaatcatcgaatggaatggaatggaatagtcaatgaactcgaatggaatcatcattgaatggaatagaatggaatcatcgagtggaatcaaatggaatcatcatcaaatggaatcgaatgtaatcatcatcaaatggaatcaaaaataaacatcgtcaattggtattgaatggaattgtcatcaaatggaattcaaaggaatcatcatcaaatggaaccgaatggaatcctcattgaatggaaatgaaaggagtcatcatctaatggaatcgcatggaatcatcatcaaatggaatcgaatggaatcattgaacggaattgaatggaatcgtcatcgaatgaattgaatgcaatcatcgaatggtctggaatggaatcatcttcaaatggaaaggaatggaatcatcgcatagaatcgaatggaattatcattgaatggattcaaatcgaataaacatcaaacggaatcaaacggaattatcgaatggaatcgaagagcatcatcgaatggccacgaatggaatcatctaatggaatggaatggaattatccatggacacgaatgcaatcatcatcgaatagaacccaatggaatcatcaaatgaactcgaatggaataatcattgaacgggatcgaatggaatcatcgccgaacggaaacgaatggaaacatcatcgaatggaaatgaaaggagtcatcatctattggaatcgcatggaatcatcatcaaatggaatcgaatggaatcatcatcgaatggaatctaatggaatcattgaagggaattgaaaggaatcgtcatcgaatggattgaatgcaatcatcgaatggtctcgaatggaataatctccaaatggaatggaaaggaatcatcgtatagattcgaatggaattatcatcgaaaggactcagatggaatcaacatcaaacggaatcaaacggagttatcgaatggaatcgaagagaatcatcgaatggactcgaatggaatcatctaatgaaata

SEQ ID NO: 470868 - DNA, 3393 bp, Homo sapiens
acccgactggaatggaatggaatgcaatggaatggaatggaatcaactggaaaggaatcaaagggaacggaatggaatggaatggaaaggaatggaatggaaaggaaacgaatggaatgcaatggaatgcaatggtatggaatggagtcaacccgagtggaatggaatggaatggaatggaatgaaatggaatgtaatggaatgaaatgtaatgtaatggaatggaatggaatggaatggaatggaatggaatggaatggaatggaatgcaatggaatggagtggaatggaataaacaccagtggaatggaatgcaatggaatggaggggaatggaaagaaatggaatggaatggaatggaatggattggaatggagaggaatggaatggaatggaacggaatggattggaatcgaatggaatgggctagaatggaatggaatggaattaaatcaacccgattggaatggaatggaatgcaatggaatggaagggaatcaacaggaaaggaacgaaatggaatggaatggaatggaatggaatggaatggaatggaatggaatggaatccacccgagtggaatgcaatggaatggaatggaatggaatggaatcaacccgggtggaatggattggaatggaaatggaatggaatggaatcgaacggaatcaacctgagtggaatggaatggaatggaatgaatggaatggaatggaacggatactaatggaatggaatggaaaggaaacaacccgagtggaatggaatgcaatggaatgcaatggagaggagtggaatggaatggaatggaatggaatggaatggaatggaattcaatgtaatggaaacaaaccgagtggaattggaaaggaatggaatggaaaggaatggaatggaaaggaaagaatggaatgcaatagaatgcaatggtatggaatggaggcaacccgagtggaatggaatgacatggaatggaatgaaatggaatggaatggaatggaatggaatggaatggaatggaatggaatggaatctacccaattggaatggaatggaatggaatggaatagaatggaatggaatggaatggcattggaaaggaatggaatggaaaggaatggaatggaaaggaaagaatggaatgcaatagaatgcaatggtatggaatggagtcaacccgagtggaatggaatggaatggaatggaatgaaatggaatggaatggaatgcaatggaatggagtggaatggaataaacagcagtggaatggaagggaatggaagggaatggaatggacaggaatggaatggaatgaaatggaatggaatggagtgcaatggaataatcaacaaaggaatggaatgcaatggaagagagtggaatggaataaacaccagtggaatggaatggaatggaatggaatggaatggaatggaatgcaacggaatggagtggaatggaatggaagggaatggaatggaatggacaggaatggaatggaatggaatgaaatcaagcagattggaatggaatggaatcaactggaaaggaatgaaatggaatggaatggaatgcaatggattggaatggaatggaatcaacgcgagtggaatgcaatggaatggcatggaatggaatggaatcaacccgagtggaatggattggaatcgagaatggaatggaatgcaatggaatggaatggaatcaactggaaaggaatcaaagggaacggaatggaatggaatggaatggaatggaatggaatggaatggaaaggaatggaatggaatgaaatggaatggaatagactggaatacaatcaactcgattggaaaggaatgtaatggaaaggaatggaatggaaaggaaaggaatggaatgcaatggtatggaatggagtcaacccgagtggaatggaatgcaataatggaatggaatgaaattgaatggaatggaatacaatggaatggagtggaatggaataaacaccagtggaatggaatgcaatggaatgcagtggaatggaaagaaatggaatggaatggaatagaatggaatggaatggaattaaatcaacccgattggaatggaatggaatgcaatggaatggaatggcatcaactgcaaaggaacgaaatggaatggaatggaatgaatggaatggaatggaatggaatccaccctagtcgaatgcaatggaacgggaaagaatggaatggaatcaaccagggtggaatggattggaatggagtagaagggaatggaacagcatgcaatgcaatggaatcaagtagaatggattggaatggaatcgaacggaatcaacctgagtggaatggaatggaatggaatgaatggaatggaatggaacggatactaatggaatggaatggaaaggaaacaacccgagtggaatggaatgcaatggaatgcaatggaatggaatggaatggaatggaatggaatggaatggaatggaatggaattcaatgtaatggaaacaaaccgagaatggaatggaatggaatggaatggaatcaacccgagtggagtggaatggaatggaatggaaatgaatggaatggaatggaatggaaaagaatggaatggaatggaatggaacggaacggaatggaaagaacccgagtggaatggaatggaatggaatggaatggaatggaacggaatggaatctacccaattggaatggaatggaatggaatggaacggaatggaatgtacccaattggaatggaatggaatggaatggaatggaatggaatggcatgtaataaacacgattggaatggaatggaatggaatggaatagaatggaatggaatggaaaggaatggaatagaatgtaatggaatcaactcgagtggaaaggaatggaatggaaaggaatggaatggaacggacagaatggaatgcaatagaatggaatggtatggaatggagtcaacccgagtggaatggaatggaatggaatggaatgaaatggaatggaatggaatgcaatggaaaggagtggaatggaataaacagcagtggaatggaatggaatggaagggaatggaatggaaaggaatggaatggaatggaatggaatggaatgcaatggaaaggagtggaatggaataaacagcagtggaatggaatggaatggaagggaatggaatggaaaggaatggaatggaatggaatggaatggattggaatggaatggaatagaatggaaaggactagaatggaatggaatggaatgaaatcaacccgattggaatggaatggaatgcaatggaattgaatggaataaactggaaaggaatcaaagggaatggaatggaatggaatggaatggaatggaatagaatggaatagtatcaactc

SEQ ID NO: 470869 - DNA, 2478 bp, Homo sapiens
tggaatgatatggaatcaaatagaatggaatggaatgggatggattggaatggaatcgaacggaatcaacctgagtggaatggaatggaatggaatggaatggaatggaatgaatggaaaggaatggaatggaaactaatggaatggaatggaaaggaaacaacccgagtggaacggaatggaatggaatggaaaggaaacaacccgagtggaacggaatggaatggaatgcaatggaatggaattgaattcaatgtagtggaaacaaaccgagtggaatgtaatgtaatggaaaggactggaatggaatggaatggattggaatcaacccgattgcaatgcaatggaatggaatggaatggattggaatggaacggaatggaatggaatggaacggattggaatggaatggaacggaatggaatggaatggaagggaatggaatggaatggaaaggaatggaatgaactggaatggaatggaatgcaatttaatggaatggaatggaatggaatcaacccgagtggagtggaatggaatggaatggaaatgaatggaatggaatggaaactaatggaatggaatgcaaacaacccgagtggaatggaatgcaatggaatggaatggaatggaatggaatggaatggaattcaacagaatggaaacaccccgagtgaaatgtcatggaatggaaaggacttgaatgtaatggaatggattggagtcaacccgattagaaagcaatggaatggaatggaatggaatggaatggaagggaatggaatggaatgtaatggaatggaatggaaaggaatggaatggaatggaagggattggaatggaatggaatggattagaatggaatggaatggaatgaaatcaacccgattggaatggaatggaatgcaatcggaatggaatggaaatgaatggaatggaatggaatggaatggaatggaatggaatggaatggaatggaacggaatgcaatgcaatggaacagaaaggaatgaacccgagtggaatggaatggaatggaatagaatggaatggaaaggaacggaacagaatggaatggaatggaatggaatgaacacgagtggaatggaaaggaatggaatggattggaatataatggaatggaatcaacccgagtggaatagaatggaatggaatggaatggaatggaatggaatgggacggaatggaatggaatggcatggaatagaatggaacggaacggaaagaaacggaatggaatggaatggaatgcaatggattggaatcaaacaaatggaatggaatggaatggaatggaatggaatggaatggaatagaatggaatcaattcgagtgcaatgtaatggtatagaatggaatggaatggaatggaatggaatcaaccagagtacaatgcaatggaaagaaattgaaatgaatcgaatggaatggaatggaatggaatggaacggcatggaatggaatggaatggagtggaatcaacccgagtggaatggaatggaatggaatctaacggcatggaatggaatggaatggactgaaatcaacccgagtggaatggaatggaatggaatggactggaatgcaatggaatggaaaggaatcaacccgagtagaatgaaatggaatggaatggagtggaaaggaatacaatggaatggaatagaatggaatggaatggaacggaatggaatggaaaggaatggaatcaacatgagtggaatggaatggaatggattggaatggaataaacacgagtggaatggaatggaatggaatggaatggaatggaatggaatcgagtggaatggaatcaactcgagtggaaaagaaagggatggaaagcaatggaatggaaaggaaagtaatggaatgcactggaatgaaatgagtggagtggaaaagaatgaaatggaatggaatggaatgcaatggaatggagtggaatggaataaacaccagtggaatggaatggaatggaatggaatggaatggaatggaatggaatggaatggaatggcatggaaaggaatggaatggacaggattgaaatggaatggaatggaacggaatgctatggaatggaatggaatcaactggaaaggaatgaagtggaatggaatggaatggaatggaatggaattgaatggaatggaatggaatcaacacgagtggaatgcaatgcaatggaatggaatggaatgtaataaaatcaacccgagtggaatgcataggaatagagtggaatggaaaggacaggcatggaatgcaatggaatcaactagaatggaatggaatggaatggagaggaatggaatggaatggaatggaatggaatggaatggaatggaatggagtggaatggactagaatggaatggaattgaatgaaatcaacccgattggaatggaatggaatgcaatggaatggaatggaatcacctggaaatgaatcaaa

SEQ ID NO: 470870 - DNA, 1202 bp, Homo sapiens
atcatcacctaatggaatgaaatggaatcatcgaatggaatcttcattgaatggactctaatggaatcatcaaatggactcaaatggaaccatcgaatggactcgaatgtaatcatcattgaatggtatcgaatggaatcattgaatggactcaaatggaataatcatcaaatggaatcgaatggaatcatcatcagatggaaacgaatggaatcatcatcgaatggaatcgaatggaattatcaaatggaatcagatggaatcatcatcaaatggaataaaatagaatcatcaaatgaaatcgaatggaatcatcatcaaactgacttgagcagaatcatcatcgaatggaataaaatagaatcattgaatggactccaatggagtcatcatcgaaatcatcatcgaatggaaacgaacagaatcatcaaagggactcgaatggaattatctggaatcatcatcaaatggaatccgatggaatcatcgaatggaatcgagtggaatcatcatcgactggaattgaatggaacaattgaatggactcgagtggaatcattggagaatggaaatcatcgaatgaaatcgaatggattcatcatcgaatggaatcaaatggaattatcattgaatgcaattgaatggaatcattatcgaatggaatcgaatggaatcatcaacaaatggaatccaatggattcatcatcaaatagaaaaaatggaatatcaaaaggactcgaatggaatcatcgaatgcactcgaatggaatcatcaccaaatggagtcaaatggaatcattgaaaggaatcaaatggaatcatcatcgaatgaaatcaaatggaatcatcgaatggactcgaatggaaacatcaccagatgcaattgaaaggaatcatggaatgcacttgaaaggaatcatcaaatatactcatatggaaccaacattgagtggaatcgaaagaaatcttcgaatggaattgaattgaatcaccgaatggactcaaatggaatcatcattgaatggaatcgaatggaatcatcatctaatggaatcgagtggaatcatcaatgaatggaatcgaatggagtcaccaaatgcaatccgttggaatcatcatcgaatggaaccaaatgcagtcatcatctaatggaatcaaatggaatcgtcgaatggactcaaatggaatcatcgtatggacac

SEQ ID NO: 470871 - DNA, 840 bp, Homo sapiens
tggaatcaacgagagtggaacggaatagaatggaatggattggaatggaatggaaggcagtggaaacagcaggaacggaatttaatgaaatggaatggaatggaatggaacggaataaacctgagtggaatggaacggaatggaatgcaatggaatggaatggaatggaatcaaccccagtggaatggaatggaatggaatggaatggaatggaatggaatggaatggaatggaacggaatggaatgcaatggaatcaactggaatggaatggaatggaatggaatggaatggaatcaacgagagtggaacggaatggaatggaatggattggaatggaatggaaggcagtggaaacagcaggaacggaatttaatgaaatggaatggaatggaatggaacggaatcaacttgagtggaatggaatggaatggaatgcaatggaatggaatggaatggaatcaaccctagtggaatggaatggaatggaatggaatggaatggaatggaacggaatggaatgcaatggaatcaactggaatggaatggaatggaatggaatggaatggaacggaatggaatcaacctgagtggaatggaatggaatggaatggaatggaatggaacggagtggaattcaacggaatggaaacaacccgagtgaaatggcatggaatggatcggacttgaatgtaatggaaaggagtggaatcaacctcattagaaagcaatggaacggaatggaatggaatggaatggaatggaacggaatggaatggaatggaatggaatggaatggaagggaatggaatgcaatggaatggaaaggaatggaatggaa

SEQ ID NO: 470872 - DNA, 680 bp, Homo sapiens
tcatcatcgaatggactccagtggaatcatcatcaaatggaatccgatggaatcatcgaatggaatcgagtggaatcatcatcgactggaattgaatggaacaattgaatggactcgagtggaatcattggagaatggaaatcatcgaatgaaatcgaatggattcatcatcgaatggaatcaaatggaattatcattgaatgcaattgaatggaatcattatcgaatggaatcgaatggaatcatcaacaaatggaatccaatggattcatcatcaaatagaaaaatggaatatcaaaaggactcgaatggaatcatcgaatgcactcgaatggaatcatcaccaaatggagaatcatggaatgcacttgaaagtaatcatcgaatatactcatatggaaccaacattgagtggaatcgaaagaaatcttcgaatggaattgaattgaatcaccgaatggactcaaatggaatcatcattgaatggaatcgaatggaatcatcatctaatggaatcgagtggaatcatcaatgaatggaatcgaatggagtcaccaaatgcaatccgttggaatcatcatcgaatggaaccaaatgcagtcatcatctaatggaatcaaatggaatcgtcgaatggactcaaatggaatcatcgtatggacacgaatgcaatcatcatc

SEQ ID NO: 470873 - DNA, 2351 bp, Homo sapiens
aagacacatggaagaagtcatgcaaggccacacggatttaggcctgtcagagcagccctggtggaccgtagaggaagattcctgagggcctgtttgcttgagggctagagggctccctgggaagcagtcatcctgaggaaagagagttgaagcgcataagagcatttcaaggacagggcgaggagaaaagagggatttggggtagagcctcctcggtgttcacaggagcactgtggaaagcagtggacgatttcaggaagatgccagaacaagcatcatcacagttaatcagtgtgcccaagccaggaaagccctggacaagctgggaggggctgatcaccctacttcgtgatgagcccatagcagaggccctgactgggctgcaggcagatgtggaaatcctggagtggatctgcaggcagaagacgaagcctttatacaagtaccagccttcctggggcaccagtggcctggcgggaaggaggcactgccctcacatagctcctaaaacagctgagtcagtgaggggttctgtgggggaagtgggggaggtttgcctgagatacattcaggagcgcctggctgacaaggtagggggagaaccctgcaggctggggcctgggctggggccagcaggggaggagacctgctggcagagcctggctgaagccaccgtctcagaggctgtggagtctcagttacaatgtcagttccgccaggcctctgaaggcagacacaggacctcctccttgccttctctttctcccccacttccaggcagtctagagcccggtggagtctcctgtcaggacacctccagaatgcttccagtcctttccctgaccactgcccgctcggcacaggccctgtgcaatatcctaaactgctgagctcctgacacccttcctgccagcctcatcccccgccctcttcccgtcatgtgccaagccccagccactgtgcagccctgctttttccagaggtgcaggctgcaggcctctcgccttcgaatctttgcataagtgggatcctcttcctgaatgcccactcaccttcttgacttggctaacttctactcaacttagaagatttattacagatttcagaggatgtatggaaatgcctcgatgtccatgcaaaaatttgtaagggcagggccctcatggagaacctctgctagggcagtgcagagggaaatgtggagtcagagcccccacacagagtccctactggggcactgcatagtggagctgtgagaaaagagttaccatcctccagaccccagaatgatagatccactgacagctttcacagtgcacctggaaaagccacagacactcaacaccagcccgtgaaagcagacaggaggggggctataccctgcaaagccacaggagcagaactgcccaagaccataggaacccacctcttgcatcagtgtgacccagatgtgagacatggagtcaaaggagatcattttggagctttgagatttgactgccctgttggatttcagacttctatgggggcctgtagcccctttgttttagacaatttctttcatgtggagtggctgtatttacccaatacctgtacccccattgtatctaggaagtaactaacttgcttttgattttacaggcttataggtggaagggacttttctccaatgaactttggatggtgggcttctgagttaatgctgaaatgagttaagactttgggggactgttgggaaggcatgattggttttgaaatgtgaggatgcaagatttgggaatggcctggggcagaatgatatggtttggctctgtccccacccaaatctcatattgaattcccgtgtgttgtgggagggacccagtcagaggtacctgaatcatggcggcaagcctttcccatgctgttctcatgatagtgaataagtctcatgagatctgatggttttaaaaagaggaattcccctgcacaagctccctctctttgcctgccaccatccacgtaacttgtgacttgctcctcctcgccttctgccatgattctgaggctttcccagccatgtggaactgtaagtccaattaaacctctttcttttgtaaactgcccagtttttatctttatcagcagcatgaatacaaatacagttagcttctagaggttttctaatttttgcattgtacatttagctgtatgatccattttcagttagtatttgtaggagcaagatttgtgtgtagattccttttttttttttttttttttttttgcatgtgcacatccagttgttccagcatcatttgttgaacaggctctcccttctccattgaattgctttgttcctttggtgtggg

SEQ ID NO: 470874 - DNA, 951 bp, Homo sapiens
gccttggaggccgtatctcaccaaccggcaggaggaagcaagtgatgaagaagaggttgaaagctcttagtgctgccaaagcagaggggttgtagggaggagactcagaagagatgcagggtgtgggccactgtcactcacccactgagggcatcctctgtcggccacatcaccactccaggagtttttttggaaggattggtgttttaagaaactttggaaaacaaagatgtaaaccaggccaactgggtccccctggtggcctggaggacaaggttctccagtggaccctgaagaactacccaccaacagtgaagccaaaggggtttttttgtcaagagtgccatagtcaggtgtgtagcaaatcttcacccccatttatctgtgcatgtggccgacaacgacctgatggccgtgctgagcacctgggcagcgaggacaggcctttcatgtaccagcctcacctgggaaccagcaggcagtactgtgcccgtcctgtagggtgtgaaattgtgggagggggagtctacctgtctagtgtccaacagtggtcaggaaattagtccctgtgctaacacctctgccttccattgcatagtctgaccatcaatgtgatggctgctctgtcttaagggccatttgggatcaaaaagcccagaactcaaatttgagattgaccatttgtagtgtgaccttgggaaggtcatcaaaccattcagaacttaattttcccaattaaattttttttaatttccagattaataaatctgtgcctctacacccaaagaagagtttgggaaagaaaagaactaacacttattgactatctaatgtatatcaagccttctgtttgtaatcattttccttttcaaactttacatgccccaagagtctccaagagttgctatgagagctcactgagaacaaatatttaacaactgtctaggtacc

SEQ ID NO: 470875 - DNA, 481 bp, Homo sapiens
tacatatacaaaatgtttcttattgcaggtctcgttccaaaaagtttgatagcctttactctagtgcagcggttttcaattgagtgggtggagactgagatgctgctaacctttctaccatgcacaggacagttcccacagcaaagaatgattctgcccaagctgtcaatagcgctgctgttgagaaaccgattccagtggaagagacaggcacgtagacacatgaaagagaacagggaagggaattacagggcaggtggaaaggcaggtgtctctctaggttataaagaaggcaaggagccttggatgtgtactcttcgtgatcagccacttgggctggagcctagcgcctctggtcccgaaatgaaagcaagatactatcactataatcatgatcatgacaatgattatgatgattttaaaattcactgagtgtgaaacatgccaggcacagctctaaaggcttttcctgtgctaactc

SEQ ID NO: 470876 - DNA, 2936 bp, Homo sapiens
cgggagaggcctcaggaaacttacaatcatggtgaaaggggaagcaaacacatccttcttcacatggtggcagccagagaaatgcagagtgaaggacgggggaaagccctttataaaaccatcagatctcacgagaactcatttactatcacgagaacagcatggaggagttgaaaggaatagagggccctgtggagtggttcaaatggctaagcctagaaaaggtgatggtgagtttcctctggtcccaagtgtgtctagagacactatccaaaagccagggcctagaattgggaactttaggaatctacctggtgctttattctactgtagcagaactggcacaaaagccacaagacaaagtccttcccactcttatctcctatttattcaaacaatgaggtttctccccatggtcactacagcccctagcccaatgtaaataatggttggctaccaccaatgtttactcaaggcccatgggctcttcagtcagcttgtggtacatgctaccattcctgaatctctccctgaagggtagtagactctcttctggccaagggcaggtcacaaaatttcatgcaggaaccaaagcctggaattgaggactccaagagcgtgcttggtgctctaccccactgtggctgaactgatagtcaagctgagttttggttcttatgaagacgcttttatgtgtgaatttttattcaatttggtgttcctgtggggggtgggtgggcactcactggaggatttttcagtcatcttgctctgccctgtctccattttctcttttttcacttaaaatcatttgtgtcttacatttttaattcctggacaataagccatatttatttgatatgatttattcaataattctaattttgaactgtcacattatttccaacattttttatttatataaaattatgcaacaaacattaaataagtgcataaatattattgtcagtttatgaatatccccttaagatagattccacaaaatgatacattatgtgaaatggtatgaatattttatgtagtattttggaaaggctagaaaacgtagcatccctaccagtgttttatttttatctacatgcaatcaatttccataatataatttggctaggctttgctgatatcatagttaaaatttaatcttattgttttaatttgcattttgttgattaccagtgaagctgaaattttcatatatatatatatataaatttgcatttcctctgtggtttctttacctatttgactacagagtgatagaattttctaatgtctcagtaaatctttctaaataaagaggactaagcacttttgatattttttgaaaaacaattttcctggcatgtatatatttttaataaaaatatacaaattttatgtagctaaagccattttggacatcttttatcaggtctttcttggactaacattactttccttttcaataaactgaaaaagcagaatggaagtactcaaattagacattagcaagattggatatcaaccgagtctgtgataaaaaccaagtctataaatattttaatttataacatataattgcatatttatttgcaaaacttttgtactagagttaatatctttgctttgagtctgagtccactgtttggggttccctattgtccttcttgcataaatcacacccaaaatgtatcctttttaatttgcacacttgccttcttgatagagggaaaggaatctaatgaatattgtgaagtaatcaagtatagatttctaagcctttaaaatatgtatcttagtattttatattgtcgtttttaaaagtttcatttagttacttttttgtataagtcactgaattatatatataaaataattctcttttgcactcatatttcattttattaaacaaaactcatatacacagatgtaagaataaaccccaactgactcttgacaaacatacaacttcactgacagaaaagaaaatttagttctaaagactattctgccaatcgtaagaattcagtaaacctatttcataggaattaagtaaaagatgtcctgaaaatattaatatgcaccagtatctatttattgctcaagttctcaagtgtgagctgacctttaagtctgttttattgttttgtctgattgaaatgcttttccccagatattgctagaatattactctgtatgtcatatatgtgatatgtgtgtgtgtgtgtgtgtgtgcgcttaactttttatacttaatattatggtccattcacaattgatttttgtttatagaatgacttttacttacagaatgatttttatttacagaatgtcgtgagtcattcttttcccattggaatatccaagtaacccagaaacttgattgaaaagatgactcataaattatcacattggagattcatttttctcatcagttgaagtaacaattttcaaagcaaaatttaagctacatttaaaaaaagcaataaaatatttatgttttattttaaataagctgaggattatttctctgcatagtgtgcattagtttaattcatttgacatgaaaaaagttcattatgttaaattctagacgctgtatgagacaaaccatatttaacaatttactggttcataatattggtcaattaaagactgacaagtgtccctgaatgggaagcttcaaagaaatactgctcagaaaacttgtctaagggctgtcattggaattatatgccactgtagttagtgcaagttatgtagtttctccagttgtagcacaaaataaaacccatctttaatcagagaaaataatacttaaatgtgctcatgaatatttatttcagtaatggaagaagtataattttttacatggtgagttttcataacaacagtacatatttttcctgaattgaattttttgcaaaatatttgct

SEQ ID NO: 470877 - DNA, 689 bp, Homo sapiens
ccctgagagagccatcctgcccatgaataatcaaagcttgcccctgcttaccaacgggatagttataggcatgggcaggagagtcctgggattgttacacaaagggatggggcagtgtggttatctgctgataaggcctgccaaggactttcatggcagccccaaccatcttaggctcggaggcctaaaaggaaaaaaatggtttcctgggccaggcccagggccatcctgctgtgtgcagcctagggacttggtgtcctacaccctagctgctccagccatggctaaaaggggccaagctacagatcacgctgttgcttcagagagtgtaagccacaaggcttggtggcatacacatggcattgagcctatgggtgcacagaagtcaagaattaaggttcgggaatctctgcctagatttctgatgtgtgaaaagcctggatgttcagacagaaacttgctgcaggggtggagccttcattgagatcctctgctagggcagtgtggaagggaaatgtgaagttgaaacctccactcagggtccccactggggtactgcctagtgaagctgtgagaagagggccaacattctccagaccccagaatggtagatccaccaacagattataacttttccaggcacacaacaccagcctgtgaaggcagccaggtatgcaactgtaacatat

SEQ ID NO: 470878 - DNA, 1681 bp, Homo sapiens
ctctctctctctctctctctctgtctctcctgctccaccatggcaagaggtgcttgcttccccttcaccttccatcatgattgtaagtttcctaaggtctcccagtcatgcttcctgttaagctgcagaactgtgagtcaattaaacctcttttctttacacattatccagtctcagttagttctttatagcagtggtgacacgggctttatggaattatttagggagaattcccaaggcagaagtttagtgaagcttgagctgcaacatctcactctgctggggcttttttcaaggatgccaggaggaagcagcagccatagccttgagcttgtgcatgaagccctgccctggtttaggggccaccttctgagacctggggaccaggggcttcttgtggtgcaagtggaataccaacgcaaaccccacttactccaccctgaagttagtcagatagtcagaaaactacataagcatcccagaagtattgtaaatgagaggaccaagatctccatcacagctatggactaaaaaaatgagtcaggacctagtgtcagggaaggatagcaagataatttgggggtagaaagaaatggtacctctaggctgactctttggacaaatcaggaggttttcactttatatttagaatatataacatgtacattccgttttgagtgaatcagattttactatttattttattctgtttttcattagacttaaatttctcttcatttgcttttttcctgaggtagaagcgtaagctttttattttagttatatattttctaatatgtaaatttaatgctatgaatttatctctgagcacttttgctgtatcccatgctatttttaagttgtctttctgttttcactcagctcaaaattagtttttaaaattaacttgaaaattctttgacttatgtgctatttagcagtatgttgtttaatttccatggacttggatttttttttcaactgtttttatggattaaagatacacatgcaggtatgctttatctgaaattagtgactccagcactgctcatattaatatgagcatggtatttctttcctcactcctttacttttaaactttttaagctttatattcaaaagagtttaaatattcactctaaatatctttttattttaactggtttatttcgactatttaaatctctggtgtcctgtgttccactttttacttctatgagatcaactgtctttagcttccacacatgaatttcagggtagcagatttccctgaaacctcagttctctgaaggctccaagaaaagttgttgattttcagttgatttagtctttttttcttattgtgaggatagcaatcttctaagctctttacatattggagctgacactaaaagtcctattatattatatcataaatcagtccatgaatttatattatttgcaactgaaaaattctaggtgatattgagtatagatttgtaaagatatattgagggaaatatgagatatttgcaattgactggctggaatgcacagtaagtgatttatctgccaacattggagatggaatctgtaaacccataatatgtagagggaaaatggtgaattcttatcagctatgtctgcctggacccttttgaccatttacatcaacactctggaaatctgcgtactggctacc

SEQ ID NO: 470879 - DNA, 639 bp, Homo sapiens
caaagcatgcttactgttcttatgggttatttgcgctgtgctgcaagccggtgcagccagatagggactctgggaaaggccagcagacgggatgctcagatcaggctagccccaatccatgggctagatagctcttttctgtctaggtctgacagtctagataggccaaaccaaccttctggagcagggcaaacctgggaggatttgctgtccttagccatgctccactgcagccattcctatgctaaaccaactgggctctgcacaggctgtaattctgtccctgccaactctccaagcagctctccaagccagttcaaatgtttgcatgtgttgtgggattttctgcagatagacttctggaggtctgtggaaccggttttggttgtcacagctggtgtgtactgctggcatgtaatttacatgtttaagccccaacctccaatacttcaaaatgtgactatatttggagatctggtcattacataggtgtttgtgtttacatgggtgttcattagggtaggccctaaccaaatatgaactatatccttagaagaggaggaaatctggacacagaagtatctatttagaaagtcctatccagagcaatcaggcaagagaaagaaacaaacgacatcc

SEQ ID NO: 470880 - DNA, 2872 bp, Homo sapiens
ccggccatttacacttcttttgtggtggaatgtcatcagttaagaaggacgtgtttgcttccccttccatgatgattgatgcaaagcataaaatcttagaaaatgtgaagcctgataatgccacagaaaagaaaaactcattttctggggagaaattcaagccagctgcagaaattcacatacttaacaaggagccaaatgttaatcaccaagacaatggggaaatgtctccagggcatgtcaaagacctccacagcattctctcccatcacaggcccagacgcctaggagagaaaaatagtttcctgggcaatgtccagggaccccctgctgtggcagtgcagaaggaaaatgtgggttcagagcccccacatagggtcccccctggggcactgcctagtggagctgtgaaaagaggaccacagtcctccagaccccagagcagtagatccactgacagtctgcacagtttccaggtggaaaagccacagacactcaaagccatacatgagagctgggctggagctgcccaagaccatcagggtccacctcttgcatcagtgtgacctggatcttgtaaatgtttcagggtcacttgtcatccagaaatgtgccttttactaaaatgattatgccaactgttctatttaaaaggctcttgatcactgaacacagtgaaaagtaattcataaatgctgactcaagaaaaatgttttgataacaaaagttgccaaggcaagccagaatgaaagcattccttagccttaaattgaaaatagttaaaagacccatagtgaaaaacactaataacaaatcttcagaagctgatgataaacatacattagaagttatgattaaatacattttgactaaacaagatacatgaagctcttattacaaggcctggctctatgataggcaataagaatatttcatagcaatgagagtaagaaaaatattaatgatgagttgtgtaaatgtatatttttatatcgtgtttctgtggttgagtgatttgcagtaaatactgtcagctaataccaaaagcattataaaatgtgaggacagccttcacagttggttagaaaggtgacaagtgaagaacatgacacctaaaaacaactgctgcactcacgggatcaatttcagtaatttccagggtgttttatgaagatgcacagatagaactataataggactctatgatttaggtttgatttataatctttggatgtgaatgttcattatgtgttgtctcttttaatgaaattgctacctttaaacttaaagtacttatgaaatggtgtgaagaagcccagggaaggctaaggcaaatttttagtaaacacttttataagtattaaaggtattgtaatgtagtatcatggcagtaacaattaaaagggagattacatgtaaacatatttttttgtattggttctaccatttagagctagaatttcctttataacattccatgtattcataattattttattcattcaataaatatttatggagtatcaaactctgtctaccactaatgcagacatcagggatataattgttcctcgttcatggactgatttggacttacttacctggcaattgaatgttgaaatgcttcaggcaggactcattctcattgcctggaaatttgctattatctatgttatttttcaaagatattttatctatgtccatattaactattaatattcatacatgaatgactcacaaaattctattctttatgcagatttatcttctaagattttaggcccatatttcaaaatgtctactcaacatctcatctcaaatgatttatgacaccttagacttgacatatctgaaatcaaactcagatttttacaatcaaaacttggtttattccaaggatttcttatatcactgagtagtagcattatccatccagttattccagacagaatcttgagaataattgctgagatatttgttattcttacaatcatttctcagtgtccctttttttctcaatttagagactatatttttaatacttttaaattcacagcaaaattaagagtaaggtacagagatttcccatttatctccctggcccacatggataggttccatgattattaaaattcccctccagggttgtaaatttgttatagttgatggacctatattgacacctccctatcacccaaagaccatagttaacattagggttcactcttggtgttgtatattttatagtgtctttcccatgtggtcctacatggaatgctgtgcctcatgtctctaggaccctggttctaatttgtacttttctgataattagggatgctgagcaccttttctcatacctgttgtccatttgtatgttttgttttgagaaatgtctattcaggtcttttgtccattttttaatcatttttttttctactgagttccttaaatattttgactatatagtttaactttttttacatgtatggtttgcaaatatttcccctaactctgtaaattgccttttcacttcgttgatttttttctttcggaaaaaaaaattggctttagagttaaattgaggttgcttgctgacgtgatatgaagttagacaaagatgtttatgagagactctattactggtcactcatttcacttctttaggaaattggagcagaaagagaggttgactcttcactgagactgggtttgatggtttgcaaagatagacaccaatgtcaccttgcatccttgagcatacataacattatttctataaaaaaatcaagtctattttacccttgacctgagctagcctcaagacttgctttgagctatagaatgggacagaaatgaaaatatgcttatgagg

SEQ ID NO: 470881 - DNA, 728 bp, Homo sapiens
agcagtgttgatttcagggcaacagatagattttagcaagtaggagaatttgcaaacacggaatcctcaaataatgaggattgactatatttatattcacaaccagatggacattgagggctacaattctgggaagaagctccaaaacacttcccaaagccaaacttgcaccaaaaaggtcatggtcattctttggtggtctgctgctggtctgatccactacagctctctgaatcctggcaaaaccattacatctgagaaatatgctcagcaaatccatgagatgcaccaaaaactgcaatgcttgcagatggcattggtctacagaaatggcccaattcttctccacaacgcccgactgcacgtcacacaactaacgcttcaaaagttgaatgaattgggcgatggagttttgcctcatctgctatgttcacctgacctctcgccaactaactaccacttcttcaagcatctcgacaacgttttgcagggaaaacacttccacgaccatcaggatgtagaaaatgctttccaagagttgcttgaatcccaaagcacagattttcacactatggaaataaacaaattcattactcattggcaaaagtgtgttgattttaattgttcttattttgattcataaagatgtgtttgagcttagttcatggtctaaaactgcaatttcttttgcaccaatctgatagatgtaaggtcaccatgcttagtat

SEQ ID NO: 470882 - DNA, 853 bp, Homo sapiens
tctctcctactctacttacactttatgactttgctcaattttctaaagcatattttagtaacttggcctccgtatgaacttagatgtttatgtttcaggaagtcacacaccggaatagagttctgtcagacaacttccagaggctacgatgaatcatcctgctacttattttgggcagccccacaaaaacaaaaggaagattccagtgcatctgagcttctgactctatcctcaaagctgattcctatgggaaaaattattcaaggacaacagaaagtacctcttcgacctctggtcaccaaggagacagtcaaagtggaagaaggggaaaacaaagaatttcctgaaaccagggaatgtaatctgaaggaattgtttcattttctgcatcagtatcatcagcttcttaaagaacctttactaaaacggatattgaaaggacataaaaatataagtgttgagaggattctggaagttggaaagcttaaacaggctttctataaagaagtcgtgtctcctttttctgaatgctttatgggaatggatatgatgtctggctggggaacacttccccgatctagtattgtaaaattgaaacctgctaataaagtcctaatggaagctacagtacgggttgatggaattcaggtttctgtccagtatgaagtctatgatggcattgaaggtcataaagaagtctggcaatttcagaaaggttgggaattcattgcctgcagtagctaatgagagtagaaattatttaaattttctcctagtgtctggcttctgaaagttttgtatggtttttagcctatcaaaagtaagcaatgtattaccttctgtcatatattac

SEQ ID NO: 470883 - DNA, 597 bp, Homo sapiens
ccatctcctgcctgaggtagataagcacatccagcaccagatattgttttctaaatatcattacctacctaaaaggaaccagggctccttgcagataatggctgatctcagcttggagaagttggttattaccgaccttctgaagcctacttctgtcaactcatcaaactcattatccagctgtcagacagggaagtttaagtctgcagaagctgtctgctgccttttgtacagatatgctctgcccccagaggtggaatctagagaggaaataggccttgctgagctgcagtggggtccaccaaattcgagctttcctgctgctttgtttacactagaaagtctaatccacagcaagaccctaactctctttaattctacaaaggctgagagagatgaggaagcggccaaagaaaagtttgaagctagcagaagttgtttcctaaggtttaaggaaacaagctatctccataacataaaagtgcaaggtgaagcagcaagtactaatatagaagttgtaggaagttatacagaaggtctactaagatcttctgtaggtgatgaaggtggctacactaaacaatagattttcaatgt

SEQ ID NO: 470884 - DNA, 1113 bp, Homo sapiens
gggagtacggttgtgggcaatacgccaactaaccaacaggctgccttgctgcctctgctctgacccgcagaaatggtccagggtccctcagcttcagatctgttggagtttgccggagttccactccagatcctcattgcctggctatcaccagcggaggctgcagaacagcaaatattgctgcctgatccttcctctggaagctttgccccagaggatgaagattctcatatgcttccggaatggctcttgggagcctggataaaaaatagaagcacaggtgccataattgccatagtaaatcatgaaggaatgacttccccacagacaacctatgaccttttactcaacttaccatacactgaagaaaggggaataccagatctcttgagcgttgttgaatacgaggttcatgctgatgctattacagttacagtaagaatcccggagtaccagacaatgagaggtctgaccatgagtccttctccaccctccagacgtgggaccacacaaggacttccctgctactgagggacaagttcccagtggccggccgcttattgcacctatctccagcattccttatgaaaaaattacttgtaccagtctatgaaaatgaatcataaagctagtgtgactgcaactattagatacattccattccatgaataacactattttatatgaaggtttgaggttaaaagggaaaaaataggcaaggattatgaaaatacaactttctgtcatagatttcagcaggtgtcttcttacaatacaggacatgtttttattacgaaaacaaagaaagggtgctgccatagtagaattccactgcagaggatgaatatactgctgggtccatttggttgtatcgtagttcaataacgctatgtgtatgtgtgtgtgtatgtgtctgttaggaattaggagagacagattaaggatcagttttaacgatgcatttcagctttttggtttagacaacttaccatgcttttcactctagaaacactttaaggtagttacaagatttctctactttacattttatatcagtcttaataaatgtgatatgctttcacatgcagtatattatttaagcttcacaacaat

SEQ ID NO: 470885 - DNA, 935 bp, Homo sapiens
gaaaattgttcagtttacctactttggagcattagattttagaatgaagctgtggaccttcgtggtgaatgttacagttcttaaaggtggctcagacccaaagagtgagcagcagcaagatttattgggaggagcaaaagaacaaagcttccttagtgtggaaggggacccaagtgggttgccgctgctggctaggtggccagctgttattcccttatttgtccatgcccacatccttctgattgatccattttacagagcactgactggtccattttacagagtgctgattggtccattttacagagtgctgattggtccattttacaaacctctagctagccacagagcactgattgctgcattttacaatcctagctacagattgctgattggtgcattttacaatcctcttgtaagacagaaaagttctccaagtccccaccaacccagaagtccaagctctggaaatctttgtaattttgagttggtctggcaataatttccaggccttctccctgcaaatggctacagaaataaaaaactctctttctccagttcatctgcatctcattattgggccatgagacatagcagcccgaatctcagtttggtccgggaacatttacaaagactaattctgtgttgtcatgaacttgcattatattgatgattaacaatggagatttcaatactcagcaagacccacaaagttgtggtctgaatatgagatcctggaaaaaaaatgttcaaatactgtgacattggtgcatttctgaattattcagttttcccttggtcatttcaatatacaaaggaagtgatgattgctgtaatatatgtttttaaaagggccattgaaattcaaaacagaaagactaaatctacctgaagaagcccagaaaggatgaagagaaaatggaacagttgacttc

SEQ ID NO: 470886 - DNA, 1417 bp, Homo sapiens
taagaatttcttaccagccagacttctggtctctctctctctctctctctctctctctctcaatctctctctctctctccctctctggctcaattatcctatggaaaaatctatgtgtatgtataaaacgcctttgtgtcaatgggcccgccgcgtccatggagagaggctgaggcggcgcagctccagcccaaggcactgagatgcagggatgggaaagatgtcgtttccttagtccgggcaactgtctgggctttgagcaagaggaagctgcagcccacccgggcaccctcaccccgacaccttcagcagtaaacaagataaaacaattccttaaagataagcctgagcttgtagatgtaaaagttggtgtccgaaccaggggctgtaatggcctttcttatactgtagaatatacgaaaacaaaaggaaattctgatgaagttatacaagatgaagccagagtattcatcgaaaagaaagcacagctaacacctttaggaacagaaatggactatgttgaagacaaattatccagtgagttatgttcaataacccaacatgaacttgtggctgtggagactcctctggccataggctccaggaaagctggtggaaaccttggggctcactgaagaaatcatgtgactgtcacatgcttaacttgcggctgccttgtaaagaaaataaagtgatgcattttgaaaatgaagccaaataaattgggtggtatttcacaaataaaatgaaattgaaagtataattaaatatacattcaattaatacagtatgaatatatacatactgtacgtatatattcatacatatatacagtatgaatatatgttgtaaagtattataaattataatacattcaatatgtatgtattataaagtataatacattcaatatttatgtattataaagtataatacattcaatatttatgtattataataaacatacatataattacaaaacataattatgattttaaaataattttgtatatgcaattataatgataatttatatttatatattaaaattataatgataatttatatttatatatcataatttatattaattatatttataaatataatttataaactataaatatacataatatatttataagctatacatatatcatttaaaaattataagtataaatgtaaatttatatttataagtataaatgtaaatttataagtataaatgtaaatttatatttataagtataaatgtaatttatacttataaatataaatatatttataagtataaattacaattatatcaatatataaatatttttataattttatataaattatacatatataattgaatatataattgaatataaatataattaaatataaaggtagactataatttaaaataaac

SEQ ID NO: 470887 - DNA, 657 bp, Homo sapiens
tggccatgacttggtgcagggctgctccagtatgctgggggtaagcttcaggccctattcatcttatgcattcccgtgcctggagatgtcactcaaggagcaaagattggtgcctgttccttcttctgggacctgtgacctcaagaggcgccaaactgatgccagaggcactctggccacagattgccacagccagcttgttggactgtgggggacaagtcttgggaccaagctgtccagactccctagctccagcaggggaaaagcacagcctttagctatagagatgtatgcagctcttcagccgcccagggagcttagcgtgttaggcagttgggagtcccagtactggctgctgtccctcacccaaggagctcaaacaggcttacacagcaggaaatcacagctgtggtgctggtcacccctctccccaggagttcagtaggcttaaacagattccagctgagaggctgttgagaatctgtgtgttccagggttgggacgctaggctccagtggtgtgggttcaattatgatgttgtaatttacttttaagatactttaacatagagagtgtgatattatctatgtgttattctaagctatacataaggcaaaaaacacttgttaagctaatcataaattaacaggccaggac

SEQ ID NO: 470888 - DNA, 591 bp, Homo sapiens
cagaagtaggcttcagaaagtggataataatgaacttcactgagctaaaggagcatgttctaacccgacgcaaagaagctaagaacttggctcatcccattcctgggcacaacattgacccagatctggagaaggagtgctctggaggtttgggcctgcggagcaggttatggctgcaattcaagagccagatccagtttggttcagaggcaacttgggtcccaagacatgaggcactgtgtagtgatgactctagaccctggaatagtaggacttggcaatccagactctgtgagaccaggtgcaatagcagcaaggaccccagaatggcagagcacagctattgtttgggtcctgggagacaggtagcagcacagaggcaatgcactgtttctgctctaacctgggggactgacagctcttggcagtccagggatcattactctgagatgcaggatgccacttcaacttaagtattggggtgcttgtctgctctgaatggccaaggcaccctttcctgagaggcagggtgctgctttaacttatgcaccagggaagcattactcttgcaggcagccaaggtactatttt

SEQ ID NO: 470889 - DNA, 709 bp, Homo sapiens
tgctgttggcgtcttcacagtggccacttcagataggccgctgctaccgtcatgggtttattatatagagctttggccatgatgcccaatggaaaaggagaggatcagactattaaagcagaagatgaagactacatcaagaagcagcaaagaagatccaaagagctaactgagaacgaacactcagatgtctgcgcgtccttttccacttggacaagtaggaagaacataaccagctggcataaggcatcagcacaaaaatgggcttttgctgctgaaatgtgtgatatattaaatagcatgatgaatgatacatatggaactctgggaaatttaaagagtttaagatacgtggatttgctacaatactttggagatatgtcttgcaagagacatacgaatctgaacagacttctgactttttccactgcggatggcttctgtggcttgatccctaaatggtcccttcagtggagccttattgagaggacttctatttgactgatgccaactgcaagatgaacaaaatcctacctctgaaacaatgtcatgcctgcatccttcaggatgatggtcagaatacacaaaagtgcagtaagcggagactatagagtttacagagcaggttgtataagttgttttgagcctcctccattaggaaattttctaagaaaggcatacctgtgtatcagaactgaccctaagattc

SEQ ID NO: 470890 - DNA, 713 bp, Homo sapiens
cggcgcctccccgccggggcgcagccgggatgcgctcggcagccaacgtgacggggctgggcgcgggcggctccgcgagcgcccagcgcccgcgaggatttgccggttctcctcacacccgagcgctccgctcagaagtcgggcgggcaaaagggagcgcctcgggaagtatctgggagccgggctggaaatgaatggggcccggaagcgagctcaaatcgctgacacctggcaccgggctgcgtccactttcatgcttcctaaggcagttctgcctgcaagaagggaacgcgcatcgcctttcagtagatcacaccgatcgtttgcacagacttcaggggcgctgctgctgctgctgctgctgctgctgctgctggaggctggagggggttgggagcagggaacgaaggcagtctcctcatctgatgtgaaccttcagactcttgcaggaagcaggacgtggaatctgcagctgagaaaggagagggatatttcagacacacagacacagagaaaagggccatgtgcagagactgcagtgatgcagccacaagccaaagaatgcctggggccaacagaagctggaagaggcaagggaggattctgccctggtgcctttggagggagcgtggccttgcttacacttcaacttcagacttctggcctccagaactgtgacagaaaagtttctgttgttttcagacactgagttt

SEQ ID NO: 470891 - DNA, 1127 bp, Homo sapiens
cttttgatgtaaacttggacagtagctgactttatgtccatctcttggctcccagtgaaatcggaccataataccatgatctctgttaaagttggggtgtgcgtgtatgtgtatgcttgtgtgtgtgtctgtgactgtgagagtgtgtatgtgggcaagtgtgtgcgtgtgtgtgagcatgtatatgagtgtgtgtacctgtgcatacaccaactctctgatccacctgtcaccaatccaattgttcattcctccatatactcttttctcttcatccccactgccaattccaaggcaaagcacccttcatcattcacccagagatcccagcaatttctaaagaaagctctggaccctaatctttcgtctctctccttcaatccttccacctcttcctgttggggcttcactccccggacaccactctcatcttccatataccaagtgccttcagacatgcagagtatctctccaacctcctcccattcctccaatcccagtgcaagctcagcgtccctcctccaaagccttctttaactctccaaaccccactcatttcaccctttgctcaaattctattgcaattatggtcattcacacacagcagaacacttattgtttaaatgcagtattgcctttccaccccctggtatccttagatgaatgatgtttttatttccagagttctaaattcaaccttccctaccccacctcctactagatacctggcttacttcctccttctgttttttgtttaaatatcaccttcttagccaatcttctttgaccacgctatttaaaactgcagcccctccaccatccccaagttcctccatccccctcaccacctaagcaagtccttgttttcatggagcttacaggagccgacatatttgcctgggcagaaaatatattcactttaccacttatttcattcacagacagttcaatatcgaatctgttctcagtattttattatgactccttatcagtgtccttgatcttgactttaatctctaaggacaagaaccttctctgttttgtttttctaaaatgaactttgaagtttagcatgattttagatttatagaaaagctgtgaatttggtacagagaattcccatatat

SEQ ID NO: 470892 - DNA, 2218 bp, Homo sapiens
ttccctggtcatctggggccgccagaattctgagagtgcttcagtggtctgaaggccctcttttgcatcttcctgcccttccctgccaccagccttccctggcaaggctctgcgatgatcgtggcaacagctttccaaggcgcccagatgtgtcctttctgccctgcaaactacatcagctctccataccctagagttcagggaggtttgcaagctcagctttcctgcatgccccttcgtccttgtgttttctcctatgtactcctcagcggagatggcagcgagctgagcatcccccccactcagtggtctgctgaggatggagtactggtgcagacacgactcaagactacatttgctaagtgtgaaaacgagtgcgtggtgttatctgacagctttttttacgagaaggaccttccttcccatacatctgctgctagccacatggcccatgcatctgtgccagttgtccctagttctgtttccatagctcctgaggattatccctcaaaactgtcaaagtcatcaaaaacaaagaaagtcactctgagaagttatcacaaccaagaggaggctaaggacttactatgactaaatgtagtgtggtgtccagggtgaggtcctggaatgcaaaaaggatattagggcataattgaggagatttgaataaaatgtatgacattttattttacaatgggaaactgaggcacagagaggttaagaaatttatccaagcagtggatgcagagattctgaaactgggcagaggttccagaagacaagtcatttttctagacctcccatagacgccatcgttgatcaagccattttcattttcacgaagtattttattatggaactcctaaagaccatcagccctacctggcactggctttctggttgaaaagcagcattgtggagcctgaaacatcatcagaggcaactgcttcccctccctgtggatttaggaccgctatgtgcagagttctcctgtttgttagtttgctgtcccagttgaattctgagtttccgggaatccctagtgcaatgagaaatgatggagaaccaattctcattatctgatgaaggaaagagccatgtacctacaacagcaaaggctcagacaagccttctcctgccttgggttcatggtcacgtgctgtaggtgtcttgtcttcccatgtgcacctgtctgcatcctcatggtgcatcctcaggatgtcccgtacagtgtcttacctatggttatgcttttataacaatgtgctaataaaagcatggattacaaaacaaaacagaagatatgggtttccttgttgatttagatatgcccaagctttctgggttggaagactgtagtgtctggactgtctggagtcaaagcagtgttgaatctataacagcaagaaactatttcagcagagccagatgtcaggttctgggctgagctttgatggaaactaaagacaggacaagaggagtttgcttcccatgcagaggaggctggaatattgtacagctcagacttaaagacataactttgtctgagagggaacttggcatgaattggcaacactctggacatataagtctccatttataactgaaggttggattgggcttagaactgttgggggaaaggctgaacaggagatggtccaatgtttattaaaaaaggacatctcagataggttttggtttatcaaagggaagcattaaaatgagtatcgtttttctaaagttaatctgtccttttatacctaaaaatataattttttcttgaatcaagaagaaacaacttcagctctgttcttggtcttaagaaaatctgctgcacacattttataaatgtcgagttaattagcactgagttagtgatgtcataatgaattatttctcatcaaagcagatgggtcaagaacaacttcctaggacaaacagttttctaaagcaaacatgttaacaaagtagtttcctataacattctttgcctcaagttttcaaaacagcaatatggagccaaaatgttagaaacctcaaagttgctttgtgaattgtatatgttttcctattgattgttttcatttcattttttatcatagttaccctagttctctgactttttttgaagtataataacatatctatggaaaagtgcacaaatcataggtgagcagtttgatgaattttataaactgaatatacctgtgtaatcagc

SEQ ID NO: 470893 - DNA, 2101 bp, Homo sapiens
acctcaaaatatgaaagtaaaaaataagaagaagaagaagaaggaaaaggaggaggaggaggagaagaagaaggaaaaggaggaggagaagaagaaggaggaggaagaggaggaggggaagaagaagaagaagaagaagaagaagaagaagaagaagaaggagaaggagaaggagaaggagaaggagaaggagaaggagaaggagaagaagaagaagaagaagaagaaggagaaggagaaggagaaggagaaggagaaggagaagaagaagaagaagaagaagaagaagaagaagaagaagaagaagaagaaggaggaggaggaggaggaggaggaggaggaggaggagaaggagaagaagaagaagaagaaggaaaaggaggaggaggagaagaagaagaaggaggaagaggaggaggggaagaagaagaagaagaagaagaagaagaagaagaagaaggaggaggaggaggaggaggaggagaagaagcagaagcagaagcagaagaagaagaagaagaagaagaagaagaaggaggaggaggaggagggaaggaaggaaggaaaaggaagaaggaaggaagaaggaagaaggaggagaagaagaagaaggaggacaaggaggagaagaaagaggagaaaataaaataagccacactgaaatttcctgattaaaaagaaatttttaaccatctaaaaactggaaacccccatgaggttgctacagtttctctccctttgtctggaaatgacaatatgagcagtgagatctaacaaagttctctgaaaaatacagaaaaaaattgtcaagtcctgaaatgcccgcagaatgcagtctaggccttgagccttctgtgagggaaagtaattgcggtttttcccattacttctacaccaacctaatatatagctccacataataacgttttacctggggttactattctaggcattgaataaatcaattaagaaaggcttttcccaaaatggagcctgcgcgatgtttgaattttgctatctcctgcttcacactcttgatctttcttcgcggtggcagctctggtaaccccctttcctgctgcccacagccagctgtgtaggaacgagagggacatgctgcatgaaaaggagtctgattgctgaggagcagggtctggggaaactaagagcaaaccacctatacagcctggaggtaatgagacctgggttgtccttctgtctgcaaattggaatcaaagtgattatttttactgtaccgttgttctgctagattttagctgaagctttatcaaagcctggttcatttaaaacagtgtttctaggggaaaaaaaatacattccaaattccaaacaacaaggttgcaaatgaaggtgtgggaaagagtctctttttaaagtggagatgccacatgtctttgttaattaaccagaagattggagtcagtattcctcgctgctttctcaataccttcagttcttactgaacttgtcattaacccaaacatcctgctttattcccatcaaaactgtttccacgtttgttgttcttcgtcatcatgatctttgtgcaatggatttttgaaactaaaaatctcaggacttcacttttgaccccattgaatttcatttggcttgttttgatgcctggctaccagactcttcagatcatttttaattcttattggtaatactatcaatattggttatcctgtataactgttgatcatcaacacatttcagaagcatttcttttatgacttcatctaattttttttaaattaaagtgctaagtaggaccatggtaaagtagaactcaaatgatcttcccctgaagatgttccctcacattaacacccttctattaatagcattgaacagtcaaaaaaggtttgtaagatatggcagccatcctaagcacaagggtaaagaagcttgatatctgcctcaaatccctccaccctgtcatgggtaccaaccaggtgttatcgaaaaggggtcccaatccagacaccaagagagggttcttggatcttgcacaagaaagaattcaggaatggctaactgcctcagaagcagcccagtagatttcagccttatttta

SEQ ID NO: 470894 - DNA, 1123 bp, Homo sapiens
attttctgcatttgtaaataactggaacctggaggatgaggggcgtcattcacaaggagagagtgagaggagaagggacgggagagggcatcctaggcagagaaaagagcacattcaaaggccctgaggtagagaagactgcatatcaagttttaaagcaccaggagccaccagagaaagatgcagcagggctcttgatacatattgatgatgatgatgacaacaatgaagatgaagctgcagatcaatgtggagaggcaggaagagaggagtgtagtcctggacttgttttaaccttgggagttcttgttgctttttctgattcaattgtccaattcattcagtccactaaatacatatttcatggggctcagttgctagggtcaaccaattgggatagaagatcacagcctctggtggaccagagcatcagccagttttcatttgtgttgatttccttggaagaaaaagttgtggcagaggctgccccatgtgtgcgaaagaccaccgttcctgggctgtggctgcagcctctgtttccgttagcctttccgtacggcagtgttgtcaggtcaccgattccaaatgtcaaatgacccaatagtgagcacgcagtggatttgtcagtgctacctaaggctaggtcaggacaaaagctgccatgacaatgtcacgtgtcattcattgtgcagccctgagaattgcatgagctaattcctgaaagtaaataagctaataaatacttgtatattatgttattgtattattttatataatacaatatataaactatatcacacaattatgttgtgtgatatataaactatatcacaattatgttacctttgtaattgatatataaactatatcacacaattatgttacctttatataatataataattacatgctatttctaataaaatttctattacattatatattctatattatgttatgtgccaaattataaattataaatacatgtaaatttatgtataaatactaataataatttataatttgctatataacataatatggaatataatgtatatattccatattatgttatatattatattacatattatgttatagattatattccatattatgttat

SEQ ID NO: 470895 - DNA, 947 bp, Homo sapiens
ctgctctctctctctctctctctctctctctctctctctttctcagttcccttatgaaataagggcacacagggaatttccacgggctagttgttcaaatgtggggcactgagaaagccagatccttgccacataccgactgggataggtgcagagcattttatttctcctctgcctctccacccaaggtttccctcgtgcttgagagttccagccctttctccatctgccgcctgttaagcagctgctgggttcagcaacaaggaggctggtgtggctggtggacggagaacactgttagtgtaacttggcaggaggttgcacgctggcacagaggggcggtgaaaacgagaggaggtgagaatgtctccacggggtggggggcggaggacagagaagggggacgaccactaggagacccactgcccccggtggctggagctcatagggagcggctggtccaaattggatggggatccagcaaaggcacagtgtctcccctcccagaccccaggagttctccagcctgcattttccagctccccacgaacatttccaaattaaaaaataaaataaaaatacgtgtggaaaaatacagtaaaagtgacagcgccttcccggtttccgactgttctgttttgacttcacaatcagccaaactggagcccctgagtagccagcttaatttgtcaccttgagttattaaccgtttccctgcctctctcgcccggggggcaagatgtggggataggattgcctataaaatacagaacacccagttacacttgaattctggatagacactgattttttttttcttgagtctaagtatgtctcagatattgcctggggcatacttatcctgaaaaccatatgtgttgttaatctgaaattcagatttcactgggtatcctgcatgtttatgtgctcaatcaggcaagatttta

SEQ ID NO: 470896 - DNA, 3673 bp, Homo sapiens
gcttacttccacatgaaggcagaaatcaatcttgggcagccaaaacacatatgctttctcagtgcttgcctgtcccatcccaagtatacttgcctcagatggcaacatgacaaagctcccttccttctctcgaatggtttgcaagcttctggtcttctttttcttctccctggattgtgcacaaaattatgccaatttatggtggggccagtacaccacttaccacagtgcaataatcatttgtttgagtgtccatcttcctctagaccaaagggggcaaatgttctcttaaaagtgccagataatggggacagatttaacccaaaggacatagttcaactcctggtcttgacagaggagaagccctcaaagatggagtctcactctgttgccaggctagaatacaatggcacgaacttggctcactgcaacctccgcctcctgggttcaagagattctcctgcctcagcgtcctgagttgctgggactacgggcacacaccatcatgcccagctaatttttgtatttttagtagagacagggtttcaccatgttgaccaggatggtctcgatctcttgacctcgtgatctgcccacgtcggcctcccaaagtcctgggattacaggcatgagccagtgcgcctagcaaacgacagctttttgagcctctgtttaacaatctcttaaaccttataggtaggcagttctgagacagctcctaatcatctcccctcctggtattcaagccctgatggaatactctcttcttcaatgtgagctggacttagtggttttcttctaatccattgaatacacacaagtgatgagctgtcatttccaaaattagttcacacaaagctgtaacttttgttttgttcacagcctctctcaattgccttctcagcttgtatgctttgaagaagcaagctgcagtgttggagaggcccatgtggcaaggaaatgagggtggcctccagtcaatggctggtgagaaactgagaccttccttccaacaattgtcaagtaactgaatactcccaacaatcatatgggttaggttagaagtgaacctttctctagttgaggtttcagataagaccacagatattatactaacaccttgattgcaggcttatgagaaaccttgaaatgagaagactaagtaaaaccatatctggattcctgacttgcagaaactgtgtgatgataaatgtgtgttatcttaagccacaaagtttttggggtgatttgttctacagcaattgataatgaatacttcaacctatagtgacaactggatgtctatttactcattttccccaccaaagtgtaaagttcctacaaggcagaggttacaacatattcatcctgctacctctcacagcccataatatacaacctgacccataaaacatgattaatcaatgtttgttaaattaacatgtattttgagtttcattgaaatcagttagttgaagtgataataacatttaaatgtgcatgagcagtaggacaaggcagatagctggttaggatagaaagtttttgaaaattgtgaggggaaaaattatttctatttgtaccctgttgtacccagcttaggtttcaaaaactttcagggggtttttattcatttaccaaagacttcaaagttggtgcctccccaccactctaaagaggtctttgcccttattgacccaaccatactgatttgcctggtgcacagtgggagctattataaggagaggggagaagaaggaaatagaaacaactgtgaaaaaggttgaaaaaaatagcgaaaaggatagaaaaagagcagaggaaagagaagaagtagtcaacatccaacccagatgcagagaaatgattcaaaagaaaaagtctgattttcctgtcggaaatatttttaaaaggaggtaggcatttatcaaaaaggaaaaaaaaaaaaaaagaataacagagtttgtcttccaaaggacccaatactcttggaattcaatgacctaattctgtgtatggttgcagtgtggagattgcctcttgtctgattctcatggcattgagacctctgatttctcaacagcacatgccacagcactatcagaagtcaggaataaagaacagagggtgtggggggcagtctagatattatgctcagcaaacatatttttaaatcagtgtaaattctatcttgctggttgcttatcttagcagttaaatcaacttttcgttacttttgtagacattatataatatcttctccccgcagctccagccaccagctgttagtcagcagaatgggagagggactgggtcagcttaagctgaataacttccatggtgacatttgagggaaccaattcccagccactgaacaaacctaaatgttctgctatggccatagaaccaaatagatcttaacaaagaaacctgagagcattcaaaggtcaaaacaattggagctagttccttcaagcttaaatatgctcatctgtaaagtggggacaataactgtgtgtcttatagggttattttgaaggctaaatatgtgtaaaagcctcagtctactgaaaggttgctcaactgtaacactcttttcattttgtgagggatcattctttgttggaggttagggacactgtctcgtgcattacaggatgtttagcaacatcctcagcttctatccatcagatgttagcaccccccccacggaccaccatcttctccatcatcaccatcaaatatgtctccagacatttccaagtgtcccctgggaggctaaaactgcccctggttgagaaccactgttctagtacttggcattgttccataaacatcagatgatatttttatcattataattattactaaaggcaacatcaccctgctatggagacaggtccttggtctcacggaatccctgcaatagttgctgcatttctgcatctttctgagagtaagggttgaaaagagataaggtcaattcatctgacaacaatccaatgggaaacctactgtctccgtagaaattcttttcatggaaagaaaaggggctaccattttgatctgctgcaggaactaggtctattcctcagcctcacagtttgcaaaacgctacagacttttccatgggcataaattctccagctttagggattgctggtatagttgactcttgaagctgctcttggatttccaagggtagcaccatttttacctgagaaaagaaggaaaaagatattcaagaaggagaacttttcaacagaagttactccatttgctgtttttgtggttttgtgcttgtttaggtttgcaagtgtgttttctgcccaaattgttcttgcatattctaacagtgtttgctttacgtgttttgatgccacgctgttttgaaggtacaaatgtttttcatggcatgtcttgtgttaagtgtacaaactgagacgtgaatgtcagtgactgaatagagtacagtattcctcaaagtttgtaactaaataaaccctaagagaaaagtgaagcgagatttctggaggtctggaagtggccagctgacaatatacatctctgtatctcctatttttatctttatgctaaatgcaaattttactttctgtgctaaaataatgtttcattagtttcaaggtaaaaatgtgtaaatagactttccgta

SEQ ID NO: 470897 - DNA, 1356 bp, Homo sapiens
ggcactctccctctcctttgcttctgctcactgattttggcttcactcgtggacacatatgcatttgtgtccctcaccttacaaaataaacatccttgggcaacttcatattaagattttaattccacgttggaagattgagtcaaaatgcctctggcgatttcagggtcccttcttgctctattctgaagacagctcctacgacactaattcaaggatcagtggctggattcgagaaaaaatggaaaacggttgttgcaagggtgtcaactgcttggaatgctgccggcaaccgggttctgaggttgcctatgttgcagaaaatgacggagcatgttctgaagaaaacactaagggtgtggctaaacaaccatttgataaggatattagcatggctgtgacccacaggtctaagcagccattgcagccgaagccagaaagagatgcaatcataacagcagagaaactccagttggaactaaaaaggacagagaaagtgaaacagaacaaagggaggcagttggacttctgggatgctacaggacaagtccgtagagctatctggctttaaacatgcattgtccttcaaaaaaagggaagaatgacctttaaggcaattcagagaccataggacttccactgctcctacaggcctagggggactgattcgatgtcttgattgaaaatattggaagaaaagtattgactttccataaagggaaatctttactattgacttttataataactccctgttggcaaaagcacattctcaacccttcttccttcactctaatttatttacatataggcttgaagagatttctcaaattttgtattcatattaaaatgaattatttcaatgaaaatgttttttaaaaactgtttttaaaaagtggtttcaggtctaactcattgagaactaattaccttctaggtttcagcaatgagtgcttgaccagagagagagacaaactttctaaggtcaactgaaactgccagttgtgtcaaataattacttcctgtgtcgcaaaatacctaatcatatttaataacagtaatgcatttcattgttttttaaatctaaaataaatgcagaagctctacttatgctttgtcatatttagaaaattatgctaatgagggaagtggcttattttcatggaagtttccagaaggtaaagctctttcagtgctgggccatggtaaagttcagccaggggaccttaaagaagggactggtactggactgagagatctcatttcttcttattggattaaccccatgcccgtcaaatgtaaattctagtgattagccatccatgctgctttgttaataacagtcctattcagctc

SEQ ID NO: 470898 - DNA, 1135 bp, Homo sapiens
cctttcgatagtcagcagagtcttctgcgtggcatagaaatgctggttcatcctcggggatgggaggacaattaaagattaatgggaaatgtggaggcatcctggtggaggttcatctgcaaaagtgctccaacaggaaggtgggggctgtcagtgaaggagctatggtggtggccactggcaagcatttcagcagggcagctgaggctgttctgcaaatatgtgtggcaaggcagggaccctgggagaggccagcagaagaggtcgttcagataagactggctccatcccatgggaacagaggcataattcccagtggaataatgagcttcagccctctggcgcccaaggaactcacacaatgggcagatgtccgaactccactggccatgtcccagacgcaaacaatagaacactggccaactcctactaaagagaagcagtcagagatgcagagagtaccatatggctttcagcttcaaggaatcaggcagggagagagaacaacagctgtggaagtcctagatgacatcatcttccaacataaggctgtttcatctacattcaacatctgttgcttagtgtagccacttcatcaatgatcataactagattttctggacaacttctgcaacttctttgtcagcacatgctgcttcaccttgcactttaatgttatggagatgtcctgtttccttaaacctgatgaaccaacctctgctagcttcacacttgtcttctgcagcttcctcgtgtctctcagctttcatagaattgaagagagttggagatttgctatggattaggctttggcttaagggaaatgttttggctggtttgatcttccagccagaccatcaaactttctccatgttggcaataggctgttacgctttcttttcatttgtgtgttcactggagtagcacttttaatttccatgaggactttccttttgcattcacaacttggctctttgacacaagaagcctagcttttaacttatctcagcttttaatgtgccttcttctctaagcttgatagttgctagcctttgatttcccatttgtcctgagaaaagagcactggcaacgagctgtactttttttttttttttttctaaataggaaataggtt

SEQ ID NO: 470899 - DNA, 2968 bp, Homo sapiens
tttccttgatataattttaaagccagcgactctgcgcgggatgcgggagggcagcagcattcaaactgtggtcgggttatcccggaagcttcgactggggacccgccaaggggcccacaagctggggtgcgagtctggcggttgctgggccagcaggagcgtcgccatggcaacggggccgcgcgcacgccgccacctgtgggtggagaaatgcccgcgcggaagtctccgcccccagcctggggcgccggtggtcgccgccgccgggaacgtcgccatggcaaccgcaccgcaggctagaggggtggagtagggggcggggaaatgcgagcgcgaaagtccccgcccccgggctgctgggcggcggcgacccagcggcccgcaaggatttgaaaccgtttggcaggggcggcggtggcggcggcgttggcggcagcggccgagcggaaagcttgcgtgtggtggtgccaggttctcgtttttttctgaatttccttcccccgcccctcccaccaggttcttgagtggaattttgcgccggtggctgccgccccgcccttgcgggcccgttcgggaaggggcgtcgccctcaggccctgggcccgttctccgggcctggggggcgcgcgcccctggggtcccggcgctgcccgctgtggtgtccccggcaggcagagcgcgatccaggccgggacgacttgggaaagttctaagtaaagtttgatcagccggtttgatcggtctgacgtggtccaagagtctgacccaagggtttgcgactgggagaggaaatctgtgtcctggacaaggtaggagcgcggcctgggcctgggcctcggcgggccgaggaagggactgccaggaacggcaccgctggagttttcaattccgtcccagaaaagagtctcagaacaatcagctggatttgcggggacagaaccagggcgctggttggtttgcagaaagtcataggccgcttggagaggcccaagcccagcaccgccgcatgtaggatgctaccctgtgtttctgagttaattatttttaagtgttcaagagaacgacataagcagtcacgagagatttttaaacaggaagctataggcttagctttgtcattaggaaactcattctggagcaggagcagggagttgtcagaagtggaagatgctgtggagatgtcaaataggatgcaaactgaagacagccctttggatttggcaattaattggattatggaagtgggaagtgaagaagaaaaatgggagaagctggatgcagaatttgatcactttgtggttgatatgaagccctttgttctaaaattacctcataggacagtaacaatttttgccattgacataggactgtttacactgagttgttcaagggtagatagacattcagtgataatgtcctgccaaactgtggaaagatcttattgtgatgcctcgtctcacatgtcatgaacttatagcacatggatctctaaagttagctacaaccttttttcttgcatctttttcttttctctatggaaatttttcttgcaaatttttcttctttctatggaaagggccagagacaggaggagcctagtgttctcctgttctccggccctgtctatcaaagcagaaaataatctattggttttttatgcttatttgttggcagaacaaaatccagtgtgaataaagttttgttgctatcttgtctccaattcctggcctgttatttctaattatggaatgaaagtctttttctcaagttagagaattttcatgtaacttaagacactagagaacaattggggagaattttggggactgggaagattctctaaggcgtagtaggtgtgagattgtctgtaaagtattggtacatctatggcattcttttatttaattagtttataataagcaatctgaaactcacatcttaaacaagaactagaaattcataataaattacatcttattgctaaattcaacttgtgataatgggttttcccattattttacatagaggaatgctttcattaaccaaattgtactaaattctggacattagaatattatatagatttcagtttgctatgggatgtggaaagtatgtagattgaaaaactatttacttaagtttatcagtttcacttttgtattttcttcttgttcaaagtgttcccaatatttcatgaagtttattttatgattatataattttcatatcaaaaaatacaaaaaattttaaaggcataagtttccaacctgaaatgatgtttgcaccatagtaaatccggtcttagtgtatttttgtaggtaaaacaataaatgaatatgacctttgtaaactaaaagattagagcagatttatgatttgcattagatatataatcctcaaattgacttagactgataaaaaattaataccagaatagttttcctgagacctaaaacaatcctgtgtcatggcaagataatatagaccattatatgtagattaaactgtgctgtgatttttaggtagattttgaaaagaataattatttcacaaaatgacatgtcagtagtgctcaattatttttaaagatgttaaaaccctcaatcaatcagctacaaatccctgggtattattggatttcataaataaaacattcaagatttaattttagagtaagttgaaaatgcttagataaatcagagattgcattttatctctttcaaggtttacataattaaaattatagaaagatttttcaatatatctaaaattattttagagatgcaaaattataacaaaattttatcacagaattttatttataaaaagtctcccagcaaaggaaagccctggacctgatggcttcactgatgaattttactaaacatttaaataataactaataccaatcttactcaaactattcaaaaaaatagaggagggaggaatattttcaaagtcattctgc

SEQ ID NO: 470900 - DNA, 662 bp, Homo sapiens
cgacctagtatttgacagcacaacagatagacttgctgtcattccgtttgctggttttggaaaatgcagctgccacaaatcatacatgaatcagatagccataaggaacggaatgctgctgacatccacacaagtcgggaagtgaatccttccctagttgagcctctagatgagaacccaggcccctctgctgcaggtctgctggagttttctggaggtccacttcagaccctgtttgcctgggtatcgccagtggaggctgcagaacagcaaagattgctgtctgttccttcctctggaagctttgtcccagaggggcatccgccagatgccagccggagctctcctatttcttactttctcttgagccccactggcaatatcctcaaattccagattcctactaatgacctcttcaaatcaactttgtctttagcacactacacacaaagatgtttccatattcttaggctgtactttactttcagataccaaaatctgtattatctataatacagatatctgcagttatctattgcatgtctttctagctatacctagctatacgtgttttcattatatgcttagtatttgttctaagtatgtgctaggcaacatctaagagaaattccattacaaattactctaaatcttagcagctt

SEQ ID NO: 470901 - DNA, 1079 bp, Homo sapiens
tggaatcaaacgagtggaaaggaatggaatggaatggagtggaatcaacccgatcggaatggaatggaatggaattgaatggaattcaatggaagggaagggaatgcaatggaatcaactgtaatggaatggtaatgaatggaatggaaaggaatggaatagaatcgaatggaatggaatggagtggaatggaatggaatggaatggaatggaatcaacgcgagttgaatgcaattacaatggaatggaatggaatgcaacggaatggaatggaatggaatggaatgcaaaggaatgttatggaatggattggaatggaatggaatggaacggaatggattccagataagtggaatggaatggaatggaatgggaaggatttgaatggaatggaatggaatggaatggaatggaatggaatggaatcaagcgtaacggaattgaatggaaggcaatggaatcgaatcaacccgaaaggaatggattacaatttattggagtggaaaggaacggaatggaattgtatggaatggaatggaatcaacacaagtggaatggaatgtaatgtaatggagtggaatggaatggaatggaatggaatggaatggaattctatggaattaagccgagtggaattgaaaggaatggaatggaatggaatggtttcaactggaatggaattgattggaatgcaattgaatggaatcaacccgaaaggaatggatggaatggaatggaatggaatgggaaggaatggaatggaatggaatcaacccgaaaggaatgcagtggaatggaacggaatggaatggaatggaatggattggaatggaatggaatggaatcaacacgattggaatggaatggaatggattcaacccgagtgtattagaatggattggaatggaatggagtggaatggaatcaacaaaagtggaatggaatggaatggaatggaatggaatgcaatggaatagaatcaaccctaggggaatggaatggatttgaatggaatggaatggaatggaaaggaatcaacccgagtggaagggaatggattggaatggaatggtaaggaa

SEQ ID NO: 470902 - DNA, 9077 bp, Homo sapiens
ggaacggaatggaatgtaaaggaatggagtgcactgcaatggaatgcaatggaacggaatggaatgcaatgcaatggaaaggaatggaatggaatggaatggaatggaatggaatggaatggaataaacaagagtggaatgcaatggaatggtatggaatgaaacggaatggaatggaatggaataaatccgagtggaatggaaaggaatggaatggaatggaatggaatggaatggaatggaatggattggaatggaatggaatggaatggaatggaaacaactggaatggaatggaatggaatggaatggaatcaacacgaatagaatggaatgaaatgaatggaatagaatggaatggattggaatggaatggaatggaatggaatggaatggaatggaatggaatcaacccgaagtggcatggaatggaatggaaaggcatggaatggaatagaatggaatggaatggaatggaatggaatggaatagtatggaaccaaactgactggaatggaatggaatggaatggaatggaatggaatggaatggaatggaatggaatggaatcatcgcgagtgaaacggaatggaatggaatggaatggaatcaacccgagtggaatggaatggaatgaaatagaatggaatggaatggtatggaatggaatggaatggaatggaatggaatggaataaatcctacagtaatggaatggaatggaatggaatcaacgcaagtggaatggaatggaatggaatggaatggaatggaatggaatggaacggaatcaacgagaagggaatcgaatggcatggaatggaatggaatctatccgagtggaatggaatggaatggaatggaatggaaaggaataacagaatggaatggaatggaatggaatggaatggaatggaatggaatggaatggagtggaatagaatggaatggaatggaatcaacccacctggaaatgaatggaataaaatggaaaggaatggaatggaatgcaatcaaaccgagtggaatggaatggaatggaatggaatggaatggaatggaatcaacccaactggaactgaatggaataaaacggaaaggaatggaatggaatggaatcaacctaatggaatagaatcaacgcgagtggaatgttgtataatggaatggaatggaatggaatggaatgcaatggaatggaatcaacccgagtggaatggaatgcaatggaatataatgggatgcaagggaatggaatggaaacaacccgactggaatggattcgaatttaatggaatcaaccccagtggaatggaatggaatggaagggaatggaatggaatggaatcaaacggagtggaatgcaatggaatggaatggaatagaatggaatggaaaagaatagaatggaatggaatggaatggaacggaatggacttgaatggaatggaatggaatggaatcaagcgagtagaatggaatggaatggaatggaatggaatcgaatgcaatggaatggaatttaatagaatcaactcgagtgcaatggaatggaatggaatggaatggaatggaatggaatcaaaccgagtggaatggaatggaatggaatggtttgcaatagaatggaatggaatagaatccaacagagtggaatggagtggaatggaatggaatggaatggaatttaatgcagtcaacccgagtggaatgtggattggaatggaaaggaatggaatgcaacggaatcaaccggagtggaatggaatggattggaatggaatggaatggcatggaatggaatcaaacccagtggaatggaatatattggaattgaatggaattgaatcaacccaagtggaatggaatggaatggaatggattgaaatggataggaatggaatggaacagaatgtagtcaaccagaggggaatggaatgcaatggattggaatggaatgcaatggaatcaacccgagtggaatggagtgaatggtgtggcatggaagggaatggaatgcaaaggaacggaaacaacatgagtgcaatggaattgaaaggaatggcatggaatggaatggaatggaatggaatggaatggaatggagtggaatcaacccgaatggaatggaatggaaggaatggaatggaatggaatgaaatggaatggaatggaatggaatgcaaaggaatcaacacgagtggaatggaatggaatggaatggaatgcaatggattggaatcaagtcgagtacaatggaatggaatggaatggaatggaatggaatggaatggaatggaatggaatggaatggaatggagtggaatcaacccgagtggaatggaatggaatggaatggaatggaatggaagggaagggaagggaagggaatgcaatggaatcaactgtaatggaatggtatggaatcgaatggaaaggaagggaatggaatggaatgagatggaatcaacgcgagttgaatgcaatggaatggaaaggaatggaatggaatggaatggaatggaatggaatggagttgaatggaatggaatcaactggaatggaatggaatggaatggaatggaatggaaaggaatggaatggaatggattggaattaacccgagtggaatggaatggaatggaatggaaaggaatcacttggaatgcaatggtgtttaatggaatggaatggaattggacggaatggaatggagtggaatcaacaccagtggaatggaatggaccggaatggaaaggaatggaacggaaggaatggaatggaatggaatgcaatggaatggaagggaatggaagaaagctgagtggaatggaatggaatgggatggaatggaatggaatcaagcgtaaaggaattgaatgcaaggcaatggaatcgaatcaacccgaaagaaatggattacaatttaatggagtggaatggaatggaatggaatggtatggaatgggatggaatcaacacaagtggaatggaatggaatggaatggaaatggaatggagtggaatggaatcaacccgagtggaatggaatggaatggaatggaatggaatggaatcaacccgagtggaacggaatggaatggaatggaatggaatggaatggaatggaatggaatggcatggaatggaatggaatggaatggagtggaatcaaccagagtggaatggaatgcaaggaatggaatggaatggaatggaatagaatggaatggaatggaatggaatggaatcaacatgagtggaaaggaatggaatggaatagaatggattggaatcaacccgagtggaatggaaaggaatggaatggaatggaatggattggaagggaataaacccgtttcgattggaatggaatggaatagaatggaatggaatggaatggaatcaacccgagtggaatggaaaggaatggaatggaatggaatggaatggaatgcaatggaatggaaacaacacgagtgcaatggaattgaatggaatggcatggaatggaatggaattgaatggaatggagtggaatcaaccccagtggaatggaatgcaaggaatggaattgaatggaatgaaatggaatggaatggaatggaatggaatggaatggaatggaatggaatcaacacgagtggaatggaatggaatggaatgcaatggattggaatcatgtcgagtacaatggaatggaatggaatggaacggaatgaaatggagtggaatcaaccagagagaaatggaatggaatggaatggaatggaatggaatggaatggaatggaatggaatcgaatgcaatggaatcaagtgtaatggaatggtatggaatggaatggaaaggaatggaatggaatggaatggaatggaatgggatcaactggaatgtaacggaatggaacggaatggaatggaatggaatggaatggaacggaacggaatggaatggaatggaatggaatggaatggaatggaacggaatccactcgacttcaatggagtggaatggaatggaatggaatggaaagcaatggaattgaatggattggaatcaacccgagtggaatggaatggaatggaatggaatggaatggaatggaatggaatcacctggaaagcaatgtggaatggaatggaatggaatggaatggaaaggaatggaatggaatggaatcacccagagtggaaagtaatgtattggaatggaatgaaatggaatggaatggaatcaatccgagtggaacggtgtggcatggaatggaatggaatggaatggaatggaatggaatggaatggaatggaatggaaaggaatcaacccgtgtggattgcaaacgaatagaatggaatggattggaatgaaatggcatggaatcaacacgagtggcatggaatggaagagtggaatggagtggaatggagttgaatggaatggaatggaatggaatggaatggaatggaatttaatgcaatcaacccgagtggaatggtggggaatggaatggaatggaatggaatggaagggaatggaatggaatggaatggaatgcaaaggaataaattggaatgcaatggagtcaactcgagtggaatggaatggaatggaatggaatgaaatagaatggaatcaatcccagtggagtgcaatggaatggaatggaatagaaagaaatggaagggaatcaaaccgagtgaaatgggaaggaatggaatggaatggaatggaatggaatggaatggaatggaatggaatcaatccaatggatcggaatggaaaggaatggaatggaatagaatcaaccggagtggaatggaatggattggaatggaatggaatggaatcaaaccaagtggaatggaatatattggaattgaatggaattgaatcaacccaagtggaatggaatggaatggaatggaatggaatggataggaatggaatggaacagaatgtagtcaacccgagtggaatggaatgcaatggattggaatggaatgtaatggaatcgacccgagtggaatggaatggaatggaaaggaatcaaccagagtggaattggaatcaacccgagtggaatggaatggaaagaatggaatggaatggaaagaaatggaatggaatgaaatggaatggaatcaacacgagtggaatggaatggaatggaatggaatgcaatgcattggaatcaagtcaagtacaatggaatggaatggaatggaatggaatggaatggaatggaatggactggaatcaacccgagtggaatggcatggaatcgaatggaatggaagggaagggaagggaagagaatgcaatggaatcaacttggaatggaatggaatgcaatggaaaggaatggaatggaatggattggaatcaacccgagtggaatggaatggaatggaatggaacggaatcacctggaatgcaatggtgtttaatggaatggaatggaattgaatggaatggaatagaatggagtggaatcaaccccagtggaatggaatggaccggaatggaaaggaatggaatggagtcaactggtatgacatggtatttaatggcatggaaaggaatggaatggaatggaaacaaccagagtggaaatcaatggaatggaacggaatggaatgtaaggaatggaatggaattgaatggagtcaacgcgattggaatgaaatggaatggaactgaatggaatggaatggaatggagtggaaaggaatcaacccaagtggaatggaatggattggaatggaatgctatggaattgaatggagaggaatcaaaccgagtggaatggaatggaatggaatggaaatggaatgagacggaatggaatggaatgaaactggaatggaatggaatggaaagggaaggaatggaatggaatggaatggaatggaatggaatggaatggaatcaacccgaatggaatgcagtggaatggaatggaatggaatggaatggaatggaatggaatggaatggaatgcaatggaatggaatacaatggaatggaatcaacacgattggaatggaatggaatggaatggaatcaacccgagtgtattagaatggattggaatggaatggagtggaatggaaacaacccgagtggaatggaatggaatggaatggaatgcaatggaatggaatggaacggaatcaacccgatggaatggaatgcaaggaatggaatggaatggaatggaatggaaaccacactagtggaatggagtggaatggaatgcaatgggttggaatcaagtcgagtaaaatggaatggaatggaatggagtggaatcaacccgagtggaatggaatggaaaggaatggaatggaatggaatggaatggaatggaatggaatggaaaggaatggaatggaatggaatggaaaggaatggaatggaatggaatggaatggaatggaatggaaaggaatggaatggaatggaatggaatggaatggaatggaaaggagcaaggaaaggaatggaatggaatggaaacaaccacagtggaattcaatggaatggaacggaatggaatggaagaaacggaatggaagtgaaaggagtcaacgcgattggaatgaaatggaatggaacggaatggaatagaatggaatggaatcaacccaactggaatggaatggaatggaatggaatggaatggaatggaatggaatggaaagaaatcaacccgttggcatggaatggaatagaatggaatggaatgcaatggaatggaatggaatggaatagaagggaatggaatggaatcaaacgaagtggaaagcaatggaatggaatggaaacgaatgttactgaatggaatggaatcaacacgaatgaaaaggaatcgaaaggaatggaatggaattgcatggaatggaatggtatagaaccaaaacgagtggaatggaatggaatagaaaggaatggaatggaatacaatcaaaaaaccagatggaatgaaatggaatggaatggaatggaatggaatggaatggaatggaatggaatggaatggaatggaatggaatggaattccacgagaggaatggaattgaatggaatggaatggaatggaatgggatggaatggaattgaatggactgaagcccagtggaaaagaatggaatggaatgaaatggaatgcaatgcaatggaatggaaaggaatcaaccgtattggaatggaatggaatggaacggaatggaatggaatggaatggaatggaatcaacccgaaatggattggaatgaaatggaatgaacccgagtggaatgcaacggaatggaaaggaatggaatggaatggaatggaatggaatgaaatggaatggaatccactcgactgcaatgaagtggaatggaatggaatggaatggaatggatcagaatcaaccagaatggaatggaatggaatggaatggaatggaatggaatggaatggaatggaatcacctggaatgcaatggtgtttaatggaatggaatggaattgaatggaatggaatgcagtggaatcaaccccagtggaatggaatggaatggaatggaaaggaatggaatggagtcaactggaatgacatggtatttaatggcatggaaaggaatggaatggaatgcaaacaaccaaagcggaattcattggaatggaacggaatggaatggaaggaatggaatggaattgaatggatggaatggaatgcaatggattggattagaatggaatggaatctacccgagtggaatggaatgaaatcgaatggaatggaatggaatggaatggaatggaatggaatggaatggaatggaatggaatggaatggaatggaatcaaccagagtggaatgtaatgtattggaatggaatgaaatggaatggaatggaatcaacccgagtggaatatggaatggagtggaatgtaatggaatggaatggaatggaatggaatggaatggaatggaatggaatggactgaaccactgtggaaaagaatggaatggaatgatatggaatgcaatggaatggaaaggaatcaactgtattggaatggaatggaatggagcagaatggaatggaatggaatggaatggactgaaacccagtggaaaagaatggaatggaatgatatggaatgcaatggaatggaaaggaatcaactgtattggaatggaatggaatggagtggaatggaatggaatggaatggaatggaatggaatcaacccgagttggaatggaaaggaatggaaagaatggaatggaatggaatggaatggaatggaatggaatggaatggaatggaatggaatcaatccaagaggaaaggaatggaatggaatgggatagaatggagtggaatcacccaagtggaatggaatggaatggagtggaatggaatcaaccagaatggaatggaacgaattggaatggaatggaatggaatggaatcaagccgagtagcacggaatgtaatggaatggaagggaatggaatggaatggaaaggaatggagtggaatctaatcaagtggaatggaatgcaatggaatggaatggagtggaatctaataaagtggaatggaatgcaatggaatggaatggaatggaagcaagttgagtggaatggaatggaatggaatggaatggaatggaatggaatggaatggaatggaatacaatggaatcaagctacaatggaatggaatagaatggaatggaatggaatcgaatggaatggaatggaatggaatccacataagtggaatggaatggaatggaatgggaaggaatggaatggaatggaatggaatggaatggagtggaatcaacccgaatggaatgcagtgcaatggaacagaatggaacggaaaggaatggaaaggaatgcaatggaatggaacggaatcaacacgattggaatggaatggaatggaatggaatggaatggaaaggaatggaatggaataaacacgagtgtattagaatggattggaatggaatggagtggaatggaatgaacccgagtggaatggaatgaaatggaatggaatcaactc

SEQ ID NO: 470903 - DNA, 816 bp, Homo sapiens
cacttggacagagggagctgctcctggcctcttacaggggcaggaatccttccatcctcatgacctggtcacctccccaaggccccagctccttataccttcaccttggttcaggtttcagcagaggaatttggagaggggcacacaaacattcagtgcattgctgtgggcttatatcttcttttgcgtcttctggccccttaaaagtgagagatgaggggactcagcccagcaagggcagagcagatggagcggctgtggagaatgcaggaaggagaggaatccgggacgcccctcagtgcctgctgctgctgacatggagaagactcggatcaagagtcaggcgcaaggtggctttcaacatccaagtggagaaggtatcaaaagtcaacctgctgcccacccgcattcacagcagcactctgaacaatagcagaaaggtggaagcaacccaagcatccatctacagataactggataaacaaaacatgattcatttatataatgggatcttattcaactttaaaaaggaaagaaattctgacaacagtgctacaacctggatgaaccttgaggacgttatgctgagtgaagtaagccagacacagaaagacaaatcctgtgtgattgcacctacatgaggtagtagagtagtcagattcatagagacagaaagtagaatggtggttgccaggggctgggggaaggggaaaatggggagttagtgtttaatggggacagagtttaagttttgcaagatgagaaagtaaagctccctgaggccccttggaagccaagcagatgctggcactatgg

SEQ ID NO: 470904 - DNA, 540 bp, Homo sapiens
ttccacagcccaaatggcgggacagtccaggggctccaagaccaacaggagcatgtggtacccaagtcacaacccaagaccatgtggcatcagatctctctcgggctcaccctgcgcttgtgggacatgtatttgctggaaggacaggtgttgatgccgatcagaagcattgcttttaaggttcagaagaagcgcctcatgaagacatccaggtctggccttttggcatgttttcggaaccagttcttccatacctgggccacggacgatgacactgtgctcaagcatcttagggcctctacgaagaaactaacaaggaagcaaggggacctgccacccccaagtgggctccagtgccatgtcccctcccatgtcaccctctggggcagtcaatacgtccctttagcagatgctgcagatgaagtttcacaccgtgccacagaaaaggcaaagccggcaagcaaggtaaaggggggaggtttggaactgatggcaatcagctcaacagtgcaagaaaaatgagttttcttttgaaaagac

SEQ ID NO: 470905 - DNA, 1335 bp, Homo sapiens
ggtgtattgttttaaacattagattgattctcagacttgccttaaaacaagaaaatgaggagaaaagaaatgccgatatgttgtataataaagatagtgaacagttaagaataaaagaagaggagtgtgggaaagtggttgaaacaaagcaacaacttaaatggaatctgagaagacttgttaaggaattgaggacagtaagaaataacttggatctgatttctcataggcatcagaaagaaaaggatctctttcatgaaaattgcatgttgcaggaagaaattgccttgctgagactggaaatagatacaataaaaaatcagaacaagcaaaaggaaaagaaatattttgaggacattgaggttgtgaaagaaaagaatgataaccttcaaaaaattataaaacgaaatgaggaaacattaacagaaacaatactccagtacagtggacagctgaacaatctgacagctgagaacaaaatgctcaattctgaactggagaatgggaaagagaaccaagaaagactagaaatagaaatggaatcataccgttgtagactggctgctgctgtacatgactgtgatcaaagtcagacagcaagagacctaaaacttgatttccagagaacaagacaagagtgggttcgtttacatgacaaaatgaaggttgatatgtctggcctacaagctaagaatgagattctttctgaaaaactttctaatgctgaaagtaaaattaacagcctacaaattcagctccataacacaagagatgctcttggaagagagagtttgattttggaacgtgtgcaaagagacctcagccaaacacagtgtcagaagaaagaaactgaacaaatgtaccaaagcaaactgaagaaatacattgccaagcaggaatctgtagaggagagattatctcaactacaaagtgaaaatatgttgcttcgacagcaactggatgatgttcacaagaaagctaacagtcaagaaaagacaatcagtactatccaagaccagtttcattctgctgccaaaaatcttcaagctgagagtgaaaagcagattctttcactacaagagaagaacaaggagctgatggatgaatataatcatttaaaagaaagaatggatcaatgtgagaaagagaaagcaggaagaaaacctctaatacccacagttctactctctacttccgtgaacgtttttttaaattttagctcccacatgagtgaaaacatacagtagttatttttctgtgcttgaattatttcacttagtgtcacttaatggcctcatccatgctgtaaatgatatgattttattctttttttat

SEQ ID NO: 470906 - DNA, 2340 bp, Homo sapiens
gcaacacaaagcatgagggcaggccgggaaaccacagtgggtgtggaggccctaccatgcaatccagctcgagtggagaaaatcgccttctagagtctggagtccgagaagaggaaaaccatcccttacttggaagctatgagaagaaggaggccactgctgtcactgccactgccacctcctcagctcgtcaatgccgctggcagtgtagcccccatggcacccctaatctgccccctgccactagcatctccgacgtcaccaccaaccacagcgaggcaagccatggtggcacaggttccagcctccagcatgtggcagtgcctcttccttctagtcctccagcctggcaggagaagctcctgctgctgaccgctctcctactgctctatcgccactaccaaccgcagcgaggtagtgacccaggctccaggctccatccatcctccaccctccagcaggtggaaggttgcggcttcttccagttctctaagctggacacagagttgctcctccgctggacacagaagagcctgaaatgacctgacgccacctcagcatgctttatatatgagtgttgtatttgtgcatatactttaatagccctgagttttaataaagttgcttttaaaaaatgtatcttatatttcagaaatacaccctaaggcatgtgattagttgggtggcatgttgtttagtttttacaattgaaggattgtcattcctttgtacaaaaaaaaaaaaaattaaacgtgaatttttatcatatgctagaggaaagaaggcagatactaaataataaatattgtatgcttccacgtaaataaaatttgaaattatataaagacaatgcattaaacttttctggggttgaagtggggaattcactggcaaaggtcttgcaataaatgtgtaggtgaagggaatattctatatttgattgtgtaggtggttatctagctttataaatttgtaaaactgaactggactaaaatgtgtgccttatacgcagattattctataaaactgattaaaactagttagagaatcagtcaaggggaaaagaaagaaaaggcacgtgaaaaaatgccaatgcactagaattatctttgatgacattaaatatagcctggtcttctcttaattctttttaaaatttacgtagatttctcaatcctttgatactttttcctcaacacatcttatattctcatatatgttaatgtatggctacataagagagggctctcttacagttggactggaacagcttgatatttatatctagagatgcatcggaagcataacactgacccgtgagcaagatgaaaatggcatgtgctagttagtgattcctaatgttgctttaagtttagtgccaactggtctacatcgttgagaatgtttagtttgatggtttacacaacttggcttaagaagtatatgaccaacaatgtatgagggagcctgctgtaaagacttttctgcacttccctttaattattatagtaagctcaaatcttgaaggttcataatatacagataaactgtgtccgtgagactgagaaaggatctttagggagaaaggccctgttcctgaaagacagacattcaatgatttcctgcattttatttctgttgtactttacctttacctttattaaacactaataaggtggttcttacagggcctcataggcctttttagttttccaacctattcatacttggtgcaaacctagtaattttttgcgtgatagtgttgggattttactctgaggctaggcttcacactgtaaaaacagctttttggaattgtatcattttcagtcttcccatcgtgttccactgtcccagccacacacacaccagatatgaagactacaagcaaccgcgaaaggtgtaacacatgtatagtagatgtttttacctcttgtaaaatctaaggaaaatatactaaaaatgaaggcatcagtaaaacagtatcattttaggttgacctcgagtatttcaacatcagtctagcttcagaacaatacatttgcaaggggaaatggtgtacttttgtggtttttttacacctgttatttcaattgaaattgaaaaaaactaatttgaactaactataaccccataaaagaaggttttgttcagtattgaaataaaataaaatgcatttgtgggactgacctcaggacgcattttaaatagtcaatactacctctaaatctcattcccccttctctgagcatcagctttattcttattccatctttaatttggcactgacagatacagactcattcttacaacatataccatcagaagtgaaacctcact

SEQ ID NO: 470907 - DNA, 2689 bp, Homo sapiens
agcagtctgggccgagacagcatgagctggggccctggggaggaggccccagacatcactcctgaagaggccctgcctgagctgccccctggggagccggagttccgttgccctgaacgcgtgatggatctcggcctgtctgaggaccacttctcccgccctgtgctgcggcaggtgatcgaggagtgcaagcaggtgattctggagctgcccgagcagtcggagaagcagaaggatgccgtggagaagagcaagagcgtcaagcagacctgtgataagtgtaacaccatcatctgggggctcattcagacctggtacacctgcacagggtgttattactgctgtcacagcaagtgcttgaacctcatctccaagccctgtgtgagctccaaagtcagccaccaagctgaatacgaacttaacatctgccctgagacagggctggacagccaggattaccgctgtgctgagtgccaggcgcccatctctctgcagggtgtgcccagtgaggccaggcagtgtgactacaccggccagtactactgcagccattgccactggaacgacctggctgtcatccctgcatgcattgtacgcaactgggactttgcacctcgaaaggtttctcgctgcagcatgtgctacctggcgctgatggtgtctcggcccgtgctcaggctccgggagatcaaccttctgctgttcaactacgtggaggagctggtggagatttgcaagctgcgccaggacatcctgctcatgaagcggtacttcatcacttgcagggaggccatggaggctcgtctgttgctgcagctccaggatcagcagcattttgtggagaacgatgagatgtactctgtccaggacctcctggacgtgcatgccggccacctgggctgctcactcaccgagactcacacgctcttcaccaagcacatcaagctggaacgcgagcggtgccaggccaagggcttcgtgtgtgagctctgcagagagggcgatgtgctgttcccattcgacagccacacgtctgtatgcaccgactgctccaccgtcttccacagggactgctactacgacaactccaccacgtgtcccaagtgtgcccagctcagcctgaggaagcagtcactcttccaggagccaggtcctgacgtggaggcctagcgctgaggaacagtgctgggcaccccacctggcccaccgggacccaccctgccaacgtcaagttgttcgttctgctctggagacccctgggttgcggcccctggacccctccacccctgctgggccagagcgggtgggcagtgtcaaggcccgttgtctcccaggtgcttgctgggactcggggtggccgcacctggctgtcacctgggtgtgctgctgtgaggggtccttgcgtggcccccatccttcccccagtgcagaactccatgggcagggagttggggggatatctcacctcccccatggcacagagccctccacactcctgaaccagagcatccgggccctagagattccacagttcccatcctgaccaccctggaaactcatcaggccaagaccccgagagagcttcagaggagtgttgagtaacacctgaggatgcggctgcacacactcagccaagggccgagtctcacctgcagtggggtttcggctctgcctgggggctccatcactttcagccactcgtcgccttggggatttctggttgtccccagctggggctgttcacagttgtcacctgtagacctgcctctccctggcctgaggttcaaaggcctcattgggtggtcagtccagtggggtcacctgttgttcctgtacaacagcaaggaaggggaccatggagcttttccctgctgggtgctcctgctttggcccagcccagctttcctggtgctccaagctaggaggccatggccccagcctaaagagggtgtcctggtctccaggtgtggagcaaggactgtgcactgggggaggttccagttaggtgatgggatcctgcagtggtctggtggcatttcttggaaccagatttacccaaggagatctgtcctgctgcctgtggagggctccagatagctcagaaatgaccagccaatggccttttgtttgggggcctgagatcaagagctgagagtattcactcgactgagcccattcaggaagatcagggcaggggcgtgtgggaggtccctcactccacgggacagaggcccctggacagcagaggaaacctacagctctggtggtgttttgaatatttcttcatggaaagcttaggacatttttaatttttttgtttcagattcaggggtcaatttttcctttattttgaactaattatgcatacatatgaacaattgttttctgaagttactttcacagggaagacctttactgaattttcttaatgttgtttttcaaggtactggcttatgtttccaagaaacaaataaagataattttactttgtttttaatgtttatgcttcttgttgtactcccttctctaagttaatgtgcctgataacttttgaaagtaagaatagagacacaggaaagaggccagaaggttggaataagggctaaataaagaaacttattgccaccaaaataaagacgaatccaggttaatcctctctggtattgacttgtgagaaaagatggacatc

SEQ ID NO: 470908 - DNA, 604 bp, Homo sapiens
gtattttaaatgaatgccacctgtcataattttaagacttttgcttgacactggggccacctgggagtcagattgctcccagcagcaggagcgtggtactgaggctgggcagtctctgctgcctcatctccatggcgcccctgtatccaactgtattcaaagctctctagccttctgtcattttgaggccaacgtgatgctggggctgctagttgccatttatctgggccaccatgtgctgagaccccacctggctcctggggagccttcctgctggctcctggggagtcttcccggtcctggctgcagggcctcttcagatctgctggtccctttgctggggcagggtgggcaggcagcctctgcgccctctctcaggggtgtggcctgcacgctgcatgtccacgctcgtgtactctcttcctttgtgcccacgtcttgctgggtccagagacacccctcagtccagattggaggcattaatttcattcacgagggcagagcactcatgacctaatcaccaccttgaaggcctcacttcttaacatcattgcattaggtcttaggttataacatgaattttggaggactcaagaaaaaaaaa

SEQ ID NO: 470909 - DNA, 2391 bp, Homo sapiens
tctagaggatttagagaactataaaggtgatatttcaaagcgatggagaaaagaaggaatggaacacgtctacactgctggtgggaatgtaaactagtagagccccaatggaaaacagtgtggaaattccttaaagaactaaaagtagaactactacttgatccagcaatcccactgctgggtatccaccgagaagaaaagaagtcgaaaaagatgctgtacacgcatgtttatagcagcacaattcacaactgcaaaatcatggaaccaacccaaatgcccatcaatcaactagtggataaagcaactgtggtatacctatatgtaatggaatactactcatccataaaaaggaatgaattaattgcatttgcagtgacctggatgagactggagactattattctaagtgaagtaactcaggaatggaaaaaccgaatgtcctgtgttctcactaatatgtgggagctaagctatgaggacacaaaggcaaaagaatgatacaatggactttggggacttgtggggaagagtggaagtgggcgagggattaaagacaacatatatggtgcagtgtatactgctcggtgatgggtgcacaaggatttcacaaatcaccactaaagaacttactcatgtaacctaataccacctgtaccccaataacttatggaaagtaaataatgaaaaataaaaataataaaatgatatttggaaacattacccacagaaagtgaaacagaatttgaagtctgatattagtgaggtttattgtctgctagacaaacaaaatagcagcattctccagaggattataacaagatccagagtctcacgacatgattttcaaaatgttcaaaagacaacattagttattttgatgtacaaaagaactaggaaaataaccaattgtaaaggattatcttttgataaccaacagatatcatcctgagatccctagaggttggaattatcaaagacttcaaatcatctattataattacattccatgaagtaaaggtaaacactcttgaaataaatcagaagtaaaagccctaggcatagaaatagaagttatgcaaaagaaccaaatggaaatttttataattgaaaaatataatctctgaaataaaaaatttactgaatggactcattagcaaaatggatagaactgaggacagtcaatgaacttgaagcttgaatcttttcagattgtttcatgtgttctttttaattaaatgcgagaaatacagaacaatactattaagaaaattataattatctacaactccaactctaagaaataaccactgttagcactttatcatatttccatctggtattttctgttctctctgtgtgtatgtgtatttggatatatatttgcatgtattatatcgcatgtatgattttgtatcctgttctctcaaaactgttacatcaatagcatttttaatttatattttttaaatgatgattttagtgagtatatttaattatatgaatatactacaatttaattaataattccttaactattatgcaataggttgtagaaaatcattagttccatgattcaaccaatgttttgaagctcttacctacagttcaaggtcctgttcttgttagttggaataaaataatggctttgacagtcagggttcctcttctaatgtaacttcttaaacaggattgtaattggtactttacatttttgttcacatctctaattatttttagaataaattcttacaagcagtattataaggttgaaagacaggaatatttttactattctttaaacctaaataaactgctcaaatacattttcaaaggccatatcaatttatgtctttcatgtgaatgggaatatttcattatctcactggaccttcacacacatcacatatataatttttgagagaaacttcttgctgtgatttcatattttttattgctagttgaacacattttccatacttatatttctcttttattttttcttattaaactgttctaattactttctcattgattgacataaacttttcatatattaaggatattgagccttttctgccatatatgttgcaaatgttttcactttttttattatttgttatttatgttttgacataaaaaagtttaaaattttatccagtcaattatatcgtttgcttccttagagatatctcccattagttttaaacatgaacagtttgccttatcaaggatgggacaattattcatttatattttcttccaatttatttcttttttaatgggaatctttaattcatctagattttagattttattttgatgtttagttttatatgaggatctaaattgatttctttttcctcataaacttagcctattttcccagaa

SEQ ID NO: 470910 - DNA, 1089 bp, Homo sapiens
gagactttctacatgccagactgggtttaggtggactgggtatgttaaacccagagaagagaggacttcgattcgagattgcaactaccttcgcaaaacagaagacccacggtgactgtaagctttattcaacattaaaacgttggtgccaacttggatgtagggccaagcatagcgtagttgggaaattgtctgccctgagcaggcatggagcaggggaagatgagatgggacagatagaagcaccagcagtatgtaaaggaaatgagagagagcaagccagagggctgtcttggagaagaggtttcccgacagagacaacagtgaatgtaaagggcccaggtggcagtgtgaccagcttgttgaaggagaccaaggagacaggcagtctgcaaatatttgcccttctggaaacaccctctacctgcctttgtcttgctctctgcccgaagaagctggcctatgaggaaatctttggtgttctcctgtgtcctatggcttcaaggggcaagcattgtccagccttggtagcagcagaaattttgcaggaagaggaatgacaggttctcagagagagagagagagagagagagagcttgctgccttttattcttggcttccctatggattcagtcaatggctttgaacctcagactgcatagagtccccaattcactgttagtcttcatacgtttgccccttaggacaaattaataaaaattttaaaagaacagaaaaagcattaaatgaatatatttttgcggtcgtttgaaggtctgtaatgagaacagaaaatacataattgaacacagagtagtacaagaactgactgttttgatctcctacaatgaggtgccagcagctgaaaataaaaggaacattgataagattctattctgaaacatatagaatcaaaaggagtgggttgtgttgatcacactgccccatctaattcttctcatatttaatatgagattccttatttcaaagggaaagccatatttatctctttctttagagtctagttcccctcattagttcattcattcaaccactcaattaatacttattgagtgccaaacagtgtac

SEQ ID NO: 470911 - DNA, 2238 bp, Homo sapiens
agcagctgaagactgacactacccgatcgcctcagaagccccctagaccatcatggacgccgagctttaagtaactctcacagtagaaactaagtccgtccccttcttaatcaatatggaggctacccacaccacattaccttcttctcaaaggcctatacctagttttgccatcctaacaaaaccattatataaactcacaaaaggaaacctagctgaccccatagatcctaaatcctttccccactcctctttccattccttgaagacagctttagagactgcccccacactagttctccctgactcatcccaacccttttcattacacacagccgaagtgccgggctgtgcagtcagaattcttacacaaggaccgggattgtgtcctgtagcctttttgtccaaacaacttgaccttaccgttttaggctggccatcatgtctccgtgcagcggctgctgccgccctaatacttttagaggcccttaaaatcacaagctatgctcaactcactctctacagctctcataatttccaaaatctgttttcttcctcacacctgacgcatatactttctgctccccggctccttcagctgtactcactcttcgttgagtctctcacaattaccattgttcctggcccggacttcaatccggcctcccacattattcctgataccacacctgaccctcatgactgcatctctctgatccacctgacataatgttcagtggaatccttgaaaccacatgtttttctcttattactagctttttagcaaaaacataatatttacattttgatagatgagaacaaaataagagtgaaatgccacactgaattacaggcttgagcagaattacctaaaaggtatgtccaatattcagtatggccttgaatactgaaacattaaccaattagcaaaccttcagctggtttgaaatgttaagcattcctcttcaggttaggtgagaagaataagaatcccaggaataagttaaaactgagaaatagaattagaaccataattagaatcagattggagataagacggtacaaactgtaatctatgtgttttgataaacaattcattgtatgggcagtactgaattttgtaactgtatcatgtttctgctttttaagatatgcttttgataaaagatataggagaatctggtatgtcagtcatctaaaaattcaagtgccttaatttataaacatattaaacatttaagaaaatataaattatgttttgatttgaaattagtgtttgattagaatgatgttaaagataatagactatcaatcagacaaaaatccaacaaaataatctttatttagtaaataatctttcccttacaaaattgtctaatagtgtagattctatcaataactttttttcttatgaactctccatgtgctttgcacatttggctgtcctgttgttactatttttcttcttaaaaatatgagctttcacaaatttaaaaaattagcattgtccttcatacattgttcaaagattttccctcatcgctgcttgccactatactcagtttttagcacttttgataaacagaagattttggggtttcatttgtcttaaatgttacaaaatcaacattttcatccattttctttatgactttaatgcattaaagtttatcaaataacatttattgacatttctcaatgatcaactacaaaaccaaaataatagatttttctttatgtatgacatataaataacttcagatccttgtgatgtttcctcattcaagtttatttatacttaaaatttgatatgaaattagtagtttatatttaacatctgatatcaaatgaatcttgttcattcagagaaggtaattatttcacaaattttcttagaaaatatgcacatttgaatattaccattgcgcaccaaggagactttggctggatatacaattttcagattattagccattttatctaagtatttagagattgacataggtcttacagaaacttgatattatgagaagtctgaagttagtgtgttttgtttagtttttaaaaattttgttatgcaattccatacaggattctaaacttttatcattaaaattataaaggaaaagctaagaaatatctagatgaggtttctttgattaactttgcacaagcagcgtttcttttctaattgtagcttgggaattttttttttcagttttggaattctttctatgt

SEQ ID NO: 470912 - DNA, 3704 bp, Homo sapiens
tcaggaaaacggaatgacatcgagctacacgctgtcatcagacagatcaggaaaacggaatgacatcgagctacacgctgtcatcagacagatcaggaaaacggaatgacatcgagctacacgctgtcatcagacagatcagggaaacggaatgacatcgagctacacgctgtcatcagacagatcaggaaaacggaatgacatcgagctacacgctgtcatcagacagatcagggaaacggaatgacatcgagctacacgctgtcatcagacagatcaggaaaacggaatgacatcgagctacacgctgtcatcagacagatcaggaaaacggaatgacatcgagctacacgctgtcatcagacagatcaggaaaacggaatgacatcgagctacacgctgtcatcagacagatcaggaaaacggaatgacatcgagctacacgctgtcatcagacagatcaggaaaacggaatgacatcgagctacacgctgtcatcagacagatcaggaaaacggaatgacatcgagctacacgctgtcatcagacagatcaggaaaacggaatgacatcgagctacacgctgtcatcagacagatcaggaaaacggaatgacatcgagctacacgctgtcatcagacagatcaggaaaacggaatgacatcgagctacacgctgtcatcagacagatcaggaaaacggaatgacatcgagctacacgctgtcatcagacagatcaggaaaacggaatgacatcgagctacacgctgtcatcagacagatcaggaaaacggaatgacatcgagctacacgctgtcatcagacagatcaggaaaacggaatgacatcgagctacacgctgtcatcagacagatcaggaaaacggaatgacatcgagctacacgctgtcatcagacagatcaggaaaacggaatgacatcgagctacacgctgtcatcagacagatcaggaaaacggaatgacatcgagctacacgctgtcatcagacagatcaggaaaacggaatgacatcgagctacacgctgtcatcagacagatcaggaaaacggaatgacatcgagctacacgctgtcatcagacagatcaggaaaacggaatgacatcgagctacacgctgtcatcagacagatcagggaaacggaatgacatcgagctacacgctgtcatcagacagatcaggaaaacggaatgacatcgagctacacgctgtcatcagacagatcagggaaacggaatgacatcgagctacacgctgtcatcagacagatcaggaaaacggaatgacatcgagctacacgctgtcatcagacagatcaggaaaacggaatgacatcgagctacacgctgtcatcagacagatcaggaaaacggaatgacatcgagctacacgctgtcatcagacagatcaggaaaacggaatgacatcgagctacacgctgtcatcagacagatcagggaaacggaatgacatcgagctacacgctgtcatcagacagatcaggaaaacggaatgacatcgagctacacgctgtcatcagacagatcaggaaaacggaatgacatcgagctacacgctgtcatcagacagatcagggaaacggaatgacatcgagctacacgctgtcatcagacagatcaggaaaacggaatgacatcgagctacacgctgtcatcagacagatcaggaaaacggaatgacatcgagctacacgctgtcatcagacagatcaggaaaacggaatgacatcgagctacacgctgtcatcagacagatcaggaaaacggaatgacatcgagctacacgctgtcatcagacagatcaggaaaacggaatgacatcgagctacacgctgtcatcagacagatcaggaaaacggaatgacatcgagctacacgctgtcatcagacagatcagggaaacggaatgacatcgagctacacgctgtcatcagacagatcaggaaaacggaatgacatcgagctacacgctgtcatcagacagatcaggaaaacggaatgacatcgagctacacgctgtcatcagacagatcaggaaaacggaatgacatcgagctacacgctgtcatcagacagatcagggaaacggaatgacatcgagctacacgctgtcatcagacagatcaggaaaacggaatgacatcgagctacacgctgtcatcagacagatcaggaaaacggaatgacatcgagctacacgctgtcatcagacagatcaggaaaacggaatgacatcgagctacacgctgtcatcagacagatcaggaaaacggaatgacatcgagctacacgctgtcatcagacagatcaggaaaacggaatgacatcgagctacacgctgtcatcagacagatcaggaaaacggaatgacatcgagctacacgctgtcatcagacagatcaggaaaacggaatgacatcgagctacacgctgtcatcagacagatcaggaaaacggaatgacatcgagctacacgctgtcatcagacagatcaggaaaacggaatgacatcgagctacacgctgtcatcagacagatcaggaaaacggaatgacatcgagctacacgctgtcatcagacagatcaggaaaacggaatgacatcgagctacacgctgtcatcagacagatcaggaaaacggaatgacatcgagctacacgctgtcatcagacagatcaggaaaacggaatgacatcgagctacacgctgtcatcagacagtcaggaaaaccgtgaattacgtcgagctaaacggagcatgacagtaagatttctcagagaccttcatacacccacgtgcaccatgtacctccaagaaagggtggattatgcagtatttcctaaattcgatggtgggaatgctctcacctccccagtgggaatgctctcacctcgccagtgggaatgctctcccctccccagtgggaatgctctcacctccccagtgggaatgttcacctccctagtgggaatgctccctccccagtgggaatgctctcacctctccagtgggaatgctctcacctctccagtgggaatgctctcacctccccagtgggaatgttcccctccccagtgggaatgctctcacctccccagtgggaatgttcccctccccagtgggaatgctctcacctccccagtgggaatgttctcacctccccagtgggaatgttctcacctccccagtgggaatgttcacctccccagtgggaatgttctcacctccccagtgggaatgttctcacctccccagtgggaatgttcacctccctagtgggaatgctccctccccagtgggaatgttcccctccccagtgggaatgctctcacctccccagtgggaatgttctcacctccccagtgggaatgttcacctccccagtgggaatgctctcacctccccagtgggaatgttctcatctccccagtgggaatgctctcacctccgcagtgggaatgttccctagtgcaaagggcagattggaggctgggtcgccagaagcagatgagccctcgttcctgccttcgtatgtgctggtgttttcaaagtttccccacttgtttttcactggatagaggcttttcttccacaaatttctcaatttggtttgaattttatgttcctcaaggaagtggcaagagggtgcccttgtacacagttga

SEQ ID NO: 470913 - DNA, 1397 bp, Homo sapiens
tttcagaggagccggtgggggatgaggagcccgtgggggatgaggagccggagggggttgaggagcccatgggggatggggaaccagtgggggatggggaacctggtgggggatggggaactcgtgggggatgaggaacccatgggggatgaggagcctgtgggggatggggagcccctgggggatgaggaacccggtgggggatgaggaacccggtgggggatgaggagccggagggggttgaggagcccgtgggggatggggaacccgtgggggatgaggagccggagggggttgaggagcccgtgggggatggggagcccgtgggggatggggagtccggtgggggatggggagtccggtgggggatggggaacccgtgggggatggggagtctggtgggggatggggaacccgtgggggatgaggaacccgtgggggatggggagcccgtgggggatggggaacccggtgggggatggggagcccgtgggggatggggagtccggtgggggatggggagtccggtgggggatggggaacccgtgggggatggggagtctggtgggggatggggaacccgtgggggatggggaacccgtgggggatggggagcccgtgggggatggggaacccgtgggggatggggaacccggtgggggatgaggagcccgtggggggtggggaacccgtgggggatgagaagctggagggggatggggaacccatgggggatggggaacccgtgggggatgagaagctggagggggacgaggagcccatgggggatggggaacccattggggatggggaacccgtgggggatgagaagctggagggggatggggagcccgtgggggatgggaaacccatgggggatggggaacccgtgggggatgaggaacccgtgggggatggggaacccactggagcaaatcacacccggctggccaataacaacactccacaggccgacaacaacaccccacaggccgacaacaacaccccacaggccgacaacaccccacgggctgataacacctgacaggccaataacaccccacaggctgataacaccccacaggccgaaaacaacacccgcaggccgaaaacaacacccacaggccaacaacaccccacaggctgataacacccctcaggccaataacaacaccccacaggccgataacaccccacaggccgaaaacaacaccccacaggccaataacaccccacaggccgataacaccccacaggctgacaacaccccacaggctgacaacacccacaggccaacaacaccccacaggccgataacaccccacaggctgataaaaacaccccacaggctgataacagcaggggattctttagagtcgaaaacgcagttagcaaga

SEQ ID NO: 470914 - DNA, 694 bp, Homo sapiens
ctcaccttccttttccacctacacggttgccacccccttctgacctccagccttttcccaggcccagcttcaggctcacctgcaggaagagagatgtcctctttgttgggtcccagtgaaactccaccatgttgagttgtgagagcagcacttggggttctatcactcccacggacagtggcacatctgcaggcacagggtggcaagcagggagccaggctcagccttcccagtccacaaggactcctgagccagagctcaggctcgaagggcccccggcctttccccactcatcgatgtccaggatgcggtccctgggcccggctccacctccacccagccagctgccgctgctgctctgtgtactgcagaccttccctctggggaacccacagtttcctgtagcaggtccccaagctgcagccagggccaaagggacccccattcagctcctcaggcctccaggaggcctccctgaagagttcaagcccagctgtgtggccttgggcaagtgacttaacctttctgagcctcttgttgcaactgcataagggggatgatgagagcttttaccccagaagtaaagacaataattgagccctcaataaatattcccctttactccatcgtttccccagggcctagtacatcaaaggtttatttaacacttaaggatataggtttatttgtataa

SEQ ID NO: 470915 - DNA, 511 bp, Homo sapiens
ccccagggcccagcacggggcctggctccgagcagcttgaccaatgaggtggtccatatgtgtcccaccattggcagcaacgtggaggagatcattctgccgaagacccacttcttcatgtgggacatagtgagacctgaggctctgagctttatctggaacacatactactccaacactgagtttatcatccttgtgattgacagcacggaccgggatcggctgctgaccactcgggaggagctatataaaatgctggcccatgaggctctacaggatgcttcagtcctgatatttgccaataagcaggacgtgaaggactccatgaggatggtggagatctcccatttccttactctcagcaccatcaaagaccactcgtggcatatacaaggctgctgtgccctcaccagggaagggttagtggctgccctacctggatctctagggcctggctgaaccaatggatgactgaccatcagaacccttctcctgcctctctcctgtgaga

SEQ ID NO: 470916 - DNA, 658 bp, Homo sapiens
ggtcctgcagcatgtaggctgacagcaaggggaacagcagtgggtcatggtgtcaggggtggagggtgggtttctgttcagagcaacaagaatgctggcagcagctggacacacagcaggctgggcagtagcagggctggcagcagctggatccacagctctggttgaggcaaccaggcaggcagacagtcgtggggtggtagcaggttcttctgcagtacacaggtgcacaggagctgctctggccacagctggacccacagctggtttggccacagcagctggacccacagcagatgggctggtagcagggtgtgctgcagcaggaaggctggcagcagctggtcacacaggtgggctggcagcaggtggtcctgcagcaggtgttttgacagcaagttgggtggcagtaaggctggcagcagctggacacacagcaggagggctggcagcagggtgtgctgctgcaggtggtcacaatggtgggctgccagcaggtagtcctgcagcaagtggtcctgcagcagacaccagtcacattgaatcagaagcacaatttattccaatatgaccttatcttaccatcttgcatttaagtgaccctatttgaatatgagttcttggggacacaattcgacccataaccttggaatatctc

SEQ ID NO: 470917 - DNA, 1453 bp, Homo sapiens
gcaaattgttcattagcgtgaaccggccagaacgttggctggtgtagaacaccggacctggttggtgatgcggagccaggacaagcccggaggaaaagcagaagggccaagaaacaaggtcagcaccagcaccatggcagacggctgttgtcctggaaacaccacagccattccagctgtgcccaccatcaccacatacccagttaaaggtggatttcgacatgctctctgtttgcctagttcctgccacagcagaatgtggcaactggtcacatgccaagaaagctgtcagccatccattggtgccccaagtggctgtgatcctgcttcgtgtcaacctacccgccttccagcaacgtcttgtgtgggttttgtttgccaacctatgtgctcccacgcagcctgctatcagtctggcactggtcagtctccttgtctggttagctcatgtcagccatcctgctcggaatctacttgttgtcaggaaaagtgctgcgatgccagtccctgccagcaaagctcctgccaggaatctgtctgcatgtctggatcatgtcaggcagcttgtggccaatcagtctgctgtgatgctggatcctgccagccatcctgctctgaagtgacctcctgtccggaaacttcttgcctaccaaccatctgtacagctagtccatgccaaccaacttggtgccaaggaagttcatgtcaacccgtcagtggtgaaggccagccctgtaaatcaacttattatcaacccatctgctatattttcaagccttgccaatcagccctctacatgcctgttccctgccagccatcgacttgtgtgttcagttcttgcaatactacttgctgtgtgccttcccattgccagccacctcactgccaactggttccttccacatgcttcatctaccagccagtggctaactgccaggccccttgttccacaaagaactgttgcaaaccagcttcttgtgacactgtgatttctggccaaccaacttgtgatggacccccttcctataaccagagtggctgcaaatcagcttgctgtgtgactggtttaggcacatcacccagtagtggctccaattgcttgccgacttcatgccaacccagctgtgaggcgtgcaacgggggcgtggctcgcttcttccgtgccccactgctcacacttctaggggaagcatgcagatgggcaggctttggggctctgaccccacggcagcgtctagggcgagtttatacaatctatccaatttaggctttcttgatttatattctagaataatgtctatatttgtttatttaagtgggaatcattttaattttatttctgatttttaatcctatattttctgcattagttatctccaaacctacaatttaattaaatttatcccagcgtttgatcttagaatataacattcattcttgtttcctgcatatt

SEQ ID NO: 470918 - DNA, 472 bp, Homo sapiens
caaagtttggagggaaagagtaatgcttgggacaagactggctccagggtctattgaagttggcctggacttttggtttgctgaagcaggcccactggcacctggggccatggggatcaacctgaagcctctggctggcctggtgctgaggcagtgtggagtgggcctgaagtctggggccatggaagccagcctggtgctggggacaatctggagcctggggttttgtctggcagtatgtcaggccctaagaccaagtctgccaggcatgtgtgaagctcagggctgtgggatctggcctggcaccaggattgacagagcagcatgtggagactcactttataaacttttgctccaagaactactgcagaaacatttcaggaaagccaagagaatccacagaccctttaaaggaagcagctggctgctacaggctccatgagacagctaaaaaactgtgagtgcctgaagt

SEQ ID NO: 470919 - DNA, 616 bp, Homo sapiens
tctgcagcttcactcctgaagtcagcgagaccacaaattcaccaggaggaacaaacaactctggacacactgcctttaagagctccagcgagaccacgaacccaccagaaggaagaaactgcagacatgtccgaacatcagaaggaacaaactctggacacaccatctttaagaactgtaacactcaccgcgagggtccacggcttcattcttgaagtcagggagaccaagaacccaccaattctggacacgattcttcacctgctgactaaggaccccctgggccctgaatacccaggaagtacaccaggggccttgggctatgagacgtgctggctacaagggaaaccaagcacattctcagttgtgctggctatggtgaaagcctcctgtttgagaaaagcagagggaaaagtaaagggcactttaccttgcaccctagcatttctggactttctatgggccagagggaaacctacgtccttgaaggatgagtcccaggcttggcaccatttaccatacgctgatggaagagaccttggcctttaagtgaacattacagggtgccaagcacaactccccatggactggtgctcataatgaccacagagagagg

SEQ ID NO: 470920 - DNA, 776 bp, Homo sapiens
gtgccctggatgtgatacttggggtcaaaggagattatgttggagctttaagatttaatgactgccctgctggattttggacttgcatgggaaggccatgtatgctctgaatcagtgtccaatatatgagactgtttctttcacagctaggattcacaggtccagaaatcaaggggtgaaagtggaagtggcaccactcaccatcttccctagtgatccactagcaaaatttttgcttccttttaccgtgacattttgttctgctggcctagaggtcttagttccagagagaggaatgctgccaccaggagacacaacaaaaattccattaaactggaaattcagagtgccacttggccactttgggctcctcctacctttaaatcaacaggctaagaagggagttacagtgttcgctggggtgattaacccagactatcaagatgaaatcagtgtactactccacaatggaggcaggaatacaaatgacccagacccttcaggaataaaggttagtgttagtccaccaggaaaaaaagaaaaaaaaaaggaaaaaaaacctgctgaggtgcttgctgaaggcaaagagaatacagaatgggtagtagaagaagatactaaagcataatcaaaggatccattttataggtcgttttgctgttccttcacaggtatctaataccaggtgaactgtggaggcttacattataaattgctagtcagataattaaggtgttttttccagagagtgtgtattagtccattttcatgctgcc

SEQ ID NO: 470921 - DNA, 817 bp, Homo sapiens
tcccaatttggcttttgggtgcaactaaagttcctcactgaaatgtctcctctttcttcccaatgtgggataggactatccaggattgagccttcccagcaacaagggacaactcagggagtgggctgtaccttcatctcatctggggctaagggtctgctggagttttttggaggtccatgcgagacctgtttgcccgggtatcatcagtggaatctgcagatcagcaaacattgctgcctgttccttcctctggaagctttgtcccagaggggcacccgccaaatgccatctggagctctcctgtatgaggtgtctgtagacacctgctggcaggtaactcccagtcaggaggcatggggagcctgcaggcaagaacgtttaagtctgctgaagctgcgcccacagccaccccttcccccaggtgctctgtcccagggagatgggagttttatctataagcccctgaatggggctgcattttttcttttagagaagctctgcccagagaggaggaatctagagaggcagtctagctacagtggctatgccgagagctgtggttccatttcattgccaagcccaccagagcaggtcttctacaacactgtgctgtatgggaaaatgggacttcactcttcaccagctgacttgtccagagataaagagcactatgctttagaagtggctgaaagtagagatttttaggttttaggtgccaaaacagcattagaagcagtaaacagagctgagaatagtaaagcacactacaaatggaaaagttgagtgtaaacatagaattgaggtaactaatgat

SEQ ID NO: 470922 - DNA, 642 bp, Homo sapiens
cgcccacagcaccagtgtgaacaggtatcattcaagtgtgtggatggtcctggagaatgccacagagcaggcagggcctccgaggagacgagaatcttgaccagagctttaaattaagggatgatccaactatggcagcggaggaggcagctttgccccaggactgttgcttccagctcttctttgcacagatgcctccaagtgcccactgtgtgccagaggcaaataaaactgccaggttccctgccctcccagagagcaaagaggtatctgcacccatcctccaccctgccccccacccacaccccatcccaggcataaatcgcaaagttggccacaacccttacagcgactttcgacaaggtgctctggaaccaaggcacagcgcgggggtggggggtcacctagatgcagtgttgagctgtgctgagatcacagagatgctggcgcggctgacccctggggtgcaggaactggcagcgccccccatcctgggccagcagggtgatatgcttcagtccgcaaagccagcatctcataaaaggtcgcccctttcttatttcaacgtgcgctaatttccttcctcccctcctcttcacagcaccccatctcctggccgcttacctcgctccagacaacctg

SEQ ID NO: 470923 - DNA, 732 bp, Homo sapiens
tccctgacttcgccagctgctcctttggcacacccccaagcacccaaggactctattgccttataaggatgaaaagacccagaattggaacttgcagctctaaggaagtcccccgcgaagggagagtaagtcagtcacccggttcacctccctggagtcaaccaatgttatcagcttcttgcttattcttcaagagagattccaggcatgtacaaatacatctatctattagaaggagggctctagaggaacatcacgaggcacagcagaagaatgggcttctcttcctggttcctgagttcaattcctgttcccaggacacagctgccagcagcgtatgggagacccagtggaaattacacattacggatatagctaaagtcccttctaatggccatccctggttctataccctttctccaagagggaaccattattatgagtttgaggatgttaagaacccaagctgctattatgagagttccaacaatcatgtgacttaaaaaacaaagtttatattttatgcacataaccttgcaagacaaacacatatttaagaaatatttattggacacctattatgtgtgtagctttgtgttaaacgctggcaatacagtgacaagcaaaacagctacagttcctaccctgatagagtgtacagtctagtcaggggagcagacactaagaagtatgcttataaataaatacatacagttgttcctctgtacctgc

SEQ ID NO: 470924 - DNA, 1043 bp, Homo sapiens
gtgaccttgtaacttccccatcaagaggtggggtctaattcccctcctcttgcatctgagctggctttaagtcttccctcttaaagacgccacccctgggaaccggatgacaagctgtcagaagtccaagctacattcagcccgcgtgatctctagaataatccatgctgatgtcccctggtccatccccttgagcgtatccaagggcacagtcagtcatcccaatcccagggcaagtcggctccatcagaatgagaactgggaccacggggcacacccagatggtcactgggcactgactctgtttctagggaccctgtcctatgatggagcccaagctgcaagttcaggagcaggatgggatgagatgaaaggagaggggcagagaggaactgcctcccccaggcagttcattgcttcttctcccctctctggaatggagcaaagggagtctattctaagtgaggaagaacaaggctgtttccaatgccacatcaattaggtggtgagggagctttctttgttgagtgtttccgcttcagactaggaggcagggagggaaaagcaaattgttcaaattgtctaaaacacaatagaactacttaaagtacacgaaactagctgtcaaaattgtgaaccataatcacagttttgattgctttctgacagtgtaaaaattacaaatatttcatcaggcaagaaaagaaaaacaaagaataaatacagtcaaccccatcccccctcccatttgtgttctacgtgcccatctgaattagtttgctcatgttgacacatgcacagctttgtatcatttgagacacacgtttcttattcttcctcagtcatttagtatttaggctatagttgtagagtggttggtttctttccaggcaaccaccattgtttgaaaactatgtcaaaacagaagtctctcttcttctccctgacaacttgtcacagctatgcctctggacagcttctgcccctgtgcccctctctgtcagtgacctctcttctgccccacgaccccctctcctcttcct

SEQ ID NO: 470925 - DNA, 743 bp, Homo sapiens
ggcatggtaggagcgtgcatgatgagctctaggtgttcggggctctctggtgaacgcgcatcaccttgtttacctcctttcatactcctgtccacttcgccagctccacactgccccctggcagtgccttgtgtgcaccagaagcgcctggccagccccacggtgcgtgtccaccagtccccggacattccctccctcttcctggcccacgatgaggtgtcatttgccgcctgtcccttctctcctgtttctgatccctgggaccctgatctagggagtaaccttgatgcctacctgctgctggaggtgggcagaagagatgtgcccccagcccggacctctcagaagcggcctggctcccaggttcctgccggagctggagaaaacctagcctggtttgggcaatggttcctggggaggggggtggcctcagccttgggggttcagggaagccacggtgtggtgggcagggtgatggggactgtagcagaggatgcccgctgggaggcagaagagccctgcctgggggcaggggatgaggggtgttggtgaacgtctggggtccccgccccaggcctggggacagtaaaccctcgaaagaacttctcacccactattttccaagctttagtcacttgcattctgctttcataatgttgaccatttccaagttcccttgtatttttaaacttaaaataaagtgcatgtatcttaagtgtacagtttcatcagttttcacttgc

SEQ ID NO: 470926 - DNA, 755 bp, Homo sapiens
cccttcgaggtccttgtcccctccctgctaggttgtcaaccctggcagctgatcccccagatgctggggaggccccgggccccaggagcttctgattctgacgctcctgaagtcaaagatggggacctccatctgggtgctgggaagaaaggcagcacctggagccccaccccagacctgcagaattggaatggacatcttaacaagatccccccaccagaattcaggtgcacgtggaagtttgagaagcaccgctccactggagtaaataaaccctttgcctctctctgggaagaagatataatccctgtctggaataaaaatgcagtagagaggaaagtaacccaacgcagcattaactggcacaggacaagctttctattctgcaaaaatgcctcaatcctggtaactgctgacatcaaagcagccaaggatattagtgtttttaataagtagctaagtcaggagtagcttacagtttgaaattactctatgtacaattgaaggtgttgggggaacaggggtaaggaaaacaacagctcaagtgttattagttagatttaaaaaaatttaataaaataaaacaaaacaaaataaaatgcagcccatgcaccaggagcaagttctttgtaggggttgttggagatttttgcattatttgtgtaagccacgtggaggcctgctgtgacacctgtttcccaaaacctcctgcatgtgattctggtggcccattctagacacacgaagtgccattc

SEQ ID NO: 470927 - DNA, 1128 bp, Homo sapiens
tacaagtggattttggttacatggatgaacggcatagtcatgaagtctgagagtttagtgcatccatcacccagtttaaccgccttgccccctttgaagtcttatatcttgcctgggcgctccaaaacattacataaaaacggtgagagcaggggcattcgcatccagctcgactttcataggaatgcgtctggcgtttcaaacactcttccgatgctttctcagaagaagagcacgggcggtaggaaagaaggacgctttcaggaaggatggagggcccaggacgatttcgctccccggtggacgtggagggcgggcagggtcatcctttctcctgaaactggggagccctacgaaggggttccggagaagacgcacggatctcgaatacctccccgcccggctgccactggatggcgcgcgcaacctgcggaaccacagggcgacatccagctgcgggcggcgaagggaattggagcgtggacctctccaggcttttcattcgctggttctgccggtgtcccgccttttccatctcctcattggctgtcgctccgggcctgcgactttgctcagcccctccggggagtggaatcgggtgtgcaacaggccgtgaggtccggctttgcgaggaactcccattggtcagtcaaacaggagtcccaccctcctgggcttcccattggttgctgtcccaccgctgctctcagtttcccagcggctggggatctgggttttctgggggtggaggggtgcagtacgctgctggaagctcgtttctctttccaccgttgtgtgcctcgggctcgcggtcaacggggctggacgaggttcagaaccctccagagcggcagctgtccccggggtgggttgtgggactcaacagccctcaggggaaaatggcgggaggcaggtggaggtgtcttctttgcactgaagacctggataccctgctgcgggctgaacgggaggctggggtggagccctggctcgggttatggccggggaggagaccacgctgggcgagtgggaggcagccccagccaggggctggaagaccaagtaccggaccttcaagggccttcttgcacccgcatcccacagtaaacaggatacgtgataattatg

SEQ ID NO: 470928 - DNA, 1473 bp, Homo sapiens
ctgctgggacatgtccttacagaaactcatggagccagaagctgggaccaataggaccgctgttgctgagttcattctactgggcctagtgcaaacagaagagatgcagccagttgtctttgtgctcctcctctttgcctatctggtcacaattgggggcaacctcagcatcctggcagccgtcttggtggagcccaaactccacgcccccatgtacttcttcctggggaacctatcagtgctggatgtcggatgtatcactgtcactgttcctgcaatgttgggtcgtctcttgtcccacaagtccacaatttcctatgacgcctgcctctcccagctcttcttcttccaccttctggctgggatggactgcttcctgctgaccgccatggcctatgaccgactcctggccatctgccagcccctcacctacagcacccgcatgagtcagacagtccagaggatgttggtggctgcgtcctgggcttgtgccttcaccaacgcactgacccacactgtggccatgtccacgctcaacttctgtggccccaatgaggtcaatcacttctactgtgacctcccacagctcttccagctctcctgctccagcacccaactcaatgagctgctgctctttgtagcagcagccttcatggctgtggcacccttggtcttcatcagtgtgtcctatgcccatgtggtagctgctgtgctgcaaatccgctctgctgagggcagaaagaaggccttctccacatgtggctcccacctcactgtggtgggcatcttctatgggacaggtgtcttcagctacatgaggctgggttcagtggaatcttcagacaaggataagggggttggggttttcatgactgtgatcaaccccatgctgaacccacttatctacagcctcagaaatactgatgttcagggcgctctgtgtcagctacttgtgggggagcgatcactgacctgagagatgacctcctttcctgccttttctggaccgaggaaaatttcccgagaagatagtaaccaacaaaccttgtttataaccattatttctatctcctgatgcctgaggagtggtgttatgtgtttggcctacaaggaaaccctatataattcattcatttattcattcaacaaatatttattaaattacttctatgatccaaacaatcttctagggcattggtgagcaaaatggacaaaagtctctgcactcaagcaaatcacatgctataaaggaagactgtttactgcgtcctagcaacactactgtccctctgctgttcatccctaaaactgtccatgggtgcacctgaaccttggcttctctgtgatttcctcttggggttgactggaaggatgggctgagataaggttgtgaagacaagatgtgagagtgggaggtaggaacggattggagcggagcaatgaagatgaaatgagcatatcgagagggatggg

SEQ ID NO: 470929 - DNA, 1177 bp, Homo sapiens
ggaggcaggtgttggtcagagcatgatgggacaaaatcaaaccagcatctcagacttcctgctcctgggcctgcccatccaaccagagcagcaaaacctgtgctatgccctgttcttggccatgtatcttaccaccctcctggggaacctcctcatcattgtcctcattcgactggattcccatctccacacgcctatgtatttgtttctcagcaacttgtccttctctgacctctgcttctcttccgtgaccattcccaagttgttacagaacatgcagaaccaggacccatccatcccctatgcggactgcctgacccaaatgtacttcttcctgttatttggagacctggagagcttcctccttgtggccatggcctatgaccgctatgtggccatctgcttccccctgcactacaccgccatcatgagccccatgctctgtctcaccctggtggcgctgtcctgggtgctgaccaccttccatgccatgttacacactttactcatggccaggttgtgtttttgtgcagacaatgtgatcccccactttttctgtgatatgtctgctctgctgaagctggccttctctgacactcgagttaatgaatgggtgatatttatcatgggagggctcattcttgtcatcccattcctactcatccttgggtcctatgcaagaattgtctcctccatcctcaaggtcccttcttctaagggtatctgcaaggccttctctacttgtggctcccacctgtctgtggtgtcactgttctatggaaccgttattggtctctacttatgctcatcagctaatagttctactctaaaggacactgtcatggctatgatgtacactgtggtgacccccatgctgaaccccttcatctacagcctgaggaacagagacatgaagggagccctgagcagagtcattcatcagaagaaaactttcttctctctctgatgataacacttggagctattacatagtttatccaggtaacaccagtttctcagtgcataatacatcagaggtattagaggcaggaaaaaagattgatctttaaatcactttcctttatgccagaaaaacccaatttaaaaatcaataaaaaatggatttaattcttaatagcaagtaaaggtaagtacaagaactaaggaagaaaccttt

SEQ ID NO: 470930 - DNA, 1004 bp, Homo sapiens
cagcagccagcaactggcaaactcatggagccagaagctgggaccaataggaccgctgttgctgagttcattctactgggcctagtgcaaacagaagagatgcagccagttgtctttgtgctcctcctctttgcctatctggtcacaactgggggcaacctcagcatcctggcagccgtcttggtggagcccaaactccacgcccccatgtacttcttcctggggaacctgtcagtgctggatgtcggatgtatcactgtcactgttcctgcaatgttgggtcgtctcttgtcccacaagtccacaatttcctatgacgcctgcctctcccagctcttcttcttccaccttctggctgggatggactgcttcctgctgaccgccatggcctatgaccgactcctggccatctgccagcccctcacctacagcacccgcatgagtcagacagtccagaggatgttggtggctgcgtcctgggcttgtgccttcaccaacgcactgacccacactgtggccatgtccacgctcaacttctgtggccccaatgaggtcaatcacttctactgtgacctcccacagctcttccagctctcctgctccagcacccaactcaatgagctgctgctctttgtagcagcagccttcatggctgtggcacccttggtcttcatcagtgtgtcctatgcccatgtggtagctgctgtgctgcaaatccgctctgctgagggcagaaagaaggccttctccacatgtggctcccacctcactgtggtgggcatcttctatgggacaggtgtcttcagctacatgaggctgggttcagtggaatcttcagacaaggataagggggttggggttttcatgactgtgatcaaccccatgctgaacccacttatctacagcctcagaaatactgatgttcagggcgctctgtgtcagctacttgtggggaagcgatcactgacctgagagatgacctcctttcctgccttttctggacc

SEQ ID NO: 470931 - DNA, 1337 bp, Homo sapiens
gaccctattatattctcttaaagatactggagacagagcatgatgggacaaaatcaaaccagcatctcagacttcctgctcctgggcctgcccatccaaccagagcagcaaaacctgtgctatgccctgttcttggccatgtatcttaccaccctcctggggaacctcctcatcattgtcctcattcgactggactcccatctccacacgcctgtgtatttgtttctcagcaacttgtccttctctgacctctgcttttcctcagtcacaatgcccaaattgctgcagaacatgcagaaccaagacccatccatcccctatgcagactgcctgacccaaatgtacttcttcttgtatttttcggatctagagagcttcctccttgtggccatggcctatgaccgctatgtggccatctgcttccccatgcactacaccgccatctgcttcctcctgcactacaccgccatcatgagccccatgctctgtctctccgtggtggcgctgtcctgggtgctgaccaccttccatgccatgttacacactttactcatggccaggttgtgtttttgtgcagacaatgtgatcccccactttttctgtgatatgtctgctctgctgaagctggcctgctctgacactcgagttaatgaatgggtgatatttatcatgggagggctcattcttgtcatcccattcctactcatccttgggtcctatgcaagaattgtctcctccatcctcaaggtcccttcttctaagggtatctgcaaggccttctctacttgtggctcccacctctctgtggtgtcactgttctatgggaccgttattggtctctacttatgcccatcagctaatagttctactctaaaggacactgtcatggctatgatgtacactgtggtgacccctatgctgacccccttcatctacagcctgaggaacagagacatgaagggagccctggaaagggtcatttgtaaaaggaaaaatcccttccttctatgacagtaatacttgggagtcttatataattttatctaatagatacatggacattaatatttcaatattatttcagatctctttttttctgcacatgaaactttttgtttaaatgtaatattacataatttctgagttttctaatttgttggtatatggttgttcataatattttctaatgatcctttgtgtttctgtggtatcacttataatgtctcctttttcatttctgattttatttatttgggttttctctcttcttaattagtttagctaatggtttgccaattttgttaaacttttcaggaaaatcaacttttcattttatt

SEQ ID NO: 470932 - DNA, 910 bp, Homo sapiens
cagcagtgaacctctactgtggaggccaggccagagaagccagcctgatgaggctttgagaggacctgaaactggagatgggatttaatggccagagagaaggaggcagcaggcttgtcatccttggcctcgctgatcgagaagtgtcccaaagacaacaaggactgcagctcctacggcagcttcagcgacgcagtgctggaactcttcaagctcaccataggcctgggtgacctgaacatccagcagaactccaagtatcccattctctttctgttcctgctcatcacctatgtcatcctcacctttgttctcctcctcaacatgctcattgctctgatgggcgagactgtggagaacgtctccaaggagagcgaacgcatctggcgcctgcagagagccaggaccatcttggagtttgagaaaatgttaccagaatggctgaggagcagattccggatgggagagctgtgcaaagtggccgaggatgatttccgactgtgtttgcggatcaatgaggtgaagtggactgaatggaagacgcacgtctccttccttaacgaagacccggggcctgtaagacgaacagctgacccagggagtaatcgcgtgctctaagccacagtggtcggggctgggcatgggcctctggagaagagaagatttgaggagaactgtcctagaggcaggaggagcagatgtgtttcagaatgggcagaattaggaaattgagaaagattttggctcaacagaatccagcaactgctccagatgttggagatgtttaagcagaagctggttgcgcacttaatgaggaatgttgttgaaaatggtcattggaagaagtttaaggtcccttttagcctggagattgtacaaatcagcattccacatctggagttagctaccc

SEQ ID NO: 470933 - DNA, 623 bp, Homo sapiens
gtcagcatcaaggtgagatcttccaccagcaaaaggattataacttgctgaagggtcaggtgattgctatcatttctcagcaataagaaagttgggggaatggatggagataaccagagtgagaactcacagttccttctcctggggatctcagagagtcctgagcagcagcagatcctgttttggatgttcctgtccatgtacctggtcacggtgctgggaaatgtgctcatcatcctggccatcagctctgattcccacctgcacacccccatgtacttcttcctggccaacctctccttcactgacctcttctttgtcaccaacacaatccccaagatgctggtgaacttccagtcccagaacaaagccatctcctatgcagggtgtctgacacagctctacttcctggtctccttggtgaccctggacaacctcatcctggccgtgatggcgtatgatcgctatgtggccatctgctgccccctccactatgtcacagccatgagccctgggctctgtgtcttgctcctctccttgtgttgggggctgtctgttctctatggcctcctcctcaccttcctcctgaccagggtgaccttctgtgggccttgagagatcca

SEQ ID NO: 470934 - DNA, 601 bp, Homo sapiens
cgctacgtgatctgctttgacaccttgtaaacatttgttggtgttaatgttgcagagagttggggaaatggatggaggcaaccagagtgaaggttcagagttccttctcctggggatctcagagagtcctgagcagcagcagatgctgttttggatgttcctggtcaggtacctggtcacggtgctgggaaatgtgctcatcatcctggccatcagctctgattcccgcctgcacacccccatgtacttcttcctggccaacctctccttcactgacctcttctttgtcaccaacacaatccccaagatgctggtgaacctccagtcccagaacaaagccatctcctacacagggtgtctgacacagctctacttcctggtctccttggtggccctggacaacctcaacctggccgtgatggcgtatgatcgctatgtggccatctgccgtcccctccactatgtcacagccatgatccctgggctctgtatcttgctcctctccttgtgttgggtgttctctgccctctatggcctcatccatatcctcctcatgaccaggtgaccttctgtgggtctcaaaagatccactacctcttct

SEQ ID NO: 470935 - DNA, 667 bp, Homo sapiens
tagtttttctaacgtaggggtcatgagtgagcataatattacaaaggaatgtcaacaggaaaaccagagcatagagcagtggggaaccataactcacaatgatagcaagaaagtttcctggttacatgaagtaattaagacatatttaaaagccaagaatataaaattagacctgatgaaaaagctgaaggagttatcatcccagccaagcaggaaacccaagccttttattccttctcaagaaggaataggagacagtgatgtgatctgtgatatgaaaaagttccaaggtagaacgaaccacagcccacacttgtcctattgctaccctgatgcttccgagctccccttcttactcaccacggggattgctttaatagtactctggtgtcctccagctagttccactttctccaatcgttgctccagcgatcctttgacctgtattcgagcccccatgaatgggcaccacttgctgagaccaggtcggttggagagaccctaacccagcagcactagaggaattaaagacgcacacacagaaatatagaggtgtgaagtgggaaatcgggggggggggggcgtcttacagccttcagagcagagtcctgaacagagatttaccgacgtgtttattaacagcaagccagtcattagcattgtttct

SEQ ID NO: 470936 - DNA, 546 bp, Homo sapiens
aggaaatattccttatttgaaggggcctgaaagtgtggcatgtcatgttgtgcagtggaaatggtcatctgacgctaaagcacagcgtgttgtacagtggaaatggtcattgtctgctaaagcacggcgtgttgtgcagtggaaatggtcatctactgctaaagcacagcttccatcataagagggtgtatggttccgagtgtggagggacccttctgagtttcagatgtaggaggcctctaactcgaactggattcaagccagttaactactggatcaaatctgatcctggacccggtctcttttctgccataacgtctaaaacatccagccagtcatggctggatagcagtttggaacagaaatttgctcaaagaaactcagagctcaaaacacaaatccatggagctctgaaatccgagagaaaatttaccatgatccctagctgctgcaagagatcaaaggacacaagtgttagagaatcctgaggtgtcacttttctgcctgaaacctctggctggtggagcctttacctgtgctttgttc

SEQ ID NO: 470937 - DNA, 3331 bp, Homo sapiens
gaagggaccagggcatgacaggaacccttggccactgttgattgccccgaggtggggacagggatggtggggctggggctgcctggccctttaagagggcaattctgcccgccgccctgaatgccccctcccctagccactggagaagagatcccgtttcttggcaacaggaagctcttggtttactgtgtcacccaagcaactgggagccacgtcctgctctgcgacagagccgttggagccgaccgatgactgcactgggctgaccgcaacaagctgaccacacacactcctcactcccctggccctggtgggtggcagacaccatggtgcagacggatatgctcctaccagagccggccccgcagacagtgccgccctgcgagctgccctgcaaagagtatgacctggtggtgtggttccagaactgctatgctcgctaccaccaggccttcgccgactgcaaccagtcggagcgggagctgcaggggcacaagagccagcagctggctgcagagatccaggcgctggcacagccgacacagcaagactccaagtgcagggtgggcgagcgactgcaggacatgcacagctggaattcggagctgcagggcgaggtagaggcgctggctgcggagactgacctgctgctggcccagaagcaacggctggagcacgccctggatgccatggaggtgcccttctccatcgccactgacaacatgcagtgcaaccagcgccaccagcacgccaaccttgtgcgtgaccatgtggagacggagctgctgaaggtgccagcagccttgggtggccaggactttcctggcacagtcatcctgaccctgtgctccccagagaccttccctggttgggacagttgctcccgaggtggaaacccaggtctgggccagcactgcgggtgtggacaggcctatccccctgcaccctctcagtgcctcaagaactgctgcagttcccgcaaaccctctgccagcaacaagggtgtctgcgaagtgatggagacactgacagtgcaggaagaggcaaacccagggacagaggggtgcaggactcgggccctggcacacaaggaggaagctgagctcatccggaacattcaggagctgctgaagagagtcatcgtgcaagcagtgagccagatccgcctgcagcatggagggtccccagcggggccctccctggccacacaccaagaccctgccccaccccgccccagactgaaccgagagcacatggagatctgcgagatggactggtcggacaaggtggaggcttacaacctcgacgagacttgcgggcgccaccgcagccagagcaccgaggtgcaggctcatccggcactccaccaccttccaagagaggggggccccagctctgcccccgtgcttgccctggctgtggtcttgcctccctctgcctggggtccccagcggcgctgcttcccccagcctggcccagaggccctcgcccccgaagacacttgggcaactgtctgcccctggcatgagaaagcatgcaagacctcctcaagtgcccagcgcccccgcagcgcctccaccccagagacccggaccaagttcacacaggacaatctgtgccgcgcccagcgcgagcgcctggactcagccaacctgtgggtgctggtggactgcatccttcgcgacacctccgaggacctgggactccagtgtgacgcagtgaacctggcctttgggcgccgctgtgaggaactggaggacgcgcggcacaagctgcagcaccacctgcaaaagggccactggtcaggaccaccctctggacacagccccaggacctgggtaggaccagactggtctctgcattccatatgcccgggcatgggggcacaggcccaaggggcactgtcctgtcggcagatgctgcgggaaatcacagatcaggaacacaacatggtggcactgaaggaggccatcaaggacaaggaggcacctctgcacatagcccagacccggctgtacctgctctcacaccggcccaacatggagctgtgccgcgatgcagcccaattcagatatagacatgacactgggcaggtcatgggtcgggggcctcccagtgccagggacctgtgcccacgtggtctcaccccaccctctgctacctcatcttcccaggaggaagctccttcagacaagccccagctcacaccccccaacacccccaagctggtgagtgagttggaggagctgtacaagtccatcacagcgctgtgggagaagcttctacaagcggagcagtccctgcacaacctcgaggacatccacatgagcctggagaaggacgtcactgccatgaccaacagtctcttcctcgaccgccagaattgcatggcccatcatacttgctaccccaccatcctgcagctggctggctaccagtgagcagcggcacggtgcttccccccaatcccccaaataaacagtgcattagctttctgcacagtatgtgtgtgtgcctggtgggacctccagttgctgtccatctgaactggcctttgggtcccctgtgaggctggctctgcctatggactcgtcatcccagcagttggagatgaggggtcagagctgaggggccctccccatttcctgggagcaccccaaacatcttccatgggaaaaataggacacggaaacccaggcatccaggagcccaaggtatcacacccagagagcgaagggcttgccaaggctcttacctcagtgcccagcaccactgccagcatcccacagtacaatgggggagatgctgttggctgtccattgggagccagccccaggagcacaatgtacagcagcactttcctgtcgccatggctatgctgcagccatgagtgaccagggctctttctgtccaggagacacctgtcctgccccatatgctcacactctgctttccctgcccaccctactctgtcctggcctggggtccccaagccacagtggctcagccaccagccctgccagctgcctgcccagatggatgctccccaggccaaccagatccgaggaactggagagagctcttctcctgtccattcaaccacccctcagcctccctccaccctgccctgcacttggggagtctctgtgaccagtcccccacacaaggaactcacaggaatgcccctttctgttcgggggcaggactgctgtcatcagggatcattgagggaagcacatggagagggggactggggtttcccatgactgtgccccagcagcccccacacattcccccacaggggatgctcccagacacttctaagctgcca

SEQ ID NO: 470938 - DNA, 873 bp, Homo sapiens
cgttaggtcaaggtgtagcccatgaggtgtgggggagaggacgatgttattccccatattgcagggggtgtacaaccccctagaatattgttcataatatccacgtggggaggagatgatgttactacccatatcgccagggtgaacaatatcacagaaggggtgtacaccccctgtgatattgacagtaatatcttctccccccccccggatattaggagcaatatcacagaagcgttgtacactccctgcgatattgacagtaatatcctctcccccccagatattaggaacaatatcacagaagaggaacaataccacgggggggtgtacaccccctgcgatattgacagtaatatcatcctctcccccccagatattagtaacaatatcaccgaaggggtgattgtggatgaaatggtgaaaaggaaaggcaagaatggaatttcctgctagtgggaagtagaagagagtattaaaacttttttctttctaagtcaaatcagtgtcatatacatgagaaagctaggcagtatggcattatcagcttggctttctccttaaatgaaatagaaagtgccctgttttactcagacagtgttttttttttttttctaaaaagctaaaagaagttaaatactttgaaaacaattaatttctgttctaaattatacaaatgttatatttgtaaaactagagaagtttgttccattgcttctaccaagcatcctagcttatgtagttggggcagctagaaatctaatgaacagaatgtatattttaggcttatataaagtattctgcaacataagctcaaaaataccccctaccccctttttgataaaaataaagtttactactaataatcaaata

SEQ ID NO: 470939 - DNA, 970 bp, Homo sapiens
tctgtcctgcagcagctgcacaggggcggtaaccggccctcagccccatccccggtggctgcagagggcccctggatagagatctggagctatggcagaggaggagacgggtgggggcagggtctggcaggctctcagcccaggggtacccgcgatccagaggccgcccagggtatgctccaccaactgggtgcccagctacaggcgccgggcaactctcaagctggctggcggtcccagcctcgcagaaccggggctagatgtcgccgtggctgcgaccaagccaggcggtctgcccgggggcggctgcaccggggcaggaaccgaccctcagccccatccccggtggctgcagacggcccctggggtggccccgatctctcttcggaggagaagaggggcgggagtcacggccaggcgggccctcaggcaggaagggatgcgcgcctgcgattccgggacgtcccgcgccagcccaggagaacccgcaagccagcggcgcctgtttctctggatcatggcacaagttgcagtttccaccctgcccatggaagatgaggagtccatggaagatgaggagtccattgaagatgaggagtctgttgaagatgattccgtggaaagcaggatggtggtgacattgctcatatcagctatcgagtccacggatactatattaactcttaattgaattaatacaagtttaggtgtaaagatgatgtttatgttgacaaaaattattaatgttttacatatatgaaagtaacaatatcatatatttttcatacttgtagaatactttgaaatctattattagctaatattttatattcattttgggttttcacattattgttagatccagagaaaagtaacattttgtgaatactcaaatcataaacattttgctggattcattcatagagactttatttaaaaagtgcactaattgaagttttacatcatttta

SEQ ID NO: 470940 - DNA, 703 bp, Homo sapiens
cctggattaacaaagttgtacactaggtcctgcccccagaggtggagtctacagaggcaggcagccctcctggagctgcggtgggctccatccagctcgagcttcccggctgctttgtttacctactcaagcctcagcaaatgcgggcacccctcccccagcctcactgccaccttgcagttcgatctcagactgctgtgctagcaatgaaagttgtttccggacagtctatgaaaagctctgctggccacggaggaagtaggcagctgacaaaaagttctgcaattgcctgtgccaaactgtgtaaagcaagtacttacatcaattgggaagataacgctgtcattttcctacttgttcagtccatggtggttgatcttaagatcttcctggtgcagaattcacattctacatttcactatgtgctggtaaattcactccatcaaatcatcaccaatgctctgctggttcttcgtcagttagatagcattgatttgtggaatcctgatgctcctggagaaacattttgggagattagatttcagtgtggttactactgtgattttaatagattttcacagttttaagcctagaatgataaaattttgtaaaaatattgttttttcagttttttaagctgtgtgatctttcacaaactttctgtaatacgaatgcttttgatgaatgaattaatcagggacaa

SEQ ID NO: 470941 - DNA, 595 bp, Homo sapiens
tacgtgtgtgttcatgctaaaatggagttaagatgtgtaacttcgttaatgcagaacagattctatcttatgcattgtagctggacccacggttactgggcagagctctgtggtggctgcagtgccatggagagtctgagatcctctgtggacctgggccctggactgacccttcagaagctgggcaaggtggtggtggagctcctgccacatgatctcagtccacaactcactgtccacaaactccaggtggagacactggtgtgtttgcctctcatcgggttattggtgggtctcatggttttattgaggcttgttcagtctgttaggggtcaactttgtgagaagcaccaaatcctgctgctctcttctcaggagtggacgtgggtcttaaatccgtgctgctccctcccctccccttgggcctcatgggctgccaggctgcgtatacccaccttgactccttctgagggtcactgaggccagttggttcaggggagctcctcactgggctggaattcctccaccttcacatgctgttcatagcagtcagcttcttcacggttaatattgatatgtgaagttttgatcatat

SEQ ID NO: 470942 - DNA, 510 bp, Homo sapiens
gaattcctccacatcacagccttgatctagttgctgcaataacaagatatagttaagaaacttcaaagagaataaatatgaaaatggaaagctccagctatccccttcgcctctatgatcagctgatttgtgaccatcgaagagacaggtctgtctgccctggcaatagtttgaacaattaccctcactatacaactcagaaacaggaaggagcaacaggaaggacaacagacaggaaggagcaagtctcctatttctcctccatcctcatggtctttctctacatcccttttggctcaggggtaaatgtgcagggtttttatattggtcaattgcatgtcacgggagttggtgtacagattatttcaccattcaggaagaagacaaaaatgccactgatagagctcttaaaggctaaaatatccagggtaccagagaaagggaagtatatgaagggggcagcaaaatacctgctcccacaacgcacacactaacacacctatctcacat

SEQ ID NO: 470943 - DNA, 851 bp, Homo sapiens
ctgcagtcttgaggctctgccttttgtttagcttttatgatcaacaaatttggagccaagtgaagacaagacaataaagtggggaatggggggtcgctctgaagcccttgtggacaagatacatgctcgcaggagacggaacttaaacaaatttacacgaaaaaaaacaaacaaccccatcaaaaagtggatgaaagatatgaatggacacttctcaaaagaaaacatttatgcagccaacaaagatacgaaaaaaagctcgtcatcgctggtcattacagaaatgcaaatcaaaaccacagtgagataccatctcacgccagttagaatggcgatcattaaaaagtcaggaaacaacagatgctggagaggatgtggagaaatagaaaagcttttacactgttggtcggagcataaattagttcaatcaaccattgtggaagacaatgtggtgattcctcaaggatctagaaccagaaataccatttgacccaacaatcccattactgggcatatactcaaaggattataaatcattctactataaaggcacatgcacacatatgtttattgcagcaatattcacaatagcaaagacttggaaccaactcaaatgcccatcacaatttgactaaaggttgtaatttttcttttgttcatttaaaaaaattccttaatatggaaatgctacataaagaccttcatgcctaagagaacagggatctacaatgcaggaatattatcactcccacacttcaaataaaaaaaaaaatgagaaaaataacaagtttgtggtgttccttgaatccatcattctgcttcctggttgaactctgactcataaaaaaaga

SEQ ID NO: 470944 - DNA, 581 bp, Homo sapiens
tgatacattcttattccttccatgatttttcccccaattcaaattattaaaatcaactgggaggaggggcggaatccatcaaataaagagcttaaatgcttacttcgcttttttgcaaattcaaacaaagtgagaggttgtatgatgacccataggctggggaaaaggctgcgtcccattcaagctgctgcttgtggctgctgggtcttccaagggcactgtggtgaaggctcttgtccggcctctgcccagcagctcagggaagggccaccacgcagatggcttttggaagggttttgttgtatgactcctagtgaaaatttaggctttgcgaggaagaatggagaaggccctcactgcagccctgcagctgttcatgcagcatggggccacatttgcttatggagagagcagttcttccactcccatcagaacagcaggccaattgaataaaaaataataaattataacataccgttcggattattagccaggtaacactgcctctggggaagcattttggcctctgttcaataaagttgttaaacttgatttgggtcatcatgacacatggtttgatt

SEQ ID NO: 470945 - DNA, 842 bp, Homo sapiens
agcgagctctgctggctgcagccagtcttcacagtgataagcgtaacttataactctgtaagatcaacatcagtatgttgtctgaaggtagtcactggaagtctgcatgttgttaccctggtctgacgtatttaagtctatattcgctggacactgcaatttgtgggcccaacacagtacagaatgaattacctaaagcactcgatggagaccctgtcatagatggcgcaaagccagtgactccagagcaaggtccagaagccaaagctacccgctgcactcatggtggccctgggatgcctggtgccctgaagggagccctagtgctgagtgtaactggagcagcctcagcccagccaggactagaccagggaccagcagcccctggtcagggaaccttctggcagcagctgtctctcctccaggcaggctgcaggaagctgtacaagctccccctcaggcactttgtagtatatgttttaaataccaaaatcagaaaacttgcaaaacagcaagaaacacacttttttaatcttctccacttgatcaacagagtcaacacaatccctgtcaaaagtccagaaagctattttgaagatgtcaataaacttattccagaatttctgtggaaaagcagatgagcttgaagagccaacaaaacagtgaaaaagaacaacaaagtcagaggactgtcactccttacttcacagatcctctctttatccttgatctatgagagtatgattattaaatgccttgaggtagtcttatttgggttaaatatgcttgatgttctataaccttttacttccatattggtatctttctctaggtttggggag

SEQ ID NO: 470946 - DNA, 519 bp, Homo sapiens
accacttcagtgcttctttcagcaatatgaagttaaaaccagaatttgctagtgccagtggtatttcagctcctagtcccctgcactttcagtcccacatgcagccttcccagggtgctaaccaccccctggagctccgggccaaaaccagttacccgggaagatacaaagaagagggtgtcaaatttgccaacctttcagggcactgcccggctgctcaggagacaagacatctacacttaaagcagacttttcccaagagcagagagtgtcgcctgccacacgcaagccaagaacaaaacacgctgtggtgttgtgatggcacagacaggtcgcgtgggttgatatggagccagagaccttcaaaacatttgatcttgtttgggcttaaacaaatatatgatttagacagaggaaagattcgaaaagttcagagggagagcagtactaaaaaatgtgacaggcaaaaatgagcaaggcatcttagagacaataagaggcctgggccagctggaatgc

SEQ ID NO: 470947 - DNA, 1682 bp, Homo sapiens
ggagggtgctgcttgggaggcagcgtccctgacatgccgttcaccatatggagctcccgggggtttgtggggtgggggcagtgcggggagatgaaattagggtgcggcggctctgagaaccctgcatcctatctaaacctcgcatcctatctaaacgacgcatcctacctaaacaacgcatcctatctaaacctcgcatcctatctaaacctcgcatcctatctaaacctcgcatcctaccaaaacctcgcattctatctaaacctcgcattctgtctaaacgacgcatcctgtctaaacctcgcatcctatctaaacctcgcatcctatctaaaccacgcatcctacctaaacctcgcattctatctaaaccacgcatcctatctaaacctcgcatcctatctaaaccaggcatcctatctaaaccacgcatcctaccaaaacctcgcatcctacctaaacctcgcatcctatctaaacctcgcatcctatctaaacctcgcatcctaccaaaacctcgcattctatctaaacctcgcattctgtctaaacgacgcatcctgtctaaacctcgcatcctatctaaacctcgcatcctatctaaacctcgcatcctatctaaaccatgcatcctaccaaaacctcgcatcctacctaaacctcgcattctgtctaaacgacgcatcctgtctaaacctcgcatcctatctaaaccatgcatcctatctaaacctcgcatcctatctaaacctcgcatcctatctaaacctcgcatcctatctaaaccacgcatcctacctaaacctcgcatcctacctaaacaacgcatcctatctaaacctcgcatcctatctaaacctcgcatcctatctaaacctcgcatcctatctaaaccacgcatcctacctaaacaacgcatcctatctaaacctcccatcctgtctaaacctcgcatcctatctaaacctcgcatcctacctaaacctcgcattctatctaaacctcgcattctgtctaaacgacgcatcctgtctaaacctcgcatcctatctaaacctcgcattctatctaaaccacgcatcctatctaaaccacgcatcctaccaaaacctcgcatcctacctaaacctcgcattctatctaaaccacgcatcctatctaaacctcgcatcctatctaaacctcgcatcctacctaaacctcgcattctgtctaaacgacgcatcctgtctaaacctcgcatcctatctaaaccacgcatcctatctaaaccacgcatcctatctaaaccacgcatcctaccaaaacctcgcatcctacctaaacctcgcatcctatctaaaccatgcatcctatctaaacctcgcatcctatctaaacctcgcatcctatctaaacctcgcatcctacctaaacctcgcatcctatctaaacctcgcatcctatctaaacctcacattctatctaaacctcaagtcctatctaaatttcacgtcctatgcaaacctcacatcctatctaaaaattcactaagatagatcagagatttcaatgtaaaactacacaactttgtttaaaacataggagaaaagctttgcaaactgagggcttggtggagagttcttagacatgataccaaaagcacaatccataaaataaaaaatcagacattggactccatc

SEQ ID NO: 470948 - DNA, 933 bp, Homo sapiens
gggtgacaccgctgaagtggccttgctgggcctggaagagacttgcgagaaagtgcaagcaacagagcccgaggggtcactgcaaaatgccagccctgccgccctcaccactgcggggaacacagaaaccagagcctgtggtggcagaggggagctgtgggcggtggcagcaaacacttgagctctccgccggccacttatgtccccgtgagccctcactcagacatgtgccagcccacgcatcagccatcgccggcctccacctgcaggctgggaaggcagctgcccgcaaaaagcagggtgctgctgtaccaaaatccttaaaaatgcagaactgggtcatggacaggggacagaaggtgggtgctagaaaaacagatgctgctgtgaatggactgttgaacttacttggatctatcatttcttccttctttcctatttcttccttttggaatgcctatcctatgcctgtcccaccactggatcttggaagcacataactcgtttggcttcgtaggttcacaagtggagagagattggcttcgggcagttgtaccttgagtttcacccatatcagatttagatgctgtttagatgagactttggattttagacttcagagttggtgctgaaacaaattaagattttgagggttgttaggacataatgaatgtattttgcatgtaagaaggacatggatttgtggggggcatggcaagaatgtgatagactgaatgttcctgtccctccaaaattcataggttgaaatttcatccctggagtgatggtattaggtgttaacctttggcgggtgattaggtcaggagggcagagctctcatgaatgagattagagccctgataaagagaccccagagagctctcttgtcccttctgccatgtgaagacacagagagaagatggctgtctatgc

SEQ ID NO: 470949 - DNA, 1491 bp, Homo sapiens
attttgcatagcatcagtttaatcctcctcatttcaaagatggagaaactgaggcccagaaagggacagtggttgaactgggggcaaagccaggtcaaccctcttacatcggcccccaaccctggccctagctctgccctccgagaccacttggccgagctgtccccttctcagggagacaacctctccctgagctctgtgacgctggcctgggcacagaccctaagccccctcccagttccagcccacaccctggccgtcctcgctcaggcacttccagaaaaatctccaagtccattggtcagcagccgtcagacactcagggctcctgggctcccaaccctctcaccaggtctagagctgcccccgagcccctcccccaggcctccctccaggcccactttcctgccccattgtccttcttaccccagacccagagctcacattgaccttggtggggtctggttcttcagtgccccccatgtggaactctgagtccattaaaccgctttcctttataaattacccaatctcaggtgtgtctttattggcagtgtgagaacagataaatacacacaaacatttagaaactgttaatttctaaatgtctttcctcattgatagtttttgatgattttctaacttcatctttccttccatatttattagttttaattcttctgaaggaagaactttcccttctccacatttatttctttattcatttcagcatagatgtggatttctcttatattcaatgggttgaaactcattactatcattatttatctttgtgctctaattatcctgaatttggccagtggtagcttctttcatctggttcctgtttttttggcaagtgctcataatttttttcatagattttatattttagagccattttagactcattgcaaaattgagttggaagctctgaggtcccatataccccctgcccccacacacataatccccctgcccattatcaaaattctgcaccacatggacgtgttttctgagcacttcctccagatatttgtgcttgtttttattccccagtaccttcaaaattctttattatgtccaggttttacaattgttttctgtagggtgtgtgtaggggtgggagtgtttcagtagggtattgcctcaccacgcctgaaagcagaaatcccacgcctatcttttattatctggagtggagatgtttcattttaattagggggtttagtctacttgcagttaataaaatgattgatacggttgggttcaagtttactatcttactgctggttttctatttacccccttttatttgttctttgctttcttcttccataccttcgtttgagttatttgggggtttttttgtattccattttatttccttttatgggttttcagctatacttctttgtattagttttacttgtttctgcaggcttacaatatgcattcttaacacataatggtccaatgggaatgaatgtt

SEQ ID NO: 470950 - DNA, 908 bp, Homo sapiens
aaaatattatttatctcaattactgagtttttctgcgcatgccccctcccaccaaactaaaggacagccccctcccagcccccacctgcacagccagccccttctttgccgcaaaccttcgagaatcaggcaaagccactgctgtaggcagctggtgccaagatttgcttcgtgctggggacacaggactgggcttgtgtccctggggagctcactgtgccaaaggcctggcccctgtcctgagagagttacgagtccaaaaggagctcacagccccgatcctgtccggagtttgcccagagcttgaagccagggccctgtctgtgggagctcatggccccaaggccccagtctatttggccttgttctggggcagctcccaacttcacagttgtgatagccctctcctgagagcaactacagtgacaacagagaagacctcagactttcagaacgagcctggcatcaagctgctaacaggagcagtgtatgtgtgtggtgtgaggtaagggcccaagaacatctctttgcacggatatccggttatctcagcaccatttgttggaaaggttttggcaatgaattgccttagcatttttgttaaaaatcaattgaccataaatataaggatttatatctggactctcaaattctgttctgttgatctatatgtctatctttgtgacagtgtcttattgccttgataagtgcagcttaatagtaagttgtgaagttgggatgtgaacaccctctataatagaatggtggcctccaagaagatatgtctacatcctaatccctggaaactgtgaattcaatcttatttggagaaagggtctttgcagatgcaattaagtgaagtattttaagatgagatggtgctggattgtcagagtgggctctaaatc

SEQ ID NO: 470951 - DNA, 696 bp, Homo sapiens
tcataggatcggggctccaggtccaagcttcggtgccatccagaatgcaatatcaacaatcacatgggggttggtggaagccgacagtcacagagcgccttgtgctgggtgctgctcacgcagtcatccatcctccaccctgccctctgggggcgggaactggaatcaagcctgttgtcagagggcttccccggcgtgcccagagatggcccagcaagaaggcccttgccagatatgggccaccgacctttaacttcccaacatccagaactgtaggaaataaatctttattcttcatcaattacccaggctcaggccagcggctggctcctggcttggtccctaagtgcactctggagctattggtgagaggaggaagcagcaggagggacaggtatggggagctgacgattaactcatggccctccttgttcagcagtgcagagatggtggcagtggccaagcagcctggacttgggctggggggcagagtggaaaaactggggaagtgtttatggcccagaactgacctgagcctggcgagctcacgagctaccgtggccaatgtctaaatctttgaaatgcagacttcagggaaatgactcatcagaaggaaagcataaagagaaactttttagaaataaatggtaaatgaaaaatcttaaaagtccttttcacaaatattaataaaaggct

SEQ ID NO: 470952 - DNA, 584 bp, Homo sapiens
ttcgtgttttctgatccacatcttctaaatgcctccaccaccagcctctggatggcccagcaagaaggcccttgccagatatgggccaccgacctttaacttcccaacatccagaactgtaggaaataaatctttattcttcatcaattacccaggctcaggccagcggctggctcctggcttggtccctaagtgcactctggagctattggtgagaggaggaagcagcaggagggacaggtatggggagctgacgattaactcatggccctccttgttcagcagtgcagagatggtggcagtggccaagcagcctggacttgggctggggggcagagtggaaaaactgggggccacagaggaaatggggggctcctatcctgtgcccatcagcccctcgctgcactttgtgcactttagtgggcatgactgggagattctgggaagccgcatgtggcaggaattctctgccatgaaacagaaccaagtgctaagtggtccttgcagagaaattagatgacatggataaggaaaattagaagcacattgaagaattaaatcgttttgaaacctgcccctccctg

SEQ ID NO: 470953 - DNA, 923 bp, Homo sapiens
cacagttgttggatgacgcgacatggacagttctctttcgaccagatccttgtctcccatcgaggggggattctgctctcactgctgcttatgtcaggagagggtcactgttgcctccatcacctcaggaccatcctggcaagacccactccttgggacacgaatgatgtctggccacacagaatacatgtttatgactcagaccgtccaattccctaaccagctatgtcccactggttctcaacagggcctcgtggaggcagccccgacctgggggaagtggccttgctctggctgtggtggtggtggtggtggtggtggtggtggtgatggtggtggtggtgatggtggtgatggtggtattggtggtggtggtggtggtggtggtactgatggtggtggtggtggtggtggtggtggtggtggtggtggtggtggtactgatggtggtggtggtggtggtgttggtggtggtggtgttggtggtgttggtggtggtggttgtgatggtggtggtactggtggtgttggtggtggtggtgttggtggtggtggtgttggtggtggtggttgtgatggtggtggtggtggtggtattggtggtattggtggtggtggtggtggtggtggtactgatggtggtggtggtgttggtggtggtggtgttggtggtggtggtggtggtggtggtggtactggtggtggtggtggtggtggtgttggtggtggtggtgttggtggtgttggtggtggtggtggtggtggtggtggagggtggtggtggtaggggctgagcccagtccttctttggtatttaaaacgtggatattccttctatgtttacgtgattcctggttaatcatagaggaaaatccatgttttcagtatcaaatgctgctttggaaatgtttctggaagagacc

SEQ ID NO: 470954 - DNA, 674 bp, Homo sapiens
cagtcttgggatggttctcaactattgtcttgacaggagcctgctcagttattcacagttacaatgcacatcttttcaaggacggcccgaggtggctggtttcccccagtggttaaccacccaggtgcccccagtaatctgtttgttctgccagaagctgatatcagattacttatgtacagaatgttccccttacatccaccccaatatgcccaaacctaatgcctgtgaatatggtgattatcatggatcattacactggcagccactggggccaatgtcatcacaagggtccctaacagtggaagacagaggcacaggaggtcagagggagacacgactgccgacaaaaggggccacgagcccaagaatatgggcagcctctgagagaaggtggaagaggcaaataaactcacccagagcctccagaagaatgcagccctactggcaccttggctttagcccagagagacttttgagctctggaaccagtgcattatatattccggatacaaacctctttgctatactttgaatgtttgtttccccaaacttcatgttgaaatttgactcctagcgttggaggtgggctcggtgggaggtatttgggtcgtgggttgggaatccccatgaatacgttaatgccctccctaggggaggaggactgagttggt

SEQ ID NO: 470955 - DNA, 1355 bp, Homo sapiens
tttacatccctcacctctctgacctcagcacagttgtgtaataaacacaagcatggataatgatgtgggctggctctcagggcagcagggagcaccgggaggaccctaatccaaatcaccaaacccacctctgccatgcaaggtggaggacagccctggaggagccggggcctgcaggaaatttgtgttctgagaggttcatgacctgtgcaggcttctttggaaggcagctgggggtgtgttggggccgcccttttcttcttgctaacaccgccaggcagccgaggtccccaagtgtttctggaggaggagacagttggctgcaggctgaggagccctggtaccaagtaaaatcagaagcccctgacaggctgtccaaggcccgctgcaagcagggcctccccatctcctaccctagcttgcctgatgtggctgccccttgctctacccacggctgttctggtagcttcttttcctccttattccagtccagaccctcagaaataatctgaaatccttccacctagctttgttccttggcgcttatcatttgtatttatacaactatctgtacaattattatatgtccaaatgtctcttagattgtgaccgtgacccacaacaagaaatgccttgtattatacatcgcaactcagcacatgtagttcggaaagcactgtgttctatgtgctacattcccagccccaagcatagggcctggcactgtgtaactatttttggtagagtgttggattaaacaatagatgcacaaggctgcacatttctgggtgatttttaaaaattgcctttctatgaataaaggctacagagctttcactttcctttctctttttcacacgttgtacaaatgctgctattaattccactgaacactgtggttatattgtcctacagagtacacatcatttattacaatgacaacatttttggtgctcaggatataaattaactcacaatggcgtggaatatcagtctgttaaaatgtttagcaaaaacatcacacattattaattttcagagatttttcttgaactttccccaaagatcttttttaatgctgtgtagattatacctaagtgacttaacatgcatatcattgtaattattctaaatttagcttttttttagagtaagattttaccactgtgggaaaaacatagctgtttaatactctaggttaagagagcaatgatcttctttatcatctcaaaagaaagtggactgagttcttaattgtcttatttgtaactttagtggaaataatatcttctaagaaaatctccagctcaatttggcagctgaagttttaaatatatgtctcctttcccatgtct

SEQ ID NO: 470956 - DNA, 1044 bp, Homo sapiens
gatgagagaggaagtgactcgcccaagatcactgagaagttagcaggggaagcagccaagggactgagttctcctgctatgggctcttgctaataacgctgggtggagccaggcctcggagcaggcaccacgtgccctggccgaggacaaagtggcaccaagctcctcgcccacagccacacccctgtggcccacttgctgattggcccagggcttagggtggagccaaagagcaccataggtgggcttggctctgtccaataggaatgctcgttactggagccaaacaatctgagccaatcagagcctctcatggtggggcagggctataaatacccagggaagtctgcgctagagcttccagggcgtctcctctggaacagtggctgtctcgggtccccaccatgtaggtgcagctccctgccttccacagcagcttctggtgcctggctagagttctgggactgaattcacagatcgtgccactggcccaagtgcacattaggaatactgttccctgtccctttgaagttaagtatggccaagtgacttctttcgctaatgaaatctagtaagagagattcaccatggtcctcttctcccgtgatgacaatcacggaaggagggatccacgtggaccctccagttattctaggtccctgaaggaccatgatgagctgagcttccctgccaagctatgtggaatgcatcgtgtgaatgagaatcagtgtcgttgtgttaagccactgggagagtggaggtcttactgcagcatgacccagcccatcctgactaaggaagtatgtgggcaccgtgctcttgggggccaagagcagaggaagtgtttcacaaatggcactctgccaccaggggaccggatcaaattcatcacctatagagggaaggcagtcatctttcccgcattggtgaagactaaaacctacgtgcaaagctgtcagcttggtgtctggcaatgagtaaacattcctgaaatggtagttgctacttctgtttatcatcatcatccgcatccccatcatcctc

SEQ ID NO: 470957 - DNA, 922 bp, Homo sapiens
ccagtgctgtgggttcactgagactccacgttgtcacgccatgctgcagggaacccttaaaatttggggaaaatacggcagcgtctgtgccctcggaggcccacagcccgcgtggggagacggatattcccagccattcgatcctcagtgtaagacaggggtggctttgggccctggctgccagttccagggtgccaagagaagcctcactccgtatctgcgacattctcacatatttcaggaagaccctggggagaggcagccaggcctgcggggctccagggtccctaagaccataaccttcttcaaactgctgctggcttttcctgaccctctgccccaggcccggaagtggcaagtgatcagcaagtggcagcggctggcaatgacactgaaaggagtcatcagcatccccatttcacaggggctgccccttcataccatgcccttctgctttcctccacctcccccagcccactaatctgttctccattctgtacaaataataatagttaatgtcaccaggcactgaccaacgctgtggtctaaagaggggatggggtgtcctgcactaagatgccagaggtgagtggacaatgaaaaggctccgtgtggtgccaacaagtgactgccttttcttggagttggagccatggaagccctggattgtggacctctgtgtgtatttccactgcttcctgaaggcatttgacccgtttctcacaacaaaaccatcacaaaactctcctctttgtctcctggggaggcaagggctagagggtgtctggctatgcactttccctcttacagcaccaagtccaagtgtgattttcaaaactgttagctcatttggtccccttaatacccctgggggggcagaagcccattttgaggttgggaaaattgaggccccggcacttcc

SEQ ID NO: 470958 - DNA, 704 bp, Homo sapiens
cagtagcctccccaccagccatgagggctgcctgctgccttgaagtagaatggctcccctgccctgcaaaccctggcctgctacatgctgccagggtgcccatctggaagctcaggctttggctgagtcggctggggaaagggcattcatttctcaggctctgtggtctccctgtcagatgggcttcaccgctctgtataagcggtgatgagtgggtcttagcaaagcgcctggcccggtctctcgccatgcagcaaggaccatctcccctggaagcttcacaaccaacctttgagagctgcgcttccagccccgggccatggcggcaaagcgcccttgtcatcggcacccacgtcctgatatctgcagagaacatcctgtccctgggcagggagccccagtgtcccccaatagttatgagaattaaaaacaagagaaactattaactaactactagtagtaaattactgcacaggaaaatggaattacataaaagacacatttttctggtgcttactgaaaaccctcctggacataatagagtgaagaagccccattttccctcctccccccagcgccccacaaaatgaaattatctaggcacatagctctacccctgctcctgcacatggaagatgaggaagaaaccactttacctttctgccccatgagcctcttaagaaagctcaggcctggggcaggac

SEQ ID NO: 470959 - DNA, 729 bp, Homo sapiens
tgtgggcaacccccgcccagccatgataaggtccaagtgccctgaacaagggtccaaggccttcgtggcctggccccagtggccctccggacctccccctccgcccaaactccatgctgtcctagaagtcggggtgtccagtggggtctgtgtggtgtggataagccccctacacaccacgatgtgccatcaaggggagctgcgatcacagatgcccaaacagtggatcgggggcacagggtctgctctggtcctactcaagcatctggagcaagtgtccgggacaggagcaagggactgcaggaatctggagactcctagccagcaagggcaacagggaatcttccagtccaatgacaggaagcagcaaaaagtagttggaagagccaggaccccggagttccacccagccagtgcccttatagaagctcagaccgctggtggtctgcaggcgggtgccatgcatctgctgctctttcctttgcacgttcaggagactcccatggggagtgaggtcagcctgttcccctttcgttcacttcgacttgatggttttctcaaaaacacaatggaactgctgggctggagatgttcagttggtcagaaggctgtaggctgctcaggacccacagtataatggtggccttgaaggtttatattttcttagatcattaagatgttagatggcctcatttctcaggtgtgtttctagctcaggtgtgttttact

SEQ ID NO: 470960 - DNA, 1165 bp, Homo sapiens
agcaccaggcacagtcctttcgtggttggcatcaaatgctgatggactgagcgggaggcagagaacacttccattgcttctcctccaggacagagcagtggaaccacggagcaatgggacccactctcaaactcggcaaaatatgcacctgattcttgatgcaagggagcggcctggagaagaagaagaagaagagaggaagaggaagaggaagaagaagaagaagaagaagaagaagaagaagaagaggaagaagaactgaagaagaagaagatgaagaagaaagaagaaagaagaaggagaaggagaaggagaaggagaaagaagaaggagaaggagaagaagaagaagaagaagaagaagaagaagaagaagaagaggaggaggaggaggaggaggaggaggaagaggaagaggaagaggaaggaggaggagaagagaagagaagagaagagaaaagaaaaatttgccaaatagttcagaccgaggggctgatcagcacccccaacccttgctcagattgctctggagggcttgctgagcctgagcaggcccagccggggtctgtctgccaaggtcctggccaccaggaaggatctggcacccacacgcccactccctgtgcagcctgccctgccccaccctgtgctgcaggagatggcctcccagcgagctgtggatcaagcgtcatcccccaactcttggaccccagcctgctgctccaccagcccaaattccacggccaccccacccaggccatctcaaaggccacgcgctctacagacgtgctgccccttggtcacttgtgagcacctgctatgctgtgcaacttgctgagccacaggagacctgctgttgctgctgctgctgctgctcagctctgtgggaaggagagtgaggtgggcgggtatttcctccccagcactctctcccaggctcaccacaggcagcttatttttatatatatatatatatacatatatatatatatgtatatatatatatacacacatatatatatgtatatatatatatgtatgtgtgtgtatatatatatgtatgtgtatatatatatgtatgtgtatatatatatgtatgtatatatatatgtatgtgtgtgtgtgtatatatatatatatatatatatatatatatatatatatat

SEQ ID NO: 470961 - DNA, 673 bp, Homo sapiens
gacctcaccccatcgttgctcccctgctaccctggtgttccgattccatgatcccaggcttccgtggaaccacagaatttgctgttgatgcaaactttcctgactggccggaaacatgcacgggatctacattttcctctgggtctgccagcagttcctggtactaactcccttcgtcgctggccctttctctcccagccccatgggtgggcaatgtcctgtggagactcagatgacatcatgcaatgatgagagggtggaggtgcaggagaaatggactcagcatgccagtgctagtacctacgaccaaggcccctggtctcgggcactggttatatatgaaatgtggaggaggagagatagacgccgaacactggatcaaacacagagacatcccctggaaaaggaaaagctccccttcaaggccaacaggatagagacatgtttcagggcaaaggaaatcacatttaagaaacaaggaccccagcctgtgtccaagttcatgatgtcccaattcatgatctttctcacctcactctctctcaagtcaatatgtggctagctccattcaacatgaaaggttacacagagaaaccagcccatgacctactgtactgcgaaaataaaataatcacagccatggtgggaagaaatcccttatcaaaaggcagat

SEQ ID NO: 470962 - DNA, 2668 bp, Homo sapiens
tctgctatgccaaggtggatcctgagacagaaaaagccctgggcaggcggtaatcataaagaagtcgagatatttctatggcagctccaaaaaacagtgagcccctcctccaggggatgatggatgcacgtgggcaacgccttgtagccagcggtggcggcttaacagtggcagaaacgcccgcattgcctcaccagctgctgggcacttctccttgctgctgccatatgaagaaggatgtgtttgcttccccttctgccatgattgaaacaccaggatgggtgtgcaatggcaatgacagaggtgggaatacaggattggaggcatatgccaagcacctcagcaccaagttctgccaatgcaccctcgtcctgggaaatctatctaaggatggcacaaagaatccacccaaaactcaaggcagctttgatgagcaccagccgatggaaggatatgggatgcagcccacagcagggcacagctactgtcaactgagtgcaggataatgaatgacagaaccgtatggcaccaccctgcgcagccaatgataattattacataggaacttttaacctcagtgcgttctttgctctcccccgtgagatattaaataatgcgttgatgtgaaatggatgccagttcctggacggcgggggctacctggcgataactatcatttgatgatagcctactttgtgccaggccctatttgaaagtgatgttcctagagtttatttcattattacaaccaacctatgatgcaggcactctgactgcctccactttacaaatgagaagagtgaggctctgagagggtccagagccaggcagtgtggagctgggacttgaactgggcatttggggccaacacttgtgctcctgttatatttgcgtgagcctggggcatgaggaattgctagtggttgaattgtgctaaatatatgaattaatgaccacagccagtcatgagcaataatggaggggaagagttgtgtacaacccggatggaaagagtgtcttgaaatcaacatgggaagtggatttgtacaaggctatgaggattgggacaaccacgggctccaagacgtcaggcccactcagattcaaattcttactcagtcccttcctggtcatgtaacaatggataaaaaaatcatgggttggcaagctatggcctgtgggccacacctgtcctcctgcatgttttagtaaatacaattctattggaacacagccatgcccattcgtttatgtatcgtccatggctgtttttgcactcctggatcaaggttgagtatttggaacagggaccactgggcttgcaaagctaaaatatttactctctggccctttacagaatatgtttgctgatccctggagagatggtgacttctcttgaatcttagtttctgcaggaaaaagctagctgtgagtgagagtatgagatgacacaagtgaccacggattatttgagacctgtcagtgctggttcttggtaggtgctgattaatggttggatgatgtggggaaagccagtgcactgcccaatgccacaggaggcaggagagaagggtgagcctctgttttctctgtaaattgcaaattgtaacaattcccgaatctgtgggggtggtgtgtatgtgttttgttttacgtatttacatattgaactgaatgtttgcatttcccccaaattcatgtgctgaagccctcatcccctttgtggtggctgttcctgtctcctgagctgctgctgacttcaggccagtttctccttcccctggagccttgcccctttctttgagaagaagatgttgattggagcagaagtctcccactgatggccaggcatttatttttattttacacatttttggtgtctgtaatcttcttgttactcaggttgtagcttaaacatcatgaggcccagtcagattccagtcttcaccactgcatggggtgggggtgcagcaacattgtgttgcataggagcgggattcctgcatctggaggaattcaaagcctttaagagatgggaatgaaaagagctccctctagtatccccaccccaccctggacccagatccactggcttgcggtacttagttagtcacttccacagtcttctactctctcccttgtccctcaccctccaaggggacataagtacaccctgtttagtcctctgggctcctctctccctgccccattcttctggctcctgttctttcatgtctgggaggacgctggcctctatggaggaactcacagggatccaccattgctggaagcatggaatccaggagaaggagcccagttatgtgtttacttggcatattattcaattcttagacctactgcctgctatatcctgtctacctctgggcctttgccgttactctctcctgcctggaatatgcccccttcctgtacccaggccaggccttgggttctacccagttacctccccactcatccttcctctgtggattcaaatgcccagcctcagggagcctgtctgggtttgattgctgttgctgttggtactgtttttcccgtaggtccatcctgttttctgcctttttgcgtgtcatggccgtgaatccccatgtatttatttgtggtattactccaagctccaggagggcagagagtgtatccccttctc

SEQ ID NO: 470963 - DNA, 663 bp, Homo sapiens
cacctcagagcatacactgtcctgtctgcccagcatctgcgtctgtactggggactgcttatccccagaggaaacgggcagctgtgcagtttactggaatgtgcttcagcatccagcccacactactcaggtgctcctgcctccgccaagcagcatgacttcggacaagtcatctggtctagattttggcatctgcaatggaggtgtcaatatctgcaggcagatgcagcagtaccggtcaaagaaggctctggagactgcctcccagttcagggccagctgcaaccctcacttgctgtggctgctggacaaatccttttgcagctctgggcctctgtttcctcacttatggggcaagggagagacgagcttggacctccctgggtggtggtgcttggaagcccatcacagacccccaatctctggccggatgcctgatccaccaagcactcggtccctacacaggaaagttggatttccctgcaaatctgattctttccagaaagtttcttccttcttcttctcctcccaaatgtgccctggaagggatatgggtacgtctaatattgcacaataaacgtctgcaacgaacaccagaggcagtccatggtgcctgcccagaacggaatcccagcctgcctgtgctcctccatacctgttcac

SEQ ID NO: 470964 - DNA, 848 bp, Homo sapiens
tccagtgctgtctctagcaggggacctgagaaggtgaatcccttgcttcagtctctctacgtgtgtcccacatgggctcacattgagatgatgggccacagccttcaaccttattcacaggttactgctcagcacccgccatgggtggtcagtcaggccacactcagatgtgtggactcagacatcctgtatgtgggagaaaccgagggctctgtcacacgctgcaaggcaaaggggaatgaagactgcgggtgggatgaaggtttcccaagggctgaccttaaaatggagactatcctgggtgatcctggtgggcccaatgtcatcacaagggtccttaagactgagagcaggaggtgggggaggaggccacagtgctgcccccggaggcaggcctgccctacctctgctggctgcgaagatggaggaaggggcccagagttgagggacgtgggccacctccagaagcctggaaagataggcattcaggccctcttctgttccatgtatctgtgataggctggctaccttccagaggtcctgttttctgacttgcttatattggcctagtgtgaactggtctctggtgaaacacagattttttctgtgaacactcaagagtggttctccctggaacttcccagctccttctgtcctctcatcaagcacttgttttcaggctggagaagctctccacctgctgtgattgacattctctgggccccactgtgtgatggttagaactttccaggctcaagttatcagctcttcagctctgcccatccctgggctctgaaagtccacccattcccattcccatgaatctcttcccactccctgtacctgac

SEQ ID NO: 470965 - DNA, 751 bp, Homo sapiens
ctttcgagggcataagatttcagaattttactaccattagtctggggctgggtcccagctgacactgaaggggctgacatgtacacaggcacctctctattggctgctaaaatacccaaattcttctcaacaaaattggagagattgggatcacaagtgggtagaagccacagggacaccgatttgtggtcaaatggaagaaatgctttcagaggtgactggggctatcccaagctggagtgggccacctaccagctgggaatttggttcttggctcttcggagggttgaggtcaagaaggacccaggtccagggctggagtgtgggagtggaaggggcccatctttaggcagattcttagtcaaagttcccctggtttgtcttcctccattattcttggtatttttttgtcttgaaactgatcatcaattcaattttcacaactacctttctgagttggaaagaacttttccattttgcttgtcaagaaagtaaatcttggagaagttaaataatttaatttatttaaatagacaattcttctaatttttaacaaccaaaatttcaatccatgttttatttgaatgcaaagaacatccactttctgtgataacacactagttgaatacactgaatagaaaatgatattttatttctttctccttgaaaaatcattttaatactcaaaagaattgaaaacagggacttcaacagatatttgtacatccatgtttatagaagcattattcac

SEQ ID NO: 470966 - DNA, 637 bp, Homo sapiens
agcagacacattggtgtccccatgatcactgctctcctgcagtgcacaccagcccagcttgcagctgtgctcctcagagataggctctgtgctgtctcccagggtgccccatcagggttagcctctaggtgtgtccacaggaaacacttgcacagaaatgacctcgttcttggccacctccaggaggtctccctggaccaccctccaaactatgtccttgcacacaatcctctgtctcagcatctgcttctgaggggcctcaaatcaagaccgacagtattttcattttctctcagccccatcctcatgcagaaactgggggtatcaatgcctacccccaaatggtctttccaatgcaacttctcaacagagttgcctgaaagtgagagtaaatgtcattgcacgtgcatttgtttaccaatcaatcgccgggggtcaactggacccgagtccaggctgtttgtgaggtttactaaggtaataacgataatgtagattgacaaccatatttacctgttattccagagtcatcaaaatgccttcacatttcttatcccatctaaatcttgcaataacctggggaagtcattcatttcagtccagttttacagatgaggaaagtgaggtgtagaaatgt

SEQ ID NO: 470967 - DNA, 622 bp, Homo sapiens
cataagggaggacgtttagctgatttttctccttaatggttcgcttagttactgaataagagatgttgcacaatggcggcaggagacagaataagcgcaagcaggggaaatgcccgatgcttaaaaaaaccatcagatctgttgatgataatgagactcactcattatcatgagaagagcatgaaagaaactgccaccatgattaaattacctccccctggttccacctttgacatgtgggaattacaattcaagctgcataaaacagtgaacatgctggagataatgatgatgatgatgatgatgataatgatggtgaggataatgatgatggtggtgatgatgatggtgatgatgatgatggtgatattggtgatgatgatgataatagtaatggtgatgatgataatagcaatgacaacggtgatgatagtgatggagcaagagatgcaccattccagctccccactgtttctaagagaggaagcagaaaagtgaaatgtggagaggtatgtaggtgggagagaggatgggtggttatacatgacaagaagctaataaaatgaagaagtaatataacatatgaggaaatgaagataatgaaggagggcaaggatgcaga

SEQ ID NO: 470968 - DNA, 1007 bp, Homo sapiens
ctcagataacagaagctggcaggcgacaaagtttgtgtttctcatgcaataaactttcatagacctgattcaaagaggccggaaaaaatgtcctcattttccttgacagacgacgtgctgtgttctccgggttgctgatcggcaaatcggaacagacggtttttcctttttatccctcctcgttaccccgatgtggctttttggtctttctccaaatgaagccctcggtgagacattgcaagatgaaagggacggtggtcgaactctcctggattacactagacctggggatccccagggacaaagaagcaaacccgggcagagacaggggcctcagatgagtggaaccaacaaaggatgggatgaatcttaccaaatgagagagctgctccgctgcaaggcagtggtgaattctccgcagcttcatgtgaagggatgtccctgtttgcagaccatccccaggttgccagtgaatgtgataagtctccaaccagtgccagggactatggaaatgatattggacaaaaagcaaattcgagtgatttccttattcgagttgaaattgggttgtaaagtagtggagacaactcgcaacatcaacaatgcatgtggcccaggagctgctaacaaacgtatactgcattggtggtgccagaagttttgcaaaggagaagagagccttgaagatgaggagcatagtaactggccatcagaagttgacaacgaccaattgagagcaatcatcgacactgatcctcttacaactacacaggaagatattcgaagatatgtatctgattttaagcaatttttgatgcataacataaagaaattaaggacagtttggtagactaaatcagatcatggcatgtgagggacagaattgtaaggacaaaaaacatggtgggcattggaatcacaataagacacttgttagcaagaaagactagtaggttttcattaattcattcatatgaaagtattgaatatctgcaatgtaccacatg

SEQ ID NO: 470969 - DNA, 675 bp, Homo sapiens
cagccagtctcccctcatcctaactggctctggagggtgggcgtcacgagctctctgttgctttctctctttacctgatgctgatcttgacactagactttcactaacaactccctcggtctccaggtttatcttagagggagtgtgttaggatatgccagacgcagttgccaggctgcatgggggagatggggagaagcagatggggacttatcctcatggagcctctgatcttgtggttgagaccagcaaggcagcagaaggcaggatggagagctgcaggggacagaggaggaccaatccaccctggggaggctggggccagggaagacttccagaagagatgacatctgaagacaggagttacaggctcctcagcggtaggaacctgatctggagagaaaacagcctctctggcatggaagaccttattgttgggagtcctgagcccttggccctgtggcctgggagcccgagctgttgctgggacagcaggagagaatcgatcagaattgcctgtcctagaattgaaccatgcgggcttgagccagaaactgggctgcagcattcattcatcctggagggaggcccagggttgggccccattgcccaggacaggttcacgtgtgataaaaataccatggaagggcccatggctgactcttggtaatgaat

SEQ ID NO: 470970 - DNA, 599 bp, Homo sapiens
gcacatagctgactgctgaacagcagaaaccagtgtcctgccaagtcctccgcggtgctctggacccagagccagaaatctgctcacctccagcgtcttaagacactgaaatgagaacccgcacagcttggaaaaccagcacataaaaccaggctctgtaagcagccagcagcagccggtccaattatgaagaaaaatcaggcaaagatggttcagggcacccaggggttccatgctgccacagaaaccaccctggggcacttgagtcctcatcgcagaaacactgagacaccccctgagggtggaagccaggggctgctcatccccaggcctgcaggagatgcagatgctatgcataatgggcaaaaatttgagaaaacactgtggtatttgaactccaagcagaaaataactaaccgtcctttctataaccacagcacatggaaaggacaagggcctcttggaggacctcctacaggatgccagacacagagagctgcagcaacatgcattcaaccccaacactgcactagacagactgagggcatctgcaagcatctacagaagcagactcgacgtttacagactacatgagagct

SEQ ID NO: 470971 - DNA, 629 bp, Homo sapiens
ggctgggaagggaggattgaggagcaatgcgtaagagttccgatgactctacatcctcacagatgttagactaccactggccagggttacacaaatctaacatgaagccagacccctctttgccaccagtcttccgccccagccttcttcttgtccttggtgtatttagtgcgttggttttctccactactatttccttggctggaatgctcttcaatcggatctggtctgtggctctctcctctgatgtcattgaagttgtcttctcagagaagatctccggagggaggactggacaaatcacacctaacagcgtgtcctgtgtcacagtaaaatgggcaggtgtttattgccacttggctcagtcacaaaatgccttggccctgggaaggacaggagaactgcaggcagagcagttctctgcagggcgggtggaagctgaaggagctgacagccaaatgctgtttacagaccacactccctactcctgggcaggcaagtctggacttcaaggggaaggtcagcgactcagcctcttatgacttccacacttccttgcaggtatgactttgcatcagctggtcataaacacccctcacaatgatgaaagcaatggactctgtctctga

SEQ ID NO: 470972 - DNA, 614 bp, Homo sapiens
tactgccgcaaggcttcacagacagccaccattacttcagtcaagccagagttcttacacaagagccgggaccgtgccctgctatcactatgcccccctccactacctctcagcaagctgaactcgttgccttaacttgggccctcactcttgcaaagggactacacatcaatatttatactgactctaaacatgccttccatatcctgcaccaccatgcttttatatgggctgaaaaaaatttccttactatgcaagtgtcctccatcattaatgcctctttaataaaaatgcttctcaaagccactttacttctaaaggaagctggagtcattcactgcaaaggccagcaaaaggcatcagatcccattgctcgagacaatgcttatgctgataaggtagctaaaaaagcagctagcattccaacttctatccctcacggcagtttttctccttctcatctggccactcccacttacttccccactgaaacttccaccatcaatctcttcccacacaaggcaaatggttcttggaccaaggaaaatatctccttccagcctcacaggccaattctattctgtcgtcatttcataacctcttccatgtaggtt

SEQ ID NO: 470973 - DNA, 570 bp, Homo sapiens
tgcagcctgcagccactgccaagggtgacacctagtatattgccatcgctaatgcacgaggatgtttgttccattgaaacctatcattttactcaaattgatgacttctaccacttgctaccagatcgggggctcttgcagggcttggtaaacttttgtgatccagggcccctggtgcttcattctaacctggggaagttccttgctgccaagaataggcaagcacagaagtctgggatgcaggtcctgccaacagaactaattgtacagcaacattctttggcagttccacaaagaacgtcaggactgtcaaaggaagtatctcccctccttgttggagaggtgagtggcatggagctcttgataactttctatgtgagaatgcctgtgttcagagagaaattcagtttccacagtgagggctccaggaggctaccacaagtggtcttggagagaagctgcatctgggctctagaggaacaaggtccagacacacctctgcaaagtcccagttctaagtcttagtctcaaacataatgatgtctccacccatggctgcccatttgtccc

SEQ ID NO: 470974 - DNA, 826 bp, Homo sapiens
gatttccggagtgaaggcagaaaaccaataccacttcttcttaaaatagtaacagctaaactcctagtgcttacatgtggcagatgctggaccaaggcatttatgtttctcgcgaatcggcagttagtgcaggactcagcggaaatggctccactcactgtcagtggggaagcttcagacctaggactggaatccttaagcgtttgcatacttacagttacccaagtttacacaactggcgagtggtagagtccagtccaaagagcctgtccccaaagcctctgactccccaccctggacttcgctgttttttccatatacctggaaaagaagggaaccagggagaaaagaggtacaaaccacagaagaccctcctctctccggccctgcttctgtacccgaatcctgtaaaaaaaacaggacaaacaacaggaggagagagcccacatacaggagtgccattgccaatggccaacaaaaatggcagaccggtgtgtggagccttcttggccactgcaaccttagccatgttcctggctgaaggcggctcacaggggaccaaagaaccacccaaccgagccctgcacaagtggttgaattacacggatgtctcttattcttgtggtggtttgttccacagcaaaacgtaactgatacaccaggaaagatccataatatttttatcaccacagagcattaccttatgatcacctgtagtcaatcctgcactacacgcacaggaccagtttactttggtttttcacttagttcttgctcttatgacatagaatttctgtgttttcaatgagaaatcaaatgttttatg

SEQ ID NO: 470975 - DNA, 570 bp, Homo sapiens
cgttccttctggttcccaagtattaatcaaccactgtgcagtttaaaaacaaatatcagccatgagtatgaaggccatggcggcattattaaaaatgtacgggacagggatgggaaggatggggctgggggatgtggatggatttcaaaacctggaacaaatgaaaactgacttccaccaacagcccaccaccccgggggcctgcctttacaaaagcgtggtggccggtcacagtcagtgccctggaaatgatcagaactactgctgggtacatgccctgagagatgctcagagcccatcctctcctccaggagcagcccatctgacccctgtaagccggctgactaagtgttatcaattcatactgaaatttacactcgcctcctcgctctgttcccatcaaacactgtggaacattttgtcctctgttctcaagcaaaagaatggtccctgcgtacctcctagatggtgatgctgggtatcacatgtgggccaaaggaagcctgggagggtctggttttctcaatgtggagatgtgtcccctgtctagtgctttctgagagagtccat

SEQ ID NO: 470976 - DNA, 597 bp, Homo sapiens
cactgtcactaagattttttctgtgtggattaactttggagtatggtgataccttcagatctgaagacctgtaatgcagaggtaagcatagttctacaccctcacctttctgacacctgcctctcagaataccaaggattaaaggaagcctggatgtgcagcttagaatccagatcccagcagagagaagtgcgcacatcctctctgctgtgtgtgttggtgttggtgggatttgcagccagcacccaccttccactctcgtttgtcgggagcataaacagaagccaggacagggacaaggtgacatttgatgaaagtcacacagccatcttgagccacactgggcagcctcttgccttttacctagtgcatgtccttcaaagaggggtaagaaaggagaagagtctaggagtgatagacaagataaaagctttaaaaagtggcctctgggaactcagtgctctggaaccatgtgggcatgtggatgctaatcagcaggcggctgtccttgcttcacagcaaagccagggcgtgggaggaaacactgactgtgccatgtgtgagggctgcagctgacccgatcgactggttgactgg

SEQ ID NO: 470977 - DNA, 1467 bp, Homo sapiens
ccctgactaatgaacaaggtttggaagagagatgttacaaatcagaggacatcatgaagcagggtgtgagcttctactgctacatgagcctgttcttgcaagacatgtaggggagaagatgaggagaattgcaggtagaactgagactcagcccattgaggcaaggaagcctccagactggtgtaggtatttctggagcccagaggagaagccagagacccatactctgggcaaaggagctgcctggcaggtgctgatatctccgagcaggtttgatgcactggatctctggaaggaccacacggaaggcaagtccggttattggaaccacctttggctgccagggatacctagcacggggccctggagaatctctgaaaagagaacaaccaacaagcactgtaaggagacaaggttcttgcatcaacaggtaggggccagcagatatcacgatttggatgttgatgaactatgaccccatttttgtattcacgaacttttgaagcatgccaattatatgaataatattgaatggaaggcaaatgtgatggtatataggaggtcactggctaaataaattcagacacacttacacaatgaataactctgcagctattaaaaataatgctgtaaaataatatttagtaatatgggaacatgttcatattaggtttttttaaagtttatgaatgtgttacattttcaatatacaaatgtttatttttatctttattatatattatatgtattataagtatattatatgtatgatacatatatatattatatgtatgatacatatatctattatatgtatcatacacataatatatatgtatgatacgtattatatatgtataggcatataatgtatgtattatatgtacatatataatatgtaatatatgtattatacataaactacatattacaaatataaattatatataatttatatattaatatatactatataatatattcaaatattgatagcttgtattagtatttataattaatatgacatattaatataagtaatatattacttatatatgtaatatataaataatatatcattaattttcatgtaaaatatataaagacaatatttacatagagtaaatttatatatttgtgtttatattttttatatattacttatgcagaagtttctacaataattgttatagtgtatctgtataggttcaaccagatatgatttttactttgcgtgtttatattttttaatatgtcctgaattttctacaaaaaagccattttttacttttataaaaatatttacttttttaaattaaagaataatgtgaaatgattggaatatcatcttctcaaatccttctcaactatttaaactcctttctatcctgtctcgagcgtagaaacataccttcatgtactatagaatacatgatagaatacatacttttctatactctatacttt

SEQ ID NO: 470978 - DNA, 583 bp, Homo sapiens
cctgtacatcctcagggtttagaatagggctatcgttataataggtgctcaataagtctttgtaaaaggaaggatgtatgggatgtggttgtttgaatggtgtgaatgatggtggcagtgggcatgatgatgatgggagtagtggttgtggaggtattagtgttgatgatggtgacagttgtggtagtgataatagtactggtagatgtggttgtgattgtgttgacagtggtggtggtggttttggttgtgttagtggtagttgttttgacggtgacagtgagtgtgatgatggtaatggcagtagttgtgatggtggttgtggaggtgatgatgtggtagtagtggtgatgcttgtgatggaagtgatggtggcgatgataatactggtagatgtggctgtgctggtgttgatggtggtagtgatgatggtaatgatggttgtagtgatggtgctgatggtattgatggtgggaatttgggtaaaggagatttaggaatttatttactgacttattttgcaacttttccgtaaacctgaatgttttttgaaatagtttttttagaaggaagggaggaaggt

SEQ ID NO: 470979 - DNA, 608 bp, Homo sapiens
gacacagctcctgggtcccactcgttcctccgtgataacagaatgccaattcagatgctgcctgaaatcggcaatatttacatggtctctagactacatcgattcgtagagcagaggtgggatctttatgtcagacagtatggagaatttcaagttaggaatatgtattgccgtttcaccttcatgaacgtattccacccctacaacagtgagcgagggatttgtttctctgtagagcccccatccatagctgtccctctcaacctggagattgtattcactttgaatccagaagctggtctctctggggcatctggagtgactgattttacccagttacagccaatctctttgtttagcttaactggtcacattaatcaaaatagcagctctggttccataggcagtcctcctctgaaaggctcttcctctcttacatccataacaatcagtgggtccacaatggtaagttaatgcaaaagtcaacattgcctaaaaacacagtctgccaagaacagcacatctctgaagggctcgaccataagcctgcaaatgcactatttgcaattgttctgtttgttaatttttctttgaattctcagcctctc

SEQ ID NO: 470980 - DNA, 704 bp, Homo sapiens
ccatttgcagcaggatggatccactgcaatggtgggaagaagaaaagaagttagaaagcataagggcagtcaaactggcatttgctttactccgtgaacttctgcaaacttgtcctgacttagaggctttgcaactgctgttccctcttcctggactgctcttttcccagatctatgcagggctagctcctacctgttctgagcaggagtcagcagatgagatgcaaggaaaagcacagaatgaggcctggcaggaagaccccaagctcctgcacattggtggtcttttgaggaattggtgggatttgaggaatgcaagtagcaatggtggatggagaaaatggaaagagaaaagaaccacatacaggaaggcctatccagaggtcactgatgggcagagggtcgtccaggcaatgaccacaccaagcagcagaggaatgacttaaggagcttgtgctgagggaggaggctgtgtggttatgccagtttttccaaattgttgcaaatcttaaaaaatttcccaatatatttattggaaaaaattcccatataagtgtacctctgcagttcaaactcatgttgtccaagggtcaacaccataaatatttaggtttttaattttgtcttatgtcagttttctaagtactttgttcattttatttagattgtccataatattctcttattatcctttcaaagtctgt

SEQ ID NO: 470981 - DNA, 614 bp, Homo sapiens
agtgacctgtcagctctgggaagtcagccagtggcctgacattacctgacattagaaagatcagctctggcttctgagaaaggtgatcctatggttatcacaggggcaacattacccccggggggttgcaatgcaagtgcatgtaactaatggtgtaaggacagatagaaccccaagacacttcccctgggcaccagtgtcaaacagcagcttctccttttttcctgtgggagcatctggactttcatattcaaagagaaatcctgtcaggcctcatggtcccctgaggaggtcatggtctacttcaggcctgacagcaacttggccaagttcactctgcttggcgattaggcaagacccatttatctccattttaagggggaaaatcccctactgggatgctgaagtaggccagtttgtcctggctcagctgagctcagactcattcagtggtcttgcaattaagcaggacttaaaagctctttggaatgacttcccctggcagatattgctgaaatgtgagagagtatttctggtatacatggtagccttgcatcgaattatcccagcagaatgtttgaaatggaaaaagtcaatgctatgttggtgacatt

SEQ ID NO: 470982 - DNA, 597 bp, Homo sapiens
cagagccctgcccatgaggaatgcacagtgtgcagaccaacgaaccacgacaacgcagtgggcaagaaaagcagcactgttcaatcacttactcaaggaacacatttattaaggcctacacgcattcaggaaatagatgtaaaagtacagtcctctccctcacagtcatggtcttaggggaagaactttgcaatgttattcccgccagccaggaatgtgatggctgttgggtgggggtgaagtcaaggctgtgtgcgctgagatacccactcccttttgaatctcccccaaggacagagtccacagcccccagaaaacttgttcttgagttttattatctccatggccaaaaatgttctttgtctaaccaaaatcagtattaccttgaattaaaatctacttcctcttatttgggctttgaaggggtaggacagtgtttgtcaccctaaattatgagaaaatgctttctaagctatgaagtcttatgaaaatattaagtggttttgttttcatcataggtaagatcatgtagcaggtgaggtggaagctaaattttattgaataacagcctgttccaggaactgtgctaagcacatt

SEQ ID NO: 470983 - DNA, 1515 bp, Homo sapiens
aggccctattgagtacggagaggatgcattacactgggagtcatgtgactagtcatatgaccacaggaggccatgttacttctctgagctccagtgttcttatttatgttattattttttgggtgtccagaaaaatcaacaagcaaaatgccatgaccattccacaaaactttgctataacttttgcttttgaccagtccacctttgctctgactggaccccttccctccctggtagccattgctttgattgtgctttgtcttcgggatcgtacgggtaaggccatgtttcatctcctgttacaattctttgaagaaatgctccagaatcttggtcctacttgtttaaaatttccattcaaagctctgctcttctctgcagttgatctggggagaactacctatttactgacacttttcacacttatggtcatcctgctgctgtccccactacttctgtccctaacatacccagttccttggtctgtgcctaacctatgggcaagtaaagtttcttccctgagaatgaccaatggaaactgaaagagttcatttcccacacataaattcggtgaccatgatttatgaatcatgatttatggtctataaataaagaagattcaaacagatgtgaagggagagctagcgaggacagctagagagagagccctgatgcattctagttcctggttacagttctttcctgaagtctccctgcaaacttgccctcaggtgctttgagaaacccacctttttgattaggcaagtgacctacggtaaaacaaattctaagtaaacttaatgatttctcacagattgtcctgtttaatccttacaataacacagtgggggtggtattactatccccattttacagatgctttttgttacatgaaaattagtccgagattaattgttagggagacttaagttctagtctcaattctacaatgactgctacttctaaagcagattaacttccttcagcctcagcctttctcaaaaagcaacttagactggcagaaagattcacacaagtggttaagcaagatcctatttgtaatttatgaaatcaatggccatgacctggaagacttcgtatgggcagagctgtcaacagcatggtctgtgtctcctcatccctaagtgcatgaattagattttatagcatgtaagatgccttcaagctctaaaattcaacagactattttctggccccagctagcaacaggttcattctcaatcatgaaagaactgaaaatggctaataaatttggtgaaacatttggacaacacagtcatggaaccacttgaatctataataattctttttggctctaaaaacctttggaatttttcccttttattataactacatggatcattacttggcaaagaaatttcccctaatattgatctatgaacataaagaattatatctcagaataaaagaatataaaaataaagcctactaacttactgacaataaaagtaggggctgaattttcatgaaaac

SEQ ID NO: 470984 - DNA, 667 bp, Homo sapiens
gtgggatccaggccggaagcgtctgagacctttatggctcagtttctccaaggggcatgcttcttgtttcctgtaatagggcctgcatggtacaagtcagcttgcttctcattaaccatccctctgaaggcccctgggcttggacttcctccactccactggcaccacctgtccatcatcccctcctctcctctcccgcctgtctgtgattgtgcttgctggaagtgcagcagccttcttgtgggcaggaggatgacaccacatgcccagggtgcaggagcaggaagacagagggcgggtggggtgttggcagcagtgcaagccaccagcagtcctggagggctcacagctgacccttccgtgaaggagaaaaatgatttcctgtttagttcattcacttcttatcttgctggtcaaagccaaagagatcctcaattttggttttaccctacaagggcagcagaggaacctcctactgttctctgtgtgagggtcactcagcaggttctgagacctgctaaaattgatattactaatagcatggatgcaggagaccaactatacgggtgttaaattctgactctgttgctctccagttggttgtattttttcagggtctaccagagaaaacccgacattaggaattagacacctaagatgtttaaaa

SEQ ID NO: 470985 - DNA, 696 bp, Homo sapiens
tacagaaaatcagagggccgctgcttaatgatctcggccatcagccttggaggggaacattccagcttcttatagttatggtgaagaaggccaacaccagcatgtcactcatggtccagaccgatttcctgatctgggtggccaagggtgagaataacatttccactgagctgattgatgaaggacacggcaccgcagtgggccataaagcagcggcaaagggagcggccagctcagatacggcgcaggagatgaaagctcttccatgcctgctgacagaaaagggggaacctgacactgccctgggcctgtggggctcctccccgcctccgtcttctggaggcacagcccacgagaaccttccagaacacactggagcccggcaccgtggaactgttcagctaggctctggcttgtttggaatttcatctgacttgaaggggcccgtggactcagaggaatttgggtctcaacacagtcccggtgggatttaccccagaccgaggaatgcttgttttactcctggatctgctacacactaaattcgggactttcctcccttctctacactttagtttctttttatgtatgtggaacaggagtattagacactctgcgattttatcagaaaggattttacaatggttatactgtgatttctccttttccctgagtacatctcctcctggctgagag

SEQ ID NO: 470986 - DNA, 1360 bp, Homo sapiens
gaatgccttcaacagtctccagttgtgggtcagagaacagctgtgcaagaacggcaatgccagaggaatgaaggatgaagtgccttgtgatgtggggaggagagaacgtgctcaaaagcccctgggaacattgccctgtgaagggcagggcccagaaactttggaggaggcagtttcttcagtcacagcttttctcctggctagtttgcagagagagctgacggtccagtgggaggaaaagggtgccgagcaaacctgcgcagcactgcagtgcagcgcaactgatcagtcccacgtgacgcacaagcagagggctgtgagctttcagaggggccattccatgtggctgggggacctgaacagcccatctcagagaaggaagggtttcatatggagctggagagaaaacaacaggaagcagagacaggagtggacaggatgcacgtcgggtactcaaactcatcagatttgacagaagtgcaagaatgtgagagcaagggggaggtctgggaggaccatccacccctcctggaaggccctgactcaaacactacaacattagatcccagcttcccctttgacagagttttgcaggttcccaggagagaggagtggtcatgaaaagggggtggggcctctctctggatgggagaaggcactggaactagtaagctatcatctctcagattccgctttgggcttcgccttccccagtagctgtcacctgcctttccctttgttgttggggcactctgctacaacctgcttcatgctccccacttactgcctccattgtttccctcccactctgtgcaataattccctctcctcccttcttcttccaggggccttgttttaggcttgaccttggcattgctggcatcctaattcctgcaacgagcatttacttgttcatctaattcatacaatgagcacctactgagctcagtagtgagttcttctaattcatacaatgagctcagacatgaagctgcccctatggcctcagggatcaaggagggctgtgtagggccatggtgtctgccccctttctggtgcccaggcagtggcccctgactcttgccataagtcctgttcctagtcacatggccacaggctctacctctttctgccactcctctgaccctctgagggaccctggaatccatcagtggctttcaagccccctgaggcacacaggacttggtaagaccatctaaggaccatctgcagcatcttttctcaaaggcctgaatgccttcctggggctctgcctagaaacagggcccagattcctgctgttgctttttgaagcccaaaaaccacactgaatgttgctctccttcctgaatctctgcct

SEQ ID NO: 470987 - DNA, 842 bp, Homo sapiens
ccaggcagagtgagcagcaggtccagaggcacccaagcccaccataggtggtgacgataggcagatatgtctggcacataggaatgtggagggaggtgctaggagatgagcctggaagggcatgtgaatgacgttgtgaatggcaggccaggaaacccaccacctctgccatgtcacccaagttcaaccccaacaagatcaaagtcgtatacctgaggtgcacgagtggggaagtcagtactacatctgctctggttcctaagatcagccccctgggtctgtctccaaaaaaggccaatgaggacatcaccaagacaagtgactggaagggccagaggatcccagtgaaactgacggtcttggccccctacttgtcttccctggagtcttctgtcctggtaactgctccagagtcatcctcacagcgtcttcctccacaccctctgttgagcacccaaagctcaggatgtgccacaggaagcagggagagaagacgccaccctgccttcaaggagctcccctgggagctgggtctccccagatgcatttctggggatgtctgtgaagcccatagctgggcagcccagaccgccccacacaggaggcgctgggctcaccagctaagggtgggagctccacctggtcagatcttgctccaggtcacttttaagattgcagtgcaggcactgggcactggcctgcccgaagcctgccttatccagggactcatttcctggctttgcttctcctctacccagcttatgagaggagtgctaggagagggagggaaaacagaaatctaaacttgctcaggggtcctattttgtatcttccctctgagc

SEQ ID NO: 470988 - DNA, 677 bp, Homo sapiens
tattatttctgcttggtaaaatgcatgaatccatgtgtccctaatcttgttgcctgctggtaggggaaagatttttcatgatccagcacaactcaaacttacagacataggtgggaaatgaggcaactcttcaaacacattcctagtctcccttcctgtggaaacacagtgggtgcatccagtggacacacgtgggttcaagaccagacacctcaactctgcagacctggtttcctcacctatgacatccctcctcgcaggtttgctggaaagattgaaccagctggacacagccagtgcctggaactgaattgttcacagctggcagcatggctgaatgactcacccctcccggaaggatgcctgtgtcaacccagcagcttcattcaggtcaatgcttattccctgagcacccgagcccgggacctggacttgaatggaagtcaaagaacctatggagagaaggctgtatatgaaaaagactaggtcttttttttattttttattttgacttatttttttttctaagtcaggtgcctctggatatgaaaaagactaggtctttttaatctccatttctctccccacctccttgtacattcctttctcattccagataattgcctcctccctgcaggtttatttccaaagcaattcaagaaaagctgtttgatggg

SEQ ID NO: 470989 - DNA, 650 bp, Homo sapiens
ccctgcctgcctgcacagctgggcctcatgacccaaaagacccctgtgtgggcttctgtccttgctttctccgggcaacaagggagagaccacacactattgtcccagccccaagaagcgccaagggagaggacaaagggccaggggcacctactcagtctctacccagcaacagtccagcaccctgaccatctcctctcccggggcaaggccaggacagcactgagggcatcggggcgtgcccgcctgcgccctcctagaacaagctttggagaacgtgtgtcatggtgggtatttgctgatggtcctggcagaaatgtgaggagatgggaacagcccactttgcactcccccaccctaacccccttccggtcccgaagtctcatgcaaaaggaccagcaggggaccaagaaggacggcccggattccagaaggcattggcagtgggatagctggctcatcctgtcctcctgggagaagaggggcacaggcacccagaatgccatcgggagcctggcaggacttgcaggggcagaatgaatggggccaaggagatacctacacaccccgtaggctgggtcagcacaaagggggaaatgtgtgattcagccccagaggggcaattgagtggaggctttgctcggagataa

SEQ ID NO: 470990 - DNA, 717 bp, Homo sapiens
attggagaaagctgtgggagtcttctagaacaatcgtactaactgcacacaccatctgcatgaaccaataccaggttgtattgaccttgtacccgcttaaactgtacaacttgaccttcatggtggcagctccaggggaaaagaaaagatggcaaagggaaggagaggatcatgggaagagccattcttcttatgagaagttttggcaacttttgaaaatggctgtaagaagtgggattccaggcagaactctagacccacctagggcagcagaggcagactgtgaaacccaggcccacagcttttggctgaatccacatcaaacaatgagactgcttcaatcctcatatccttttgttgtgaattgcaagcaggaggcaagatgggcttgtctggtaaatgccacctgtggatcagaatatctgatgctgatcctgctggcccaaagaccaccctttgaatacctctgctctagaatatgcatcatccctgatgtggccttacacatagatattgctggcagtgattcaaatggctgccattgggatgctccaggaggtccccttggttataaaatatcattccgattaccaagaagcaacagaacatactggttaaaagcatgtgctgtacagccagactaagggaatccaagctgactttgctcaacactggctgtgtgactatgggcatataattgcttaaagtttatgcctc

SEQ ID NO: 470991 - DNA, 1023 bp, Homo sapiens
tcttttgggaaaaccaattggccatgtgggattcttttcttaaagttcggccccacatggttcatgtggaaaccacactcccgcagtccccaggctcccctcagcatgaggacagtggatccaaaggcaaaggagaagaaaaacgggtctccagggacagaaaaggtgtgctccggtgggagggacagcctcgttccaggcagcgcttcctccctccctcccgcgcatggtccacgctcaactcattcatcgacagtattcagggctccctgagccgacgcctggttctgtgccagctgctggctactcttctgcaccggggtttccctgggccctccattcccaagaagggggccctcccttgccgcctggggtttaatctccgccaggcctgtgcaccgctgggctgctggtgtgtggtccttctcactcatgtgcctcaacagctggaaatagtgaggcgggaagggggacgtcgagcataaaaccctggcacttctcaaaacaaaacgaacaactccagcttttaatcagtgtagggcaggggcgggagaattgtgtttggtttgacatagacaaagccctttttaggtctctgctttccgaggaatctgtgactgccctttctgaaacggctgcagaaccctgggctggagatgctgggctgttcagcagggcctggggaacagactggacccacttggcgcagggtagggatttggcttttattagccagacccctctgcagtggaaatgatatctattagtctcctcttctgctcttggaagccggaagaaccatagcttttgggaatgtggtccgtcctgccttgagctttgataggtgggctccttcaaagaggagactgcgaatttgagttttaaaaatgaatttctacattatggttaggggaacttgctatgtatgggaccccaactgtgaaagaataaatttgcaaagtgaagaatcctgtcctattcctgctcccagccactgccctgaccagatttttagataccagg

SEQ ID NO: 470992 - DNA, 862 bp, Homo sapiens
tgaagtatctttatgtctagcaggatgtgggtgggaccagataagagaataaaagcaggctgcctgagctggcggtggcaatgcttccctgtctccttctgtactgtggaagctttgctcttttactctgcaataaatcttgctgctgctaactgtttgggtccacgctacctctataagctcttcattcctgaagccagtgagaccacgaacccagcaggaggaacgaacaactccagacgcgctgccttaagagctgttaacactcaccgcaaggtctgcagcttcactcctgaagccagagagaccacgaacccagcaggaggaatgaacaactccagatgcgccgccttaagagctgtaacgctcaccgcgaaggtctgcagcctcactcctgagccagcgagaccacgaacccaccagaaggaagaaactccgaacacatccgaacctcggaaggaagaaactccaaacacatccaaacatcagaaggaacaaactctgcacacaccgcctttaagaactgtaacactcaccaccagggttcgcggcttcattcttgaagtcagtgagaccaagaagccaccaattccggacacaatatgaagtaagttttcctatgtcttttaaaaatatatattaatatatttaataagaatttattaccttttcactaccctatttggtactattcttattcattttactttttatttttaaaaacttttgcagtggtatgattgtatatggaaaggtcaatgaaaaaaattcactcttcctaatctgaaatggcatgtttattttcatttatttatttttactgacatgaccatataagggttagtgaaagaaaatgttcact

SEQ ID NO: 470993 - DNA, 834 bp, Homo sapiens
agcccagggaagaggggagcctgccctcccacaatgtgactgatgttacagaaaatgcgctccaggcagaagacaggctgcttggcatttagctgtgcggtgaggaatggcctgatctggctggtaggtgagtctaatgggctggagagcaacgagcagcggggacgcaccgggagctcctgggacttcaggctcccgtttttcagatctcttagacagagccttgccccagaaaccgtctgtactgagacttcacacaaggccccatctgtgtgtggatataaaccagagcagctgagaaacccgccctcccctctgagacctgggcaaggctctggagcacagaggaggaggctggagcgcatgcactttgatcctccaaaagggagctgcccccacctcagacacccctcccccaaattactgaagcctatccccccgcccccccgcttactctgtgcaagcagagtaagcttcgtgtccatggcaatgaccatggccttcaaagttcctcttcccatcctcctgtgagatgccagggccatgctagctcatgcttattcacaggataccaagagaggtgacgggtggggggctgcgaggcacctgggggccccagctctgaaattcagtgtcccttccacacattccattgctcgaaattcccatttcccatgttctttaagtagatgagaagcctgcttttttgccaactgccacaaggggctggactttcctccctttgaatgtgaccttgaaggtcttgatgcatattgagaagggcatgggagtgattagagaaatgaaagaaaatttgtatttggggttcctcat

SEQ ID NO: 470994 - DNA, 1034 bp, Homo sapiens
ggccacatttgccccttcccctcctggcagcccaagggcccttccaaaagcatatgccagaattggtttctgttgctcataatgaaaacaccctgcctgaaacaaagaaaatgtgatgtgaatgtgtatgtaaaggaaggagggaagctggggggagacctgggggccttggcatctgagatcaggatgttcggctggatggcttcctgcctcacgagccgctgcctgtctgtctcctctgctggatcttccttctcgccaagaagacccctggaagaccctactaccaaccccgcagttactcctgatggctttacctctaaagctgatcctgaggtgactgcccctcagcaccttacctttcccctgagcccaggcgccaccagctcccctgggcctgcagcggccgctgacccatgtcccacctgccctctcctcacagagctgggtggtctcactgaggtcaagaagctgccatctgtgaaccaggaagggccctcaccagacaccgaccatgctggggctttgatcttggacttcccaagctccagaaagcgcggctttccgggccctccgggatccactcctgcctgcttccccagcttcaccttcaccaagcagcatgatctaagtgtccacgaaggctcccttgccaagcgacacgtgcccccagcagcttctaccgtgtaagatgccattacccttcttcctcaccttttggaattcaactcatcattcaaagctctgcctcagtgcctcctcctccataaagccttccttgatttctttctcggaattgctctgcccgtcaccgccccatgggagtctgctcatatcccattttaatgtaaaataatagaaataatagaaataattagaaattattagaaataatagaaattagaaataattagaaataatagaaatataaataatagaaataataatgtaaaaaaaaagaaactctggaggcagactcaagttttatactgggtctggcacatgctggctttaagatgttggggcaattactt

SEQ ID NO: 470995 - DNA, 653 bp, Homo sapiens
ctcccaccctcacccccacctcacttctaagacactcttagctcgcatgccaaagtccgtctgctcacgtctgctctggtctttgggcgccgcccttgaccgagaggaataccgaacgttcccctcccaccagcacccagagttccagtttgtttctggactgtgcacaaagctcagaaacagggaaagaggctggaaggtcgcaaaggaggaagggaaaatgatatttaactgcctcctcaagagagtcaccatcaaagtcaagcaaggttccaaggtcgggacggactatcagctgggctcctggcggcctcaccagccatccgagagcccaagggtctggaccgtttcaggccggtctggcacgagtatctctccaagcgtgctgaaagtcgctccaacaattaagcttgaccctcatccgccaagaccacatatcactctctcctgcccggatccccaagcccacctgaaactcagcaggcccacatactggcagaagggagatctcagggctacaccagactggggagccatctgaagcccaccgtgaaccaaggacacaaactctggtagaaggcatttaacattctctcagacgaagcagaggagcccctgagcctgacgaagaccccctgctccctcgctgaacc

SEQ ID NO: 470996 - DNA, 483 bp, Homo sapiens
gagaaagggctggaggaggagcaggtagtagctctaagcccagtgaggagtagaaagatggctgtcgacgaaccaggaagcaggccctcaccaggcactgaatctgctggcacccttatcctggacttcccagcctccagaattcctggtggctggcagccatccctggcgttctttgtggctgcatcgcttcattctttcttcctcttcacatggcctttgatatggtttggctctgtgtccctgcccaaatccccagtgttggaagagggaccagtgggaggcgactggatcatggaagtgcatttcccacttggtgccattctcgtgacatcctgctccagccatgaggactcctgcttctgctttgccttctgccaggaacaaaagctccctgaggcctccccagaagcagatgctgccatgcttcctgtacagcctgcagaaccacgagccagttaaacctcttttctttataaatta

SEQ ID NO: 470997 - DNA, 821 bp, Homo sapiens
gagattctgcctctttagttgcaatggtagaagaagagagattagagaatctcacatgggctttccactacccctgcccagaagtctcagacatcattccttctcaagtccatgggctagaactgaccacaggacccaacctacctgcaaggaagctgagaaatggggacccagaggccacagaccctgctgaacgctgctcccactttccagcccgggggccactcaagccataccatgggagccacctccaagtccaggccccacatcccatgaggcccagagagagaaagccccctcctagcctgaatttcctgtccaagggtgggcctgtctgtgggtcaactaacagcgagaatagctgctcccaaggaggcatagccttgccctctgacccccgtaggacaggagccccagaatccatgggcccagcctcggtacttgggcagaagaagaaacacccacaaacacgtaaacaaaatagcccacaaacacgtaaaaagatgttctgctccaaaataattcaaagatgcaaatttggtgtctgtgagcttgagaagttctggaggatccaatgaggtacactttccattaggaagcaattgtggctattcaagaataaagtaagaatatatatttttagatgtatatgtactatgtctttcaaatggctactaaatcattaggacatacatatgttattttttttttacctaatataataaacagaactcctgggtgtttcttttggttgagggatgggtggaaaaattcctgagaccttaacagtgcctgaactgattatgtttggggcctgtggg

SEQ ID NO: 470998 - DNA, 1570 bp, Homo sapiens
agctctcttctcttgtctgccaccatatgagacgtgtctttcaccttccgccatgattgtgaggcctccccagccatgtggaacttggatgctcagttgcctgctcagtttatctatcggcatctctcaccacgatggtcacatggaggttcttggagggctgctgaccaaccacagcatagagtcgcttctgaaccagtacccaagaattccaggttccatgtttaagaacagccaaggtcagggactcagtccaaaattctgcaacagcttcctgagaggagagaccttcatggagcacagaaatgctgtagacacagaacattcagccctgcttggtgcaccagggaaagaacacttcttggacaaagcaatgtctaagctgcttacagaaggaacatggctgggtcttcccctggtctttgtctctgctgtggactatgatagtcgagtcttgcatttggcggaatccacaatggctgtcacccaggcaggcctgtctgggaccagtgatgagctagtgctgagggacactgcatgttttctcttttgtacacagaaggtggtcatacctcctctcactatgcccaggcctgggacaatgcaggaggaccctagtggcctgaaatctatgttggcttgtcacttaattgacaatagaagaaatttatgaactggcaaaaaaaaaaaatgctactgcttaaaataaccacaaaccattcgacatacctcacattgaaagctgagcattaccgctcacacaatgacagcatccgtaagagggtgccagatgtgtgtgtggggagcttgcgtgcgtggatctggttctcattctttgtgtagcatcggacccaataacttttttttttttcattttcactggacacttattttattccttcggttttctggccagctgttgttcatggctctttctgtcctatagaatgcagatatagtcattgaaaccctaagttacctagtcgaaaccccaagtgaaaccccaagttacctaggaagggaaggtacaaggacaaggaagggtagggagggagccgcgtctagagcaaggcccatgggggccagcaccctgggtgaccacagccatcctcggtagactttaaacaacaacctactgaatgaatgcatgaaaattgaggacaaaattcgtaatcaagattctacaccctctactaaatattttcatttttgaatgttatgttctagtgggttatattgaatttttattgttttccatttatcaaaagctttatttgccaccttgcatcctagaaatcttaacatagacctgggttatatgataaccatgactgttagtgatagaatattctgtgaggaggaagtgacatcatctaggcaaatatttctagatttggcagaatttagaatcttttcaattttcagtgatgataaattctaaaacgcacaacctagtgcatataacgttttaacttcagcagaactttttatgttgagaagtttacattttgtcatgagtagcattaagcttcgatacatattgctaagctcccttctaaaagagcatttt

SEQ ID NO: 470999 - DNA, 924 bp, Homo sapiens
tgggagccgtggcttggggtcaaagggccctggggaagggaacactttggcgactttgtgcaccctgagggctccacaaatccaactgttgacagcattgtctttcttcatgtgatcatcacagcacagatgtgaaatggaaggaattacccaattttcaggcatcatgttggaagatgtaaggatctgccagggactccctgggggcagaaacctggagaaacaacttatccaaagcatttctttagctgacttccctttttttccctccctgttgtatgaaaaattcatacttgccattaagaggcaatgggaagggggctttgggcagtcatcaattcaagaaacaggattagcatgctggatccatgaagcacagaaggaaggaaatgtaactcaaagaaagtcactgatgattatgtacagtggagacacatgtaatggccgtctcctgacctcacactggcagtccctagaatgctttcctgtgcgtaatgacatttcgctttcccagtatccctgtgtgatacatagtttttcaaaattgcctgtcaatttcatgaatacagaagactaacatcccaaaggaggcaatgacttgctcgaggccccacagtggaaccagggcttgaactcatgccaactgatatgaagtcttaggtctttttgctacgacacaggtgcctctgtatctgcagttggttttgatggcatgtgcgtgtgtgtatgtgtgcgtgcacacacacgtgttcatgttgatgagggaaggaagaacgacagaaggggctaccttttggatgatgctaaaaacgagccctgtctaactggtatctgtgcctttactgtgttggacattagaactattcaaaagaagttcaaatcacttgggagtcaacatctcaaaatacaactgcccctcaaagc

SEQ ID NO: 471000 - DNA, 1741 bp, Homo sapiens
cagctgtgcccaggttcctcgccgcctcttcttcctggaagatttcattattggcatttgaatgagggggatcctgagaaatctaaatatcctccttgaatttagtttaatattgccaaggtactatcacgggatagcgtggagattctcctggaatcctggaaatgactgtcaaggcacctactgcataccaggaagtctatatgtgacaattcaatttacttctcacaaccctggtgttgatgtagttggagagaaaaggcagcatgttcaaggtcaagagctagtgtgggttggtcagaacctaactcagattcaatgctcatgtgccatattgtcaacacgcctgctcatggactattactgtcacacgcacacatacactcatggaaaaaaaaatcaatgcaatttgaatttctcttccccagacgagtctttgataaattgttgtggagagctattgatctcttattgcgatgtgatttttaaacagcattaaagtaaacatagtcttattgtgttcgttttactggataacacttatctagacaaaaggaggcacgaagctgccggagctactcagctttacctctaggaaagatacagcgaatcaccgccaataaaacaaagcaaaacaaaaagctcgccatgctgaacggaatgggaaaattgctctcttgtcactaattttgattgaattgagtcggcaatctctgaaccggttcactgatacaacaataggaaacatttaactgtttcttgcacctttaaacataaatagtaggtttttaagcagtcagaattggctcatgtgataatgggagctgcccactcatctcttcgtgtttacacccagctcttcctgcaatgcatcgcctcttgtctctgccagtagcccagtcacttcacaccctctgagctccagcgactcctcctctgagaaacctcttgggtcctagtgtttgtagtttgtctcatgcagtcctcctaaaaccttgcgagttctcttctccccattttacaaatacggaaacttgggcttataaaaattgatttgtccaaggacacaaagctttccaggtcacaagatttcaagcacagggctctgtggtcctcaggctatgctgatttatcactgtctctccccacacatttcaccttatttgtgcactgttcattgacccagtcactttgtgaattctttgacaggggggataagacttattcatgtctgcatccccagcatctagcataatctttgacataggcagatactcaataaatacctgctgactgcttattgacctctaaccttccccaagtcttggcttcagttttttcatctgtaaaatgagggcaaggcagaatggggctatggcagaggctatgcctgatacatggatgactcaagatgagtcgctttcctcttccttcccttgtaatttcctggctctggcagtgaccatccagggccagggctggctttggggtgtatcctcaggtcagctgcgatatgaggagctgcaggtcaactgcaacatgaggaacatcgacaggcccaaggtcttccttttaaagagctaccatttagtctgagacatatttgtgcctgttctagaattttggtgtgaaaagttctctattttatgaaaggaagaaaagttctctattttactctattttatgtagtacttgggttttgtttttaagttttggccaaataaaagctgacaactctatg

SEQ ID NO: 471001 - DNA, 897 bp, Homo sapiens
gttgctgttgttttgcaggactcattttgtcagttacgctaacatgacacccaccccaactgagaagcacatcagacaacagctactgctaaagtgtgagtccccagttgtatgctgtgtgccaggacttatggatagttgtagaaaaggatgcttgggatcaaagaccagccatacagagccagaggtttcaaagcaggctgagagctcagcttcaaatgctgtcagtcagacccctgcagtcagggggcgccttacaaatgccagctgcccacgcattccctgcttaaaaccttcagtggctttccatcacctgctggctgtagcatggaccaccaggcatctgggttctccccacccatcacttcagggaccccttcccattggggcctttcccagtatgctctggatagccattcttaaagtgtgccctgaggacccctgagatcacagaacctctcagggggcacccaggtcctccattttcctgtttcttttatgtataagaacagatctttttcctatgtacatcaactgtactgcaaccaaagcaacatcttacaacaaatgtggggccagatacgaagatccaactgtcttctgataagtcaggcattgaagaaatgtgcagaaatgttaaatgaggtcattttttcactaaggtttttttgtcttgttttggaaagaaaattttgttaaaaaaaaaaaagaaagaaatacatatatctttcaatttacatttgcagttaatggatttattattatttttaatgaatttgtaaatatttttgtgatttctcagtttttatttctgacatagtaaatattgataactatcacccacataaaagctctttagggttctcattaatttataagcatgtaaaggggtcctag

SEQ ID NO: 471002 - DNA, 2278 bp, Homo sapiens
aaaaatcaataatcagacaacaagatgtgcgaactcgatattttacacgactctctttaccaattctgccccgaattacacttaaaacgactcaacagcttaacgttggcttgccacgcattacttgactgtaaaactctcactcttaccgaacttggccgtaacctgccaaccaaagcgagaacaaaacataacatcaaacgaatcgaccgattgttaggtaatcgtcacctccacaaagagcgactcgctgtataccgttggcatgctagctttatctgttcgggcaatacgatgcccattgtacttgttgactggtctgatattcgtgagcaaaaacgacttatggtattgcgagcttcagtcgcactacacggtcgttctgttactctttatgagaaagcgttcccgctttcagagcaatgttcaaagaaagctcatgaccaatttctagccgaccttgcgagcattctaccgagtaacaccacaccgctcattgtcagtgatgctggctttaaagtgccatggtataaatccgttgagaagctgggttggtactggttaagtcgagtaagaggaaaagtacaatatgcagacctaggagcggaaaactggaaacctatcagcaacttacatgatatgtcatctagtcactcaaagactttaggctataagaggctgactaaaagcaatccaatctcatgccaaattctattgtataaatctcgctctaaaggccgaaaaaatcagcgctcgacacggactcattgtcaccacccgtcacctaaaatctactcagcgtcggcaaaggagccatgggttctagcaactaacttacctgttgaaattcgaacacccaaacaacttgttaatatctattcgaagcgaatgcagattgaagaaaccttccgagacttgaaaagtcctgcctacggactaggcctacgccatagccgaacgagcagctcagagcgttttgatatcatgctgctaatcgccctgatgcttcaactaacatgttggcttgcgggcgttcatgctcagaaacaaggttgggacaagcacttccaggctaacacagtcagaaatcgaaactcacttccttttgatgatggtggtggtggtggtgatgatgatggtgatggtagtggtggtggtggtgatggtgatggtgatggtgatggtgatggtggtggtggtggtggtggtgatggtgatggtggtgatggtgatggtggtggtggtgatggtgatggtggtgatggtggtgatggtgatggtggtgctggtggtggtgatagtggttgtgatgatgatgatggtgatggtgatggtggtgatattggtggtggtggtggtaatgatgctggtggtggtggtgatggtggtgatattggtggtggtggtggtaatgatgctggtggtggtggtgatggtgatgatgatgatgatgctggtggtggtggtgatgattatgatttggtggtggtgatggtggtgatgatggtggtggtggtgatgatggtggtggtagcggtgatgatgatggtggtggtggtagtggtgataatgctggtggtggtaatgatgatgatggtgatgatgatggtggtggtgatgatgatggtggtggtaggtggtgataatgctggtggtggtaatgatgatgatggtgatgatgatggtggtggtgatgatgatggtgttgtggtgatgatggtaattggtggtggtgatgatgatggtggtggtggtggtggtggtgatgatgttggtaatgatgatggtggtggcaatgatggtggtgatgatgatggtggtggtggtggtggtggtggtgatggtggtggtggtggtggtgatggtggtggtggtgatgatggtggtgatggtggtggtgatgatgctggtgatggtggtgatgatgatggagtgtaccaagggatgaactgaggaagcagaggacccttggaggaccctgagggcacagttgggagagatgagagaacagaacaagatggtgaccgttcacaacatgtaactgagttcagcttctcctgttgccattgaagatgttgggtgaccatgggcctctagcacagaaacattttctgtttattccacatctcaacataatgttgtgggaaagtgatagttctactcttcagagatgcccacaagagttggaaaaaactaaatgtcagacagaagtgggcagcccctccctgtggctctgcaccaagtttaaggttgaaaaccagggtgaacatttacctgg

SEQ ID NO: 471003 - DNA, 550 bp, Homo sapiens
gagggcctttgcctctgttctctcctgtgcccacaatactccatgcctggaggccttgcctgtgcaatggttaattttaggcatcaattcatctgggtcaccaggtgcccagacatttcctcagatattatcctggatgtacttgtctgcatctctatctgtggtggacatggaacactgggctgcaacattagcactagactggtgtacacagggacccccttcactcaacaagagcacccaactccccttggacatcccttcttctccccaccttcggtttacttaagacacaggattcagcgttctgtcacttgcaacagaaattgttcatcagagaagcctgacagcctcacatacccacagctccacaccaccttaccccgccatgaaactggaagtttccaacaggcaaactgtatgcagttgaccattgcacgttctagccattgaggacaatgccttcttgtaaataaaaacaaaacagaaaacaaaccaccaatagcaagcacctttgaaggtggcgacatgaccacaggtgtgagtgtga

SEQ ID NO: 471004 - DNA, 2121 bp, Homo sapiens
cccgcgagctattacagaaagcataatgacggtatgtcttctaacattccattagccaaagcaaatcacatgaccaagccccaaatcattgggttggagaagcgtcgtggtgggggccgggggaagaagagaggatatcaacagagcaataatgctaccacaaatgcatgtttttcaacatgtatttctctaaagttggtagagaacgatctcaaaacaggtttcaagctttctggtggtcaaagggaaggaggaaacatgttcagatccataaggagcattgttgagtccatagcttctgccccactggaaagctcttttattcaggtccaagctagaactccatcttcctgccaagtcagacatatcagcagtctctgcagagtggcagaggctctggggctttctcagagaccaggagcaaagagccctgtttccctgatggcagcatcttcaggattagtagaaaagtggaaagggggaccaagagattcagggctagagaaataccatgtgcacactgagcagcagaagtctgaacttaaagcaactgtggtcagaatgactgagaattacttaaaagtatggctctatacccctgtgcaaaataacgcacacagggtgcacttgagtgaggttgcatgcataaagagttgggttcattacctggcacaggggtggaagatctgtaggtgaggcagccttcttgcaaccaagaggcaaaatgcatgagaacggaaactcacacatgaagaatgacctagtagagggtagaaagacagctggattctttagggtagtaccaagtcactgtcctatgcctgggtggcctgttggcagacttcattttttaataattttcagctgattgtattcttgactgatatgaatgttcatttatatctgtatagtcaccgttaatctcagactgccaatatctattcatgtttcagttaccccaactaggttgtgaggggctgacaggcacaaaacttgccttattcatctttgtctttggcacagaatgatgttaaataaatgctgtttgtcaagagaattggattcctggacatcaaggttcatggtaatgtacccatcctctcccctcctctcccctcccctgccctcccctcccgtcctgtgccctcccctcccctcccctctcatgtatctctctgtctctcttcctattttcttagaaatttactctttgtctatttagatgaaatgttctgaaagagggaatataacaagtaagtaaataaattgtcttggtttgataaaacacaggaaaagagggagttttctgatgtgttggttgcatgacaagctttataaatggttttggatttcctgtaactacctctatggcaccctgatttggcctttattggagtaaggtattctctctattcttgtggcctcattgcagatctttctactcagtgggaaccagatataaaaaccaatgcatttaaaatgtgagatatagaaaggaaacagagaacagtttccgagctggcttccattgccttataaatatagcatagttacttgaattccataagaattaaactctgatcttttaaaatgcatgcaaattcttgcagaatatatatgaaaaagtcactataactgtagaggcacttcgactcccttgataaatgggacttccagaccacactttattgagtctctgatttttaataatttgaatcctgcaagatttaattctgcataattctggctgaaatcagcttttgattgagttgtaatggctctgttattgtaaatatctctgcatgctaatgttgtgctggaattcaataatatttagatgaaattttttgccttgagcattatggaagcaagatttagaaatcgggaagtttatgtcaaagcgacatctattttgggtaacctgcaaaatttttaaatgcaataaatggtcatctcaagacaagatttaaataattatgaatcctaaatgtatacgtgtggatcaattataatatgcgttgaattaaatatatgtatattattcatacattttatgaataaaatatataaaaatactttaaatatgcatctttatttaaccttgcaatacttcctgaaata

SEQ ID NO: 471005 - DNA, 496 bp, Homo sapiens
gggcactcggatgagagagagccaaagagcctctcttcttctgagcaggaccaggatgcggaacaagttgttcttgcctcatgtcctgctgcctgtcaaaaagaaatctgtcttggaggaaaagccaattaactcaaacatctttcatttggatgtggattcaggctccttccacctggtgaccctgctctcctctgcccagttggtgggtaggaggagaccctggagaaggtgcaccagcttcttaaccactacttacatgtcactggaagcaactggtcacatggacacacctagatgggaaggagcctgggcaacagagtccctgtctgggcagtggcttctcgatgacagctctccacattggaaaaaagagctcacattttggaaaacatgcctctgccacgacacctcatccaattctattctgctgtatcacagacagttgaggcaggaagattcagcatctggtccttcttcctagtaaagttaaagc

SEQ ID NO: 471006 - DNA, 610 bp, Homo sapiens
aagcatgactgttctatagtgaacaaacaactgtggcgctgctacaccactgggcccgaaggggtggcagagcaggcagtagccagagttcaaagaaagctaaaaccacaggaggggagagggcagtcctgcaggaggaagcccaacgctgcagtctgcgcccgtggagtcctcatgaggacaattttgactgcctttgtcctgatccctctctccactgtggctcaaaaccagctcaaggattcattagctatttggaaagtttatcgaaacaaaatcaaacaaaaatcaggttcaaaagtgagtacagagaacagccgtaattctatctctccagagttcttgtcttccctcctgtttccttcaaacaagccactgcattgctctcccattttcctttgtaaaaatggtatgtggaagagggttattgcagcagcgtttaaatatgaaaacagttgctgcagacaaggccctccagatatgcaacctggcgtttcttcaagagcagattctacatggagaggtgcagcagaagcaatgatgctcaggacatggcactggaccacttgccccacgtctgtgggatcctgagtaggaaccagcattttaa

SEQ ID NO: 471007 - DNA, 679 bp, Homo sapiens
aaaaggaaaacttggtagtttgttcccatccgtgcactgactaatgctcagcaggcaccgggtggtaatgacctagggaagggggtgtaggcacaggctaggatgtgggcatcctgggtcttcacagcctctgccaggatgaggggcctgggatgctgctttgtgtgcacagaggaaaggtgtaggaatgcccgtgctcgctggcatttaatttaccagttgcctctgtgctggggctttggcagattctgctggaatctgaaagacaggctgtcataccgagggcctgctgccgactctgaaattgagaaacttggcagatatgcaaacaacatacaggggatagatctccagcttccccgacagggctcccttgcactctcctgccttcattttgtcgaagtcgacctcacccgcaggtcaggaaggcacctgcttagtgatgagccctgtgctaggttctggaaaggagcaggggacacagagatgaatgagagctccccttttcctcaagaagtccacactctctcattaggagagatggatatgccattcatttatgttttaagcatatactgaataccaaatactgtggctccataggactgggcacagtccctatgttgaaaggcaagtgaaaaaaacatttgggtcagtagaatatgacaatcagttataa

SEQ ID NO: 471008 - DNA, 506 bp, Homo sapiens
gagagcatcgctatcttcttgtggaggaaatgaatatgcaaactcctttggtaattctgttgtccactgaagttcaagaacctcttgcacagtcgaatgccagctccttcctttgtcttcctgaatttcccacaaccctccccctcctcagttcctacacccaatggctgacttctacagtcatcaagccccatagtagctgtggcttcttctggctcactctcctcatctttggaacaggggcaatgcactgcccactgctgatgaggtttgaaagaactaaatgggttaacatcagcagagatctcagaacttggccttcacatagtaagaattgggcagatgtaagccatttcccccactgctattcttactccccagaaatgtcccacatccaggaggctgaaaaactgggtactatttctctccacctcttggaaatactgagataattacatttctcttggaaaatatcaggtgatctgcattcactggggaaatggtgc

SEQ ID NO: 471009 - DNA, 607 bp, Homo sapiens
ataactaactggccgagactagtttgcagttgtcatgatgttgttgttgctgttgacaacggtgatgataatgtttgatgacgatggtgatggcgatgacagcaatgatggtgataatgatgacaatgatgataatgatgatgatggcagtgatgatggtgatgatgaccatgatgatgaagaagatgatgatgaaagtgatgacaatgatgatgacgatgatgatgatagtgacatgaggatgttggcaataatgataacaatgatggtggtgatgatgacaatgatgaaggtaacgactgatgatgatgatggtgataacaatgatgatgatgaggatggtgatggcagagatgacagcacagacaaaggcacaggactggggcacagcagagtatgtttagcaaactacaagtgtttctggatcttaaatgcaggacgtgggaagcagctccaaggtgtgggtcttagctagatctaagccaatcagtcttgtccatggattttgcatcttaactagagtgaagtctttttaaagaaaatggctgggactggttgatcctggcagaagtgcttggagacagtctgtgagttcctgctgcccaga

SEQ ID NO: 471010 - DNA, 899 bp, Homo sapiens
gtcttgagcacacaaccaacaattatgggggaaaaaaatcttgattatctgagtgtcagaagaaagaaagcagaggccaacaggagcaagactggctgctccaactccagaaatcttggcaacataagcagcatttcaggggatgggcaggcggctttcttctgctggctggctgacagcgcaggtgctgctggagcagcaggcactacagagccagtgttctccaatgtggatgccagctccatggggaaggaacttcggggacatcgcagtttcaaaattgggcactacgccaaaggcccagaacctgcagaggaagattttagcaaaccttcctgccattatggaggcaccgtgtcctgttgttgggcttgtatctccttgagctcatcctgtgatgaagagtggctacattgcttgacacatggtgggctttatgcagtcagtatccagtatgcagtctccagatgtaggcccaggttctggatcatggtgccagcatctggtgttggtgttggccttcttactgcatcttcccatagtggaaggcagaagggcaagggaggggcgaacactgtgccctcatatcacagaagagcagaagtgagtggatctactcctacaagcccttttaataatggcaataatcctttcatgagggcagaaccttcatgacataaacaccttccaaaagaccccacctcttaccactgttgcactgaggacttctaaagtctaactgtattctttagttcctgtccctttctccatctttaaagccaacaatggcaggtcaagtcctcactttgcatctctgtgacctctcttctgtcattgcctctctctctttctcttaccatagctgggaaagttctccacttttaaggacttgtgtgatt

SEQ ID NO: 471011 - DNA, 670 bp, Homo sapiens
caccatcacacatcagtcagcatggctataattaaaaagacaaaaaacaacagatgctgggcactggaaagggatgtgaaggcaaattgcatgttgcagggatttgatatacagattattttatcaccagccaaggtgcttcactgtgtggtggcaacaggatccatgatggtttgtgtgttccagcagcagcggcagcatggtgaggtgcacactcatcagctgaggctgggcactggcaggcacagttgtgccagcctccataaatatgtttgcattggtggcagtggcagtgtggcacttgtggtagggggtgaggctgctatcttctgtgcatgcattcatgctggcagaggaggcatcccagctgggcatcccgggctttacagcaaacaggcaccaccaggttggcaccccacgagaggccagcagatggggttgctcaggtcgtaccagccccatctcatgggcaagattgccctgttcttttcaggcccctcttctgcaggtttgctacagttggctggaggtccactccaggccctgtttgcctgggtatcaccagcggaggctgcagaacagcaaagattgctgcttgcttcttcctctggaagctttgtcccagaggggcacaggcctgatgccagcaggggctcttctgtatgaggtg

SEQ ID NO: 471012 - DNA, 1340 bp, Homo sapiens
ctgagctatttgctgcccagacttctggcccatagaaacaataaggtgataaaaagcgatgcggataaaaaccaaccccaaaaacccaaagctgctgactcagcagcagcaagaagaagctcttgacacatatttagcgaatgaatatggtggtagtttagaaatttatgctttagaagaatcactctatggaaaattgacactggagaaacctcagagcttcagagtcatctttggccttgctttccttctctttgttcaactggccaccaaaattggtcaactgacctctgaaatgactcatcattttctacctctgatttctcccgagctcatctcaaggggcatctcctttgtgggtcttttactctcttctactgccactacaagtattcttgccatactaactctctctaccttaattcttatccccactcctcacccctccttaccactctcagattcttgactgaaaacccaacctaaactggcttatgctgtttaaaagagagagtttattggtacatatgagtcatatgtgaaacagcctcaactgtgcctgaattcatggctaaaactacacaaccaggagctgggttcttgatactcatttattggatctgcttcttcaatgttggctctattttgggacttcatatagttaataggtgcctgtcagcaactcagagatttaaatccaggacaaaaaaagttagagtctttgtcccagtattcccagaaaatgccctgacagccaccaggcccagactgaattaggttaccagcctgccttacactgatcattgtggccaggaaaggtaatactctgactgaaagaggttcacccccagaactgacgattggccctgcccagatcatattaattgagaatgggagggggtacatccttaagcaaacattaaggcagttgccagaagagggaagggaggttggagaggcgaagggcaaatagacactatagatactgtatgcatctccctccttagactgggcatattattcagacactgtggtatgtttgcattcccagggctccataagatgactacaaaacccagtatcacctcaagtgtaattattcagtagaaggaaaatttattcttttactctcaggcccagaaaaagcaaggattaatactggttatcatctttaaactgtcatcatataatgtcaggtaaaaaagtgaatcatctccaaatatttgacattaaacgtgcagattgaatttgaagatgctctggagtttttctaaaacagtgctatgtacatttttagaatctgataaaaagctgtcaactctctccagaaaatgtacatc

SEQ ID NO: 471013 - DNA, 504 bp, Homo sapiens
catcaaagaccaaaggtagataaatccacgaagatgaggaaaaaccagtgcataaaggctgaaaattccaaaaaccagaatgcctcttctcctccaaaggatcacaactcctcaccagcaagggaacaaaactggatggagaatgagtttgacaaattgatagaagtaggcttcagaaggtgggtaataacaaactcctccgagctaaaggagcatgtgctaacccaatgcaaggaagctaagaaccttgaaaacagaattttatatccagccaaactaagctccatgagtgaaggagaaataaaatcttttacagacaagcaaatgctgacagattttgtcaccaccaggcctgccttacaagaggtcctgaaggaagcactaaattggaaaggaaaaactggtaccagccactgcaaaaacataccaaattgtaaagaccatcgacactatgaagaaattgcatcaactaatgggcaaaataaccagctagcatcataatga

SEQ ID NO: 471014 - DNA, 953 bp, Homo sapiens
gcggcaaaccaccatggcacacttatacctatgtaacaaacctgcatgttctacacatcatcactcctctgaagtggatgagatgagcctgcacactcgacatactttctccagtcaggaggccgcgtgttacactgaaggctgtcttcagagaattcccttttccagttgttctctgttgcgggatatggatcctgctcagattacctatagtagtttgtcaaactcaagtgaaagtgtgcccagtaacctgaaacgtaattctcaggtcaagagatttgaacttatttatagactatcggcgctcccttacaaccccttttctcatctagaggttcaatttccagacctggcacacaaacaagataaggcggtgtttggggcctccagccacttggatacaagcgcattcacatgactgtcaccagcagattaccaccaattattactaacttccaggttgtaaattgctcagcaaactaaaaaataaagctgtaacagttcaagaaaactgttcatcttttcccgttctagctttctctgcttcttgtgggggtatactcttattctatgctttctaggtggtatatttgttctcagtgacatattcctgcattaatggagaaatatatatatatatttatttatttgattatgtgatttttattacttcttgtctgttccatactatttcttcgaggccttagagaagaatgtagccttgatggtggagaatgggttaaagtttggtgagaaataagatttaaatgtcaggaggatgggcaggaggaggggtctgaacctaaagggtgatctcctggttggtgagacctggtgaaaaatggtggcttggaaaaaattcaggcatgtatgacaatctttgtgtttcctcttttatcttgttgtagggtgattagtaatcttagccactagtagtgatgaaaaaaaccttc

SEQ ID NO: 471015 - DNA, 1008 bp, Homo sapiens
cctgacgtcttctgagtcgttactgaaatggtcctgctctggtgtgctgtggaacgctgacgcctcatcatgcagcacgtaacaacatttcagttaacaatggactctatattatggtggtcccatcagataataagaaagctgaaaaagttttatccctatgacatcattgccgaggtattccagaagaaggtattgttatcacaggctaacagctccatgcatattcttgtccctgaagacctttcagagggacaagacatggagatggaagacagtgatattaatgaccgtgactcctctgtggccgaaggctcgagagcccatggcaaaccactggtgaaggaccttgctgaggaggcgatgtttgagcagagacctgaacaaagtagagccagcgagtccagtccgtggctgctgactctttacagcactctacttggagtctgtaagccgcccggactttcagccggactgacaagtggagtatctgtgtcagtgtacgttactcatccgtcgttgggtcagggtctgcgggatggacccccgcaatgtacagtgaaacagctgcctcgttcacccctgcaagagaagagaggtttatttggtggagaaattgaactagaggctccatactgaaggacacccaaagcatagcaggagagcaagagaggctggcactaaaatagagctagtaagtgaaagtttaaatcttcttcatacataatactataaaattgttaatgtcttaagtcgataagaaatgggagtataactttataaccaggtgggttagtgtcagaaaaaaaaaacagccaaaaattttagaagagagggattcaggaaaaggggaggtgaggaagagaattgtttttcattatagttagactttaaaagtgtacgtgtattactttgataaaaaaaattcacagaaaataaaacatggtaataaaggctacctgcctaaataaatggaccaatgtttataatactgtggctagcttctta

SEQ ID NO: 471016 - DNA, 841 bp, Homo sapiens
cggacccagaattcagatgatggatgttggagggcttttctgacaaagccaaatgtggtcgtgatgcaagatatttcctggaccccttcacaggacttgcaacaggggtgcctcatttactcaacccaccccgtgcaaacccttgcgggagggagcacacaggtgagcgagtgcgggatccggccagctgcttttgggcaccaacaggagcaaactccctgtgggcctcgtggcagcatccaggtgggggcatggctggctccaggaattcaaagagctgtaagaactctttatctttctatccgtatttcaatttggactcactctcagatagatgtggtccaatacagcagcaagtttcccaggcaactgtcaacttacatgttccttggagactgacatgcaagaaaaataaaagtatgtgttttgccaaatggcttcagtgcaagacccagcccagattcttattaacccagtttggatcgtatactgatttatggactaattacttgtctatgaatggagaactctgactggtcagatatgtatgtgcacactattgccaatgggccttggaaatgtgttcagtcacaccagaaccagtcaatgatcataataatggtaaatacatctctgaagaataggatactgagcagaccagaaataaatacacctgatcttcctgagcctgaatcttcacattaactattttaagaaaatttaggttacaggattttataaatttatattaaaacatatatttaactaaaacctcagaagtttcttctgcatttagtcataccaggtaagtctcccgctatccagtgctagattctatatt

SEQ ID NO: 471017 - DNA, 689 bp, Homo sapiens
cattagttaaggcaggaacaggccattttcacttattttgtggtggaatgtcatcacttaaggcaggaatgggctatctggatgtgcaaggtgaggtgctcatggctgcctgcatcaatcggttgtggttggatggaaaggagggttctatcatcattgaacagcattcaggaaatgaatactgaaagtttgggtagagatacaaaattgattggaaatatgtggccaatttacatgatctttgcgcagcatgccattcatccctatagaggccatatgaatccattacgaaccgaattgggcttactggcagttatacccttttgcctactgttatcccttgtacctctagcaagtaaaggaaacgatagtgagaaggaagtcaaaagttgttttatcaatgtaatttactctcgtgcagacaaaaatcaggaaatggtcagacagctagattaaggggattatgatatatttatatttctatcacttaaattcctagttattcttgaataaatataatgagaaatattttggcatactattattagcctatgttaaccaatggaaacatattataatgacactttttcaagacaaaactgactgtgaagattaaagtctcatttattgtacattcatttcactagtttgtgtaaaacttggaaaatacatcaaagtaaaaacagatt

SEQ ID NO: 471018 - DNA, 874 bp, Homo sapiens
acaaaaaccacatgattatctcaatagatgcagaaaaggccttcaataaaattcaacaccccttcctgataaaaactcttaataaactagaaggtatgcgctgcaggctgcgacttatcaggtgctttatagctccctacctgctatgtgagacaggaacaccagatgaggctgaggactggatatttccctctcctcctatgaaagattccgctctggagccaaaaaaacagtttttcttggcgtgtgtatgtgaaatcctggtggaattccttgaagtaaaatccatgtctcaaaatgaccatgtaagtgttcagtttgtggatccagacgcttctgctccagagcagtggccaaatgacagaaaatataacatgaatatatttttgaatgaatcaaatgaagaagagctagatttaattgggttatggagtttaaggagatgggtaagtaaatagcacatattttggcttttatttcacagcctaaaagggtataaagatatagttagtcctttattcatgtattaacatatataaatatatactgtgttgattctggttgaaacggctggttttaacctgaaaaatgaatgaaaattgattttaatcttggctcaccaaacttagtgaagatatttaggtaggtttttaagatcgtgtttcagcatgacttgcaaaaaagtcttttaaataaaagtcctactcaaataaacttttttcttggtattttcccctaattattccagtttttccagaagcttctcgttgctctaaaatctttataattttcagtgtacacgtttgttcatggcaacgttactcttcatatttatttatttatttatttatttatttatttatttatttatttc

SEQ ID NO: 471019 - DNA, 3123 bp, Homo sapiens
aaccaggctttatatgcacgctccacaacagcagtggaacagaatgtacacaatggcacatatgcaggccaaacacgctgacaacaggtttctcaccattcctcatgtggggccaagacccttatttctaaagagttgtgatgataaagcatctgctgtttgtggtgatcacaaagcagcagataaattcattgatgatgaaaatctgacattagaacaagcttataatgccgatgaaacatcactatttgggcattattgccttggccagacactgactgcagctgatgagacagcctttacaggaattaagcatgtcaaggacagaataactgtgctagtaagtaataaatgtgctaatgcaacaggcaaacataagtgtaaacttgcaacgatagaagtggatgctgaagaagtttttaaaattaataacaagtgtccatttgctcattcattgactgatggtgaaattgccaaaatgcttctgaatcaaggtgataatgataacagagatgatgaagacaatggtgttatcactgcagaaaaagcgcctagagataacgatatattttgtatatttgtccccacccaaatctcatgttgaatttgcagccctgagacacaagccaatcagagactgagacttcatcagaagattctagaaagcccctcttccctcacaccttatcaccaaaccaccaagaaccacaccaatagctgaacagagaatgataggactgcaagatgcagacactctctgaagaggagcactcagggagggccaagataaggagggcagacggaaagaaagacattagatgaatttcaaacctctggtatctgtggctggaataaatattaaatacagcctaaatcctcatcaaaataatataaatcctcacactaaagatctatatatctcagtttcctattacctcatataacatactcaactttcaactaaaaattacaaggtatgccacaggcaagaaaaagcacagcctgaagagacaaggcaatcaccaaagccaactctcatagaacactaattttgaaattatcagatagaaaatttaaaacaaatatgattaatatattaagggctctgtattcataagggatctccagagaaacagaacaaatagggtatgtatgtatgtatgtatgtatgtatgtatgtatgtatgtatgtggagagacagagaaattttaagaaatcagctcatgcaactgtggaggtgcaagaccaaaatatgcagtaatagacagcaggctggagatctagagaagagtcaagaacaaactccaaaggccacctggtgtcaagattccttcttgttcaggggaagtcagtctttgttctgtgaaggcctttagctgattggatgaggcctatcgacattatgaaggataacctgctttactcaaagtctactaacttaaatgttaatctcatcctaaaaacgctttcacagaacatccagaaaaaggtttgaccaaatatctgagccacatggaccaggctagctgatataaaattaaccatcgcatgtctgccccttgtcaatgtgccacccatactcatctccttacatcatacttaatctacaaataaaaaaagagcaaattcatactttcacctaacatgatataactatcctgcctacaacaaaaagtgctctaagtctttccccggaaaatgatgcaaagtccttaacaacatttaatcttttcctttatagcctataatttaaatgcaatgtaaagttataaagcctataacttaaatgcaatgtagatatatgtacaatattcaaatacatgatgtacagtcaatacattttatgttacataataagaggataaaggtgggtagaaaacaaagatattgctgcacacatatgcaacaacatgcttttaattaaattttaaaaattcatgtaagttacagctctagtttctgtaactggtcatgtgattgttagcctttatttataactatctccttccacccattccatatttccctttgtcctcagtattcatcacggtttattaactggtggggtgacccaaactaggcaaattcttaaagggtttggaccaccagtagtcctgtctgaactgcattgtagtatttcattaaatttaatcacagggtgctatggtttgaatgtctcctccaaaactcatgttgaaatgtaatatcattgtaacagttttaggagggctgaatgataaaatgtgtaaagcaccttgaacagtgccttgcatatgttcatattcagtggatattaactcttgtttcattgtccttatatgctgaagaaaattgagatctactctcattattctcaatgacatgaagggaggctacataaaaattagagaggttaaagtgtgaagaaattacttcacctattttcagcttgattttcatagctatacaagggacagagatagatgatgccttccagttctaagattctattattccataaataagtttacctacaagtaaaataaacaagtcatattagacatatttctaatatggatattatctattatccaggatatgatacactcactcaaaacaaaacaaaacccaacacaaaacttaaggcaaaacagacacacatgttatttccagaatcatgtggataactatttcaatcatcatttttatcttttacaggtataataaataccatagtattatagcaagttgtaacacttgggaaaatacagagtttattgatgtatttcgcagatataagaacaccttacttttataatttgcatgttaagcaagacctgaggcgtgcctaaatctttcatcaacaattaaggtgaagtaggttaatattttcccagtactattttagattccttctctccgagctatgtactaacagccattcatcaatatgcttttctttttctttttatatataatagataaaaattcaacaccaatttgtctgtaagatgactgttattgcccttaagctatgcctctggtttgcttttttaaagttattttaaaatatattcttggcaacattttcatttccctgggatatagcttaggtatgcctttattaaacattaatgagtcat

SEQ ID NO: 471020 - DNA, 1972 bp, Homo sapiens
ccaccatagaaaggaccacaaccttatcatctccagtgtgtggctgcttagcaaggacagtggaaaggccagtatgagagaagcagaccaagtttacccaccctacaatgcaagctactgggctttactgaccctggtagggggggaaggatggttaagccattctaagtcacaggatgagatagaaggtcagcaccagatacaggacataaagaccttgctgatgaaacaggttgcagggaagaagtggctgaaacccaccaaaagtaagatggccatgagagtgaccgctggttgtcctcactgctatactcctatcagtgccatgacagtttacaaatgccatggcaacatcaggaagctgcttcctgctggtcaaattttgggaatccaaaaacttttcgctttttaccaccttcatgtcttaattgtaaattcacagtgtttagtgaatgtaattgttttcaaatttctatcgttccacagcaaatgtcattagtacaaaatagaataaatgggacacagcataaacaaaaccctctgattctatgacaccatgatttggccaatcatgaaaaaatatttatattcttttaaagtaaagcagagctagagaaagaaaagcaaaagtttctttgaaagaggagccagcctgaagttgttataaattaaaacttcaccatattttagaaataaagctattgtagcatgagaaaattgactattcttgaacttccctcaaaatcttgaaacagagtatggggacaaccaagcttatttactattttaaaaacatgttggtagaacagaagtgaataccctttaaaataaataaataaataaataaataaataaatacattctaggctgtcagaagtatagcattgacaatatatagcatataatatagttaacacagatgttaaaactagccaacaaggaatttgaagccaattataaatgaagttgatgatttaattaaaaaaagatgaatatgatgagttaggagataggaatctcagcagagaaatgaaataatgtaaaaaagaaccgactagaaattatagaataaaattattatctataaaataaagaattagtgaatatgcttaacagtagattaggcactacagaagaaatgataaatatataaaaattatcttaattgaagcacatagagaaagagtctgtgtgcagacagttattctaaattgttctaaacatgtttagattttataattactttcttcttttccatgtttttcacatatatacacatgtaagaccaattctttaaaaaatagattatatcaaagaaactaatagatttttaatggaagagaagaagaaaactaaagaagataaaaattgaggaagaagaatatttgaagaaataaggtcccaatatcaatttttatcaagaatatcaactcatatgtccatggagctcagcaaatttaaagcatgataaaccccccaaaattataactaggtacatagtagtcaaatgttgaaaactgaagtaaaaaggcaaaccttaaagtcagccaaaaagatatatgatacatttaaaagagataaaactttaaaaatcttgcttatcacaatgatgcaattaaggcaaatatgaaaagctattcttagaatgttcaaagggaaaaataaactgtcaaaggaaaattctacatccagcaaaaagatacatcattggtaaagatataatagtttcactctgtttaggacatggaaagacccaagtgaatgtcattattccagtagcagtaagaaaatagctaaacaacatacagaactgtgttgtttgttttaaggtaatcagagatatgaagtcatatagcaataagtattttgaattccaaagggtgacaaatttctcttggaaaacatggaacacgggaactgtttcacctttggcaaagtactggaagaaaaaatgaggataataaaatcatgt

SEQ ID NO: 471021 - DNA, 614 bp, Homo sapiens
acatcacacactagggcctgttgtgggggagctcttagatgaggagcttaattttgagaaaagaaatctggactgtaagaaacatgggatcaagcacacaacagaatagaaggaattccaagaataaagataaaggagcattcccatatggaagatttcaacatgagaagcaagcaacgtggctaaaatggattgacagaatggagagtttcaagaggctgacatacaatgattttgccctctgtgcttgccaccagaggtttggctacaactcagcttcatgtcttccctctgctcaagaagtcttcaactcctgtgtgtttccactgaccctcttgctccacaaactgagcagcttgggaacacttgacagggtatcttgtggaagaaaattccaagcagcaaagcattcaagaggtgacttaggtgctgctaaaggcattcagtttcataaaggaagcagagtataaaagttcagaaaatttgcagtctgatgatgcagtagaaaataaaaacccatttttttgaggggaaattcaagccagctgcagaaatttgcataagcaatgaggagccaaatgttaatccccaagataatggggaaaattgtctcc

SEQ ID NO: 471022 - DNA, 708 bp, Homo sapiens
tcatcagttaaggttatttttacttcttttgtggatcttcagttacttcaggccatctggatgtatacgtgcaagtcacaggggatgtgatggcttggcttgggatcagagacctgacagttatcatccttgtggcatagagctatgctattattgcagcttctcttgtagttcactgtggccatgcagtttattctcaccaatggaaagtcccgtcagaccttgagcaatgccccttctgaaacaggaattcactggattactgtgacttgtcccgacttccttgcaagcacctgggggaagggacggctcagtgggcacagctacagcagacttaaacattcctgcctgccagctctgaagagagcagcagatttcccagcacagtgctcaagctctgctaagggacagactgcctcctcaagtgggtccctgacccccgtgcctcctgactgggagacatctcccagcaggggtcgacaaacaccttatacaggagagctctggctggcatctggcaggtgcccctctgggataaagcttccagaggaaggaacaggcagcaatcattgctgttctgcagcctccgctggtgagatactcaggcaaacagggtctgaagtggacctccaacaaactccagccgacctgcaccagaggggactgactgttagaaggaaaactaacaaataggaatagcatcaacat

SEQ ID NO: 471023 - DNA, 562 bp, Homo sapiens
ggagctgcagactggagctgcaaaagtttgctgcaggggcaggcccttgtggaaaatctctgctagggcaatgcggaagggatatgtggggttaaaacccccatccagagtccctactggggcactgcctagtggaactgtgagaagacggtcactgtactccagaacccagaatggtagatcaacagacagcttgcaccgttcacctggaaaagctgcagacactcaatgccagcccgtgaaagcagacaggagggaggctgcaccctgcaaagccacaggggcggagctgcccaagaccatggaaacccatcccttgcatcagcatgacctggaggtgaacctggagtcaaaggagatcatttttggagccttaagatttgatttctccaggattttgcacttgcatgggttctgtaacccctttgttttggccaattgctcccatttggaaaggctgtacttacccaatacctgtacccgcattgtacctaggaagtaactatctgacttttgattgtacaggctcataagtggaagggacttggcttgtctcagatgc

SEQ ID NO: 471024 - DNA, 575 bp, Homo sapiens
aatatccagcagaggagaggatgatattactcccaatatcgcaagggctgtataccctccttgtaatattgttcctaatatccagggcggaagacgacaatattactcccaatagcgcagggggtgtacacctccctgtgatgttgttcctcgtatttaggggaagagaggataacattgcttccaatatcccagggggtgtacacccccctgtgatattgttcttaatatccagtaaaacaaaggatgatattactcccaatatcacagggaatgtacactcaccctgtgatattgtttccaatatccagagggcagaggatgatatcacttcctatatcgcagggggtgtagaatccacttgtgatattgttaataatatccaggttctggaagctttgtcctgtcgctcttcacaataagccttgctgccgctcactctttgggtccatgccatctttaagagctgtaacactcaccacgaagtcaagctaatggtctatcaatcttatttattctttcagatgaccaacttttgctttctttgatttttttgtatggatttttgcatctca

SEQ ID NO: 471025 - DNA, 1378 bp, Homo sapiens
tgcagaagatgggtgatttctgcatttccaactgaggtaccgagttcatctctctggggagagtcggacagtaggcgcaggacagtgggtgcagcgcactgagtgtgagctgaagcagagcaaggcatagcctcaaccaggaagcgcaaggggtcagggaattccctttcctatcaaagaaaggcgtgacagacggcacctggaaaattgggtcactcccaccctaatactgcgctttttcaacggtcctagcaaacagcacacaggagattatatacgtgcctgtctcggagggtcctacgcccacagagccttgctcattgttagcacagcagtctgagatcaaactgcaaggcagcaaggaggctgggggaggggcacctgccattgccgaggaggattgagtaggtaaacaaagcagctgggaagctccaacagggtggagcccactgcagctcaaggagacctgcctgcctctgtagactccacctctgggggcagggcatagccaaacaaaaggcagcagaaaactctgcagacttaactgtccctgtgtgacagctttgaagagagtagtggttctcccagcacgcagcttgagatctgagaacggacagactgcctcctcaagtgggtccctgacccccgagtagcctaactgagaggtaccccccagtaggggcagactgacctctcacaaggccaggcacccctctgagacaaaacttccagaggaacgatcaggcagcaacattcactgttcaccaatgttttattcttaagcttattatcaataatatgccttatatttatttagcattttatactttacataacacttccacattccatgaatcatttaatcaccacctcaattctgtaaggtgtgtacacccctctgcgatattgttcataatattcaaggggagagaaaatgatattactctcgatatctcaggggatgtaaacaaccctgccatattgtttgtaatatccagggagggagagggtgatattactccccatatcacagaggaaaatgtgagaatgatactacccccaatatcgcagggagtgtacacgccgccccccccccatgatattgtttctaacatccgcaggggagaggaagatatcagtccctatattgcaggggatatccattccccttttgatattgttaaaatatccaaaggaaatgatgatattactgtcaatatcggagggggtgtaaaccacctctgtgatattgttcctaatatccagtggaaaggatgatactcatcccaatatcaaagggggaatacacttcttctgtgatgttgtttctaatatccaggagggtaaaggataatattactcccaatatcgcaggggg

SEQ ID NO: 471026 - DNA, 549 bp, Homo sapiens
ctctctgagaaacacccaagaatgatcaataaatacaaaaaaaaaaaaaaaaaatctatattgtgggcacaatctaatcattttctagtgaatttaaagcagacagaaaaatgtgaaaaagagagatgggcctcacctcccagcctacatctttctccagtgctagctgctttctgccctcaaacatcggattctaagttcttcagttttgggactcggactgggtctccttgctcctcagcttgcagacagcctattgcggtccttgtgatcatgcctactgtagccattccctggctactgcttatgttcgctcacctccctggagctctacctacaatcagcaggtggcaaagccaaccaggcctgtgtgcttcctttcagggtggtgaggtccctcaggcccagggtacatgtgcacaacgtgcaggaatgttccacgtgctgaccagaagtatgtaaattgtgcagctgttggatgaaatgtttataaatgtctgttaggtctatttggtctatagtgaagatcaggtcagatttttttatgtg

SEQ ID NO: 471027 - DNA, 580 bp, Homo sapiens
ctgcagcaaaccaccatggcacatgaatacctgtgcagaggagtctctctccatggccatcctcaccccaagcccatggcgagtgctgcttagctactgccaatattcagtcaaggcccaagagctcctcagtcagtttgtggttaatgctgccagtcctgagtctgtcccttcaggacagtgggcttcccaaggaccagagtcacagccattcctgggttcaggctctaagaatttggaattacggtattgcagccagccatgtaggcttcatggagtgaccttggagctccaaggatccctggggtcagccaatgatgatactcttgaagaatttctgggaaggcatgctggccctgtctacaattcccttttcctggcactctgtgtaaataatcagggatgcacctgtctcattacagaaaagcgtatagagaaatgatcagtgtatgggttttggattttaagagcaaaatctattttgcagattggtcctgctaaggacagaccacagaaagctcaaggtaacatattaataaatttgctgcaagaaataacacatggcagtaatttgcctgaa

SEQ ID NO: 471028 - DNA, 1117 bp, Homo sapiens
cagcagctggagatcatgggcttggaagaagacagaaagatatgggaaagtttgaaacttcctagagacttgttgaatggttttgaccaaaatgctaatagtgatatggacaatgaagtccagggtgaggtggtctcagatggacataaggaacttattgggaactggagcaaaggtcactcttgctatgctttagtaaagagactggtggcattttgcctctgccctagagttctgtggaactttgaacttgagagaggtgatttagggtatttggcagaagaaatttctaagcagcaaagcattcaagaggtgacttgttttttcctggaagtgtatagtcatatgtgttcacaaagagatgatttgaaatggaaacttatgtttaaaagggaagaagaacatgaaagtttgaaaaacttgttgcctgaccatgtggttgaaaagaaaaacccattttctggagagaaattcaagccagctgcagaaatttgcacaagtaacaaggagctgaatgttaatagccaagaaaatgtagaatatacctccagagcatttcagggatcttcatggcagctcctccgatcacaggcctggaggcctagcaggaaagaatggtttttttggtggatcccagagccttaccactttgtgcagccttgggacattgctccttgcatctcagccactccagctctagccatggctaaaaggagccaaggtacagctcaggctgttgctccagagggtgccagtcccaagtattggtggtttccatgtggtgttgggtctgtgggtatgcagaagagaagagttgaagattgggaacctccacctagatttcagaggatgtatggacatgcctagatgtccaggcagaagtctgcggcagggatggggccttcatggtgacccttgacttgggcaatgcaaaggaaaatatggggttggaaggttggaacccacccaaagagtccccacactggggcactgcctaatggatctgtgagaaaaggaccactgtcattcagacccccgaattggtagatccactgacatcttacaccatgcacctggaaaagccacagttttagggtacatgtgcacattgtgcagg

SEQ ID NO: 471029 - DNA, 817 bp, Homo sapiens
ctcctcacatcccagatggggcggcggggcagaggcgctccgatggaccttcctccttcttccggaaagaatcgggtcacacactgacttgaagaatggtgtatgcagggatttttctgagtggtggaggtggctctcagcaggatggatggggagctggaaagggaatgaagtggaaagattatcttcctctggagtttggccgtctcctgcagccaatctccctggctgtccccagcggaactcctcttgacattcagatgctccttctcttctcctccttctctaccacaccgctctgctgctcttctgctcctctgcttgaccactcatggaacctgggagccgcagtttccaggcttgaaggtagggcctttgccagtgaaccaccctcttctacccagtatttccctgcttcctgtccataccaacattgcctctctaaacatgataatttggcagccaagccaggtatagacaatctcctgatggtctacagatgtcacattaaagtgttaattgagagcaggcaccagggagaggcaacttcccagataaaaacacttgaaattgataataaaatctcaggtattgggtgggacactggagaaacagggatgaatgagacagacaaggtccctgttgtcacagagctggtagcctagtgacaacaacaacccaagaaattaatggaaataactatgataggggaagtacgggatgctatgggggcttattgaggggcacccaacccggacttgagggtcaggggcttctcaggaagtaatgtttacggtagccttcatcaaggctcttt

SEQ ID NO: 471030 - DNA, 1682 bp, Homo sapiens
gccaccaccgctattaatatgggctttttgccttctgccatggttgtgaggcctcccctgtcatgtggaacttctgacaatgcaatagaaaagaaaaacccacttcctgaggagaaattcaagctggctgcagaaatttgcataagtaatgaggagccaaatgttaatggcaaagacaatggggaaaatgtctccagggaatgtcagaggtcttcacaccagcccctcccatcacagcctggaggtctaggagaacatgatggttttgtaggcagggcccagggcccccctgctgtgtccagcctagggacttggtgctctgtcctccagttactccagccatggctaaaaggggtcaaggcacagcttggaccatggcttcaggaggcgcaagccccaagacttggcagcttccatgtggtgttggacctgcaggttcacggaagttaagaattgagtactttcaatatgagattgaaaagaaatggttacaggggacatcctcacaatgcttctaatcttagtgggaaggcttcaagtttctcactattaagtatggtattacctgtagttttttgggtttttttgcgggtatttttttaagcaggtattctttatcaaggtgagaaaggatggctacagtgggctgaagttgggtcattccattctcccaaatggaaagttagaactgactagaattgggcatttccctttctcgaggtcagttaggctctgataatgcaccagcagaatactttgagtagaattggtattatttcttctttaaaggtttggtaaaattcaacagtaaagccatcgactcctgaatgtttatttgctgaaataaattttattagagctttcatatcattactttttattagtcagttcaggttttggatttcttcatggttcaattttggtaggttgatgctacctttattcttgctttttgggaattttactattaaacgtcttgaggtagtcttatatgggttaaatctgtttggtgttctataaccttcttgtacttgaacagtgataccttcctctagctttgggaagttctctgtattattaatttgaataaactttctgccatgatctctctctatcttctctttaagaccaataattcttagatttgcttttggggggctgttttctagatcctgcaggcatacttcactttttaaattcttttttgttttacctcctctgactgtgtattttcaaataggctgtcttcaggcttactacttctttcttctgcttgattagttctgctgtcaagaaactgatgcatgcttcagtatgccaattgcatttttcagctccagaatttgcttgatgctttttaatgatctcaatctctttgtttaatttctttgataggattgtgaattcctttaggtaatcttgaatttcattgagctccctcaaagcagctatttttaattttctgtctgaaattcacctatctctgtctctcagggatttgtcactgatgttttatttattttgtctggtgatgctatgttttctaggatggtcttaatgcttgggaatatttcctagagtctcagcattaaagatttaggtatttattttagtcttcaaagtcttggtttgtttgtactcatccttcttgggaaggctttccaagtgttctaactgacttc

SEQ ID NO: 471031 - DNA, 1391 bp, Homo sapiens
ctttatcaatgggggataggagcccacggattaattctcttgtttttccactgggtggatagttttaaggtccttacttaaaaccatggcctccacttcctatggaataagatctaaactccctcagcgagacacacaaggcctttctccagtcctgaccctggcccctggtctccagtgtgatgctttgctcagtcctaacaagcacagggaatcccttcaagggaggactcgctgcccacctgtaacagcacggccacagggggatagagcaccaagtgggcctgtgggatcgccaattccagaacttgacccttggatggcatttctggatctgcgatggggaagacaggagcccattgtcctgaaaggccttaagggaatattggtggtagtttggcagcactccctgtgggcctgtgggagcagtagctataaggtttttgattctgtctctgactccttgatggcacctctgaacctacgcggggctgtcctggttggctttgccacttgccaattgcagacccccagggccttgagtaaacttaagcagtagccagggagtagttacagcaggctctgggaataatggtgtttagatctaaatcctgtgcctttgatatgtaaatattcacctaagaagtcatgtcttgggaaataaaacatttctgcttgctagaaataagaggagagactaattcagttgttacatatattatttggggagacatttgtaaccatctacacttctttgttatgtcttttaatctgaatttttttgtgacagtatatattttatttttaaaacaatgaagcaacatttataatcaatatataatttaaaaggaaaaaaacctaaaaacttttatgtgatagcacactagcaaagatttcttaaataggcaattgctttattgcactcttgtagaatggctgtactatattccacaacaatgtagttgcatccttccaaaataccctgcacagagttcaactggttaacttaaaagcaacttataaaatgcacagtatattggtgtctctgagaggggtattatttgtaagaatatgagaggatcagttgtagccaatttgtgatatttagtataactctttagtactattcaataaatagtacccattaattttctaggcatgttgtagttttaaggtagtggttaagaaacagtctgggttaaatatagtttgcaaacatactgattttgtgactgagggttaattactttacagattttttttttatctctgaattggatataacagtattcctacctattaattgtctcctgtgatgtttaaatgagaataacattttgcatatgaatgacatatataatacacaataaatataagttattttaaaatgc

SEQ ID NO: 471032 - DNA, 977 bp, Homo sapiens
agtgaccacagtgggttcactgcaacactcaacacgagggtctgtggcttcattcctgaagtcagcgagaccatgaatgcactgggagaaacaaacaactccagacacaccacctttaagagctgtaacactcactgtgaagacacagaaaaaaataaaaagcaagatattaaaacacactaccagagcaaatcacttttacacaaaggaagacaggaaggaagaaaagatgagaggaccaaccaaacaaccagaaaacgaataacaaattggcagtacgggcagagacacaagaggctggacgttgagaggaacatattggttgaagagcacgttgacaggcaccagcagatgccagcacgctggcaggccatcaaccggtggaatgacctggagtttggccagggcagttggagaagagtccagttgctgagtggcccaacgccaggggaaaactttcccattccatctcccttctggcttccccatctgctgagagctacttcaataaaaaaacttgcacttattctccaagcccagattgttctcatgaaggacaccattgtaggaatgaacacagaggaattcacagggaaagatgtagcccagacctactggatatagctagattgaatccagtgacctctggacttttagttgttaagcaaatcacgttctatttattttatatggtcaaatggtataaattaccatacaaaaaacttaaatatttttagatatttttacctaaccagagaataattataaagaatataaaaactattaaatgtagccctataatattaaagtcataaactgtcattgctttggaagatataaagtaaaaactgaaaagtatgatgattttatgtacatgattcttctgttcttacacttctgtgacgattggaaaattaaaaactgcaaagcagtttatgctgtttaaaagcagatgatatatgagtcacttaagtcac

SEQ ID NO: 471033 - DNA, 853 bp, Homo sapiens
cagcctagtgactgacgttaaagtacatccaggtgctattgctggcagagggctaaaggtgactagggaatgaaaaatttgttgacatattcacaaggaacatatataatagaaattgctcaatatgggattgcatttagaaatacattatttaatgaggaaggtttaaccttcaagaaaacacctgaaactgatcagcagcgtctcagtaaaatcttaggagtggggagaagtaatgcaagatcctggaagaggcgagaaatgaaattgctgcagacccaaacagatacaccaccggtaactcgggaaaacctcttcacaaaggtagaagagaaagaaaacaattttatcacagaatatgcattaaaccagaatgtggtatgcattccatgcaatccactaagagactgcaaagacaatctttatgataggaggagtgttttaaatgagcctactctttgcctaagaaaattaattagctatgagctaaagcatcatcagataaatgatcctggaaagggatactgaaagtcaacagaatttaatcccctttttgggactggctcaactgataagtacagttctgcaaagcagagagttagagacaagttctcagtcaacaaaaaaggacaaaaaaaaaaatccccatgacacaatgaagcctaaaactacctcaaaaatcttggcagaaaaaagcaaaagagcctggaatctgatctaatactgagtctgagggatggacacttctaaaaatcagggctttcttcacacaaaagatgagaaggaagggttgtggtataaatcactaatagtattaaacttgggatgcccactgacttttccagacttcaag

SEQ ID NO: 471034 - DNA, 1841 bp, Homo sapiens
gcagtaacatttgatatcgacagtgttctggacttggccattctaataggcttgtagtgccatgctccctctgctacaggtgctcctgcaccaaactctttgggctccacattggctagcatgcttcccctaccacttctctaagcagctctccctgcaaactcgagcacccatggtggtcaagtggtctccccctgctgggattccagaggcttttggcaaaagcaggttactccttaacagtacacttcaacttattgaccaagattattacagacaccaaactgccctagactttctccttgtggacaagacagagtctgcacaatcactagaaaatttagctgtacctggattaatgctttggaccaagagtttgggcactcacagtatttggggtgtctcctgggtcctgcaggagcaatctgcttccttcaggggtctatggatcttttcagaatggttccccaatctctccattctctacctgatgatcctagtggatgagaaaattaagaatggaaaatcttaccctccactggctggagcaaatgagctaatgatactgcctacctaactgagccttctatgggacagacacctttatctcaagcttctcgatgttaacaccacaacagcaagccctagctttagggacaaagcctgcagctttcaagctcttctgtttatggctgagtaggtttaagtgttcagcttttgtttgggtagttattattggcttcagctaatcaagttagtttaatcgtttcatatttgtgcatctattgtttcagaatctggggaggagatagatattaagaaaaaactgttaaaaacttagatatatggcaacaggatggtgtatatcttctgcatgtacagtagcattgtataattggcttacccaggagatttttatcctcctagtgataaacctctgttttacctgttatttaccatttattaagacccaggtctccatgacattagatgttaacttgcagggttttgtgttcaatagaaaaaaaaaattgcaacatttatagtttacattagcttgttctgtatcaaacctatcaatctcattgcaacattcttcatcagcatcaataaatagtgtttcataaatgtgtgctgaacctgttttaccatctcaacagttctcatagtaatgagttaaagaattgtgtataaacacaacaaatgtattttaaagtggtgcagcatccccttcataactgcttcctgggatcttcccattcaaaagcaaaaagttattgagattccagggccagagggatagaaaagaaaacattttttaaattttggactgagaactattctgtgctccctggcacttgagttaaaagagtatatggatctgtcactaatgggtggattgggatcacagactcattaattgccttgaaatcttgtaccaaatggtattagccagaaggctttaaatgggggtattacattacagggagaattgcaaggttttagaagaccatgggcaagcaatttcttaagcacagatgctaggacctttcttgcttccagtttaactgcatatttttaactggggtctttaagctgtattttgactggcactgctgttttagcccttccaggtctcccaggatacaatgctagcaggttgacctgcttgttgacatggtccgtaatattgcctgtatcacggaacattagaaatcttgccaggtggtgcttaaattgcagcagtgcccctacttatcctgtgcagagatcttggtacaaaggggatggctccattccacatcaatgcagatttccaggcctttggagtacctgctacc

SEQ ID NO: 471035 - DNA, 775 bp, Homo sapiens
gtcattactttccagggagtaaatggtgctgtggcaattaaccgtatcccagatctgggacacgtctgtggtgctgtccgtggacaacggccgcacctcagccctgctgcgcttggcaatctcgtcggactgcgccttgacctttgcaatgatgctgtccaagcacagcagggctgaggctgagagcatgtaccagatcaagtatgaggagctgcagacactggctgggaagcacggggatgacctgcagctcacaaagactgagatctccaagatgaatcggaacatcagccagctccaggctgagactgagggcctcaaatgccagagggcttccctggaggcctccatcacagttgccgagcagcgcagggagctagctgttaaagatgccaaggccaagctgtccgagctggagctgatgaacatcaagctggccctggacatcgagatcgccacctacaggaagctgctggagggcgaggagagcctgctggagtctggattgcagaacaggagtatccatgggaagaccactagcggctatgcagatgccctgatctcagcctatggggacctcacaactcccggcctcagctacgcccgggctccagctttggctctggctgggctccagctccttcagctgcaccagctccaccagggccttggttgtgaagatggagacccgcgatgggaagctagtgtccgagtcctctgacgtcctgctccaagtgaacaaccatagcagaccctctcagcatacccctcctgc

SEQ ID NO: 471036 - DNA, 1334 bp, Homo sapiens
tgcagcaaaccaccatggcacacgtttacctgtgagtgaagctgcagaccttcgcggtgggtgttacagctcttaaggcggcgagtctggagttgttcgttcctgctgtccggagttgttcattcctcctggtgggtttgtggtctcgctggcctcaggagtgaagctgcagaccttctcatggatcctgcacaggggccgcaggtggagctgctcgccagtcctgcaccatgcacctgcactcctcagcccttgggcgatcgatgggacagggcgccgtggagcagggggtggtgctccttggggaggcttgggacgtgcaggagcccatggtggtggggaggctcgggcatggtgggctgcaggtccggagccctgtcccatggggaggcagctgaggcccagcgagaattcaagcacagtgctggcaggctggcactgctgggagacccagcgcaccctctgcagctgctggcccaggtgctaagcccctcactgcccagggccggtggcggcggccggccactccaagtgtggggcccgcggagcccacgcccacccaggactcacgctggcccatgagagcagtgcacagccccggttcccgcctgcgcctctccctccacacctccccacaagcagagggagccagctctggcctcggccagcccagagaggggctccctcagagcagtggcgggctgaagggctcctcaagtgcagctagagtgggtgccaggctgaggaggcgctgagagtgagcgagggctgccagcacactgtcacctctcactttgacctacatttccccattttctccccctctcccaccctagatgccctcatatcacaatggtccgttacattggtgacattatggtgattggacctagtaagcaagaagtagcaaccacactggacttattggctgctgtgcaagctgcgctgccacttgggccacataacccagcagatccagtcatgattgaggtgtcagtggtaaatagggatgctgtctggagcctttggcaggtccccataggtgaatcacagtggagacccctaggattttggagcaatgccctaccatcttctgcagataactattctcctttggaaagacagctcttggcctgctactgggccattgtagaaactgaacatttgactatgggtcaccaagttaccaagcaatctaaaccgccttttatgaactgggtgctttctgacccacctaccaataaaattgggcatgcacagaaacattccatcattaaatggaagtggtatatatgtgatcaggcttgaggaggtgctgaaggtacaagttacat

SEQ ID NO: 471037 - DNA, 627 bp, Homo sapiens
ataaaaagcaagtcaaactagagcatatgtatgtacatctgaatgctgacctgtggaagctgaccatgaacatcatcccattcccctacctgcacttcttcatgcctggctttgccccactgaccagccagggcagtcagcagtaccaggccctgaccgtggctgaactcactcagcagatgtttgacaccaagaatatcacagctgcttgtgacacctcacctcattatggctgctacctaacagttcctgccattttcagaggccacatgtccacatgggaagtggatgagcaaatgctcgatgttcaaaacaaaaacagctgctactttgcttattggctccccaaccatgtgaaaacagctgtctgtgacatcccaccccaggggctaaaaatgtctgacacctttatcagcaacaacacggccagccaggagctgttcaggccacatctcggagcagttcacagccatgttcaggtgcaaggtcttcctgcactgctatatgaactgcttcaattgactataggttccattatctacaatactgaaatttggccttaaatagtagtgtctgcatgtataattctgctgttttaagctactgctgttcttaaacaccagctac

SEQ ID NO: 471038 - DNA, 3227 bp, Homo sapiens
gtctatagtaacccagacagctcctccccagccatgtggaactgtgagtccgttaatcctctttccttcataaattacccagtcttgggtatgtccttatggaagcataaggatggacaaataccaataccattatgtgtctggctgccacaccttgctgtgggtctgcttcagaccctagtcaccttggttttttctgtgcctggagatatatgcagtcaagtctgtgaaactgcaaagaattccttcctatggaggctccttcctctggaggctctgtcccagggagtactgatgtgttgccagcctgaacacatctgtaagaggtggttagagccccttttgggaagtctcactgagtcaggaggaatgggatcatggacccaattaaagaagcagtctggccgctttttggtacagcaggtggctgaaacaccttcagggaggtcctgccaagtgatgatgaatgaatcatggtcccatttaaagatgcagtctagctacaatctggcaacgcagctgtgctttgtcgtggggggtctttccttgtctggaccattagtattcccaaaggtgcaggctggaccaactaagtctaccaaactgcaaactgtggctacccactgacttttgctttataaaaaaggtttaagtctgaaataaaacatacaattagaagttcatatacacatagtattattatttcactgcatggactttccacaaaattgcacactaaatggcatcttttcttggttcaataaatataaacatatgggggttggttaattactaaaagtggtaattaattaactgtatatatggctttctttgtagatttccatgtaactcacaactggaattttaagcctgcacatttattaaacttaacagatttctaaatactgctgattttctcctcactgttcttttgcaaagaataagctgtatacaacatgaacataaatctgatttatttttataggagctctgactagaattctagagttgttttagttaactttatgccaggatttccaataaaaattcctctctaatgtatttgctatttggtcattacattcatttggataaaaatgatttaaattaaatgtgcttcttaataaagagaagtttcagtgattttacttactaacattgaagattttcataaacttaaatcagagtatttctaagctaccattagaggaaaaatattgcatttaacaagcaggtatctaccataatgggctccgactgctttgaataaaaatgaaataaaaatgccctaaatattcagtaaaatgaaatcacagtataatgtatatgctgtcaaaccttttgaactaatagaacaccagaaaaagtgagaaagattaaagtaaattttaaaatatgcttttcagtctagggcataggcagggagcagtggctttcagaaacccaaacgcttgtttttgtggctcttattcagacatatcgcaggttttactaaataaaaaatggcaccttttttgaatcccatttactcttgtctcccctagtagggaagattttactggttaagtgaacatcctgaatattcctaccatgacagaactcatgccagcttgtgctcagaccctaggggatgctgcccagagccaagctcgcattcatgaaaagctttgctatgtggtaagcttattttttcttgtctgttctatgtgaaaatgatccaaaaatctagacttgtattgtctgcttacacatggctagccatgatatcactaatgtttgctgaaactcgttgatagggtcactccatcaaaattaacatggatggtttgggcagctttcggtttgatccatatccatcatgatgtcaagtaaaactgaaacatttatatttgccactctctcacatgaaatgttaagctacagatattttaatggaaactgggttgtttaattaatcttaatcattttagtaaattaattcttgattgtaacattctaatagcttgaccccttattattcaaatattcccctctgtcaaacttcagcttattgtcttcttctccactactcaaaagaataaattccaaccctccatttgagcattcagcacagcctgtcttgcatcacttgttgttttcctacctcttattatctaatgatgtaatattgaactttgaaaccagttatgtctttctctacagctaaatagttgtgtaacacagagtaagcagtgaaaggcttaaaatcttttctactaatatacataaacaattaaaaggatacctttgaaacatttttttgtaatggctgaagggaaaattttaatggatgaaagtgagggaaagtaataaagacagaatttgttttacttaccttgacatttgccttcctatctgttctctcagctcatctcaattcaagctcttcattgtagctcttgttctaaaatacaaattgtattatgcctcttctttgtttaaaacttttcaatagtttgcctttagtgcagaataaatttgaatttttgagtagctgtcttcttacctcatcaaatgctatatcattaaagcaaaccacagtctaaattttgtcatacatacaatgcgtattagaaaaatattccttagaaagcagggataaacagtctgtaaacttgtccactaaacttgtttttcatgcactattgtcactttgtgtggaaagttcagccaagatagataaggcagcattccataagctgggtcctatagtcttatagttggggtcaggaaacaatttctccaaacaaatagcaagaaacaatgctgatgattaagctctgattttggtagtaaaaagtcatatctgatatttatcatactaataggtaaaccttcatatattgacggaatatggctagctgaagggaggacagcgatgcctctcaagtgtgtacttcctgaaataatgccaattgactgtccctatgttaaagattttctataagggccacttatttccttagatttgaatctcaagttactaagatatgcataatgccatactttatatggtgaggtatgtaaaattatagacatctaaaaatgcttttgaattattttctgttttgttaaattttattcataaaactataacatgctttacattatgcattcaaaactaagaagagtattactttaaaaacaaaagtcctactctttcacaattaccccagtttcttgctgtt

SEQ ID NO: 471039 - DNA, 607 bp, Homo sapiens
ggttacattgggaaccaaagaaccacgtggataagcaaacgggatgctgttgcaactttcacgccctgtgatacggctgtggcttgcttctttggtgcctgctgctcaaacctctagcgggagcatgcagacaggcaggacagaggactttctgtatcctggattcttgccttggtgtactggaagaattggatcacacatgggcttggagaatgagcgcaaggttttattgagtggacatagctctcagcagatggatggggagccagaaggaagagcaagtgggaaagtggttttctcctggagtcaggcctctcagcagctgggctctctcctccaacctcaccagccaaactccaagtcgttctgccagtcaatggcctgccagcgtctgccagtgcctgtcggtgtgctcctctggttaccagttcaggaaacaggcaaagtgattgtcttgttcaaactcataaccgaagcaactggcataagacctgatacagaagatgttgatgaggatgtggagaaaggggagcgctggtacactgtttgcaggaatgtaaattagtacggctactgtggaaacagtatagagttttctgaaaaagct

SEQ ID NO: 471040 - DNA, 1014 bp, Homo sapiens
aagaaacgtgaacgctcatatattgttgactaatgtcctttgatggagaaggactacactttagttgctgtactcaatgatgacgccgaagctggcacatgtatacctggacaagatttaaaagatggaattctagaacttgagcctgtgcttaatgcttcagaggccagcagcactaagaagccagcactctctgccctcttcgcaggcaatttgatagcagaatctcttcagatccttcaatgcttgcaggttctccaattccttgccctgcagtccacagctgtgagcactcagctgccagctgcttcctcagcacctgaccccatgaccaggaagttaagcagcatccctctggctcctgcgtcacatctggtttctccagtgttctgctcctgtggtgtacgacaaccagcagcacacgatagcaaacagctttccttggcactttgcaaggaagatttttaaggcctctgccaacacaggtggaagataacaaatatttctctgccgtttagtgaggcatgactttgccttttccagcaagatctgaatgtcagcttggagtaagcaggggttttccttgtgcattctgtctcaatcttatggttagtgactgttctttctatatttagagctatctttacttcttactagccaatttctccttatgctaattctctagtgttattaataattcttcatgtcaaacttttttgttcaaattacagtgtggtttgtcttgcctgattggacagtaattgatgtaaatatgattgcaagaattgcaaaattcaaggtccacaatttcatgtattaagcttatactataagtttaaatttgattatatctcctaatattctagctttattataattgtgtctcattatcaccatatcttattctgattatttaacatgaaccttatactattaaatatctcaagtcagttatgtaacacatggatcaagtaaaaaaaatgaggaacataacattatttttctattttaatc

SEQ ID NO: 471041 - DNA, 727 bp, Homo sapiens
atctgatactacaaccactaccgggctccaaattatggcagctacaggaaaattgagtatcattctggggacacaaggttccctgccgctgaatcgagtgcagtgttgtgaggcttctgcccaaagggaaaggcaagatgttagcaagaagagctctgtgtggaacttgctgagaaaactgattttacttagagcttcataccttaagggtgttgttgagaacagaggggatctttattggaaagcaataaagaaaaggctggtagctctgataaaagcaaaacagcagagcaaccagaaaaagtcaggggaaaagttatccaaaaacactttccctgggttcagagtcaaatttgggtgtcaagaaaactgtgtgcatatgctaagcagggcccactttagaggcaatcagaacaagaatctgggtagacttgaaagcattctccagcacatgtacagattcatcagtgcaaaaaggaaaccaagacctcactagtcaagtaagattaacaaaaccttcgactgaacactgactgaagaaatgtgtagtgatgtcactttgctcattctaaatactggtcatgtgttttctctcttttctataatgtctacctatagatttattactttcatttaatatttacattaatatatttataatgttatataaatgtattttatttatattaatattatatttggatattttcaaattatgtacttcagg

SEQ ID NO: 471042 - DNA, 647 bp, Homo sapiens
atctgggaaaggagacctgaggagttcagtcttcaaagtggagagctgacatgactccagacatccaagggggagattttgagtgggccactggatactggagatcaaacaagggatactggaagcaaagagctacgtcagaaatagctccacggagcccaaagccctgggcaagactaaattgcaaggaagcagaaaggaggaaatcttcagagaagccaagctccaaagggaaagaagggtatgcagaatccagacaatgtggcccagacaaggccgttagaaacaatgggaatagaaagctgaataaaaatcctgaagtcaaagatgtactcaggacaatgactgagagcccactaatgttctggggtagttatcaccagaagaaccttagtcttggacaagtacctatcccaactcctatcaagatggtgttgaatcttgagcctcttctgcaggctccagactcaagtagaaaaggctgctggcaccagataataattactcaagtggagagaagactcctctcttaggtccctcagaaggtaggcctgaggacaatggaaagagggaatcgtagtgagcatatcctaggacccccaaagcatgacttaggaagttactctattacctaggcaagaaacaga

SEQ ID NO: 471043 - DNA, 542 bp, Homo sapiens
cctgtcattgattcatggatgctaaaagaagacatgacactctgtggtcagaaacataggactttgttactcagagcacagcaagaagcatgtgcatcagcatatttgcctccaagtctcacaggggcaatatggggggcccagatggatgttccacaggcagctggaagactcttcactaaagatgtggacatcgaagttcaggcagggcagagagatttgccagactggactgtcctgccatctagtggtgggataagaggattagctagcgtcccctccagctgtggctgccctggagagaacagcaatttttttggaggcaacattattcatgatagccaaaaggtggaaaaaatccaaacgctcatgaacggatgaataggtaagtaaaacatgctgtattcatacaacggaatattattcagcaataaaaaggaatgaagtgctgatacatgtcacaacatggatgaagctaaaaaatgtgctaagagaattaagctggtcacaaaaagccacgtattatatgattccatttatat

SEQ ID NO: 471044 - DNA, 553 bp, Homo sapiens
agcaaccactaatctttttccttctccataaactttcaacacaatgttgaaaagcagtgaagagaaaaaccaattttctgaggagaaattcaagccagctgcagaaatttgcataagtaacaagaagccatatgtcagtcagcaagaaaatgggaaaaatgtctccagggcaagtcagagacctttgtggcagccccacccattacaggcccagaggtctaggagggaaaaatggttttatgggccaggcccagggccccctgctgtgtgcagcctaggaacttggtgccgtgtgtcccagctgctgaagtcatggctaaaagaggccaaggataatgtaaaaacaatagcaactttgaaagtcaagatgggtcatccagcaatgaactattacccaactcagtcgccaagatttggatcattaagtgctcagctacataaggaagaaatgaattactaatttgtgttgttaaggctaatgttcttgtttagtgtttagactgacctataagttcctgcgctgtcctgaatgaagccttgcaggatggaaata

SEQ ID NO: 471045 - DNA, 1446 bp, Homo sapiens
atctgtgtgtctgtgcatctatgtatatgcctgtgacacagtcctccctgtcttccagctacaaagaacacatttcaaacaccttgtgcagttcccttgaacctccctctctagatgcagggttagaaggtgacagcccccaccccccgcgacccaccccaaatgggaaaggaacttatacctgtctcacaaacatctggaagctggggaaaacatcagagcaagtgaagaatgttcaaatatacagggaccatccagagacatgtggcctgcacgttgatgagcaatgtgaactgaattactgttgtatctggaggaattccataaaagagagtaatcagtctatttggatcccaactgccttttcctgtccccaaagggcgggaactagtgtgggtggaaaaacccaatgcatcccaaggcagtcctgccttctaaagcgcccgccaggacaggctcctggtgggttgtaaggagaacggcaggaagaagtgctcccaggaagctgcctagccaccgccaccaccacagggttccatccaactgacttatggcatcaggagctttgaattgtctcatctccaagactctgaaggtccttacaacactagcaatccccttcatgccttaggggatctctacatgatgtcctgctcagatgatggaaagccagcccccttcctcttgcaaactggcttcttgcacagtcacctggccttagactagaaccatggctctcaaatttcagggaaagtatgatcaagcagttcatcaggaagcacaaatgccacatggacagggcaattctttttcaagaagacccacagacttctcctgcctaggctctgaagaagccacaaaaatctgtccttccactaggctttcaggagagatgagccgtctccatttccatcagtcactcagctcttccccaacaccacagacaactggccgccttggaggctcttccaagtttcctgtagcagactctttagttgttataatgttccagaaactgaagtgggaatggaagctatcaagttttctgtactccaaaaattgtctccagcacattccctgagaaagtgttgcatccttgccctgaacaccttccaacagaatgactaaggaatactcaatgctagaccattccagcctgttcacccaccaagaggtggaacttgtctgaagctacaggaccacaattgaccataccctcccctccttctttgctttatctttttggaacatattctgtttattattaacatttttaaactatgagacttaaagataatctgttctaagcccctaatcttgtacatgactaaaaaaaatcacaaggacaaatagaatgcatgcacaccatcactctcctatcctctacccacagcagagatcactaatcaattaaagcaatcttttctactgcacacaggtgtggcc

SEQ ID NO: 471046 - DNA, 1021 bp, Homo sapiens
acgcagataaagcctccaggtagcaggcttcagagacaaaagattgtaaatatttcttatcagagttaaaaagcctcgctgccaccttgcagtttgatctcagactgctatgctagcaatcagcgagactccatgggcgtaggaccctccgagccaggtgcgggatataatctcctggtgtgccgttttttaagcccatcggaaaagctcagtattccggtgggagggcggacatacctcaaaggcagctgcgagaactccatctgtgaggcctacctagaacgtggtgagggtaacagagcatcagtaatgggcaagatgaaaaagacagctgctggttggaatgggtccagagtgagaagagcaactgcagtacataaaccaaagacacctgtatctttgggttctgagcaggggccaaagttttggtatcaggatgatgctggccttataaaatggggaaatattaataggtctcactgtatctatatccaaagcgataaccagcaaaataataaagaggggtggggtgagggaactggtgggggtgtggcaggtgattaataccctgttaacaggatgacagaattgtcttgtgcaatattaaccacccataacactatttggtctgataaagaccagccctgtgaatatttaactttcacaatatttgctttactgatagtgggccattttcatatatgaaatatagcctattgcttattattaattagacctgagtcgaccttcaggatttaatattctttcaacaatgatttgtgtaatttattacatggtaacatacattcaaaatgtgagaacattaggacttaaaatataggcttggacagaatcttgatataacatctaactaattcatttgactatatattgcaaatctttcacattctaagtactgaagggcatccatgaactataagatgccttctatcctcttatgtactggagctctactttcaggggaaaatgaaatgaattcataagaacacaaggcagagag

SEQ ID NO: 471047 - DNA, 1226 bp, Homo sapiens
gcaaatttctgcagcaggcttgaatttctcgaactgctactctgcactgctactgttgctgtacgctgatgctgctcctccttctcctcctcctcctttttgggactgctgctactgctctggcctgctctgcctatagagcagccactttgctgtacactgctactctgggcaattctgcctatgggagagccccgctctgtctatggacagccattttgctgtacactgttgttttccaccaacttgactccctctcctcaattaagactccacaagtatcacggtgtttctattcaagtaacccttacgtttcttcggacatggatgaaactggaaatcatcattctcagcaaactatcgcaagaacaaaaaaccaaacaccgcatattctcactcataggtgggaattgagcaatgagaacacatggacacaggaaggggaacatcacactctggggactgttgtggggtggggggaggggggagggatagctttaggagatatacctaatgctaaatgacgagttaatgggtgcggcacaccagcatggcacatgtatacatacgtaactaacctgcacattgtgcacatgtaccctaaaatttaaagtataataataataaaataaaaaaaagaaaaaaaagaattatataatgacaaaaagaaaaaatgcaatagcaagtattagagagactccaagtactgattaattaaaaagttagttactattctttccacattataagtcttttttgtttttggagatcaagtggttctttgattcctttttgaaggcaagtgctttcattttgcttctgactttctctaaagcagtgctgtatttgttaaagctctaatcctctcaggcacttgtgattagacccccgaagaactgtttcatggcctctgctatgttttcttatcactgtaccttttaagctttcaactatatttcaagttctggcctgcgtgtggccttcagcataaatttcgcaggcaaagtggtttgttctaatgctttcctcatctctctcaattgtttgcatgcttctttttattatctttccatagctctttgacctttttattcattagctcaaaccacatgaaatatcatttggctaagggttaagtcagaaaaataggaaaggtggttggcttttggcatatatatttacatttttgaattttctatttttgcattttcagttttattttcctt

SEQ ID NO: 471048 - DNA, 505 bp, Homo sapiens
tgctgtgccatgatctcgaccaggtcagtgccaagagttcaggatgacagttttccacctctagccagccctcagcttttcccaggaaaggtagagaaaggtggaactggttccaggcaaaccaatgctcccagaccagagggctgggggttgttagagagccctttcccagaaaccctcaaacccgtcttaagtctggcagccacacttgttgcttttaaatggctgacaggcgccctgtgttttcctccaatttctagtgagaagatagaaagaatagcaagagaaaggggtccaatgttactcaccactttggagaaatcccagatgggctcccagaaaggagacgagaagtcttcttccatcaaaggtttttctcgatcaagagcactttgaaaatactgtcttgctctcacttggcctgcatggtttctgctgagaaatcgactgatagtcttatttaggttcctttgtatgtgtcttttttttaagcatgattgagcct

SEQ ID NO: 471049 - DNA, 958 bp, Homo sapiens
acagaagcaataggaaactaattcactgggtccttgcatcaactcacctttgttaatcttggctctgattttgtgctccagttggctttattattgttttaaaattcactagagtcaacgcctatcctctgttagtgtctataccaagtatggaccactatctgaccttgatatgccattgggatggaacccatgggaaaactgcatgtttccgcccctaagatctctgtttcccttcactgaattccgcatcttgtgcttagaaacttgtgtcccacattttcctgctaccagcaaaggaaacaaccataatcttcccagttgcgatgaattggagaaacccacactttcttggttttcttcctatgacactagctactccttttgtctcaccttttctggttctgcctcatttctgactcttaacattactcagtaccttggtgatcttatccagtctcatggctttaaatatgctgctgacacccaaattcgtatctccagctcctgcctctctcctctgaacaccaaatgcctataccgatgctcttcaatttatgatagggttatgtcccaataagcccatcataatttaaaatattctaagtggaaaaagcattgaaactatcttaagttgttacatctagcccatggaacatcatagcttagcctagcctaccttaaacatgctcagaacacttacatttgcccacagttgggaaaaaaaaatctactgaattcagtgtctatcttataataaagcactgaatatctcaaataatttcttgagtactgtactgaaagcgaaaaacaaaatgattatatgagtacttgaagtatggtccctactgaatgtgtagcactttcacactgttgttgagttgaaaaattctaagttgaaccataagtaagtcagggaccatctgtgtacaattcctactgacatctaaatttgtct

SEQ ID NO: 471050 - DNA, 1152 bp, Homo sapiens
ttaatcaacagaaacgtattttctcacagctctggaggctaaaaggggccaggagggttggtttctgcaggaaatgtcggttaaccaagtaattaatggctacctgtggtatacaagccactgggtaggatctataggaaatgccgagtataagataaggtctccatccataggaaacagccacctgttacaggacatccagcagagcagcagctgtgctccatttgtcttagccctttcccagggggctgcctgtgttcttgtttataagaggagggttgggcagggaccagatctcaggcaaacactgaacttcactctgctgacaattcgaaatcttattgtgggtgacttatggcccaggatcttattatattcagaagatgtcacaggcaagagtgtcagtcctgctacaggcagattatctgccaggtaccaatccctacagaaggccaatcccatgaccctgaggcccatcggaagcaagattcatttgaaaagacagaaaggcgtccttgtcttcgaccctgtgctctttaaaaaggcaaaagagttttatgaggaaatgcaaatgactgattcatgtgtatttttggaggggtatctttggcattttaaagagagtcctggtattaagaaggccagacacaatgtgaaaaatagtcagcaaatgaccatgctgcagtagaatgtggtgacattttcagagagtacatttcttagaacaatttctctctgtgcacttctatggagctgctggtactgctgaaatcaagctcctctgggatacagtaggactatttttacatgtgcaaattgtacaggctctctgaaataaaactactgagctagaaactccattatcctgcaacttccaaaactgaaaaacacctttacttactactcacatttcaccagccattgtgaggatgaataaatacgtttatattgctttaattttcagagtagtccatacatacatttatagctctaagaagaaaagcatttccaaatggttggttgtccaggattgtgaagttattctacccactcagaggcagcaggatcagtgtggagaatatttttagtacattccttttcaaaatatacctcattggtttgactcattgttttggaaatcattcagaatat

SEQ ID NO: 471051 - DNA, 829 bp, Homo sapiens
cccgggagggggaggttgcagtcatgctgatctaagagatgggcccccacagccttgagcagctccattcctgtggctttgcatggtacagccccatcctggctgctttcacaggctggtgttgggtgtctaaggcttttccaagcccactgtgcaagctggcagtggatgtaccattctggggtctggaggaaggctctggacatgtgatgggagaggctgctgtgaagaagcctatgaagccacatcagcttcatcaggaaacattttcacaattgatgaatgatacatgctttgggaacagtgggtctttttcgcttatctatattgcctcatacttccaaaatgttttctatatctgtatgttttttattgtcaaagctctagtaaaaatactagaaatgtcagaatcaagatccagctatgttaatgagctctgtatgagtttcacactgaagatcagctaattggctgtcacttttagatcacctggaagatcctaaactttaatgatgagcattttctggcccctgactgtgactgacacgtgctccttaagcccaaaatcttctctagcctctttccttattagggctttcatacctacatcatttaaggcaaataatttcatgtagggtcatggtcaatatgagtgaggatacatgggggaaaactgcctgactagcaacccaggtcttaccaattcctaagtttttcccatgtgtctgttgcttaacactttactttctatgtgaaaaaaaaaaagctattttactttctatgtgtttttatataacttgccccatcactgcattactgttcaatgtcc

SEQ ID NO: 471052 - DNA, 937 bp, Homo sapiens
actttctcaaagatcagttggcttttatgtgagtcgctatgtgttatgtgcgagaccgcaagcctcctgctgagaaagcaagccgactcatgggttttcagtgtctcagggagcttgcagaagtgatccagttccttcaaagggtctgcggattctcttggcttttctggtatgttcctgcagcagttcttggagaaaaagttcacgataaatgtgaagaggctagggggaagggtgaacggcacgaagaagagttgcagggcattaaggggaggggtgggcagtacagaggggttttgggggagtgtcagcagtaccaagaagctttttggggtagtttgtccctaaaagtcgtcaagggggttgacctgctggggttccagagtccagtggtaacaggaggttgctccttgccagttcaactcacctgttaccctggagctgttgtggtctagaaatgagaaactgtgaggcacaaaactgtaaaactctttccggtttctcctaatctgttctgaactcaccataccttgctcaaggtaatatggttaatgcagaagggaagggaaggaagaaagggaaggaggaagggaaggaagaaagggaaggaggaagggaaggaagaaagggaaggaggaagggaaggaagaaagggaaggaggaagggaaggaagaaagggaaggaggaagggaaggaagaaagggaaggaggaagggaaggaactactttaattggctcctaaaagtagcatgtttcttttgagaggattttgttattacctacccttctgaagcctacttctgtcaattcatctatctcatttttccatccagttttgctcccttgctggtgaggagttgtgatcctttggatcacaaaggcattctggtttttggaattttcagcctttttgtgctagttcttcctcatcttcac

SEQ ID NO: 471053 - DNA, 658 bp, Homo sapiens
acgtattccccctcagcccggaatgcacagattcctagtggaaagaatgactccagtggtatttcagaaatctttggaccaagccagggtcttgagggcaaggtttctggagaggggcccagggcacccatggggcttcagcttttgctgccctgtccctcctcaagtatctgctcctcacattccagaacaacacttctccactgccccagctatggctcaagaaggcccaagtgctgctctgaccaccactggggatggaacagctgtgaatgtaggcagaattcacatggtgataaccctggagaggtgcagagtacatgagttgtgggactgtggaggtctcaacctaggtttcaaaggatgtattgaacagtctttggactcagatgaaaacatgccacagggaaatagctgccaaagagaatctccactagaactatgcttgctggagccctgggggtggcggcagcccactccagaacagtagcactgccagtgtgcaatgccagcctgggagagctgcagtattcatttgagaaattacaaaatacatcattaatttatcaaaatatgtggttaaataccatatattctcacttataagtggaagctaaatgatgaaaacacatggacacatagaaagggacaacaaata

SEQ ID NO: 471054 - DNA, 646 bp, Homo sapiens
tatttgctatttccagtagaggtaatgcagcagagtttagattcagacattttctttttaaaatataatcaaatatattttcatctagtgaagaaggaaaaacagatatgttccatatcttttaggggacaagactccactgatgttgactttaagcacaaatgcaaacagcagaggaatggcagggtgaaatgtataggagcacagactctggaacactgtacagattcaaagcccagctttgccatttcccagaaaatcatcacaggtgatgaaatttttcaattggaaaggatcttggagatgatccagttagattctctagtttttcagaggaggaagttggagcacagagaaagtgacttgctgaaggacacgctacaaagtgagatcgctaaattctacgcaatccaagtccccttggcttctgggacactactggtacaggtgcatctcttccagagggatcatggagtctggtctcaggccctcagattaagaactgattcgaaagacttcagtacactgaagtaccatgcacactgatatttcaactggttatcagctctcaaaacattaacctaaaatgaaaaatgtaaacttgccaaatttggtttttgttttcatcttatgccagtaaactcat

SEQ ID NO: 471055 - DNA, 659 bp, Homo sapiens
gcaggcttgctagcaatatcagcccaagatgctggttttggagagcaatggtggctggaggcaaactattggaagcatgatgttactagtaatggacccgctaccaacagcagaacctacaacttttggaacattgcttgcaacttctgtgctacccaacttcagtgctgccatcccttggtctatagcattcatgccaggagccttactgagggtctcattggcaaaagctgactgtccatcaaccatggctccacctaaggagctaggtgcaatttcactcttttttatggctggggatgatggagggcagttcccggggcccctggcaatccttcagggcgtctgggtccaggtctctgcagttgggacagaagcgcttagccaggccacagatgcacaagagaggcaggatgaccaggaagatgatgacgaagatcctcaaggggccagggaagaactcgttctcctggcagcagctagggaatactttaaacttttccccattcagtattatgttggctgtgggtatgtcatagatggcttctattacattaagctacctctgcttgctttgggcgtccacttgcaagaaatctctttttccatccctttactctaagtttatgtgagtccttatgtgttaggtaaatcgggga

SEQ ID NO: 471056 - DNA, 723 bp, Homo sapiens
gtttattgtggccccgacaggccggggttactgtggcgaccacgagagcagctttggcgctatggaggagcccggggttacccctcaaccgtatttggggctgctcctggaggagctacgcagggtgagcccaggcgcgatgagtgttacgtggcccaggggtcgcgggagccgccgggggaaggaagcagtagaccggctttggggtctaagccgccgtggtcagaggtcccgaagccagtcctcgtctgctgcccggctcccgcccgtgttcgaggcagtagttaggctcgtagggcgcttgagtggtttttgtgtgatggaggaggacctggggctctgggaaggtgaagaaagcacttgcttagctggactttgcaaagatgtaaatgtttcccgattcctaaaactaattagcctttccgctatgttgtttattttgagcagagacacgtggttccttcgactgtgagaaacttgaggactgttcctttaaattagttacatttactgatgagttttgtagtttcaggttttatgtttaggtcttttatccactttgagttgatttctatgtgttgtataaagttaagagttcagtttcattcttttgcgtgtgaaatccagttttctcactaccatttattgatgagactattctttctgcattgtatattcttggtgccctattgaaaatttgaccatatttatttggatttattt

SEQ ID NO: 471057 - DNA, 2277 bp, Homo sapiens
ttgttttctagatttctttctccccactgatgatgatatttgctgacccttggcattatattgggcccaccaaaataattctggatgctttttccgtcttaagatcctttatcacacctggacattctggggagcagaacatagacatctttggacagtatgaaggctatgaagtagagtcatctttaaaggatgccagctttgagaaggaggcaacagaagcacaaagtttggaggcaacctgtgaaaagctgaacaggtccaattctgaacttgaggatgaaatactctgtctagaaaaagagttaaaagaagagaaatccaaacattctgaacaagatgaattggccaaaatgaccttcaagatatttcaaatgaatgaagaacgactgaagatagcaataaaagatgctttgaatgaaaattctcaacttcaggaaagccagaaacagcttttgcaagaagctgaagtatggaaagaacaagtgagtgaacttaataaacagaaagtaacatttgaagactccaaagtacatgcagaacaagttctaaatgataaagaaagtcacatcaagactctgactgaacgcttgttaaagatgaaagattgggctgctatgcttggagaagacataacggatgatgataacttggaattagaaatgaacagtgaatcggaaaatggtgcttacttagagcatattaaaaatcttcagactgaacaagcatctttgcagtcagaaaacacacattttgaaaatgagaatcagaagcttcaacagaaacttaaagtaatgactgaattatatcaagaaaatgaaatgaaactccacagattaactgaaacagagcttaaatttgaacttttagaaaaagatccttatgcactcgatgttccaaatacagcatttggcagaggctcacgaggcccagggaatcctctggaccatcagattaccaatgaaagaggagaatcaagctgtgataggttaaccgatcctcatagggctccctctgacactgggtctctgtcacctccatgggaccaggaccgtaggatgatgtttcctccgccaggtggtaatgctcgcttgccctcctcacctcctgctgtgcaaacagttcctaacagcccgcggaaagatgggtcaatgccttcagaaatggaatccagtagaaatgataccaaagatgatcttggtaatttaaatgtgcctgattcatctctccctgctgaaaatgaagccactggccctggctttgttcctccacctcttgctccaatcagaggtccattgtttccagtggatgcaagaggcccattcttgagaagaggacctcctttccccccacctcctccaggagccatgtttggagcttctcgagattattttccaccaggggatttcccaggtccaccacctgctccatttgcaagtatgcttttttaaactttttttttaaagctcaatatgtggtttattaatcggagatttaattttactatctgttaatgtagtaacacagtggaggaaagttttttctagcattctgtgaatctgaaaattctcattacttttccgaattgggaaggcagccagccataagtggactgcaatgaggtttcagcttgattcatcttaataatatagaattatttctgtattttggcagtcaagaaaataatggactttttgcaggtcttacgataaaactaaaattatctgtaccttatttggtagcaactggttattctgacagttagtgaaaataataacttatattctagcattaaaattactggctaagatattttttaaagtctttttcataagtagttctgatgcagtcctacttatttaaaacttaaaatgtatttattacgtttgaccgaatttttggatttattgaattcttttaaagcttcacataagaaaaagggaataatatgttgcttttatattcatactttactgttttgaactatagggttctgcagaataaatatgtggttaccaaatactaggctttgcctatgaatgtctcatatagtctttccttcccttgtttctcttctctttttaaagttaaaggtgaattaaaatgaattttgtttggggaaattttaaggtggcctttgatattactggaaatgttttagtataatatcaaattagaattgggaatcactaatacgaattttaagtttgttgaaaattatattacatgcagatgttttttgaggactttgataatgaaagaaaaaagtgatttaca

SEQ ID NO: 471058 - DNA, 746 bp, Homo sapiens
agctccgtttctgtgttgtacatgctcttgctgatggcctccctgctcaattcccttcagtgccgaccctcagctgcaggtcttttggagtttgctggaagtccactccagaccctttttgcctgggtatcagcagcggaggctgcagaacagcaaatattgcagaacaacaaatgttgctgcctgatccttcctctgaaagctttacctgagaggggcacttggctgtatgaggtgtcagatggcctctactgggaggtgtctcccaggagggatgacacaagcacccctgtggccaccaccactgggactgtgctggatcagacccaaagccagcacagcactgggcctggcccaaggccggtaccaccacatatttttggatggattatcaagtgggagagtcaagcactccacagctggatggtttatggtcaaggaattttgattgaaaggctagcaactaggattctaaatcacagtggtccatagttctttttttaatatagaaatatagtatataataaaggtgacattttaaataattggtgaaaatatggatggtatagcaacatctaacattgatgtcatagtaacaataagacaaagctaaataacgtgaaatgtaaatgccacaaattgagtcaaaagaatatcatgacaatttgggaaaagttacttgcaaactatattacttgagaagtttctttttaaatatatagaatatcacacaagagcctctgtgg

SEQ ID NO: 471059 - DNA, 1484 bp, Homo sapiens
gacactgggcacagccatctgcagcatctctttcttcttgaagcatccttcttttgagctccaacaacaagatgtgcgaactcgatattttacacgactctctttaccaattctgccccgaattacacttaaaacgactcaacagcttaacgttggcttgccacgcattacttgactgtaaaactctcactcttaccgaacttggccgtaacctgccaaccaaagcgagaacaaaacataacatcaaacgaatcgaccgattgttaggtaatcgtcacctccacaaagagcgactcgctgtataccgttggcatgctagctttatctgttcgggcaatacgatgcccattgtacttgttgactggtctgatattcgtgagcaaaaacgacttatggtattgcgagcttcagtcgcactacacggtcgttctgttactctttatgagaaagcgttcccgctttcagagcaatgttcaaagaaagctcatgaccaatttctagccgaccttgcgagcattctaccgagtaacaccacaccgctcattgtcagtgatgctggctttaaagtgccatggtataaatccgttgagaagctgggttggtactggttaagtcgagtaagaggaaaagtacaatatgcagacctaggagcggaaaactggaaacctatcagcaacttacatgatatgtcatctagtcactcaaagactttaggctataagaggctgactaaaagcaatccaatctcatgccaaattctattgtataaatctcgctctaaaggccgaaaaaatcagcgctcgacacggactcattgtcaccacccgtcacctaaaatctactcagcgtcggcaaaggagccatgggttctagcaactaacttacctgttgaaattcgaacacccaaacaacttgttaatatctattcgaagcgaatgcagattgaagaaaccttccgagacttgaaaagtcctgcctacggactaggcctacgccatagccgaacgagcagctcagagcgttttgatatcatgctgctaatcgccctgatgcttcaactaacatgttggcttgcgggcgttcatgctcagaaacaaggttgggacaagcacttccaggctaacacagtcagaaatcgaaacgtactctcaacagttcgcttaggcatggaagttttgcggcattctggctacacaataacaagggaagacttactcgtggctgcaaccctactagctcaaaatttattcacacatggttacgctttggggaaattatgaggggatctctcagtgcttaactagaagtcagtagagaaaatgagttaaatggaataagggttggagtgtggaatggagacagagggaggtgaattagctaagtgtatgccacgaagtgccgtgtacttgctaggcgtaacctgggtaagtgtgtgaggatgcatcttttgtaagatctctgtaagttttgattcctgcctgcct

SEQ ID NO: 471060 - DNA, 607 bp, Homo sapiens
cctcctgtggcctttcctccgtgcatatgcctccccgttatctccttgagtgtctaaggagaagagagacagcaacaagcaatggaaaaatagatgttgatgggtatctcatagaaggttctgtgccctaccttttgatcaaagccccaaggacagaacgttggtggacagatcatagcagatgctttactgcaccttggcaaatgtctctctatgggtctaatgagctgcgtgaggctaagctagccaatggagattgttcacctaattctatctctgattttgtgatcagcaagcaggagtcagattatgttgtagcaaccaacatggacttttctacagccacctacctaagcacttgccttcgacagtgcctagcaccacagattcctgagccctctttgtctctgccagtaaaagaagcttctctgcagacaccaaagagcagtgcctctgccttcctgggtcaggtgctgctactactacgaaaaaagctgttatgaccatttccgattaagtcttgttggctatatgttttcatttctcttcggtaaatgcttagcagtgcaattgctaggtcatagaacaggtgtatatttaagcctca

SEQ ID NO: 471061 - DNA, 678 bp, Homo sapiens
agttaagactttggatagattttcttttttgccaattcagactcgaggtatgtttgagaactgggagaagttcagcacagctaggggcagagagctagggaaaggaatgaggcaagagatgtgcataggaccaaatcatctagagctttatagtcatattaattcctttgcattttattttaagggtgatgggaagggggaagacaacatatgtattaattttttagggctgccaaaatgccatggactggttggcttaaacaacagaaatttattttcccacagttctggaggctggaagtccaatatcaagatgttgcaggcttggtttctttggaggtctctctccttagcttgcagatggcctccctcttactgcctctttatatggtcttttctctgtgtgttcttctcacagtttgaattatttaagaacaaattcctagaactggtattattaaatcaccaggtatgaagtctatatagtaagtctaaattgtttttcacaaatattataccaatttgtaaggccattgactttgaccatacatttgcctacctagtattcattctcaccttcattaatcaaagacttttttttttttaagtgggaatgtgacttgttataaaagcctcatttcctcagactcccttgcatctaggtacgtccatatgacc

SEQ ID NO: 471062 - DNA, 695 bp, Homo sapiens
ccgtccgagttagagctgcaatctagtcattatggatctgatcaactctactgattacctgatcaatgcctctactttagtaagaaacagcactcagtttctagctcctgcatcaaaaatgattattgccctttctttgtacatttcatctataattggtaccatcaccaatggcctctatctatgggtgctaagattcaagatgaaacagactgtcaatactctcttattttttcatctcattctctcttattttatttcaacaatgattctgccatttatggccacctcccaacttcaagacaatcactggaactttggaactgccttgtgcaaggtcttcaatggcactttgtctctggggatgttcacctctgttttcttcctttcggccatcggtcttgatcgttaccttctcactcttcacccagtgtggtcccagcagcactgaaccccgcgctgggcttccagcattgtcctgggagtctggatttcagccgctgccctcagcatcccctatttgattttcagagagacacatcatgacctaaatgataccaaatgttgctgctgctgctgttgagcccaaaatatcagcaatttggctttactaaaactgctactgccgctgataccatttctgcattaggtcttgaaccactctgtgcctgaaagctctgacaacaggacagaaa

SEQ ID NO: 471063 - DNA, 3981 bp, Homo sapiens
cgtcttaagcttctgaagagacatctgggagcttccagaaactaaaggaaggactggaaatgctagggggggtcataatgagaggtgacaacgtgctggtggccctcgctcgctctcagcgcctcctcagcctctgcgtctgctctggccacgcttgaggagccctttagccctccgctgcactgtcggagcccctctctgggctggccgaggctggagccgactccctctgcttgcagggaggtgtggagggagaggtgtgggcgggaatccgggctgcgcacagctctggcggaccaatgcgagttccgggtgggcgtaggctcggcaggccccacactcagagcctccggccggcactgccagccctgggcagtgaggggcttagcacccgggccagtagctgcagacagggtgccgggtaccccagcactaatggcccacccgcgctgcactcgaattctcactgggtctcagctgcctccccgcagggcagggctcagacctgcagcccaccatgcctaagccccccctgccacccgcaccccgtagtgggctcccgtggggcccgagcctcccagaggggcgccgtcccttgctccgccgcacccggttccattgaccgcccaagggctgaggagtgcaggcgtgcactggagggttgtatatgcaccaatcggcactctgtgtctagctcggggctcgtggatgcaccaatcagcactctctaaaggattgtaaatacaccaatcagcactctgtttctagcttaaggtttgtaaacacaccaatcagcactctgtgtctagctcaaggtttgtaaacacaccaatcagcaccctgtgtctagctcaaggtttgtaaacgcaccaatcagcaccctgtgtctagctcaaggtttgtaaactcaccagtcggtgctctgtgtcaagttaatctggtgaggacttggagaacttttatgtctagctagaggattgtaaatgcaccaatcagcactctgtgtctagctcagggattgtaaatgcaccaatcagcaccctgtcaaaacggaacaatcagctctctgtaaaacggactaatcatctgtctgtaaaatggaccaatcagctctgtgtaaaatggaccaatcagcaggatatactttggaggccagaagacaatgcacttatgttttttaagtactaaaagaaaaaaaattgtcaaatcaaaattgcattataaaacctagtattataaaaataatgtgtaactgttttttctaaatggtttaaaagactgatacatttaaaaataaacaagtattagtctaaaagctgttacgataatcatgttttgcaactccatgctttattctctgtgtaatttaagacactgatgtgttagaaagttattagcttatgtttttggacagtgtataaaaatataagtttatgacattgacaatcaaaagggttggggatagagctgttagagaagtagtgtatgttattaaagttaatctgctataaattcaaattagagtgttataactttagggtgttatgtaatcccatggtaaccacaagaaaataactgaagaatgtatacaaaatgatatgagaaatttaaacatttcactacaaaatatcaactcaatacaaaagacagtaatgcaggaaatggacaaaaaagctataaggcatgtagaaaacaaatagcaaaataaaggaataagtctttccttatcaatgattattccaaatgtaagtggattaaattctccagtcaaaagacagagataggcagaatggaccaaaaaaaaaaaaaaaaaaaaaacatgatccaactatatactgtctctaaaagactcactttagattcaaagacacaaataggttaacagtgaaaggatggaaagggttgttctatgcaaatagtaacaaaaggagaatggtagtatctaaactaatattagaatgactaaaattaaacggactgattatatcaaatgttagcaaggatatagaggagctggaattctcatacattgtgtgggaatgtaaaatgatatgaacacttttgaaaatagttcactagtttcttaaaatgttaaatacacgtttaccttataatcctgtcattccagcaaagacttgcatacatatgttcatagcaactttgtaaataaccaaaaatggaaaatgcctaacaactgataaatgtataaacaatacaatacatattacaataaattaactattgatacacaatatttcaagaatgaatcttaaaataattatgcttagtgaaagtcagaaaaaatacatactgtatagtttcacttacgtaagattctagaaaatacaaactaatttataatgatagaaagtagatatgtggttgcccggggattgggtggggaatggggagaagttacaaaggagcacaaggaaatttgggggagtaatgtatatattcagtgtcttgattatacatggtgatggtttcataggtgcttacgtatgtcaaaacttatcaaattgtactattaaatatatatgacttattttaagtcaattatacatcaataacattgctagaaaaaatagaggagaagatttttagctcaaaataatctttatgccaaaatggtgtaatttggggtggcaaattttgctatccttcacaactcaacaagaaaaagacaaatgattcaatttaaaaatagacaaggggtttacatggacatttatccaaagaagatacacagattgtcagtcagcacatgaaaggatgctcaatgtcattaggcagtaggaaaatgcaaatcagaaccacaagagatcccataagacatataaccaatagatgtatatttttaaatccagaaaatagcaagtgttgatgaagatgtggagaaatgaggaccctcatgtatcaactactgggaatgtaaaaatggttcagacttgttgggaaacagtgtggtagtttcttcaagtgttaaacataggagttaccacatgacccaaccatccaaggaatctacccaagagaaatgagagtgtgtcttcacacagagacttgtgcacaaatgttcatagtagcattagtcataataatctcaaagtgaaaacaacccaaatgttcatcgactgataaatggataaacaaaatttagtatatctataaagtggaatactatttaacaatgaaaagtcatgaagtgctgatacatgcttcaacatggatgaatctctaaaacagtatattcagtgaaagaagacacaaaagatcacatattgtctgattctgcatatatgaaatgtctagaataggctaatctatggagaccaaaagagattgatggttgcctcacattgttagagagagatgggaattgactgcaaatgggcacaaaatttttttgtggggtgatcaaaatgttctaaaattatactgtggcaatttttgcacaaatacttaattgtaataactattattgccttctatatccaacatgggtgagttttatggtatgttaattacatctcaatgaaacttcttttgaaaaattgtttgcatcttttgtccatttgggtaagagtttccaggaaaagtaaatcatattgatgaagatggaggaataataaagtcttgttaatagagacagtagaatagtgaagtcatatttacatagacagtaacttattttgttatatatggtttcaattttcaaaataaatatgtatatatttatttttaatcataaacacatcagatcatgataactgcaatgcaagtattaaaatatgtaactgggaacaactacttaagagcgtcttccaacactaacttattcatttttttctttgtggttttctttctttcctgaacttcctaacttgttctttagttgacggtgtcatctccattatcctggggaaaactaaaattgttattgcaaaaataaatacaaattttaccattttaaaactt

SEQ ID NO: 471064 - DNA, 522 bp, Homo sapiens
aactaagacctacatctcctcaaacattctgagatggatagcagggattcaccatgccctacttcttagatgactgcttatttttcgccgagtctcatcacttctctgcattcaaagtcttttcaggtcatacaagaagtgtgatggatgccagcatctgcttcctgtggggcttcaagctgcttccactcatagtggaaggggtctgtcagctgcaggtctgttggagtttgctggaggtcccctacagaccctctttgcctggtatcaccagcggaggctcagttggaaatgcagaaatcacccatcttctgcgtcaatcacactgggagctgcagactggaactgttcttattcggccatcttataacatagccggaactgaaagaagtttaattgactcacagttctacatgattgggaggcctgataatcatggcagaaggccaaatgaggagcaaagtcacatcttacatggcagccagtaagagagagtgtgcaggggagctcccctttataaaa

SEQ ID NO: 471065 - DNA, 1477 bp, Homo sapiens
ttttgttttgttttggtgtctcccttttggaaagggagtactcacccaatgcctaaaaccccattcatgttaaatatgtcataccactctctcctggcctgtaaggattccaatgaagtctgctaccagacatattggagctccactgcagaggagcctctccctgtggccaccaccagcaacaacccacagagggttctgccaggcactgctgatgttcacttaatgcccaaagactcttctgtcatggcccagcctagtgccctgatgagaaaggctgatgatgtggggagtagcaatgggatgcccttgtgtggctgggatagaggaggagagcactgcgacttgaggaagctggtgaaacggcccatgcatttgaatcagagccagatctgctctccaacaggaacctcaacctatgcatttccagccccttctcagttctatttctggctggtggtgtttctcatgggtcatgagaggctaacaccaacacagcctcatctctgtgaggaactggaatgatgtaggtacagggaagaaaagaggtattcaaactacatcattttctgactgttttcttggttggcttcaaataccagctttacttgagcattggaaccttatgctagtaaaatattaccttctcagtccctctttttagatagactttgaccttcattcttcctttctttttattttctcatacattttcttatgagagcatataataactctcacgtgagtcctaacaaaatagataaagtaataaagtgttttaatatagagtaattatttagattgcacaaaaggaaaactttagctttgttgtctaaaagattagaacttgcaatctcaacataatttacaattatagctcatatgagctgattttatttcaatctttatgtcatctgcactattaattatcattgagttcttcataaaaacagcaatttgtgaatccaagatggcatcataatcatgcatatctcctcctggaaatttactcaagtgattgggcaaaaataaacttttcagtgatgttactgcttcatctgtatttaaaagattatttttatatgtctttgtccatgattgtgcttgcaaagaggagagtagcgcttaagtaatttatttagtatagacatactaactgaataattgggccttctggaatctactctggggcctaaaatatgtgactgaactgtctatactggctctattgcctagattactggatagggcttcctgaaaatattaattagaaatatgatacaatctatttatttgccaaatgccttgcccatttggactgctaagacaaactaccctagactggttgttttataaacaatagaaatttatttcccacagttctggagagtgggaagtccaagatcaaggtgtcaacagagtcagtgtctggtaagagtcagctttctggttcatagatgatcaccttttcactgtt

SEQ ID NO: 471066 - DNA, 651 bp, Homo sapiens
agaccaagatactaattaggtgatatagtgtatagattatggctatctgggattggttttctactcatttcatactttacatagaagatgagaattcatgtctttttagaagtttgctgcagtttactagaggtccacttcagaccctctttgcctgggtatcaccagtggaggctgcagaacagccaagattgctgcctgcttcttcctctggaagcttcgtcccagagggacaccaggctgatgccagctggagctctcctcagagcttgagcactatgctgggagaatactccttgtcaggatcagctgctctcttcagagccagcaggcaggaaagtttaagtctgctgaagctgtccccacagccgccccttcccccaggtgctctgtcccagggagatgggagttttatctataagcccctgactggcatttctttcagagatgccctgctgagtgacgaggaatccagagaggcagtccggccacagccactttgccacgctgtgttgagttctgcccagtccaaacttccaggcccccttagcactatcaggggaaaaccacctactcaagcctcagtaatggtggacgcccctcctcctaccaagctctatcattccaggttgacttcagactgctgagctg

SEQ ID NO: 471067 - DNA, 663 bp, Homo sapiens
tcaattaataaatgataagagttaatcaaggctcccttgacactgtgccagaagagtatggcagctcctctaggcagtgccccagtgggaactctgtgtggggccctcagccccacatttccccttgatactgcccaactagaggttctccatgagggaaccacccctgcagcaggcttctgcctggacaatggccatcttcttgtctttgcacatggtcctccttctgtgcacatctttctgtatgccctaaaatcctcttataaggacaccagtcagactggattagagcccacaactaatggcttcattttaacttcattaccccttcaaaggccctatctccaaatgtcatcacattctgagtctgttgatgaacataagcagataaaaatgtcctccaatagtgaagacaaccaaaatagttcaattttggttgaaattcagaaaaaacaaatatctgtaatgtcctcctccaatttgaagttagaagagcaataatatttcaccgtcttaaaagtaatgttaattctctagggcatctttagaattccttctcctgtttccttatcaattatttccaacaccctacataaatctttcatactattgataaatcatagtctaacaagaagttattcatactttttttaaaattcctgt

SEQ ID NO: 471068 - DNA, 1582 bp, Homo sapiens
cgacgagtcaagagacagcagtcagctaaatcctatcagggatgcgacaaaattgatactacatgaaaatggacgaatacagtaaattggtaccagtaaagtggggtggtgctgaaaatgtggaagcaactatggaactgggtacaggcagaggctggaatggtttggagggctcagaagaagacaggaaaatgtgggaaagtttggaacttcctagagacttgtcgaatggctttgatcaaaatgctgatagtgatatggacaataaagtccaggctgacgtggtctcggatggagatgaggaacttgttgggaactggaataaaggttttaaaagggaaacagagcataaaagttcagaaaatttgctgactgatgatgcaatagaaaataaaaacctattttctgagaagaaattcaagccagctgtagaaatttgcataagtaacggggagccaaatgttaattgccaagacaatggggaaaatgtcaccacagcgtgtcagagaccttctcagcagccccttgcatctcaggcccagggcagagccctcatggagaagctctgccagggcaaggtggaagggaaatgtgggattgaagccccacataaagtccttactggggcactgcctagtggagctgtgagaagagcaccactgtcctccagaccccagaatggtagatcttctgacggcttgcactgtgtgcctggaaaagccaaggacactcaactccagcctgtgaaagcagctggagggaggctgtaccctgcaaagccacagggccttccaaatagctagaactacaggcgatgccaatgtttggccagttcttttgtcaaactctcctcaagttatctagtttctatgtgctgaatatattgtgccgggaaagttgctgatacattattttcaagtttactttctctttatttctattggccaaatatatttttagcttttatttattttaaaccattctatgtcattttgtgtatatttctataaaacagcatttatagattttcctttttgtttattcaaattgaatgtttggtcttttaaatataaatggttctcagtccatttatatttatatgagctctgaaacatcttattcttaacatcttattttttgccttcttcttatttccctttctttaatgttgacttctatgaaattatcatgacattgctccttaaattttttaaagacatacccataaaatacataaagtatgattccatttgtataaatttgagaataggcaaagctcaactattctgcaggtatgcctactaaggtagtgtgactaaggaccataaaaacaaagatggtgggcaacaagctgcaagtcagggatatctgaatcttgctttgtttcctaatcagatataaccttcacctttaaagacatacatgttactattgagcagcgtgggagttagacataaattaggaaattacctgggtcctggttagacatctccagttattttaaaacatgatggattagcagagaggagagaattaaaatacttttttgttttctctgacaaactttatgtccatttctttt

SEQ ID NO: 471069 - DNA, 790 bp, Homo sapiens
cagcattccttcccccagggtgtggggcaggaccctctctggaatgaggatgatgtgacccacaattagaaagacaggggaagattagaggccgccttggggcagtctgagggacttcttccggggatggaagaggcttcaaggggtgtggtacggatgacttctcagctaggacggtcttcatgtttcttgggtccactcacagcccgatggccaagggaggacatggctgcccgccacggcagtatcttcagaggctccctgactcctgcgctctgggatctgcaccccaccatggggaaaccctttctgacctggtttgcccctcagtccctcgggctcatacctagtgcctgcggcaggacagccatggccgccaactccaccagcgacctccacactcccgggacgcagctgagcgtggctgacatcatcgtcatcactgtgtattttgctctgaacgtggccgtgggcatatgggctggcccagctgggagcggctggcaagagagcagtgagcacatccagaaaagatcagaaccagacagggaggatgctggagatgcatcccacagggagaagcagacagagcaagccaggcaggtgcagccctgcaaagatgtttagatggtgggcctgggagagtctggcgggggccggggggaggcctttaaggaagagatgttcctggaggaggggactttgagctgagcctttgcattcattaaagtatctgttaacaagtgactgaaaactgctttcaaatgagctctaagaatataggaaatgt

SEQ ID NO: 471070 - DNA, 730 bp, Homo sapiens
gtcatacagaagagtgtcccacgtcatatctgctgatatgttatggccaaagttgaacaagaggggctgtcaaatgatactgagaaaaatagtcatgaagatagaaggcaagtcagaggaatatcagagacccagaaagcaaggaaacagtttcaagaaggagagagtgaggggccaacggggccaaatggtactccaacattagcattttggttttccttgtcacgcttgttgctgcatcattataagatagctatggcacctatagatatcacaaatgctccaggctggaagaagaaagagagcccaccctctgcatctatacctcttttgatcaggactatttgtcagagacccctttcaacagattttgcttacatcccctatgaacatccaaagctacaaaggaagccaaaaaataagtatgcagttttgcagactcttagactagatcatgacaagaaagaagggaccaggaatggatgctgagtgagccaactgcagtttttacatagtatttttatgtacaaaattaaaagcatattttgtagagtgcatggattgaatgtagtgataaccaaactatgcaagaattgtgctttgcaggccctgtaaaaagcattttgtgacatctgaccattaaaagaagttaggagatgtacttgcaaactattcaggctctgatccctacattgcaggagtctgacactataaattgtacattttcata

SEQ ID NO: 471071 - DNA, 543 bp, Homo sapiens
agactatcactgtcatggatagtgattcctctgatggatctgggcaaagtaaagtgaaaagcttctggaaagtattcaccattctagatgccattaagaacatttgtgacttacgggaggaggtcaaaatatcaacattaacaggagtttggaagaagttgattccaacccttttggataactttgaggggttcaagactatagtggaggaggtcactgcagatgtggtaaatacaagagaactagaattaaaagtaaagcctgcagatgtgactgcattgccgcaatctcatgatcaaactttaaaggatgaaattgctgcagccactccaaccttcagcaaccacctccttgatcagtcagcagccatcaacattgaggcaagaccctccaccagcaaaatgattatgacttactgaaggttcagataatcattctcactttttggcaacaaagtatattttattaagactcgcagaaatgcatttggaaatatggccctcgagagtgggtggcccgtgggaaagggctgagcagagctgt

SEQ ID NO: 471072 - DNA, 555 bp, Homo sapiens
acacgcaggatgggctgcttctcaaagccaggtccctgtcccagccttaaggaccatgtctgcaatgtgacagaggaaaaatctccatttggaggaggcttgaacccgatgatctacctttctaataacagggagctggcatctatggccaacaccaactggcctgccccagcaatggacctggatacatcatactccactccaacctctggactcaaaagcctgcgagtcctttgtcccctggctagtcctcagtctgtaaagccaagcacccagaggcctttgccactagctttccgtgtagcttggaccttctgtgacctcactctcctgttgacctacagcaaaatagctgacgtcatgccaagcctcgcagacctaccagacctgatgacctgtgatctaccaatgccacaacatgactggaatgctcagacagttaccaaacaggaagataagccatgggtaattatttcaatagaaacttagagttgaagtgattgttcctgtaagagtctattaattagaattagattttgctgctaaactaaaaaa

SEQ ID NO: 471073 - DNA, 724 bp, Homo sapiens
ctttcgtgtcttccgttgtcccccagagtacagccagcttatgggtgaggaagaacatgggagcttcacctctggtctctggtcgtctggcaaggaggaagataagctcagcaggcaggccggtgctcaagcagcagaggctccagaggttggagctgtagttaaaagaaggcaaagaacatgcaaagcaggcatctctgcagcaatagctttcaaggaacgcaggtcaaatggcaggtccttttcccggaggcccctcccaccggccccgggcgtgtcattctgtcagccaccctcttctctttaccgggaaattcgatgcttctgtaccccaaagaggaacatgtcagacccacagatgacacgggccactggctactcttctggccgtcttctgtgctccatcttctcccgcaatattgactggctttgtttcccaattcatgtgggtgaaaatggccacctccgactgctattgaattttctcttccagtcccatttccaaaattcctagggaaaagttcagtctggcttgagggatgcccatcctcagaacaaaaactaggactaggaagagagacaaaaaccatgcggatggcagaggagaaaagcatttcctattaaacccagtggaaaaccgtttcagaagagaataaaagggaggcatcaccggcttcccctcctttctttcatttgtcactgtcaccaacaactttactgtcag

SEQ ID NO: 471074 - DNA, 489 bp, Homo sapiens
gacatcattcttgtgcttcgacctgggcgcagagcagtccctggactcgggtcaggagagctatgtggcttcagcacattgtgtactgtaaccaggtgagtttctccaaatccacggatgcttttgcctttgaagaggacagcagcagcgatgggctttctccggatcagactcgaagtgaagacccccaaaactcagcgggatccccgccagacgctaaagcctcagataccccttcgacaggttctctggggacaaaccagagaatgcagagatgtccctggctgccacagcattttgatgcctcttctcactctattcagcgcaggcctctgtgtggggtgacaaaagctccagaaaacactgaaagagaacctccagaactacaccctttaacttatccattaagcatctgctctgccaagcagataccttttatctccatttttatggacaaactagctaagactcagtgagattggatgactc

SEQ ID NO: 471075 - DNA, 666 bp, Homo sapiens
ctcccgttctctctccttggcttacggatggccatgttcatgtccacatggcattctccctgtatctccgcatcattttctctctatggtggtggaaatggagagacaaaggtaggtttgaaacatgttaatagaatggaaaatacgggacttgatcattggatgtggatggtaaaggagagagaggttctggatttggaggaggaagagctcaattttgagtgtatgttagtgccattcacagaagtaaagaccaggatgaggaagagttacttgataggaaaaataatgaatttgatttttgatcagttggtgtctgagggacactcaagccaaaagtcttcactagagaggtctggagctcagagtgccttcaatggagatatagatatgaaaggggtcagcattcagatgttaactgaaatcatgagaatagctatgacctatacagtatgtggagtgagaataaaagaggatcctgaggaatgccaacatttaagaacagttggaacagaggacagtcgcacagctagggtggagggaggggaagaccgggaagaactgctggaatatccagacagaaggccagagtgatggccacaaaagtggaggaagctggctgggcatggtggctcatgcctgtggcaaaaattaagttttaggcaa

SEQ ID NO: 471076 - DNA, 548 bp, Homo sapiens
tggcacactcctacctttcctgtctccatgctgcccgctctggatagaatacccttcctcatcttgccatcctggaaatctctcaattttttcaaaatcctaatccaagaccttgttcatctttctgtacaccaaggtcttagtacagcatctagaaccctagaagagtgtctagaaactcgtgtgtgtgtgtgtgtgagtgtactgaatgaatcaatgaatgaatgtctgtgtggagaaagccagagggtatttcagacagggtcccaaagtatgtgtcccttggtcagatcaccagatcttggggatcgcaggaactgccccagctttgtagaagcattgcaatttcatttcatccttttggaggctgaccaccattcagagaagctcagcctaactactgaatgtggacagtctacatggatggagaggcaatgggaaatgaaccaaagcacccccagcagggccagtacccaggacccacacctcaagtccagagacacttttctgtttcagactctctgaactatccttttggagtttgtaac

SEQ ID NO: 471077 - DNA, 656 bp, Homo sapiens
aggttcattggctgggacgcctgtgacaaaagacagattaacaagagaaaggttatcaaaaaatgaccaggaagggtatggtaacctagggttgtttaataggtcttgtgatgccgattttagcctggccttcttcattgaaatttctgcataaaccactccttaatctgcatgcaattaaaggtaggtataaatatgactgcaaaactgccctgagctgctaccctgactgtggggtagccctgctctgcaggagcagtcacggagctgtaacactgccagagttatgtgtgacagaacttctcaagccacgaattgtggcagtaaccaggctgtgggactggtggatcggggaacatgaattcttctctgtgaccctgcgtcttcagagagaagaaagttcctttcctctgggcatagaaagagcccccgtggaacgagaatcctgggacctgattcaggggagaagggcagaagaagattcggtttccccatctgtaaacggagataatgatgagctcacttcatacttttacttcattgttgccagggctaagggagtgaagctggcaatagataaatggtgcctgataccatacaccttgcggggccatacaaaaggacacagcactctgtcctcctagattgttaacttt

SEQ ID NO: 471078 - DNA, 633 bp, Homo sapiens
ggagtcatagacaacattaactcctcctactacgtttggccacatgcagggagtattgtcagccagggaagtccaggcaggtccttggtgtccacagtttgtattgaggcccaagcccatattgcctgcatggctgactgttatggttaatactgagtgtcaacttgattggattaaaggatgcgaagtattgttcctgggcgtgtctgtctgccagtacggccacaataaaagcaggcaggaaaatgtggaaagactagactggtttagtcttctggcttatatctttctgccatgttggatgcttgctgccctcgaacatcagactcccagttcttcagctttgggactcggactggctttgttgctcctcagctttcagacggcttattgtgggacctcaccttgtgatcatggctacagatcatcttcagtagcaaagaagaaaggccagaacttactttagacagtgttgcttcttcagtataccaaagggtataaaaactgccagaatatggaaaggtcagctaaaatctgggttcttgtctcacgaccaggaaaaattaggcacatggacacattaaaaggtgaggagaagggaatttattaaaagaaagctttcagtgaaaaaaa

SEQ ID NO: 471079 - DNA, 707 bp, Homo sapiens
agtccagttattatgatcaggggcaggggcactgagacagctcatgaagcaaagtttctccagaattgctgtattgctgtttccaaggtcaccagaagctgggaatctggctctgcctctgaatcacttaaaatccagcttcctggtccctactccagaactaccagatcaaaggattatcggagcagggcctgaaaatacctattttccaaaaaaactctcccatgggttcttagataaccagtccagaaattggcattttggaaaagcaaagaaagtgttcccattagaccgaagtttcaccttgttcatttcactgaaggaaatgcagtgtgttaagtctccagccctgttccttgccgaccttaaaccctcggtacaggagaattgccttcccattctctgtgaatccagtggacactcagaaaacatgaacagtctgcagctgcttcaagaacaagatccgggaatataaatatgcaatatacttcatatagttgcacatttttatatttctgaattttggattatttcaatggactgccttaggcttagtattttaaatgggaaatctccaaacatgtttattgagtacagattatagaagtgacacatgattaacctcctttatttaaaatgtatatgtgaagaatgataagagaaaggtacaaatctcccgattttatatcaaaataatatttttgcca

SEQ ID NO: 471080 - DNA, 748 bp, Homo sapiens
caagtctctgcttagatacctatgaataacaagaaactgattactttcctagaagacagagcaagatcctgtgaagaagaagaagaggaagaagaagaaggagaaggagaaggagaaggagaaggggaagaaggagaaggagaaggagaaggggaagaaggagaaggagaaggggaagaagaaggggaagaggaagaggaggaggaggaggcacctgggagacagagcaagatcctgtctcaaaaaacagaagaagaggaagaaggagaaggagaaggaggaggaggagaaggaagaggagaaagaggaggaggaggagaagaagaagaagaagaagaagaagaagaagaaggaggaggaggaggaggaggaggaggaggagaagaagaagaagaagaagaagaaggaagaggagaaagaggaggaggaggagaagaagaagaagaagaagaagaaggaggaggaggaggaggaggaggagaaggagaagaaaaagatcttacagattatctagccacctcattgtatttttatgttcttaaactttaacgaagcttaatttttttcttcatctttatgcttccagtgttatagttaagaatgaattgtctaaaccaagttcataagattttgttctagaatttttatagttcagctctttacacttaggtatatgattcattttgagtaaatgtatatttatggtgtaaggtgagctactcagaagtcagagcattcaccaataaac

SEQ ID NO: 471081 - DNA, 516 bp, Homo sapiens
cagcacagcacgctttggtagtttgatctactgctttgtggtttatcacatctaacatgttcctaaaagtgagcgatttccaggcacaattttcagcatcagctctagcactgcgacatagtgaatatgtggatgactttgttaaagaagatatttttcaggttacactaacaggcaagggttatcacctggagcgtgctctccaaaatgacttagcaggattcttgctgaaactggggaatggacaaggatggagcctgaaaccgaaagtcaaagcccagttaagaagaggacttagaggagcgttactaaagtttggattcttgctgaaactgggggatggacaaggatggactgtgaaacccaaagtcaaagtccagttaagaagaggacttagaggatttttactaaagtttggtcagggagacagtctccatcaaaatccaccattcactgtgcttggcaagcacaatcctccattagcttctgctggaaggtatgctttatgagggaaat

SEQ ID NO: 471082 - DNA, 843 bp, Homo sapiens
gacaaccagtgaagagctttttagattctgatgccgccccccagcaagttggatagtgcctgcccacactgagggtggatctttccaacctagtccactcagactcacatgctaatctcctctgaaaacatccttacagaaagaacccaaaataatgccttccctagagggtttggtttaaaagatgcaagtaaatcgagtcaggctcagaggttcaactctaggactttgctgcaactactgaaaaagaagtgctcttctccctgggctgctggactggcagggtgtaaacctgagctgctggttatcatgttttcctctctgattgaatcaacacaggaatgcggaggcaaagatgatggaaaatattgcattatctgcaaaatcacagaaggcttggtgcacagttgggtaactgaaaacgaagtagacagtggctaccaagaagagaagttttattttctgtgtcccatgcggtttttattccagggtgatgcaaccctttcccctaccctctcacccacagtgtgccctcgtgtggcccggaagtggaaaaaccctcagacattctggtcctcacgggccaagctggccagagctccaatcccttatcacagtgaccaaactacatagagaaaaagaggcatgaaaacaaggactcttacaagacttgccaaatgttaggctgaacaagtgaaatagccatttttatgggttacaaaacagttagacatcaggccttaatcccatttacaaggcaggcaccctcatgacctaaccacctcttaaaggcctcaccttttaacactatcacattggcaatacctgaattttagaggggac

SEQ ID NO: 471083 - DNA, 1203 bp, Homo sapiens
ttcctccacagataaatagttccagtatgactgtgatgtgtctagaagagctgccggagtatgtaaaaactcttgcagctcagtgcctgcctgaacagctgctgactggagcagctgccatgggtcttcccagttttgtgctagggatccaaggccctggtagtgtaggcacacgagggaatcttctgatccacagattgcaaaaatctgtggggagtgtagaaccctgggcagggacatggatgaagctggaaaccatcattctcagcaaactaagaggaacagaaaaccaaacactgcatgttctcattcgtaagtgggagttgaacaatgagaatacatggacacagggaggggagcatcacatgctggggcctgtccaggggatcccattgtatggatataccattgattatttacctgttggaggacatcgtagccacttctaaggttttagtggttatgaataaaactgctataaaaatcctatacttttctaggtgaacatacattttcaaaacagttgggcaaatacctaggatcagtaaattatgataatactatatttagctttgtaaaaaactgccaagccattttccaaagtggctgtaccattttgcattctcaccagaaatgaatgagtttccaaatgaagtttcctccaaatgctcaccagcaatggttattgtcatgttttaaaaaaaattagacattttaattaaagtattatatcactgttgttttaatttgtattctcctaatggcaaataatgttgatcatcttttgctacttctgcttgctcttggtgtccatttgcatgaaatatctttttccacccctttatcttaagtttatgtgagtctttatgtgttagaagctgtgattattttttatttatgctctctatttcactgaagatttttacctttatatcttctatcttttttttatttcattaaattggactttacctttctctggtggcttctttattagcttaataatcaaccttctgaattcttttcctggcaattcagagacttctccttgatttggatccattgctggtgagctagtgtgatcttctgggggtggtaaagcaacttatttcatcatattaccagaattatttttctggtttcttctcatttgggtagactatatcagagggaagatctgggactcaaggcctgatgttcata

SEQ ID NO: 471084 - DNA, 603 bp, Homo sapiens
cccacaaccccaggcatgtatacaggatccacactcctgcccacaaacaccagtttcgatctgcatttccttcatgattggtgaggttgagcatcgtttttggtgcggcccatccggatttcacatgaaggatgttctaagaaggaactggaagactggtgtggcccactcagcaggaagaccagcttggtggcaacagagattggtgagagtggcaggaggaggtcatgatgtaaataccagcagaggcgtgggaaagtggtcagagaaagcctcaggtggagtcacagatgttgatgtccagagtcaggagattgcaatggctggtgctgactggatgtgctggaaccagcagtgctcatcctaccaagcacaacgtcgctgtgcaccacagttcctcagacctgagactaagggtgagcaggagaagcctgcagaaaataagagatttagacacgactggctccccacatattgggtgggctagaagtcttccctccagactgaggatggataaatcagatgagataaatcagaagatatggggtgggtgttggtgcttttatattaaaagaattagcaacactactcagatgattttaa

SEQ ID NO: 471085 - DNA, 2112 bp, Homo sapiens
gcagtattttccgcctgaaatttctccgattctaggctcgggatgggaggctccgcagctgctccagcctgcggccagctccgcctccccaacagccaccctctggggccgagctcctctataccctctgcggcaccgcaaagcaggcatttcctggggcagcctgaaccggtggcccagagccccagttcctgccaccggaatccggaccttcctcccgctcccctcgccagcgaggcggcccctcggggggcggtcggcgccgcagcggctccgatgcccgcccggaagggagcgctctggccccggcctcgcagctgcgggacagccgggagcggagcagagggcagccgcggccagttgtctccccagcggactgggaagggaactttatctcggcctggactcccgctgtacctttgttgggggttagtggtgaggctgcggtcgtccgagctcctgggtgtcgcgggcgccgcgatcccctcttcccgtagaagggcccagggcgctgctcgaggcgcgggaacccctggccagaggcgggcactggcgcagccccgcggctgctgctggccaagccgactgcagggatgagaaattccttgtaagagtggctggaaggctccgcggagagggaagaaactcttcccagagcgagctcccactgctccttgggaatggtgcactttccagttccagttggaccctctgggattgtcacaggaagcgctgccatgtatgaggagccctctgcaaactacagaaggatggatgctcttagcttataaataagattttgacgccctggttggtttgatgacttgtgtcatgaggagtaggggtgtgcgctgattccaaattcttccacgcggcatcctgctccggagcctcccttgtctcctagagaaagggacagggaatcgaaggatggggagtctgagggagaggcccctattccgcacgctgtctcctggctggctcctgaagggctggctgcttcccccacctggaagtccaggcccctgttcggaagtcctctccgcacagcctgacagtcccttggttctcttatgattgctctcctcccgcttcaggcctaggatggcaaggacagctcccacttaccagagccaaggcactacgccgttcctgggtgtcctcttctcctccagctcctttgtaagtcccatgctcctctatttacctagtggagggtgtcatgccaggaccctggcatatgatacaccagagctgcattgcttttccgaatctgctcaagctgtacaacatttctgagcctcagtaccaccagccatctgtggtcctccatttgtcctcttctcctacaaatacctccagcccctctcttccttcatgatgcttctagcattggaaatcctccaggacaattctgccttcaagtttcctagcctgagccactgagttgatggaggaaaatgtgatagagatgactcgtcctcctttaattttcccacttctataagcatataaacgtgccctgcaactctcctaagtgtccccagaagacccgctttcccagtctctgagacaaacatttcttagccttctctcctgcaagagataacatttctcaaagtttctttgagcatgtagatgctgacaggggatgatctatcccttccaccaccaaacctccacaccagttggcactccacccttgttatagtggaggaagctgcaggctagttccagcacagtgaaccccagtagtgtttcgcttctcagcctttgccatctcctcatccctgagccatctccctgtggcagacactgatgggccaccagcactgcatcagtgaaggacttgctgccccagctgctggcgtgctgtcagcacagcctcctgcagtccgcctctccacgattgcggaaagcatctaggctgaagggtgcaggtgctgtatgcattggtttatatgcttcctgtacatttcctcaggaacccaacctgcacccgtccttctctaaagtatggttaccatcagcatccagacatactcctttttttttttttttttttttttttgcttctcttcatagcaaaatatatgaacagtttttaccttt

SEQ ID NO: 471086 - DNA, 535 bp, Homo sapiens
caccagcagagccttttagcatgaactttgagtattggactggtatctttgcgacttcacaaaactgtgccgactcatcatttcaatgcttaataaaatataaaggcagatcccatgtgtatgtattgcaggcagagtgtttgggtgggcctaagtgttatgctaacctcccagatggccgaaatctagaaaacctggaagagtccatgtcctctctcccccattcactgacccctaacacagatcatgtcaaccaggcttttgaccagcagaacaaccaacccgtggctggtggacagctgctgggctgtgccaaggctcttaatctgggcccacagttgctctggattaaagaagaaaaccaaaagtgggaatataaggtggacccaggaattgtcctaagaaatgtaccccaaatgactatggacctgatccacagctttctcacagcttttaaaaaaagaaaaccttaattacacaaatcacaaaaacaagctgtttgctgaaagggaaccatgactgttcttggtattaa

SEQ ID NO: 471087 - DNA, 967 bp, Homo sapiens
ctgtacctccctggatgaccttgctccccagggaagagccttgggtgaggaccacctcctccggagccctgggctcctcctcccaggtggagccagcttttggcccttggagtggagtacaggatcctgggccttggttactgagtttagggatagcttggcctctctggggcagggccaacaactcagttccagaaaatccattaagcagcccaagcatgtgcttagagcacggcaaagagaaagggaacacacacagcggcaagccagtgaggagtaagccatacccttccttgagtatggaaggaaatcctgatgctgcttgcaggatcccctcttggtcccaatctcttaagaacacagatacgacacaccgagtctattggcactcagccttccacaccagggaaccaagtcatctgggcaaacttccacacttcaaaactcagcccaaccaagtccagccgatgacaaccatttctccaacattaggaggtgttgccggcgatgctctggcacctcctgaaaaactcaggggcccagagtctgaggagtatgaagaaacagggcagccccagggaagacgaggggggcccatgaaacaaagcaagtcggcatgaccaagttgaaacgtcgcttcattttccaagcttgcagcaaatatccgttactatcgccaaaggaggagaagctaaatgcaagtttgggaggttataaggaaggtaattttcttatctgattcttctctcaagaagataattctggtaatatggagcttgaatgcaaaggaacagatgctggcaccaggctttctgtacactctgtagaactgtgagccaatttttattggctcttttatttataaattatctagcctcaggtattcctttatagcaatgcacaatcagactaatacagaaagttagtactgaggggtggggtgttgctgtaaagatacctgaagatg

SEQ ID NO: 471088 - DNA, 798 bp, Homo sapiens
tggctttctgttccctgagtgcccgggtctcccacttctgctaatgtggtttcccctgagtagaatggctgttagcctggcttcctcccacttctctttggggactcagccaaaatgtcacttcccccttctccaggcccagtttggttggccagaccccctgctgcatcatagaacctatcacattgggttatacctcaattgtccacgttgcctgctagtctacaagctctgcaatggtgaatcatgtggttataacattcatgtggagtgttggatgttctattgtgagaaggcgatgcatggaaccaaggcagccatctttttatcatggggtgaaaatctgaggatgaaaagtgaatatgcgaaggatgcagagtggaaggaaaggaagaactacatccttgaggacacgtgggagccagtgggccaatcccaggattccttgtcagacctagaggaaggcacatatccaaaatccctgccttgagtccttaactctgaaaaagtcttagtgatgagttctaccccttcctgccggtgaagggtaacaatccctccatttttggtgactctctactctgcctaaccttaagtttttctaagaactgaccgttaccttgtgatggaggaggaggaggaggaggcagtagtgatttgccaacatctttgaacctttcctgggtgacctgccatcaaggaatatttcctggactgcttgtggaaagcacatttcagggtgctagtaccatcttgtggagatggttaaataaattacgaatagaacagagaacatcc

SEQ ID NO: 471089 - DNA, 2663 bp, Homo sapiens
gcggcatagaagagaatatgttttgaatgtttgcgctttgggatttctggatttcattaaggaaatatggggagtcagaagtgctggttcctgaaagggcctgagaaagcaagaaggtggaagatgtcaatggaattgggaaataaaattgtgggctacatgccctttatgagtgggctaggaactctgctccacgtcatcacctacactgggccccagctgatggagcaactgccacagggaactttggcggtggccctggaggctgaagaagagggcacttggcctacagacttatttcttcttggacacacctacggtgcggccacagcggccagtggtcttggtgtgctggcctcggacacgaaggccccagaagtgactcagccctctatgggcccgaatattcttcagtcgctccaggtcttcacggagctcgttgtccagaccgttggccaggacctggttatattttccatcctttacatccttctgtctgttcaaaaaccagtcggggatcttgtactggcgtggattctgcataatggtgaccacacgttccacctcatcctcaatgagctctcccgccctcttggtgaggtcaatgtctgctttcctcaataccacatgagcatatcttcggcccacacccttaatggcagtgatggcaaaggctattttccaccgcccatcgatgttggtgttgagtactcgcaaaatatgctggaacttttcagggatcactagagacatggcagcagcacaagcggcggcgtgtaggcctcctgtggaagaatcttttcaataattttttaatctcatctaatgtttacatatgcaatcattctcatttcctgttcttctaattttctgtttttaaccctataattttgaaagtaagatttgctgaatttttttcatctcatataaaagtcttttatttcaatatgagtgtttaagtcattgttacgtagtgctataaatgccgtaattttcttgttattttatttcgtgctttcagttttttatgtttctctttctatgttacttctttcctatgtactttttttcctagtgtaattgcttttcaaagaaaaattttgcaaattaattatttgaagagatgttaatggatgctctggcaaaaaaaatcacaacactttctatgactacacaagacagggaaatatttgggcattgttttggggatccacaatgattattaaaatggttgtgtttctaagagtatcagcagctaggcaatctctttgactatgtttaatcagagttcacaatcttatttgaacacagaacacatttttcattatacctccagcaatattctacaaaatcgtagttgtgggatactggtttgggaaatgctcttctagtgattaggaattcatagaacctactttattgtataattgttcaccttgaactgttctaataatactcattgaacctatttttccaaccccacttttgagctgatctcctgttttttgtgtcccttcgactaaactcttcaactaggcatatgtacatatatatgtactgagttgttttttaagaggtattttctactgtgagttatttaaagacagtttgaaatacactctactgacagtaattatctaagatgaacttgatgagtcatatgctttcttcatatttaacttcattaggtatggcaaaatttcctccatagttggcagtatcaacttacactctcatcatctgaatttgagagcctggatcttctctaaaattcggatggatcatctttttccatgctaaagggcgtaaaacactacaccatttccattttcatttccctgattgctagtgaaggtgagtaacttctcaccactctgctggtcattgagtctcctattcattgatttgtttatagtttttgccaacttttgcaattttttgttcatttctgattgacttataggagtttaaaaatatattccagatactccatgagttatatccactgctaatctttttcaagtctgttgtattaagatatacaaggttttatgatggcttgcagttcagaaactttaaaatttaatgtgaacaaatttgtcaatcttttctttataagcacaacttataagttgtgctttttgagtcatgtttaagaaattcttccccattccaagttcataaaaacatacttctatacattattctaaaagttttaaagttttgcttttcagatttatctttattctacctggagaggatgttttgtgtgttgtgtgaggcagggatatgcttttttcaaaatgaataaccaattttctcaatgccatttattgaataatttattatttatgcaattataaagtgacttttctcatacaccatgttcccaggtaaaggtaggtctgtttgtcatacaaagcctggtgccttacatatttgaccatacttattgttagactttttctaactccttgaaatagtttagagaaaataattttgcagagaactgtggccttgtactaatatttgagggtttaaattagcaagaaacaggaaatgtaggttacatgtattaaataaacagtaaaagataatagtgccttttatacagaaggtattttgttatgaattagtaataaagatgtaaatatgatggttaa

SEQ ID NO: 471090 - DNA, 522 bp, Homo sapiens
ggcctggagctgccaaccctgctgcagcagccagagtacctggctgtgcgcaatggctggaccctgtgctcactcgctcacaaccccttgctgctctctgcctggcttgcccttggcaggtttggatatcttggcaaccattgatgggaagcgtgccaaggcccaggcacccgggctagaagcttactctgcaactcctggcagacacctttactcctacgcgagagatctgaaatctaccacgtggctgcactggacccgctctcaacctattccccttttgggcaaagagaggggagaatgggcccactgtgttttagaggctgctccccaggcctctatttgcgtgctgcctacatgcctccagtcatttctatccccccaaacaaccacaaccctgctcaagctggcacataaacttgcatcgtgtttccaagaaacagctgagaaggcttggaaagggctccctcctctctcatgagggttagggatagagaccatttccattttacagacaagaac

SEQ ID NO: 471091 - DNA, 597 bp, Homo sapiens
gcggagacctctcccctgaggttatagaccatttctgcatttctcactgagctgtctactgattactcatgggcgttctaagttcttatttatttgtgggctcgtttgctcagcattatctctacaaccagattctaagctttgcaaaggaagagatcataccttattctgtatcccagatacttagaaagtttatggaagttccaaacttttcccacatcttcttgtcttctgagccctccaagtctctaggaagttccaaactttcccacattttcctgtcttcttctgagctctccaaactgttccaacctctgcctgttaccaaagttgtttccacattttttgggtatccttatagcagcaccccactctaccagtaccaatttactgtattagtccattctcatgctgctatgaagaaatatctgaaactggattcaattacctccaaccaggtccctcccacaacatgtggcgattataggaactacaattcaagatgagatttgggtggggacacggccaaaccatatcagcagggtgacacaggcttaaactgagacaatccagcatggaacacttgcaggaagtact

SEQ ID NO: 471092 - DNA, 769 bp, Homo sapiens
tccttaagggtcttgcctcctcagaggaaaaattcagctaaggggcagaatccccgaagtccattgtatcattcttatgcctttgcgtcctcatagcttagctctcacctatcaactttttgatgcacctaacaccggagctcccaaatttataaaacaattactaatagacctaagaaatgagatagacagcaacaccataatagtggaggacttcaatactccactgacagcattagacaggtcatctagacagaaagtcaacaaagaagcaatggatttaaactatgttcaggaacaaatggacttaacagatacatacagaacatttcatccaacaactgcagaatacacattctattcaacaatgcatggaactttctccaagatagaccatatgataggccataaaatgagcctcaataaatttaagaaaattgaaattatattaagcactctctcagagcacagtggaataaaactggaaatgaatgccaaaaggaaccttcaaaaccacacaaatacatggaaattaaataacctgctcctgaatcagcattgagtcaaaaaatgaaataaagatggaaattttaaaattcttcaaactgaatgaaaataatgacacaacctatcagaacctctgggatacagctaaggcagtgctaagaggaaaattcatagccctaaacacctacatcaaaaagtcagcagcaaagtacccttgaagagggtctagcaggcaactggagagatccaagtgccttattca

SEQ ID NO: 471093 - DNA, 893 bp, Homo sapiens
cattacagctgccatcacggttcatgggtgatccaccgactgcttcaaaacagctgtggtcaagaggctgtatcaaaatgtcaaccatggcccttgtcattccttctctccagatgatccagttgcatgctgatgtagagaaccagcactgcagtgcagagcagagcttcccaaactgtagcaccaccccatccagtcctgacccttacaggaagttaacccatcgagtggcctttggaggactagactggttaaatgatgatgaccgtgatgatgatgatgatgattccttgagcactatctcctcctctatgtctttggcgttaggaagagtggataaaaaagacacatctccacctggagaggaagcgagaagcaagaagaatcagctgctcacctctgattttctctgttccaggtctaatgggaccatcattcgggaaggatttccttcccactcccctcctgctacagtgatggctcctcttgaagctggacggtaaaatcagctgaatggaagctaaactccagtgggcttggccagtctctaggttaatcctagtcttagccttacagccccactgtattataaagcagtcataagaacaaaagcttggtattttactcattctttcaacaaatatgtataaaaccttgctgcaagcctggttatggctaagacactcttcagccatctaatctgtttctatttttatattagtaacctttgataggttttcagacagtcccagatgactgagtgttgggaccctttgtcctgggtcagggggattgcagcctaatgtttcagtgctgtgtctcctccctcacccagtaggtagttttagagctactagattctgacagcttgtgtcaagtcccgtttattgctc

SEQ ID NO: 471094 - DNA, 631 bp, Homo sapiens
atattatgctgtctttaggcacctatgctgggggaggtacccccctaggctctggagaggaggtatgagtgaaggggtactgctcagggagccctgggtgtctctgtccatgcaccctaagccgttgggcttagactatcagctgatgggaaaggtggctaaagaggatattgcaaagaacccacagcaactgcagcctgactgttgctctgggctgctgtctgctgacaacagaagtgaatggcagaacctgggcaccaccacccaactgggcggagaaggaagccgtatagcagtgaaattgagtctgaaagggagtgatacatgtgtgtgcttaggaaacactgacttgacagtttactgtgagaacgtggaattcccagcctcagccccaacccctgggcagcctgcaggcattctagaacagtctgtctacctctctcaaagaataactatgaagcagctcctcagggtccagggaatttgtccaccatcgtttatataataactgccagtgcagagatcctgaaaaaaagtctctgttctttctatgatgtacgaacttccttaagaaaataaacctgtacttcaaaatttatattccaaggcttgaaaacaaaagcacattgcc

SEQ ID NO: 471095 - DNA, 817 bp, Homo sapiens
atggaccttcaagatgcttacacaacagccaggaagaaaggaccaaaacctaccctgcagagcacttacaatatgccactccctgctgtataatgggggggatgggaagaagatgtccccaagccccctggtcccccgtagaagggatgaggggaagatccacaaaatcacacagaaatacagagactctgcacaaggcatcccccattctaaatctcctgtgtttcacaaggcatcttggtgtcattctgtgtatcagactgtgctggcttttctccatttacccaatggatccatttaccccgtggatccattctctttctttctgctccctggaagactgattccgatggattgcatcacttgggctcccctcacctctgactttccactggatttgaccgatgggagccataagcaagagacaggagagtggacctccccaagaagtgaggaagatccgaaggatgggacaggaggagaggagatgggaaatcattccaggcagtggggccacaaaaacaaagcatgtggcaggaagaaacgtggggcatcccaggacctggcaggagatcggagcagcacaaggagaatgccagaaaaaaaattaagtaaggcagacactgagtcaaaactgacatgggaaaagagcatcctggcttcagtgcagaaaatggattcaagcaggaaaaaagtggagacagtggaaccttagaaagcttatttgggctaatatatttttatctcttactatgcattagagactgttctaaattctttttagcatcgtgatggctcatttcatatgctagcttga

SEQ ID NO: 471096 - DNA, 737 bp, Homo sapiens
ttggagacaattattctaagtgaagtactctggaatggaaaaccaaacatcgtatgttctcactcacaagtaggagctaagctatggggatgcaaaggcataagaatgatacaatggactttgggtacttgagggcaagagtgggaggcggagctattttaaatcctgcactagaagactgcctgaaagagttccacagagtaaatgttgtgcagagaggacaaccagaaatccaggggctgagggtgtcccccagagggacagccaaaagagacgtccagggtttgaagttagcaaggccccacagcagcagcatctctgcagagccacagatgccctctttggagcaagagccagcttttgtccttctcaggacgagagcaaagccatcttgtgacaatatcagtcaagcgagaaatcacagtacttctctcttcctctcttcctgtgttccagccctggaaggaacgaatgctaaagttagcaggatgctggtagagatcaaccagaaagaaagaaaaagttgactacaaccttcctcccaggcagcaggtggtcgagtcgactgaagccattcttagaaaagagggtggggggaggcgggaaagacaatgctaagtcaggaattggttcatacaattatggaggctggcaagtccaaatgtgcagggtggtccatcaaactggacacctaggggagagctaatgctatggttcaagtctaaacgatgtctgcc

SEQ ID NO: 471097 - DNA, 690 bp, Homo sapiens
gaaacggtttgaggatgaagagactggacagatggatggaggaccatgaggtgacccaaccaggggcaagaaggaagagaatcggctgcttctctgtggcttcactcctgaagtcagcaagaccacgaacccactggaaggaagaaactccagacacatctgaacatctgaaggaacaaactccggacacaccatctttaagagctgtaacactcaccacgagggtccgcggcttcattcttgaagtcattgagacaaagaacccaccagaaggaataaattctggacacaagagtgcaggaagaactgccatttataaaaccatcaggtctccatccgggaaatttcagaaagagaatgattcttatttgaaatcgaaaggaattcagccacattgggacaagggacagaaagcaacaaattcagctgtttcccagcaagttgccagcaccaactcttcagccatgtatgtgaaaccatgttggaagtggatcctcttgcccctactcagacctcctcagctgatgccacatggaatgcaggtgaactgtgtgtacattttcaagggattctgtagcaaagaaacacaaattaggtgactaaaacaacagaaactttttcttttacagttctggaggcgagaagtctgaaatcaaggtattagcaaggccgtattcccgttaaggcttt

SEQ ID NO: 471098 - DNA, 698 bp, Homo sapiens
tctggtttacacaagtgtgctagtgaaaactcaatgagcacactatgatttgtgtacatttctattttgtcaaagagaaagccaaacagactcgcaagaagttggcttctgccaaagggttcctcaggagtgcagacagacaagcagcaaggctcctggatctgagaactgcccttttccaccaatgtcaaacacgtttcacagctgacctgccaagaatgtggatcctgcttcaagatacacagtctgagacagcacgcagcagccgaaagagggaatctccgttccctctgatacaatgtgatgagaagggcgcttcacgtctatggctgcgttcccaaaaatccataacccggatcgaattaggagaaaaatacaacagacaaactcagactgggggacacgaaggtctgcagcttcattcccgaagtcagcaagatcagaacccatcagaaggaagaaactccggatacgtgggaacatcagaaggaacaaactccggacacaccatctttaagaactgtagcactcactgccaggcctttccacaactgccaaaagaaccttccacaatcattacattctcatttcgggacctcgagtgactccctactgctagtctcatcaagtctggattctgctagcatccaaaaccttcattccatcagcctctcttcaccactccagagtcatctctc

SEQ ID NO: 471099 - DNA, 1011 bp, Homo sapiens
gaatttcctatctgctgtaacaaatgaccacaatcataatgcctaaaacaacaaacatttattatcttacagtgctggaaatcagaggcctgaaatgggttcactgggccaaaatcaaggtgtcatcttccacatgggccaacaacatcatttggggcttggccatcagaacaccaccctccacacagctgtggaaattcttccagtccaaagtgcattccttggcaagtcttccgggagggacgctccaagatgtgcttattccaagcagcgcttaccctggaactccaaacaaaatgctaggcagccacaaaatgcaggcagatgcttcctccaaaggggaaggaagcagaaaggaaatggataccaaatgtgccaccagtgaatgtccacagctaccagccaaccccaatctgtttccaaaccaccactgcactcctgagtcccaaacaggctacacacatttctggccaaattattagtctatgtacacatagattgtactttaaataatataactttttttaaaatgaagaattgattttatgagagacttctgtgatcgcctgaaaatatggttgcaaaattctactttgaatggctctatgtacctgtagatatagtcgtacataatctccaaagaacttttcccaaaccttaagccactgcttcattagggcaaatgagaagcatggtcttctggctaaacggctttttgcaacatccaaaatgcgtctttgactttgaatcattaaaaagttggtcttgatttagagaattgcttttcagggaggaagaaacttttggctgcattccttcatgaaagggatggatcaagatgtatctggacaatgtgttcagataaaaaaaaatttagactggctcgtgtgtttgggggaaaaaaatgaaaccctgaatttcagaaagttgaattgagggctgtaagttttccagattcatatagtttttaaattttctgtaaataacttgtagatttatttgtctcctagg

SEQ ID NO: 471100 - DNA, 841 bp, Homo sapiens
agcaatagtcgtgttgtggttcctttgagagaactaagtggagctggtctgtctcagctgcagaaagttgcctcccctggaaccatagtcttccttccccagggggcccacatccagtgactaatcaaattcaagatgagccccaggacttgtgtggacaggactgagaaagatgataactctctcccctgggaagaggcaagaatggcactgtgccagctgtcttaccctatgaatgagtttccatctgtagccaaaagtgtcctaactgaaacaatcaacctcacggttaataaagtgcaagagtttaagctagaagaagtagttccccccaaccccccgcatgaccccacatgtcccttgctcctgttcatagcagctgatgtcatcaaggtgcctctaaacataggatttaggccaagcacctctagatctccaaaagcagttgggagaagatgcagatatagctctctggtggagaacaactgttctaggaggtttcagcaattagctctctgtggcattgactttgttactagctccagcgacagccagctccaagtaaaggaaggaatggttcaatatttttcctccaacagagaagggcttcgacttaagtggagctccggatgattttggcaactaagtccagtgtgattcaagctagcaaattaaacaacaagacaaatcaaaagaggctggagtaaagaatccagaagagcaaggttacactttactaccaagagagcaagtatacttattttttttcttttgatcttacagataataattcaaggcattcttttttaaaaaattgaaacactaggtataaagccaaagg

SEQ ID NO: 471101 - DNA, 664 bp, Homo sapiens
ccgtttcctgaataggaatcaccaccagagttttccgaggcctcttgctcttcgctttctcggcaaggctttctgagtgactggcactgcagccacactgtctctacaggaataggaggagtttgagcatttgtgggcagcaggtgttgtctgccactatggttggctgtactctttattctaagatggcttccagaagcttcgacaataattatacaactcacagttccagcaagaaagagacaccatctttgtcatcagcaaataaatggggaatgaatggcaatgaaagccctgaattgagcaggaaatggggcaggaaagagatgcactgctacagcccttccttcttcttgggaaaattgagcggcgcagggagcacagaagggctggctaaaagagtctgtaatggagaatgggcaagtacaacaggtctggatttccaccaggaaacctggctacttcaatctgacctgtcagaactgcccacttccttcattttatattttcattcttggaaatttgtctactgggaccccaccccttcttctcaaactcagccccatagaccttagagaccacaggattcatgcattaaaaatagaaacagaagccaattaaacctctaatatgttaaataagagttatttgcatctctgaagaa

SEQ ID NO: 471102 - DNA, 937 bp, Homo sapiens
gcttttcaaagcaagggcagtgatggtacaggaaaggggtcccgatccagacatcaaaagagggttcttggatctcatgcaagaaagaattcaggatgagtccatagactcatggacagctccgactcaggtaaagcctgttgtctacatgcttccagctgccgagctcaacctggacaagcagaggcattcactgatgaagggcagatggaggatgaggattaaaccagccaaaagggaagccacgtgccctcctttctccaccctcaaaatccagggatccctgatggggaccttagccccttggcccacactccactctctgccatgttccagcaagagtacgaaaaggcagaatccacctgagggacgcaggaagaggagagagacctttggactcatgggtgggaggtgtttggtaggtggaagaaggcttgatgagagggtatttagggctgaaggaaaagcaaccagaggtgatgacactcgctctgctggttttagcagctacagtcacaccttttgccgatcaacgcctacccagtactgctttttccggaaacactgagatatggaaagttgctgtagggatcaaaggaaaaatctcccgtttgccttccgaatatttgctgaaaatcaaatgaaaaaggcaaattgataggagaaaaggcatacatatttattaacatgcatgggaggatatcagagtgatcttcccaccacacagtagggtatgggtgctaagatacccttcttcttaggcgatagggagggaataaagcggacctttgagtcatctatatatctggtgacccagatatacagtatgggatcaacagatatatagatgactcaaagatacactttattccctgtaaggacttgtctacttatagttaactctgatttctaggattctgtcccttgacattgcagc

SEQ ID NO: 471103 - DNA, 645 bp, Homo sapiens
tgtgagtacgagcccagtggctgaactggaccggagtaactgttatggactgaatgtttgcatccttccaagttcatctgctgaagacttaacccccaatgttgtggtgtgaggaggtggagcctttgggagagctaaggaggaagggcccaggctttattatctctctttccagatgtggggcacaaggagtagaggaaggaaggagatataaaagccgtcaacaattaaacacaagaaaatggatccagattctttgttacaattacgtagatatcagagagaacaaagatgacgccattcttcaaagtgattactgtggaaagctggaagtcttgcaagaagcaaaaaccaaaacgagatcaaatgtgcaaggtcttttaagaaaaatgcctgcaggaaggaaatacctgtgggagggcattgctgtgcagacaattgccggatttgggcagggtgctgaactccagggagtaacaaggaaggtgactcacattcctacagcctccaagtcccttttccttttcaaaacacatctttctctaatcagaatgctgcttcttggctctgagtcttcctagtatcacttccttacctctcactctctaataaggccacccacacctgtcctccagattctttgcc

SEQ ID NO: 471104 - DNA, 570 bp, Homo sapiens
ctgaggtaaatgctgtgaggtgaaggaatgtggctttgagagagcagataacaaaggcatccatgatccacagggtggtccgagaaggttttcatgagagaatgatgtttcagtttagatcagaaggaaggttgcagcctgtgagcagttactatcagctctaccctcatgtattgattgtgaaccacgcaagtgagcagatgcagacaggtggaagcagggctgtgacccagaaagcacctacacagggattcgctgttcctgaacaaccagcagatgacactatgcccccctccccaatattaaaagcaataaaagctcctgccagaaaaatggtttctacccttgacctgcattgtgccctcctagagataggagaaagctatacttcctgccttctccaagttttggcattgaactctgaactgcacagccagcagccttctggaaatgaagctggagagctcaacagcagtggtgaagatgctttgaagagggtctctttgaggcctgggattctgcaatgcagaagtcagtgatccattccccttgtccatcctgtgcatctat

SEQ ID NO: 471105 - DNA, 574 bp, Homo sapiens
gtcaccactaacaactctattccaaccaggggaggcacagggctgcctcctgactgtcattcgtcacaatggcccatggcactctgagttcactgaagatgtcatccacattctgtccaagggaaagggctgtgaaatgtaaggggattgactctgcactgcttcaaagaatgagtgaggaccatatgaaagatgtcgtaataaaagacggaattttggatacagacatgcaagtagaaagaagagcatgtgatgatgaagacagagattggggtgatgcttctacaagccaagagacaccaaagattgccagcaaacctccagaagtgagagatgaggatggagagccccatgagggctccattctcatgggtaggattggtgccattataaaagggaggatttctgccttcatctatggtggggcagaggatgatgaggtcaaggaagattcagtccaccaaatagaattgctgcgaggagcaaatgacaatttcagaggtgcataaacattgagtaaatggtaaagcaaaagaaaagaacagaattatttgtattgctgctctctggctgc

SEQ ID NO: 471106 - DNA, 640 bp, Homo sapiens
gagtgtccatgtgcataatctcatttaatcttcatgctgatgctgtgacttagctacggggcttgtcaagtaggaaaatcactaatttccccaaggagcctcagagatgctgctggcagctggccctcctctctacctgctgctgctgctgctgctgctgctgctgctgctgctgctgctgctgctgctgctgctgctggtgttgaccaatttatcaacttttcttgtctttatgcttagcccttttgtgtcctatttaaaaaatctttgtctaccccaaggtcacgaagatgttttccttgaaaagttttacctgtcacattttgaatacaaatctgaggaagcgtctttgcatcttctagtgatattttttcccgggctcagtgaatctacggcagggctgaggggtaataaatccataatggtaggagcaaggagccaaaatcagacttcaggctcttccagttatcagctgtttaacgttaggcaattgtttaagcttgctgtgcctcagtttcccaggggtaataatcctgccttcttcatagttttctggtaagggcccattatgtcaatacaaggctgagaactgtacctggcatgaaacaaacatcactaagcgttagttattattattggg

SEQ ID NO: 471107 - DNA, 1088 bp, Homo sapiens
acccccttcctagcaggacagatgaggaggcatgaggagccatcatggtccctgggcagctgactccagtgtcccgggatgaagaggccgctactgcagctgtggaatgcagttataaccttttaccttcccttcaccagacactgcctataggcctcacacaccagacagttctcaagatgtccttcgggggagcctccaggaaggatgaggcttggaggacatataggagccaaagaaaagtgatggaggtgatagaggtggtggtgatggtggtagaagtagaggtgttgatggagatgaaggtggtggtggaaatggaggtgatggtggagatggtggtggtggtggaagtggaggtgatggtggtggtggaaatgaaggtgatggtggagatggaggtggtggtggtggaaatagaggtaatggtggagatgaaggtggtggtggaaatgaaggtgatggtggagatggtgatggtggtggtggaagtggaggtgatggtggagatggtgatggtggtggtggaagcggaggtgatggtggagatggaggcggtggtggtggtggaagtggaggtgatggtggtggtggaaatgaaggtgatggtggagatggtgatggtggtggtggaagtggaggtgatggtggagatggaggcggtggtggtggaagtggaggtgatggtggagatggaggcggtggtggtggtggaagtggaggtgatggtggtggtggaaatgaaggtgatggtggagatggtgatggtggtggtggaagtggaggtgatggtggagatggaggcggtggtggtggtggaaatagaggcgatggtggagatagtggtggaggtcttggaggcagtaaagttaaaggctggaggccatgcaggctgtggttgtgaaggtagagctgacagaggtagaagtggttgcagtggtgatgaaggtggtgatgatgaggagagtcgcgattgtggtggtggttatagtgttggatctggtcacttccctgcttcttttctggaactccacttggagtaagaaatttgttcttctttgctgtactttttccaagatgcaactgag

SEQ ID NO: 471108 - DNA, 534 bp, Homo sapiens
cggtcacgcaagcagaccaggtccccagctatcctttcttgtagctttatgggaatatggagagtgggttttccagaggctgcccaggcacacaccctcattcccctgttatgctgaccaggtgctttggcttagtggtagagggggtccttgtttcaccaccagacttttgctttcactcagagagagagaacggaatggcagaaagagcagtaggtcaggagtcagaaagtgtgtgttccagtccagccctgtggcctcggtatgaccgccttcccctggttttgtgggtcctgttggtcatctctgcaataagccatggggatgaggttgtgagaaatgtggacttgatcattatggcaaaccttaccttaaatagctttgaaaacaacaggtttatagccctagaatcaggagggctcatgtcctccaattctgtaccgtaaggagtctctctgagtggtatccttgtagatgcaggctaatctaaagactagtaagtaatcagcggggactgcatttaattcacccctt

SEQ ID NO: 471109 - DNA, 608 bp, Homo sapiens
gtaaaaccactgaacttttaataggtttatgtggaagccctcaagttatactatgcgggcggtggaagacagagatggtacttggaggattgcggccgacacgcaccgatggaagcttccattttcatgggggaaaatgcagccctggcaaggtgcacagggaaggtggccaaatctgcgtacagtggctaagcagtaaaggtgctgtcaagaaaatcactgttgggtacattcaagggggcaatggtgacataatcacaaggttccgcttcaagattggcttccaatcaactacctttgtcctgagttactcacatgtagggctgaagaagctgcaggtgaccacatgtaccaggcagcagctgaacctcatggagtctgtcagtcctcggcagcactcaaatcctcaaacggggattaatgatggaattggagcgaggaaggagggggtgacaaccggaggattcattttacctcttctggaaaggctacaggtcaccctgtaccaacagactattaaaatgaagctgcctatccatcacctggaatctgctggtccaaacacgctgaaattgatctagcaggaggggaaaaataccattacagaa

SEQ ID NO: 471110 - DNA, 587 bp, Homo sapiens
ggcgataatgatgtgtcaatggactataacaaatgtaccacgtgtaatcgatgtggggacaaggagccttggctgggggccacgtgcccttgcctggtgccaggatcctttggcattatcattttacacagggagatgcaagaatgtctttataatccaaggcttgggctctccctccttgatccccatgggattcttctgggttcactctccctgccataccctatacagcagccaccctggaccactgactcttctccagacttatcgagctttcctaccactccatgtggtatctggtgctcatgtggttctaccttctgggaatgctctttctccattccctgtccacaaatccaagccatctggaccgtgggtcctgggatgtaggagaccctctgatgttaccgactggccagtgctttgggggtgtgacttgtgaagcaggaaatatttggggaatttagcccccaaactggactccaattcaattggcaaacaggtctccaaccaacatcttcatactactcttaaaacttaattacctaggcagcttcacttttacctaactggacaggaatacactt

SEQ ID NO: 471111 - DNA, 586 bp, Homo sapiens
cccaggccagtggttcattaagtgtgatccccagaccagcagcatcagtatcgcctgagaatttcttagaaatgcaacttatcaagccctacctacaaccaacacaatcagaaactctgggggactctgattctgaagaaatggagcggaattcagaaaacttcatggaaaaagtaccattacctggtaaattccatgaggtcaaagatgtgacaatcaaacatatctacagacattgcagaatgtcccctggaggggcaggggggtggaattgcccccaagttgagaatttctgccctaggcagtgcctatcatggcccctgcctcccatcctggcaatacagtcactcttcctggtgacccaacagcagaaccaatgtcattgtcctcctttccagagctctgtgctccaaaggtggggtgtgctcctacccatgtcacttcaccctcatcatgcttatcatccacctttcttaatcataaccttcatcattatgtgaaactggggacaaatgatctctttcaaatgactggcatatagagttgatcctcatcctttgaggatttcatatttgtgaattcatct

SEQ ID NO: 471112 - DNA, 1135 bp, Homo sapiens
agcttctattacctgatacccaccccaaatgcctttgacacagtggggttggaaattgaggaggattggcagcagcggtggcagcagaaaatgattctgaggtcaccttcctctaacttcaccactaccattattatgactgtcatcatcaccatcatcatcatcatcatcaccgtcatcattatcaccatcatcaccttcatcactattaaaatcaccaccatcactatcaccactatcaccatcatcatcatcaccatcaccatcttctcaagatcaccatcatcaccatcatcatcatcaccgccaccttctcaagatcaccatcatcaccatcatcatcaccaccaccaccttctcaagatcaccatcaccatcatcatcatcaccaccaccatcaccatcatcatcaccaccaccttctcaagatcaccaccatcaccatcatcaccaccaccaccaccttctcaagatcaccatcaccatcatcaccaccaccatcaccatcatcaccaccaccaccaccttctcaagatcaccatcaccatcatcatcatcaccaccactatcaccatcatcaccatcaccatcatcattgctgaaagtgtccactgaaatgatcttttcaattgcctcaatcttcacagtcaaaaaaatccaaagtcaggagggagaataatattatttcgaacacacagaacaacattgtatgatgctaagttgtcacaggcccatttttctcttttccattccatcctcccaacaagcctattagaagaccaagcaagtgtaataccctcattttctggagatgatgcagacaagttatgacttgcccagtgtttgaggaggagataagattgcagctcttcagtctcactttggtggcttttccctctgcaaggacaggtggtcaggatcctgagtcctaacctgtcagggtctcaattctgctaccactcactagctttgagaccctgggcaagttacttcatgactttaaggctctgtttccccagatgtgaaatagagtgtaacagtttactttacagggttgttttgagaagcaaataagaatacgcaagaagcacaggtggtatagagtgggtcacaccgtacgcactctgataacctg

SEQ ID NO: 471113 - DNA, 959 bp, Homo sapiens
ctccccgtaaaccaaaggcatgtgggaatacgtagtcctcttgtcgggccagtaggaacacggtgaatggctacttcctggcaggccgggacatgacgtggtggccgattggagcctccctcttcgccagcagcgagggctctggcctcttcattggactggcgggctcaggcgcggcaggaggtctggccgtggcaggcttcgagtggaatgtgagtcctggaggactggcggcctgtgggagggccagggcacaggatgtggtcgcagcactggagggggacagctcccagtggctggtgtcagccgatgtccaggccacgtacgtgctgctggcactggcatgggtgttcgtgcccatctacatctcctcagagatcgtcaccttacctgagtacattcagaagcgctacgggggccagcggatccgcatgtacctgtctgtcctgtccctgctactgtctgtcttcaccaagatatcgtccctgggggcagctagcttcatccagccccaggcttctgaaggggcttgagtcctggggctgcctgattctggctgagagagctgacactagcccctgcgacctccgagcctccctgtgcctggggctcctcccttgtaaggaggggcggcagaccttgtctcctagggctcctccacccccatgccagccacctccctggaaaccagggatacagaaataaacaagacctggccctggtctgccaggggctcgcactgtgttttcagggtctggcctgcagtgagagatgaggcaagggaggtctgattgtaagaggttgaagtgcccaaggtgcccaggtggagcgggggtggtgtttaggagccggggtggtgtttaagtgggagagtgacatggtcgtgtttgtactttgtgctctctggaatcttccagagggtggactggaggagttggaatagactctgggccgggtgc

SEQ ID NO: 471114 - DNA, 527 bp, Homo sapiens
tgtgtgtgccaaggatgagagtctatgagaccatacacatcaaaaaacgcggaaagaacaacttccggagtgctgcaagtagaaaaattaccattactcccacaggcctgagagaaattcacagttggagtaatcagagtactactccaaaccctgttggcgaaaccctgacaaggtttaaaacaaacctcaaaaggatagagttgatctgcaaggcctataagaaggaaaacaaagttgacatgcaccccaaaaagtatgtgattccagtgcttggaaatgcctggcacacgatgaatactttatgggttttggctattagtgttgtgactgttgatagaataccctccttcgaaggctccagaagagatatttttgctgccccaaagaggtggcggcacctccttaaaataactgtgctggctgggccactttgtcagcagcttcctcaggaaaacaaggctgcagagtttacttcctgttgggcttcctgtgccttggtttctcctcctagctgactcagggag

SEQ ID NO: 471115 - DNA, 721 bp, Homo sapiens
cacagactgaatcttcttgggagggatccaatgcaagaaaatgtcaaagggaaatcccagaaaaagcatctattgcaggtcttagagtcagtctctagagtagaacgggaggatagaggctccaagagggaagcaagagaggattttgagacacagcccttgcttccagtgctaaggccacttatattggacagttttacaactgaacaagttaaaaatgacagtaaggaacaaagatcaaggtatatcgatacagcaaatgctttggagcaagaaactaaactggggttacgacggtttgaagtttgtgacaacattgatcttgaaactattttgatggaatatgagagttattattttgtaaaatttcagaaataccccaaaattgtcaaaaagtcatcagacacaggagacctattatctgtcttgaaaataactacaaaaatgagtattggggaagctaatagctcatgtatagataatgaaaagcttttgaaagccatcaatccagataatgatcaatataatataaaaacccagtataggttagcagtcaacaaggctggctggaggaaagatctaaagtgggggccctgtgctttgtagtaacattgactgagaagtctgtaagtgggggaagtaattataaaccaagggagatcattgtcctgtttacaagccacttgttaagccacagactttaacatttcatgtagggacc

SEQ ID NO: 471116 - DNA, 1347 bp, Homo sapiens
aatataattccttaagttaaaatgaaaaacaaaaaagaagccattaaaaagaacattctgggtagctcttccctgaatctatttacaatgtgggttgggggagtggagagtaacacgagtgaaacagaggaggagtcaacacagaaaactcatggtactagaaatgaacacaacaggacttcagaaaatcgtgcctactgcaagagtggaaaggcttcttggatgtggcaaaactttagctgtgctccagataagaaggaggacttggatgaggggaggcgctctggactagaggaacacggtgtgcagaggtggagggagaggggtgagagtggtctgccagctttgtctgtcttggtagagaggaatgggaattctctaagtgctcattggtcgtacaagacagacctagcaaaggtctccaatccacttcagcagctgaaacggccggaggtgatttgcattcactggagtacatatagacttcccatctgtggtttccaggcatgggagaaattgggctacttttaaatctatttttagatatacagagctgctaaatatcatttgatctgggactaaggaatgtttctaaaattgttttttcatattcatgaatgtgttgtttccagtggctattaatttctacacatatcaaacaaacaaaagcaactgactatctagaaatgtctgggaaatggcaagatattacagaatcaattgaatagaattataaacccttttttgtgtgagtgcatgcaaatccattagaaattccttggtagcaatgctttccatttcaggcctcaattttgtgaaatatcatactagggaggaggtagttcctggaaaatatcattgcctttgtgactttagagtgtaacaggaaaatctacatttaataattttaccacattagacacttagggcaaatttgcaaaagataattttatgaattttcaaaggatataaggctttaatatgtggaagtgataataataaaaacattcaaaatgtgctaacaaacaggtaatgccataatgcacaaaatgatagtattgtgtattatatgtagacttgtggccactaaccaatgatatgctacaaaattattattaataactcctcagcatcatcaaccaaaatcgaatattgatcaacacttataccatattcatgaaataatttggaaatatctgatgatatataaagctttcttcccatgatacataaaacattttatttcattaaagtaggtatttgccttttgccattaaaaatattgagaagtttccttatgagaaaataaaaacaaaggtttggagacctttttcattgtactttgcc

SEQ ID NO: 471117 - DNA, 1324 bp, Homo sapiens
tgcaaaaccccaaccattggtggttcagatgaagccatcttcacactgtttggggctgggagctgctggtgcaggagtagcagagtatggtagagagaacagtgagggcagctttctcatctgtaaagttgggctagaactagtagctcctgtgaggactcaaagagatgatgcttatgaagtgcccagcacagggcagcatgtggacgtggtggctgttcatgtgtgccctgcttgggtgaccaccaagttcagcaaggcacctggtgagcagacagaccactggctccaggcagctggagacctgcttctggccctggctctggagctgactgtctgtgtgatcctgaatgccttgcatttcctcctgtgtctcggtatattcatctttcaaatgagagaggtggatgagttcacacttgccaactttaacagtcacgtaggtggttggctatttgaagattccatggaactgaacttctgagtctgctttgtgctgctcttccctctgcatctttgcccatgtggttcctccttccacaaatctccttcctgctcatccatggagatacaaccttctttaaaaaaaaaaacctgtcaactcacaccccagtgtcaccacactcaccaagcaacttgtcatcctgaatcctgcagacatccgaccatcacagccagccattcctctgtccacccccagactcttttgtctcactgtgtccaggctggtattgcaggtagacatgctgttttcacagggtggacttgatggggaaagccataccctttgtatcacgtacttagcaccacgaggctggcagcaaacccctttgctctgcctttgttcctggctaattagagcctgtttccaccgttgtcgctgtctttccagccatctcttcccccacaggaactccagcctctggccatgttgtttccatcctacttgtaaccccttatgataacaaatggccactctttgtaacagaataaaatccaaccatagctctgacccagcttagtgtctacctcacctggaatgcagccccttcaacagtgaaggtaatgttataaatactgactatcttggtccccacagatctctttcccgtcacacctcctctgagccctctagctttgctcctttgaaaacccataagccttatttctgtctttggagtataatcaccttgaaagtagagactgtgattataatagcatctcggtaaaccccaataaatatttgttggttgattgatttactgacattactgggccggaatctggtttctggactttgttgccgtgtttattgccatctgtt

SEQ ID NO: 471118 - DNA, 970 bp, Homo sapiens
aagagcaggggtgggtccagggatttggggtccagccaaggaaggagcctgggccaagactggcctttctgaggatgcctgtggcagagttctggattgccaagtggtgtggaggttggagaaggagggctgccacgggggccagccgtgttcagaaggccaggcccatctctctgcaagcattttctgaaggatggaatgaggctataaacaccaagatgtttatggaaatttatgtgactgttcctaatgtcataaatcatattctgacaagaaaagtccatgatcccggactggccctggtgcatctttatattgggaatgggggagtggactcttgtaaggtggctggagacatcaagtcagcaggacacagggaggatgatggacaaaacctccggggccttgagttctggcttcagcttagccatgttcttactttcccgctttttacacatctgtcaaatgggaataaaattcctgggaagtttcaagtacatacacaaaggtatcgtcatctcaagaaggattttctctctggcccagaccctttgacacccactgctagccctcatggacaccttcagcctggcttaactatgaaagaatctataagctattaattatagctttattaaaactcaacaaatctagccctaaaaagacagctgacatgggtttaggtcatatcttcttactagctgtgtgaccttgtacaacttatcctctttaagcctcagtttcctcatggaagaaggggtgggagacaaataagagtacccacctctggcttaacatgaggattctgtgagacaatgcctggaaagggcttggtacatggcacagattctgtgtgcatgacgtggtagttaccatcatcatcttcatcacaggtctgagattcctcttgcagagactcattccactgagaatttaaaactcagacacctggggggaacagattgcatat

SEQ ID NO: 471119 - DNA, 892 bp, Homo sapiens
tgctagcagcagtaagcagaggtctgagtgtggaaggttcccaatggagtttagcctgaaggatgctatatatgctgttgtcaatgcttggaacacagtaactaaagacacagttgtggatgcctggcacaacctctggcctgcaactgtgttcagtgctgatggtgaacaaggtggtgactctgaagaattctgtatgtccagtgaggaaaaaaaatgctttatcttcttacttctgaatcaaggatattatgataacagtgatgatgacgatggcattaacgctgcagaaaaagtgccggtagacgacatggtgatatgtgataggtgtattgaaggactaaagcagaatgtatttggaacagaacaaggaatcatgtctgattataaaatcaaagagagacttctaagacaaaatacactgtcaatgaagcagatgactgcaggaaacatttcaaaaagccatgcagcagaacgtttcctcatccctagaggatcgacttcccagtccctcaactgcttcccatgtttcttctcccttaaatcaatcaataattaattaattaataataaacaccatgcacagcagccttttaagtataacagcatcttagccgaatggcctccagttgcatctatattgtttcaaatgacagatttcattcctttttattgctgaatagtcctccattgtgtatatgtaccaagttttccttatccattcatccgctgatggacacataggttactttcagatcttggctactctccagaatactttctgcttgattctattatgttattttagtctcttcgttaaatttatctggtaaggctttaaatttctttctgttgtctgaaattttactattttgaattatctttctgaaaa

SEQ ID NO: 471120 - DNA, 1066 bp, Homo sapiens
ggattttcctcagaattaactggcagtctgtcgtcgtcctaaagttgttaccatttggcatgtgacgttatggtaaggttcttgtgggtggactccaaagccacacgccttctccttctgccatttgcacaggaagccgttcccccttgcggaaagggacttggggatggtgcctctgcagctacgagtgtgtccgagggtggggtggagggcctgaggagcggcctctcatctcttcctctgcggaacttcatcgcgggttccccaggactgcccaggcctccccaggactgcacaggcctcccctgggccggcggagccgctctcaccttccacacttcgccgccctcctgcgctcaggcagcattctggacacgggatgtacaagcttctcctgtacctgcagtttctcacgataatcagctcacaatagtccttatgccaaagaggcatgtgtggaggtgccatattctggtctcctacaacattcagtaatggtcaagatggttgatgcaggaaacagatggaggggcagaagttgatactcatctcattagatccaaagaagccaaatggtggccatcacctgtgacatgaagagggtatattttatggaactggacagctttcagaatcacaagcaacctcttcaaaatgtgatctactgaaacgtgcttgaaagagagaataggagtgaggcgggcaaaggaagcagaagccattgtgaactgccctagagaaaccttgggcatctttttgttgggcaaagtggtagaggctgaaacggggaatagcatgtaacattttatttgactgaaataaacagctgtttgttttttttttctttcatatgtaagatagacaaaaggtgtttgacagataaggattggggcaatgttggtatgagttcagctttttagtttgttctttaaaagtggccatcaagatgtgggtgtaaggtatttcacagtgatttgcattcattctcattgctgtcaccatcaaggcccagttactcaatatccaagtttgtttttgttgtaattcaaacaaaataaatacaagt

SEQ ID NO: 471121 - DNA, 524 bp, Homo sapiens
tgggctggccaggtagtctaaatcaccatgtgtagttacctggggaaagagacgttaattgcaaacagtcaggttggaaagggtgatgggaaaggtcatgaacattcccagacatttgtggccttctggattctgaataagctgcttcctggtgaccacctccctatgggacagccagatcccacctgcttgactggccctgctgagcgctacaccttgcagggactgtgtgatccttggtgtcattgcactaagacccagcaagggtctggtgctggacaggttggaagtggaggaaagccagcagtaacgggcctcagccagctcccacacaaactgaagggccgggtctctctcccaccacaccccacacgacagcccaaagtctgtttccaggaagaggtagataaatatttagcactgaaccccaatactgtccctggcactaaaaagacttcctccatggaactctaatagacctcaaagacaccttccttgagtccaaatatttgttttaccctgtt

SEQ ID NO: 471122 - DNA, 585 bp, Homo sapiens
gtttatcatggaccaggctctcaatgacactgtactgtagctgcttaggcttctgttctctgaagctggtactatggagaattctcagaacagcttcattacttttgatgagttattctatggggctaactgggtctaaggattcagttgactgttatggctgctggaggaggaatggggcatacaactggaacgctctggagacagaggaatatctctcatcaagatgtgttagaggagagaagagccagagtccaagaagtgatagtgaagctgagatgagaaggtggactctggagggatgcaggaggaacattgaaacacaaggtgaagcagcaagtgctgatggagaagctgcagcaaattatccagaagatctagctaagtccattgatgaaggtcgctacactgaacaaggccatgtaaaggacttggtcttcatcacaggacagtatgttatgtagccactgaagggcatggagtgccaaaattaaacagatgcagatggcagcattctgttcaattctgtatttgatttttgtcacgacaattctgacactgtttgtgcaatgagttatgcagcgc

SEQ ID NO: 471123 - DNA, 1376 bp, Homo sapiens
ctggtgccctcacaggaggagaagacagacaaagggaatgtgtttaatgtggattctgtcacttgcacctgaaggaggcctaattcacaggaaggccatggctgaacagggtcctcgcttcctccatgggggtggggccgcagggacacaggcagatgaaacagcaactctagccagagggaagctcccggggcccgggtcagcctgaggccaatgaggacagcttcacggagatgcaatggtcctgcacagctgtgtcttaagaagtcaggaatgtgtgcaaagcccagggcagaggcgctctgtgcttcggagcctcttctctgttctgcacttcgcaggacaagcacacccaccccggagcattccagactgtggggcgatgaggcaggccccggcggtgtggcctgccgtggcggtgtggcctggccccggcggtgtggcctggccccggcggtgtggccggccccggcggtgtggcctggccctggcgatccggaccccaacacttctgttcgcatcttgggtcacagccagggcgacgtccaacccccagcgccgacgagctcagcgcctggagacttctggtcccagaactctcaggacccaggagaggaaggcactggtggtggccatcgggggtacagacttatgggctccaggaacgcagtgcggccctcaaggcctggccgtcactgaactggaatcggatgagactatggaaagcactattccgggccgcggacaggaccgtgagggtcacgcctctacatgtaaacctagaaacacggggccagcgcggcactggacgctgcccatgacacgcagaagcgaggaatgggctcctgctcatgcagcaccgccgactccacacatgcagaatgctctccccaggctgggcgccctcctgaaggcctctggggctgtacggccggctcagaatttctagggctgacacaggtccagaacctaaaaagcgatgaggttacgccgcaagcaggtggaaacacagcctctccacccctcgcctgacccgagctggctcctgaactagagctggaactagatctaatgccgatctaatgaccctttagtgggctattattttctttagcagaaaatccgtgtcacagaccccgttctgattgccttgctgcatgcccgtcgtctgctgggaacgccctgtgcatctcatttaaccctcacagcagcagcccccgcagggggtgattttcgtttacggaggaaaagaccccttcctcctccagtctctacctgcccttaatacatctcgatttcttgagacaaatcttcaactgtctcccaatcaggatccaactgatcgaaggctggtcgtttctgtatctgaaagctgt

SEQ ID NO: 471124 - DNA, 1072 bp, Homo sapiens
taattaaatgttaatccagaaagattttaacaagcacttaccacattctggcttacaccctgctcgtgtgcatggaaaaagctcctgctgtttttcaggcggcatcctcatgtatggggccctggtgctcttcgagtctgagttcgtccacgtggtggccatctccttcaccgcactgatcctgaccgagctgctgatggtggcgctgaccgtccgcacgtggcactggctgatggtggtggccgagttcctcagcttaggctgctacgtgtcctcactcgcttttctcaatgaatattttgatgttgcctttatcaccaccgtgaccttcctgtggaaagtgtcggcgatcaccgtgtgcgggaacgtcacccctgccaggcaagcccagggcacagatgctgcgatggcctcttcctcttaagtgtggggcctcacccctgcttttctttctttttttgtattgtcaaaattgtatttccatattgaagcagcttgagtttctactgaaaatgagcccgaattatttcactattactgtaaagggttcatcttactctggcattctgagaattagactgaaagtttaatttctgcagttccctcatattcagattctttctttgatgttataacacaaagtcattcctactcaaatgtaataaaattgaggctccacggaggcccgtgtccacatcagctgcagctcccactcagacagacggcctgccccacagcctgccctttgctgaagataccctcgctttatacttgcatttcgcttttcagtaaaaacagtcaagttactgagttctcacataaagagctcttctcacacactctaaaggcaagttgcgtaaacagtggcgtttccgaacgcaattccattgcggccaccaatgtaaatcattgcccagagactttgctgctagcatgcgtgtccttcccatcctttttctatttgcaaaatcacactcgaacaccatttctatatatagagatcagctgtcctgtaaaactcaaatcccctaagatggcccacttgcctggtcatgggtttcctattttattt

SEQ ID NO: 471125 - DNA, 642 bp, Homo sapiens
acgtgaaaggctggggagggtccagagcagcagagactccccttcactgctagggtgaagggagaatgatacagcctcttcggaagacagtttgggcatttcttacaaagagaaagcgcctcctcaaccagagagcacacagataccttcacctccaccgtgtgtatgcagagaaagtgcctcctcaaccagagagcacacatatcttcacctccaccgtgtgggacacgtgtctcctcaacaaatcctccccagtagtgtcatcagtagaagacatcagacaagtcgaaatcaagggcattccaaaaagacatgtccggagctttgaggagcagccagagcagcgtggggtcctgtgtggggccctgggcaggaaaagcacatttgagaaaaaccaggacctccacaccatttctctgccacggtgcgtgtctgtgtctccatggagtgtcgccctgggtgggctggagggcgccatggccccgggtgagctggacggcgccgtggccccggaccattaatagaagaaataaaagtgacagtggagtgagtgtggcaagcagaagagctgtcgggaacgtcacctgcccacccctttgctgtaggaccctaccaccagcatactccgtcgttggcaccctc

SEQ ID NO: 471126 - DNA, 1320 bp, Homo sapiens
cagcagctcggtcaggatcagtgcggtgaaggagatggccaccacgtggacgaactcagactcgaagagcaccagggccccatacatgaggatgccgcctgaaaaacagcaggagctttttccatgcacacgagcagggtgtaagccagctagaggaaacagccttgaaccagcaacgtcactcaagacccttaaaaataggggataggccaggcgcagcagctcatgtctgtcttcccagcactttgggaggctgaggcgggtggatcaccaggtcagagggaaggacggtgctcacggtggcgccggggagagaagccccaattaactggggctctgcacgcgtctctggccttggcaggaagggaagctggggaggaagtgtgggcttcctgccgttcagtgcctggcctgctctgctgagggtagagacgtgccaacgacgagggtgccaacgacggagtatgctggtggtagggtcctacagcaaaggggtgggcagggaagctgcagaagcagcgcagacagccccatggcgccctccagctcacccggggccacggcgccgtccagctcacccggggccatggcgccctccagcccacccagggcgacactccatggagacacagacacgcacccccacagtgtggttctgcggttcatgggccgctgtctgcattcctcctcccttagctccatgctggtgcccgaccacggacgggtctcttccctacagttctgcacctcccaggtgtccggtaaaaagaatcaataccagctttcaagtctggcttctgctgcacagcaaaatgcacaatgtatgatccatcatgtcatgctgtccctgtccacggagatgtccttccatcacacacaggctgtccccgtccacggagatgtccttccatccacgcacaagctgtccccgtccacggagatgtccttccatcacacacgggctgtccccgtccacggagttgtcctccatccacgcatggactgtccctgtccacggagatgtccttccatcacgcatgggctgtccccgtccacagagatgtccttccatcacgcgggagctgtccccgtccacggagatgtccttccatccacgcatgggctgtccctgtccacggagacatccttctgcccactggctgaagggcacaaggttgtttccagcttctggcagttatgacagtgctgctgtgaacattcatatataggatttagaatatgggtttatgcctctcaatccatgaacatctgtttatgcctccgaatccaggaacatctgtttatgtctctcaatccagg

SEQ ID NO: 471127 - DNA, 3165 bp, Homo sapiens
ggacacctccagacccagagcacccctcacacagggtccctcacacagacacctccagacccacagcacccctcacacagagtccctcacacagacacctccagacccagggcacccctcacacagacacctccagacccagagcacccctcacacagggtccctcacacggacacctccagacccaggacacccctcacacagacacctccagacccagagcatccctcacacagggtccctcacacggacacctccagacccagggcacccctcacacagacacctccagacccagagcacccctcacacagggtccctcacacggacacctccagacccagggcacccctcacacagacacctccagacccagagcatccctcacacagggtccctcacacagacacctccagacccagagcatccctcacacagggtccctcacacggacacctccagacccaggacacccctcacacagacatctccagacccagagcacccctcacacagggtccctcacacggacacctccagacccagagcacccctcacacagacacctccagacccagggcacccctcacacagggtccctcacacggacacctccagacccagggcacccctcacacagacacctccagacccagggcacccctcacacagggtccctcacacggacacctccagacccagggcacccctcacacagacacctccagacccagagcacccctcacacagggtccctcacacggacacctccagacccagggcacccctcacacagacacctccagacccagagcatccctcacatagggtccctcacacggacacctccagacccagggcacccctcacacagacacctccagacccagggcacccctcacacagggtccctcacacggacacctccagacccagggcacccctcacacagacacctccagacccagagcatccctcacacagggtccctcacacggacacctccagacccagagcatccctcacacagggtccctcacacggacacctccagacccaggacacccctcacacagacacctccagacccagagcacccctcacacagggtccctcacacggacacctccagacccagggcacccctcacacagacacctccagacccagagcacccctcacacagggtccctcacacagacacctccagacccagagcatccctcacacagggtccctcacacggacacctccagacccaggacacccctcacacagacacctccagacccagagcacccctcacacagggtccctcacacagacacctccagacccagggcacccctcacacagacacctccagacccagagcatccctcacacagggtccctcacacggacacctccagacccaggacacccctcacacagacacctccagacccagagcatccctcacacagggtccctcacacggacacctccagacccagagcatccctcacacagacacctccagacccagagcacccctcacacagggtccctcctgcggctgctctgcagctgcaaccacttccctctgctgcctcctccctaatccctggccaccatgaatccgttccccatctctaatctggtcatttcaagaatgctatgcaaatggaatgctatgcaaatggaactgtacagcagagccttctgtttccagctgaacttagcagaaggagcagggaggaacccatctacctcacctcccaccgtcctggaagtggagctgggccggaagctaacacctggctattctctctgggtggtctccgctctctgcgagtgggtctcttcgggccagcggtgtcaggactcgcccaccttgccgagcgtgtcctctgctttctctgtgctgcaggccagcgtctcacactatggacacaatgcagctcttccaccccctggtggatggccgttggtgttttcccagtctgtggagatcacagctgaagcggtgagagtcctgctgctggtctgcgtggaagctcccagtctgtggagatcacagctgaagcgcagtgccaccctgctgcccgcctgccaaaacgccacttggcctttcggcctggcctccgtggtagcagagccttaactctctctgtggcttaaatttatctttcctggtaactaatgatgttaaatacattttcttgtgcttactgaccattcttatgtcttcttttgtgatgaatgttcaaatctttcatcttaaaaacaaaactgagttgtctgtctgatcgttgagttgaagatatgtactgaaagtattttactcttgtctgcctttttacttgattagtactatgtttagaagagcaaaaacttaatttttatgaagtccatcatgtcagtttattctccatgcatcacgatgttcatgcttaggaagtctgtgccaatctgggcacaggttggggggccctagaacccaccagagcctggccctcctctgagatttgcacacactgaagtttactctgacaaacttcacagcagagctgatgaaatgaatgcagatgaaaaccatatttgtggaattaaattctatcaactgtcctctaggttctagagccagtttatcatagacatgattttgttctagttagatgttattttgtaaaaacatcatgttgatttttgttcaattcttggtatttatttcctaggtgaaggcaaactcattatttattttcaaagaagcttaactaaaggcatcgcccctccaaagctcccacctaacccaattcagagtatgagtgcttaagaaagtcacagacgtttcttttgtgacggacactcagagttactttacatgaagcccattataaagaagagctgtaggaacaggagctggggacgctgcagagcactcgggctgtgaggcaggcacaggcctcactaacccaagcagtagttctttaaagaataatctccatggtcccccacattttccttttcatgtttcaaatccatgatttttaaaatatgaaagaaggtgagaagggttatgcttttctatgacttccaaggaagaaacacactgttcaaactcaagatgcaatcagtattactgtgcaaattctgtactatttaaaagtaactaggctggac

SEQ ID NO: 471128 - DNA, 1332 bp, Homo sapiens
tgtgctccccatggttagcgtgttctccgtggttagcgtgctctccgtggttagtgtgctctctccatggttagcgtgctctccgtggttagcgtgctctccgtggttagcgtgctctccgtggttagcgtgctctccgtggttaacgtgccctccgtggttagcgtgccctccctggttagtgtgccctccctggttagcatgctctccgtgtttagcgtgctctccgtggttagcgtgctctccgtgtagtgtgctctctccatggttagcgtgctcgccgtggttagcgtgctctccgtggttagcgtgctctctgtggttaacgtgctctccgtggttagcgtgctctccgtggttagcgtgttctccgtggttagtgtgttctccgtggttagcgtgctctccatggttagcgtgctctccatggatagtgtgctctccgtggttagcgtgctctccgtgggtagcgtgctctctctggttagcgtgctctccgtggttagcgtgctctccgtggttagcgtgctctctctggttagcgtgctctccgtggttagcgtgctctccgtggttagcgtgctctccgtggttagcgtgctctctctggttagcgtgctctccgtggttagcgtgctctctgtggttagcgtgctctctgtggttagcgtgctctccgtggatagcgtgctctctgtggttagcgtgctctccgtggtcgctctggtgcagtggacagagagtgtgggcctcacgctggtcagcagggacctcacctccatgcagctgaagacccccagtggccaggtcctcagcttctgcattctgcagctgtttcccttcacctccgagagcaagcggatgggcgtcatcgtcagggatgaatccacggcagaaatcacattctacatgaagggcgctgacgtggccatgtctcctatcgtgcagtataatgactggctggaagaggaggtatgtgagtgactctagcgtggttcacagtgtttctatggaagaggagggacgtgaataaattaaactccctgaagacctagtaaaatgccataaaaattacttttggtcataatgatgtgcaattaattgtaaaatacttctttaatttatttagctttatgaggccaaatcaataaatgttttgcaacagacagatgatgtcagaatgtttttcacaaagataactttattaaaaattctatgtacatttattttttcaacattatattttctttccttggataaattgttgtcccttcaccaatgtctttgttgtggtactactatattatgaaagcctttcattttattaaaaac

SEQ ID NO: 471129 - DNA, 740 bp, Homo sapiens
gcctctgtgtcctttcagctttacgatctgtaggaaaagatgttaatttcttcggcgtcagcatggccagccagcactcctcgccagggagctgcagccgtcctgcaccaagaggccaagtggctgctgtgtccggccttgagtgtcatcttgcaggggagctttgagtcatcttcgcttagtgcttgtgtctttgattatttgcgtgtgaacttggacatgggcaaagcggtgtatggatggatgatgatgaaagatgagaacatccctggcacggtcgttcggaccagcactatcccagaggaacttgggcgcctggtgtatttattgacagacaaaacaggaatgaatggaaagggcacacagacggtccgcagcttcatagtcgctcgacttgatgcgactttgatcgagtggtgcggtagcttcactcgaactcgatggtggtgcagtagcttcactcgggactgtacttccactatccgtgcagcagttctttctttcactttcaatacggtgttcaagaaatcacatgggatattctttgtgttagctgattttgcccaactgtcaggaattgccacagccagtccaaacttcagccaccaccaccctgatcagtcagcagccgtcaacattaagacaagaccctctaccagcaaaaagattaaaagttgctgaaggctcagatgattgttagcacgttttaaaaatatttttaaattatgtcttgctagcgg

SEQ ID NO: 471130 - DNA, 511 bp, Homo sapiens
gacaccatggatacccagggaccagtctcccagccttttcagcagcctgagaaacctggtcgtgtccgtcgtcggaagactaggcgggaacctcgtggtcataacccagggcggctgagccgggagcaccggggtctcttcaaccacgaggtgaaatccctagatgttgcaaggctgcttagcagtgggaccctggtgccaggcagccccacactccccgccaagccctccccaagcccaggcagggcccaggaaccagccccacggtccagggacaaagagaaccaggtgcctggaggttcgggcccaggcccacccagttccccagagttgtctggcgtggggcagctgctggcagagctgcagtgtcagctgagtttgccacaggcctttccccggaggaacctgattaaggatgccagggatgccatcgtacacaccttgcaagcctgtaatggttgtgtgcctgaccttgccctggtgcttaagggatgatagtcacccttgccag

SEQ ID NO: 471131 - DNA, 873 bp, Homo sapiens
aaagggaaccatcggccatgtgtaagcggagcaacgaggagaccagatccgcagtccagagatactgctccagcaacccggtcaatgtgtgggagggaagcgggcggtgggctctgcaccgtccatggctggctccgggcgacttccagcagagccagctaaatagccacaggcaggcccaggactggagccaggaccagcaggacaaagccactccagtggcctgtctgcagggtgaaggggccactgggccacctttcgctccagaaagcgatatgcgaggtggttgcaaacggtcccgcttctggatgatgctcccgccactccctggcctgtgtctgcacactgtccatgtattccatcttcctcatcagaggagcccgcgtggcccactgcgggatactcaccttgccaaccgctgtgggccagggtcgtgttaacacccgagagatgcttcggacgcaggcctgcgtgttagttgaattatcctacgcgtgattatgtgaattgtgtatcacaagggaaatatatgtacgttctcaccttcgtggaggcagccgcaaagccttgcccgtaacaagggtccaatgaatagttgttgataagctgatatttgtgttataaatgcagaaatattctctgaatttcacagaaatctggctgaagagggaagccagtccaccagggaactttaatctcttccacctctcctctttctcttcttttaatagtaattattgacagggaatgctgaatggttttctgcggtcacattcccgtgttcagtttaatgatatggggaactgcagatggaggtgaggataacttgaaaagaaagggtattattggtaaatgcgctggaagccttgcaaa

SEQ ID NO: 471132 - DNA, 720 bp, Homo sapiens
ccacatagtggaatgttactcaccatgaaaaggaatgaggcactggagccatgggcaggcttgctcacagccgtggaagacaggaatgatgttttcctttggggcacagggcaggcaagctcagtgcctgttataaaaggctcgggggccctaagcccaggctcctcccatgccctgcagcagtttgcaggccctgcctggtcctcatcgcacaccccgtgggaactgctgcaaggtgctggggtgctggctcctgctggtggtgtgagcgacaacaccaagaagcctgggcagcagcccggactggcctggcgtgttccacctggggcagctgtgttgagcctggttgtgcctgtgaatgcgtataacagcagtccctctaatcggggtcagctgtctctgctgtttctaagcccggaaggcctggcccctcagtggagtgtgcacagtcaccagattgccgcccgcttgtggattaggctctcattcccactttccaattgcagcagcatgtgctcaggtggaagctccaatgtggagtgcttcaattatgcagacatttaagaacttattgtatattttcctcaacaattgtttatgccctttttgctgaagataaatattttatctcggctgtggaagtgacttcttcagcactgagctggatttacagcacaaagggaaagaaagctttgggtgggaaatgctgtgtgtataggc

SEQ ID NO: 471133 - DNA, 1268 bp, Homo sapiens
gacaccaaagccaaggtgctgcggcctctgcttcatgatgggcctgggtcgctacacctacctcgtgctaagaggtgagcacctggaatccagcagtcattatctggtacccagtggtcattacctggtgtccagtggtcattacttggtgtccagtcgtcattacctggtgctcagcgctcattacctggtgtccagcggtcattacgtggtgcccagaggtcattacctggtgcccagaggtcattacctggtgtccagcagtcattatttggtgtccagaggtcattacctggtacccagtggtcattacctggtgtccagcagtcattatgtggtgcccagaggtcattacctggtgtccagtggtcattacctgatacccggtggtcattacctggtctccagtggtcattacttggtgcccagagtggtcattacctggtacccagtggtcattacttggagcctagaggtcattacctggcacccagcagtcataaactggtgcccagtggtacccagtggtcattacctggtttccagcggtcattacctggtgtccagtggtcattacctggtgcccagcggtcattacctggcatccagcagtcattacctggcacccagcagtcataacctggtgcccagtggtacccagcggtcattacctggtgtccagcatcattacctgttacccagtggtcattacctggtgcccagtggtcattacctggtgcccagtggtcattacctggagcccagaggtcattacctgacacccagcagtcataacctggtgcccagtggtacccagcggtcattacctggtacccagtggtcattacctggtgtccagcagtcatcacttagtgtccagaggtcattacctggtgcccagccatcatcacttggtgtccagaagtcattacctgatgtccagcggtcattacctggtgtccagtggtcattacgtggtgccctgcagtcatcacttagtgtccagtggtcattacctggtgccctgaagtcatcacttagtgtccagaggtcattacctggtacccagtggtcatcaccttgcacccacggtcagttcctggtgcctggctgtcatctcctggtgcccagtggtcatcagtggccctcaggcttcacagccatggagacttttgcctgggaatattcttcagcatggagttttgttagcatatactaaaaaattcaaaaacaaaaagcccagcttgctgtgagcaccttttgtgagc

SEQ ID NO: 471134 - DNA, 1169 bp, Homo sapiens
gcagtctacacaatctaagcgccttctgcgtggagcagacaaattaacaaaacatcatgaaaccctcttatgaaaataccatagtcttaggtatggacgtgcagatctgtttcttccttagttatgtacccgtgcgtgttcatgcatgtgtacacatggatgtaaatatacataccaatctcccgcacacgccacacgtgcaggagagggaaggaaggcggctgcgttgtcaccagtcaccaaccctcctgtcccgctcctgggtgttccggtgcgaccctcagcctctgcacctgaggtcacctgtgccaactctcaccctctgcacccaagggcacctgtgccaaccctcagcctctgcacccgaggacacctgtgccaaccaaaaaaaaaaaactcaaaagaaaacctctgcacccgaggacacctgcgccgaccctcagcctctgcacccgagggcacctgcgccgaccctcagcctctgcacccgagggcacctgtgccgaccctcagcctctgcacccgagggcacctgtgccgaccctcagcctctgcacccgagggcacctgtgccgaccctcagcctctgcacccgagggcacctgtgccgaccctcagcctctgcaccgagggcatctgtgccgaccctcagcctctgcacccgagggcacctgtgccgaccctcagcctctgcacccgagggcacctgtgccgaccctcagcctctgcacccgagggcacctgtgccgaccctcagcctctgcaccgagggcatctatgccgaccctcagcctctgcacccgagggcacctgtgccgaccctcagcctctgcaccgagggcatctatgccgaccctcagcctctgcacccgaggacacctgcgccgaccctcagcctctgcacccgagggcacctgtgccgaccctcagcctctgcacccgagggcacctgtgccgaccctcagcctctgcacccgagggcacctgtgccgaccctcagcctctgcacccgagagcacctgtgcctccttcctttaactaaatgtgtttattaaccaaacgataaggcttttcccccaataactgaaactctgccatacccagaaccaggctcacactctcccagcccctcctgcccgtcccctgctgtctcccaactcccaccttcc

SEQ ID NO: 471135 - DNA, 1172 bp, Homo sapiens
atgggctcatgaggccgtgagcgctgtgagagcctcggtgatgacgtgcttccgtcacgccttctgtccgccgatgatgcgcttccgtcccgccttcgtgtccgcttccctttatgggctcatgaggccgtgagcgctgtgagagcctcggtgatgacgcgcttccgtcacgccttctgtccgccgatgacgcgcttccgtcccgccttcgtgtccgcttccctttatgggctcatgaggccgtgagcacagtgagagcctcggtgatgacgtacttccgtcacgccttctgtccgccgatgacgtgcttccgtcccgccttccccagttttagaaaggactatgtcttggtccttcttaatggtataaaagatatcctcagcccgccagatgctcctgcatttgagtgacgacacgcttctctggctgtgaccaacttttctccctttctttttaaatgacaggacttcttgttcaatacttgctggatatgaagatccaacccagtgcctcccattgcatccactcctcacaccaccgtctccatggcgtgacagttcctcagtttttctttgttgttcatgaccttcaccttttggaaaggtactggccagtcactttgcaaaatgttcctcaatttgtgtttgcttgatgttttctcctgattaaagtgatgcattttgggcaagaacatcataaaagcaacgatgaatgattttcaacacatcatatccagaggcactatatgtcttcatgcttccgtctttctgaaaaatggtgcatggatattaaaggaggtttttgcagaacgggatgattcggatcactatgctgttcagaaacaacgaacaaatgacaatctgctcctccccattcctgtgttgaaaccaggcactgctccgtacgtgctcgtggaaccagatggctcatcctcacttgtggaatgggagtggagttacatgtgtcacttctgggccaaagcagtgaagaagctgttggctattcccctgtctgtgtctgaatgcagagaatgccagagccaggaggggcgtggccgtgtgtacagcaccgatgctgataggaatagccatgatgggttgctaggtgaatgagaaacaagctcttcactggtgaagccaatgaaacttgaggacttatttgctgttgttttt

SEQ ID NO: 471136 - DNA, 853 bp, Homo sapiens
tttctagacctcacacctctgaaagcgtctctacaccttcaccttaactggtatgaaattccagcttggtatttgtaagctcttggtcgccagcatttcctctgtcctcccattcacttcctcctgcactgcagagtctttcgaggttttcctaacatggtcttatttccgaaagcattttggttctctgatggttctcagagcaatctgctttcagctcattgatgcacttttctctctcatgtctccagatactagtgatggttttcagttgttaccttccgaggagcctccatgtcctcagagctgtttgagcagtttgttcactgtggcctctctctgcgtggcagagggctcctccctgcatctgcctgtctttgctgtctgctcacattttagagtttatgcccctcaaacaatccctttattctcattgaagttgggctatgggtggatggagcctaatgcactcatccgacaccccgtcttcaactagacaccctgcccttctgcaagacaacctgtgcgtgtgccctggcagcctcagccaaaagcagcaggggagtcgtttcctggatgtttggaacaagtccatcaaagaatatttttgaatttctattatgtgcagaatatttgttatgtgacttggtcaaaactctaaaaccttctgtttcattatttcatatacagataacggtatccaagcacacagatattttgtgaagaaaataaatgactagacagaaaggaattatagaaaaaacattataaaaataccatctttagtgggacttcaatacgcctggacatttctacagtgctggtaaaagagaccacaagaagctgctttaca

SEQ ID NO: 471137 - DNA, 652 bp, Homo sapiens
aggatttatagttggacttaactggggaggagcagagaaatgggaacgagcatccggcacccttgtgcatgtaccctacaatgactgccaggcttggatggatgtccccactcctgacttggtctgccctgacaccacctgggcaatggggagagtgtcttcctacggctggggcgtgtgggagtccaggcttcacgcactctttgctgttcaatgtaggaattatcagcctttttgtgctggtttttccttatcttcgtggatttatctgcctttggtctttgatgctggtgaccttcagatggagtttttgtgtggatgtcctttttgttgatgttgatgcagttcctttgtttgttagttttacttctaacagtcaggcacgtctgttgcaggtctgctggagtttgctggagatccactccagatcctgtttacctgggtttcaccagcggaggttgcagaacagcaaagattgctgcctgtttcttcctctggaagcttcgtcccaaaggggcacctgccagatgccagccggagctctccggtatgaggtgtctgttgacccctgctaggaggtgtctccagtcaggatacatggcggtcagggatccacttgaggaggcagtctgtcccttagcagagctcaagc

SEQ ID NO: 471138 - DNA, 938 bp, Homo sapiens
ttcacagctctcactctccacccaggcatcctggttccagaagcagtcttcccctctgcaatgtctcagagccttccaggggactgcgaccctccacccaggcatcctggccttccaggggatgtcaccctccacccaggcatcgtggctccagaagcattcctcatagcccccatatctcagagccttccaggagactgtcagtttccacccaggcatcctggctccagaagcagtcttccactccgccatgtctcagagccttccaggggatgtcactctctatgttctttccagtgctccctctatggaatgaaacatccacaaagtgcatctgcagcttttcacaacgaaaggagaaggaagaggctggtgcacgctctgataatagtggatagtactatatgcaaaggttcttgtagaaagtactgtatgctaaggttctcgtggatggtactctatgctgaggttctcgtggatggtactctatgctgaggttctcatggatggtactctatgctaaggttctcagatggtactttatgctaaggttctcatggatggtatggtatgctaaggttctcgtggatggtactctatgctaaggttctcgtggatggtactctatgctaaggttcttgtggatggtactctatgctaaggttctcgtggatggtactctatgctgaggttctcgaggatggtactctatgctgaggttctcgtggatggtactctatgctgaggttctcgtggatggtactctatgctgaggttctcgtggatggtactctatgctaaggttctgatggtaccacatgctaaggttcttgtggatggtactctatgctaaggttctcagatggtactttatgctaaggttctcatggatggtatggtatgctaaggttctcgtggatggtactctatgctaaggt

SEQ ID NO: 471139 - DNA, 1746 bp, Homo sapiens
tccacctgtgttttgttgtccgtgcacatggggacacacatgtggaataacgcccccgcgagacgcggccgccgcctgtctgtggagaaccccatggctctcctagggggtgatgccctgaagttctctgaaatgttccagaaggacctggcagctcgggcaatgaacgtcgaccccagtttttggaaccagtatgctgcagccatcactaacgggctcgccatgaagaacaacgagatctccgtcatccagaacggcggcatcccccagctccccgtgagtcttgggggcagcgccctcccccctctgggcagcatggccagtgggatggacaaagcacgcactggcagtagcccacccatcgtcagcttggacaaagcgagctcagaaacagcagccagccgcccattcacgcggtttatcgaggataacaaggagattggtatcaactagccagtgactcgctcatctgccctgcccaggcccacgttttgaagttggagcatcaggcctccgacctttcttgcctcggttctcattacactttcacccatagcagaaaacactttgtgcggctgccgagaggtggtcttgtaagcgctgcatggcgctcccttcaacagcaagcctgactgttctcgagaactctgcaatcttttaaataagcttccttcaaaaaaaaaagtgcttggaaaaccgccttaggaacagaaagagctcagaccatgtccacttcctttctcctgaaacctaataatctctccgagggagaaaggggttctctgcggtattccagtgaaactcatttgatggtttcttttgaattagttagacacttgaacggtgttttttagaactcttcatgttaaagacgtggtttagtactcccaatgctgtgtatcatgacactatcttcgtctgtagtatttatgatgttaagataatgcgggtaacagacaatataatagccccgaccttaaacgaagcttttgtactgcagaatacatctggctgtgtgattttttttttaagcaagatttgttttactataaataagtggattatttcaatgcaggcaaaattgtgaagttctgttgggaaagatagcatgcttttcgtgtgcaagtacctgtcagtaataagccctttttttttttttttttaatttaaatgtttgtagctgctatgtggacagttgttttctagtgtggtctgtagcccaataactggggaacgagttacagacaaacatcaccgtaaatgactcacaacattataaacagttgtgagaaaatatttcacattatcaaagctgtacaataaaaaggtaatgtttgtataatgtggttgcaaactcttaatttatactattgcacttttagtattttgtattagggaggtttgtctataatttgaaaatttaaaaaaatgtaaagtattttataaatagtacttcagtttaaggaaaatgggaaaactgttacagttccttgttttgtcttatggtcaaacaatattagaaatctctgccacttgaaaagccaccaagacttgtcagcttttcagtaaagtagggcctgccgtttcttaaattaaaatgatttatttaacttttccacaaagcccactttaaaactgtgaccgccccctaacgaaaccttggtgaattcatcctaggactatgacgtcagtacaagccaggaaggaactaggataaccttctgcaggtctgattttcatgtaagc

SEQ ID NO: 471140 - DNA, 978 bp, Homo sapiens
gcgtgagtcccggttgatgttcctgcatgggtgtggctgggctgtccatgtgaagtgggtcatgaccaaaccgtttgaaaaacatcgctgtatggatgcatcttttcctttgcgtctttcttttcttttctctcttctgctttgagccatcaccttgcttaggaaggattcacggctcggggtatgaagctgacactccttgtgcgggtgacactcgtggaagggagccgcgtgccgggtgacagcggcatagtcaacagcagatcacacgttccccgctgggcccatcagatcacagtggagctggaaactccccattgcctggtgatgctgggaccgccgcatgtagcacaaagggtgactcacatgtgtgtggagatgctggtgtacacaagcagactgcactgccgtgtttataaagtctacagccacgtccacaccctcactcacaactcacccaaggcagcccccagtcctgcaggccgtgttcatggtatgtttaggtgcataatacttaccattgtgttacaattgcctgcagtactcagttcaggcagtgcatgtctgcagccctgggccatgggccatgcttgcagccttggtgtgtataggctgcactgcccaggtttgggtaaggacactctgtgttgaccccacaaggacaaatcgcctaatgaccgatttgtcagaacacaccctcattattaagtgatgcctgactctttatgaagtgctcagagcagtggttgttatatagtattacataaatgttagtgataactttatgcaactcttgaatcatctattgcaccaatatttgctaagtttcttttttcattgtttctcaattttttttaccatttgctccatcccttaattatgtgtccttctttcaacattttatgttttgggtttggtttctagacaaacatttatatcccttcatattaaaattgtttatatggaaataaaaatatt

SEQ ID NO: 471141 - DNA, 1783 bp, Homo sapiens
acgtatctgcgctctgtgaatatacccttcttctacatgagaacatcctggctctacgtggacaaaatcttgttctacatggacacagccttgatctccacgggcccagccttgatctacgtgggcccagccttgatctccacgggcccagccttgatctccatgggccctgccttgatctccatggacacagccttgatctacgtgggcccagccttgatctccatgggcccagccttgatctccatgggcccagccttgatctccatgggcccagccttgatctacgtgggcccagccttgatctccacgggcccagccttgatctccacggacacagccttgatctccacgggcccagccttgatctccacgggcccagccttgatctccatgggcccagccttgatctatgtgggcccagccttgatctccacggtcaccctttgtgacacccaggcagtcaacatgctgatgaaaagctgtgaccgaggtctcccacaaacagcaggaggacatgcaatgcacccgcccccccagtatgtcctggacatgggttgggaggtggagaactgcggggctcgggaggtgcagacccgcggtgtcggtcatgggctcgggaggtggagacccactgtgtcagtcataggctcgggaggtgcagacccgcggtgtcggtcatgggctcgggaggtggagacccgcagcgtcggtcatgggctctggaggtgcagaccctcggtgtcggtcatgggcccaggaggtggagacccagggtatcggtcatgggcttgggaggtggagacccatggtgtcagtcataggctcgggaggtggagacccacggtgtcggtcatgggctctggaggtgcagacccacggtgtcagtcatgggctcgggaggtggagacccacggtgtcagtcatgggctctggaggtgcagacccgcggtgtcggtcatgggctctggaggtggagacctgcggtgtcggtcatgggcccgggaggtgcagacccgcggtgttggtcatgggctcgggaggcagagacccacatggtgttggtcatgggctcaggaggtggagacccgcggtgtcggtcatgggcttgggaagtggagacccatggtgtcggtcatgggcattgctctacctgggtgccctggccagtggagttggaggtccagactgggcccggacagacccacacgttcgcgagtcctgacaaaagccaccgtggtcaaatgcacgagcactcgagggccagcgcgggccggaaggaagtcccgccactccccgccttgttcagtgttacaggaggtgttgagtgaatcatccaagacatcaaagaaatcaggcgcagggagcatccagagaactgaagaaaaagagaaaagcagtccagctgcacaggcagagctcgctaaagcagctccaaaccccgcaccccgacggcatcctgtctaggctgactcttgccttttactttgggaatgggaagatggggggaaattaggactcctcagtttgttctgtttctttttaggggaggacagcacttgataggtgtaactaataagtgatcaatgaatgctagtttgagtacatgagcaaattcagataaactccttgaaaccagtgtccagactctcatatattcataactcagcatcctcacacctcatgtgtttcttgacataaagtttatgcatttgaattaaaatggtagttttagtgacatcactgaaattaataaaacatcttttggataccgcgttgacct

SEQ ID NO: 471142 - DNA, 3803 bp, Homo sapiens
acttttgtccccagaaaacccctgctctaactgtgcatccgtccagctgctcagaacgctcttccagggcaacctcacggcagctgccccatcccccacggtggcacccaaaacacacctgccctgctctccaccatttgcctgggactgaggggtttcctgggactgagggggttcccgggactgagcggtttcccgggactgaggggctcctgggactgaggggtttcctgggactgaggggtttcccgggaccgaggggtttcccggactgaggggtttcccgggaccgaggggtttccgagaccgagggggttcccaggaccgaggggttcctgggactgaagggttcccgggactgaggggttcccgggactgaggggtttcctgggactgaggggtttcccgggactgaggggtttcctgactgaggggttcccgggactgaggggtttcctgggactgaggggtttcctgggactgaggggtttcccgggactgaggggtttcctgactgaggggtttccgggactgaggggtttcccgggactgagggggttcccgggactgaggggtttcccgggactgaggggttaccgggactgagggggttccgggactgaggggtttcctgggactgaggggtttcccgggactgaggggtttcctgactgaggggttcccgggactgaggggtttcccgggactgagggggttcccgggactgagggggttcctgggactgaggggttcccgggactgaggggtttcctgggactgaggggtttcccgggactgaggggtttcgtgactgaggggttcccgggactgaggggtttcccgggactgagggggttcccgggactgaggggtttcccgggactgaggggttcccgggactgaggggtttcccgggactgaggggtttcctgactgaggggttcccaggacagaggggtttcccgggactgagggggttcccggggctgaggggtttcccgggactgaggggtttcccgggactgaggggttcccgggactgagggttcccgggactgaggggtttacccgggactgaggggttcccgggactgaggggtttcccgggactgaggggtttcctgactgaggggttcccaggacagaggggtttcccgggactgagggggttcccggggctgaggggtttcccgggactgaggggtttcccgggactgaggggttcccgggactgagggttcccgggactgaggggtttcctgggactgaggggtttcccgggactgaggggtttcctgactgaggggttcccgggactgaggggtttcccgggactgagggggttcccggggctgaggggtttcctgactgaggggttcccgggaacgaggggattcccgggaccgaaggggttcccgggactgaggggtttccgggactgaggggttcccgggaccgagggggttcctgagaccgaggggttcctgggactgaagggttcccgggactgaggggttcccgggactgaggggtttcctgggactgaggggttcctgggactgaggggtttcccgggactgagggggttcccggggctgagaggtttcctgactgaggggttcccgggatcgaaggggttcccgggactgaggggtttcccgggactgaggggctccagggactggggggttcccggggctgaggggtttccgggactgagggggtctcttgggactgaggggtttcctgactgagggggttccctggactgaggggtttcctgactgagggggttcccgggaccgagggggttcctgggactgaaggggttcctgggactgaggggtttccgggactgaggggtctcttgggactcaggggttcccgggactgaggggtttcctgactgagggggttcccgggactgaggggttcccgggactgaggggtttcctgggactgaggggtttcccgggactgaggggtttcctgactgaggggttcccgggactgaggggttcccgggactgaggggtttcctgggactgaggggtttcccgggactgaggggtttcctgactgaggggttcccgggactgaggggtttccaggactgaggggttcccgggactgaggggtttcctgactgaggggttcccgggatcgaaggggttcccgggactgagggggactggggggttcccggggctgaggggtttccgggactgaggggtctcttgggactgaggggtttcctgactgagggtgttccctggactgaggggtttcctgactgagggggttcccgggaccgagggggttcccgggactgagagggttcccgggactgaggggtttccgggactgaggggtctcttgggactgagggattcccgggactgaggggtttcctgactgagggggttctcgggactgaggggttcccgggactgaggggtttccatgactgaggggtttcccgggaatgagggggttcccgggaccaaaggggttcctgggactgaggggttcccgggactgaggggctcccggggctgaggggtttcctgactgaggggttcccgggactgaggggttcccgggactgaggggtttcctgggactgaggggctccagggactggggggttcccggggctgaggggtttcctgactgaggagttcccgggactgagggggttcccgggactgaggggtttccgggactgaggggttcccaggactgaggggtttcctgggactgggactttcagtgcgcaacccaggaaagtccccgacaaacttagtccaagtagccgccgccttcctcggcacctttgtgaaatttccgacctcgcccaaggccgattctgctgcttcctcttccctggcctgcctgtcctcatctactcacggtcgtgatctaacagggtgcacatttcctgcgtgtccgcccgtcttccttcaccagcacacgagctcccagcaagcagggactttttcctgctgtgctcagagccttctcctcggctgctggtcttgtgccaggcactttgttggagttcaatcaatattcctcaagtggacaaaagttggtattataatccctctccccagggtgcattcaggccaccccaaaccaggcaggggctactcagaaacaactgatcctcctctgacacaaaagggcacaccttccgggatttgccattctcgcagaatttctcctgatgttcgagcctccatcgtggtgtgtcccaggaggaaggcaatgctcctggaggacccacgtccagccccggagctgccctcctgggttcagatgcctccgcggccccagctccccacctgcagcaaacacctgcacacaggtcccccacacaccctctggccctgcagtcccatcctcagggttgtgcacacaggtgcccccacacaccctctggccctgcagtcctatcctcagggttgtgcacacaagtgccccgtacgcaccctctggccctgcaatcctgtcctcagtgttgtgcacacaggtgcccccgcacgcaacctctggccctgcagtcctgtcctcagggttgtgcacacaggtgcccccgcacgcgccctctggccctgcagtcccgtcctcagggttgtgcacacaggtgcccccacacaccctctggccctgcaatcctgtcctcagtgttgtgcattctgaaggataagtgggagggggcatgtcctgggacccccatctgcaggaatgtgatgagcttcaggaagggcagccatatgaaagcctccctctatgaaaaa

SEQ ID NO: 471143 - DNA, 771 bp, Homo sapiens
ccatcgtcatagaggaatgtccatagaaggacttccatggaggatcttccataaacagacttcgatagaggatcctctatagagggacttccatagagggaattccatagaggatattctatagagggacttccatagagggacttccatagagtacttcaatagagggagttccatagaggaccttccatagaggacttccatagaggacttccatagaggaattttcatagatggacttccacagagggaatcccatagaggaacttccatagatagattccatagagccatggcggttgtcacctgtggtaaacagaatggcgggagcaagcgggatgtcctcgggcgcgtgccctatccatgaacgtggtgcagcctgcagtgaccaagatgctggaggtcgcgactgggaggtgcaggttcccagggcctggacttccatggccccagggcacaggcagcatgatgctgagagagctgctgtttacaaggtgacgaccacatcctggcctaaatgcactcccgtcccagggcccacacttggtccctggggccagctcggtgcaggggcccaggtatgtatcatcttagtgtccaccagagggaagctttacccactgtgcaggaatcactgggcagccacgggcccgtgggctcagtcggcctctggtatggtggacacaggaactagaaggctccaacttaagctctttcttttaatctcctaaaatactcctgggggcctccatgttttgagtattcattcac

SEQ ID NO: 471144 - DNA, 1197 bp, Homo sapiens
aagctgcagtgatttgttgtagcattgctagaaagccacaccagcaaggagttggcatggggcatggtgcaggcagccctgttactctggctgagcctacatatgcacatcctcccagctgctaagggcttgggcctggggtcagccctggtgctactggccctcggagaagcaacacctgcctctgcaggctgtcaccacaaggtgcagaaaacgcagagtcctgagcttcatgagcacagccctctgaggggttcctgctccttcagacccaaacccagcaaagctgagggctatgaagagaactccaaaggcatcagagatggagcccatggcagagatagatgtctccatgggacccaggccattcttcctaggtaccagcaaagggcaccctcagattattctggtagtgatccagtcacagtccacagaacactctttggagtcactgattcacggatcatgacaatgagcggctgccccacatgccttccagacactgtcttcccaagtactctcggcagcgggaacccacttcagcagaggagatctggagctggcttttggacacaagggattttagatgacagagaaacatccaaactgaaagtggcccagctgctagatgtgatgacatacatggggaatgtggccggtctaacatctgatggtctaatgaacggtctcacatctgatggtctaatgaacagtttcatgtctgatggtctaatgaatggtctaacgtctgatggtataatgaataatctcatgtctgatggtctaacatctaacatctaacgtctacccgtctaatgactaagggtttaacatgacgctaaccctacaggactcctgtcctcacgagaagaggagaggaggacacggacacagaggacagccgagagatgaaccagggagggagagacgtctgaaagcccaggagagaggcctcgggaggagccaccctgcccacgccttgatcttggacttctgcatggagagctgagaaagttagcttctgttgtttatgctgcctggtctgtgggatgttatggcaaatcctcaggagacttgcacactaggggccactgggctggagccagagaaccacctaccagtctatagttgttctggaatctagcgaaggactgccgagtgtcagaggcagaagggagagcttggggtggactcacc

SEQ ID NO: 471145 - DNA, 685 bp, Homo sapiens
cagcaaaagtcaggataagcaaacaggatgcagaggaggggacagcccataaaacggaataaagtttcattattgggaaatcaaaacttaagcaggaaaggggaccggggcgacatccgggaagattgtaaccccacagtacttgatcagtggggaactggaggagggacttgcgtgctaggagataaattacctgctgtagctgccgcagttctagaggctgggagtccaagatcaaggtgccagcaggccggtttcttcggaggcctctctgtgggtgaaagccgtctccccaccatggctgcacatggcgtttcccctgtgtatgtccggtcttctcatgaagacaccagccagactggaaaattgggctttcaggctaggttcagaaacttaggctttcagaattttgattccaatgcctcgggccatgttctctgctctgatcctgtttagtttttggagacttttgaatctgcaagctcatgttttctgccggatttgacacgctttctcgtgtcatttcctccagcacgattccgtgtcccgatcactcttgtctcctggactccagcggccagtctggtctttcccgatcaccccacaggcctctgagccccgttcactgttgtttccttgctccttttccatgggtggtgcttattcatctgtgcttgaggctccg

SEQ ID NO: 471146 - DNA, 639 bp, Homo sapiens
agccttcggtgactggctgctgggtgtttcccgtagatagagtcatgtgtcatgatgacttttgagaagggccagattcccaggtcaaaattgcccctgagaagttgggtgaaagccagaggttttatcaaaagcctacctgtggaattaagtcacaaatggagtcagatggattcctccttcactccctgcccgggattacggcgtcaggaacctgcatgtacatctggaaggcatgagggtgaacttgaatccaagttgggctcttaccacctgcgagcctctgactgtgacatgcaggtaacctgtgggagtagtggggaccctgtgtctcaggttcacaactacctggccgtgggcccagaggatgaagcaggagaggcagcaggcagatgtagctgttgctatggcaacaagggacccatctatcttttatttatagatttctgagctcttttttctttgagattaatgtcaaagttttttcaaggaatgcattcttgtctgtgttgattcccttctagagtatgttcactttatttggggttaatttgttgttcttttttaaaaaaattagatggatgtatagttcattaatgtttcagtatttctccttttctgatacgtatatctaagcct

SEQ ID NO: 471147 - DNA, 552 bp, Homo sapiens
gtgacgttggcaggcaccatcatgtgtgccaaagcggcttgcacccatgaagcagggaggcctaggggctgcagctggagattgctggtaggttcacaggaacaagcaggccagctggctgtgtgggacccttgggccatgggtcccagccccagcaaggagcggggagcagtggcaagccggctgctcaccaggtccatcctgaaaaaggaaggaatttcctttccactggttctggttgtgcacaacctactattcaaggctcagcccaaagtaccatgcctccaggtggtccccttggccagcccagccctgggccctgcttccaatgcttgttctggccccttcgaagttcaggtggtcatcatcttctgttcactggtacttaatctcctcatccagactgtatatggctcaagggcagagaccaagtctcaatctggaggctatttaattagcaattgacctggcaagaagatttctttgcccaagccaaataagcacagaaacagtttaaagccaagctatctgcttcagtaactggcaggatga

SEQ ID NO: 471148 - DNA, 542 bp, Homo sapiens
tcgaagacattcgaaatctcagtttgaggttggtgaaaacgaagatgaattttttccccatctgtggtttttgggtcatctgggaagaagatgccaaaatgaaattaggcactgaaagctttcctgatgggggtccctgtgagcagggccgtgcaccggcccatgacggaactctgtttagactcagttccagactcctcgtctggggaaaggtggagtttgcacacatgcaggccctggaaggcctgagaacagctgtggctgccaggcaggaacgaaaacgtggaaacgtggaaacgcgggtctccggccgtccagctttcgcgggccccgtgttcttcccttcagtgaaaatacgcttatacatgcggctccttccctctccagaaaattgtaagtttcgtgtgctctgtttctggcccttgcgtcgtgctcggaaagggcttctgcagcctaagaccatgaagagacatggcgagttctaagcaggtggatgaaatgagtggggtgttaccctgcctgatcctccgggtgaaatgtcc

SEQ ID NO: 471149 - DNA, 557 bp, Homo sapiens
tttgcctagaaaatggctcgagatgctggagagcgtgctggattcctccttccgtatcttcacatcgcgtgtgacttggtgcaaaactcagtgggtgcccacttgggaaagagggctgctttctggtggcccacgctgtccgtgtcccctggctgtcatggcaaacagaagaaggaaaaggcgtttcaaggccattgagtcgatgccaggaggattttccaagcagggttcttatctaggaggatgtgaattgaggattttggcaaaaacagaaacctcagaagatctcacggaaactcacaaccgtgacgacagtgccaaggggatggtattaaaccacaagaaaccgccccatggccccgtcacctcccagcaggccccacctccagcactgggggtgacagctgagcatgggattgtggagagctggtgagcacactttccctaggggacagctaggaggctcacgagtcgggggggcagggtgggaaaacactttcccccctttttttctttccttctccactgtccagcaggcctgttgtccctgcaggccc

SEQ ID NO: 471150 - DNA, 596 bp, Homo sapiens
catgtgagaggatacgtgactgatgaaactcatacagatgaggagttgcttcttacggatgagcaaagaaagtagtttcttgaaatggaatccgctcctggagaagatgctgcgaacgtcgtggaaatggcaacaaaggattcagaatgttgagaaccgactgcatttggaggcaaacggaggcaggcacgagggttctggaaatgaagaccaggtccatggacgctcaggctgcctttcagcgacttctaattgttggacaccccggagaattctacatccggccacagatgacagagtgggccgcctggtgtggctggaacctctagggggctgcagaccctgcgtttgctcaggccgaattcattcaaacattaactgattagtcttcattgtgcgtggtattctctagaatcgtgacttgttggtgaaagctgggaaataatttggactctcagaccgagttcaaaattgaccattgacttagcagcctttaaggtgctgtgaacagtgcagggcacttcagggacccctggagcagctctgttacttaatgggcgaagacacgttttggcgagatttgccgatccgctctc

SEQ ID NO: 471151 - DNA, 2440 bp, Homo sapiens
tgctctctggaagggacccttagtgtcaggacttcctccagtgggtgattgtggggagtaagcccaataaccagttagcacttcctccagtgggtgacgatggggagtaagcccaataactagtgagcacttcctccagtgggtgacgatggggagtaagcccaataactagtgagcacttcctccagtgagcagtgagcacttcctccagtgggtgacgatggggagtaagcccaataactagtgagcacttcctccagtgggtgacgatggggagtaagcccaataactagtgagcacttcctccagtgggtgacgatggggagtaagcccaataactagtgagcacttcctccagtgagcagtgagcacttcctccagtgggtgacgatggggagtaagaccaataactagtgagcacttcctccagtgggtgacgatggggagtaagcccaataaccagttagcacttcccccagtgggtgacgatggggagtaagcccaataaccagttagcacttcctccagtgggtgatgatggggagtaagcccaataaccagttagcaattcccccagtgggtgatgatggggagtaagcccaataaccagttagcacttcccccagtgggtgacgatggggagtaagcccaataaccagttagcacttcccccagtgggtgatgatggggagtaagcccaataactagtgagcacttcccccagtgggtgatgatggggagtaagcccaataactagtgagcacttcctccagtgggtgacgatggggagtaagcacaataactagttagcacttcctcttcaccgggtgatgaccggcgagaaagccccctgtttattcagcacttcctccccagtggatggtggtcatggagtaagcccactgttggtgatgattatggagttagcccactggctagttagcccttcctctccagtgcatgtggatgagggagtaagcccagtcattagcactttctccccagtgggtgatgatgtgggagcacctgtgatccaggtagatcccatcctgttctcatggagctcagagtttggtgatgataaaggcccagaaatgaaaacatgcactttgtgctacctggacttgcatttccagtgccctttacacggtgaaaaacgtgaatacaagccatcagtagaaaaagaagaccctctgaaacaggaatttccaagacagtgcattgaggaagtccaaggaggaaaggatggggaatagaagacagcagcgaacaggactggggactgtcacaggagccagagaaagggctgattctaagaggaaggagacaccaaaaatgtaaaagggtgcaaaaatactggagagaggaggcctttatgatggccactgggtgggggcattggcagccaccaaggcctctgagagagcagaaaatgtggttccaccaaacactcttctggaacctgctcttttttttgtaaggctttgaggaacctccatgctgttttccatagtgggtgaaccattttacattccacagcaggtgcaccattttatattgcatagtgggtgcaccattttacattccatagcaggtgaacaattttacattccatagtgggtgaaccattttacatttcatagtgggtgcaccattttacattccatagcaagtgaaccattttacattccatagcgggtgaacaattttacattccatagtgggtgaaccattttacattccatagtgggtgaaccattttacattccatagcgggtgaacaattttacattctatagcgggtgaaccattttacattccatagtgggtgcaccattttacattccatagcaagtgaaccattttacattccatagcgggtgaacaattttacattccatagcgggtgaaccattttacattccatagcgggtgaaccattttacattccatagtgggtgaaccattttacattccatagcgggtgaaccattttacattccatagcgggtgaaccattttacattccatagcgggtgaaccattttacattccataatgggtgaaccattttacatttcatagcgggtgaactattttacattccatagcgggtgaaccattttacattccatagcgggtgaaccattttacattccatagcaggtgaaccattttatattccatagcgggtgcaccattttatattgcatagtgagtgaaccattttacattccataatgggtgaaccattttacatttcatagcgggtgaacaattttacattccatagcgggtgaacaattttacattccatagcgggtgaaccattttacattccataatgggtgaaccattttacattccacagcaggtgcaccattttacattccatagcgggtgcaccattttacgttcctgccaacagtgcacagtggct

SEQ ID NO: 471152 - DNA, 868 bp, Homo sapiens
gattactgttcctgtctagaccaggaaactcaagctcaaggccctgcccggtgtggcacaactaatggatggtcaagaccgaggctgcctcaggtcctccagccccagccccgctctccctgccactcatcagcctctcaaaagcagggcctctcaaaagcaggaagagtacacagatcctcatcctccttggggccatgctgttcttggcatctttcacagccactgctctgatcaccttggcatataaacttcctgtcgtggctccatcagaaaccaggacttcccggggagggctgctgaatgccaggctgttcaccctgtgccctttggttcatggaaaaagtgggtatgaaacttttggtctggatgggaaagctgattgccttcttgcttccaaacttctgaacctttcaacctgcactggtgtctgtgcaaatgtcaccttctcagagcagcctttgccgatcttccaaaataaaatggccagaaccgttcctggtattgaagaggcgattgtattgtatttcgtggagtactacacaaagccctactgccgatttgggccagttcttgtgggcctctttctgagcatttacatgcaccaaaaccaccaggaaaacattctcagaaccaaggaagtctttccttatccttccaggccaggctgtgtccttctttttggttcctctgtgcactgtatattcctgggccctggctttgtgggtaccttacctagatgttccagagaagaggccctggtccttggaaaaccttgtgttgcccatgggaggaagaagagataagattttaccgaaaggaatgaatatacagaagctgtgtgactttttctataggttgcagttac

SEQ ID NO: 471153 - DNA, 562 bp, Homo sapiens
aactgcctgaaaatccactttaaaatgaggccccatgctcttaggaggtggcctccatgcttatggtggcttgtttatggttttccgggtgtttgacttccttgatggtacaatccagtgggcccggtacaggaacaatgtcaaagactatctcagcaatgaagaagaggcctttggcaccagcttgaacagtcagagatcacaaatgactctggggacacttaggataaaaagcaatggcctccaggcccttcactggcacttcaacgccagtgaacatgactgtcttgctcagcaacaggatgtgaagaagtccatctattccagtcgtccagggatattgcttctgcttctgagtgtcttcgtggaagctttggaagggaccctgagagtacgaagtgaaagctataataaatcggaaaagggcattgtgatttttcacaaattatatttcaaggattagactttactttgtcatgtttgtgtgtgagcatttgtgtacaaatatagtctttaacccttttaaggaagattgttaggatgttgctatcctagaaggatg

SEQ ID NO: 471154 - DNA, 522 bp, Homo sapiens
cttctgaggaatggcagaggcaggagagtcaaaaccaagggaagctgagtgtttgaagaagggagtggaatttcttattttgtccaaatggacccaatctagtcttgaccagtggaaggttcctgctatttcttctgaggccacaactgcctttgccaatgcctcatcagggcctgaagcttatacctcaccatggattcccatgacagcatggggcaagggagtcctcgggacccaagacaaagagtgggaagggactgaagagatgtggaagagactgcagagatgtggaagagctcccgtcaaccctactgcagacctggaccgaagtcaaagcatgaacatggggctggcagtggcagcaatgggtgaggggaggcttcccacagtacatgtgcaagtgtgctgctgccctgctgctggagagggtggtgttgttgccagcaacttgtgcttctgccctggggcagcagccagcagcagaagtgatgactatgagtaggggggcttgctctcagggag

SEQ ID NO: 471155 - DNA, 1212 bp, Homo sapiens
ttgaagatcttggcaggaaagaatctgaggagctaccatgtctatgaactcatgcaccaaagatgaaaattccgtgctccgggacgaactgctgttcctgggcggcccggctagctctgcctacgcgctcagccccttctcggcctcgggagggtgggggcgcgcgggccacttgcaccccaagggccgggagctggacgctgccgcgcagcccgagggccagctgctccgggaggtgcgcgtgctcggggtccccttcatccctcgcgcccgggtggatgcgtggctggtgcacaccgtggctgtcgggagcgcggacgaggcccacgggctgctcggcgccgccgccgcctcgtccaccggaggagctggcgccagcgtggacggcggcagccaggctgtgcaggggggcggcggggatccccgagcggctcggagtggtcccttggacgccggggaagaggagaaggcacccgcggaaccgacggctcaggtggcggacgctggcggatgtgcgagcgaggagaacgaggtactaagagaaaagcacgaagctgtggatcatagttcccagcgtgaggaaaatgaagaaagggtgtcagccctgaaggagaactcacttcagcagaataatgatgatgaaaacaaaatagcagagaaacctgactgggaggcagaaaagacctctgaatctagaaatgagagacatctgaatggggcagatacttctttctttctctctggaagacttattccagttgctttcatcacagcctgaaaattcactggagggcatctcattgggagatattcctcttccaggcagtatcagtgatggcatgaattcttcagcacattctcatgtaaacttcagccaggctatgaaattgtcggcatgcctgttgattctttcaatagcatgttaagtaggtattatctgacagacctacaagtctcacttatccgtgatatcagacgaagagggaaaaataaagtttctgcgcagaactgtccttacatggacagatgtttaggacttcaagatcacacttgtgggaaatctgggggagccacaacttttcatgaaatgcattgtatacaaaattcgtagttatgtccaaagaataggttaacatgaaaacccaataagactttccatcttggcagccatcctttttaagacaattttgaaatatacaatgcattaactat

SEQ ID NO: 471156 - DNA, 638 bp, Homo sapiens
tagggatctaagttttaaagaatgctggtaaggactcttccaattatagacaatctgaaacgcaaattctggaaatccttctatagattcttaccgaggaatcctgtagtttccttggttggtcaatgctcatattattttttcctagttgaaaacaagaccattagtttggtcagtagaaaccatggcatgcacactggtgttacagtaaaagtaggtcacaaaccaagaaagttagtaatggaaagcaagtcaggaagtttgagctatgtgttctcctgtggccttagaacatccattcagccattccacaaatatgcccggacccccagtggagttgcagcttttgctcctggccttggggattcagcagagaatgctcctggcaagtttcctaccctcgaggtgctcactctagggcttattcttttggggcctcattgtagttccatattttcattcattcgttcataacatgcttgttatgtgctagtgttagacactgaggattcttgttaaaagacaggagtcccagtttttaaggatgcagccctgtaaatagatagttactctgcagagaatttctgattcccagttggagaactgttacagctctctcagtcccctgctgttctttt

SEQ ID NO: 471157 - DNA, 548 bp, Homo sapiens
tcctgcagcagggctgggcaggcggggtatggtggtgcaccccactgggggtgtctgggaagtgcagagcaggaccactctcagctcccaggcgggggcccagcaccctgagccttcccaggctgcctgttttagatgcttttcagactttcatattctgtctcctactcctgaacttccctggaatgacaccaagttgtatgaggggtttactgtgtccttgaatggggcggggacagtgggtgctgggaaatcagtcccttgggacagggggcccggccaggatgctaaaatatctcaggctcctgagtggctggatttccctaggaccctcagaccaacagaactcagaccctcagacctacgctggggcccggtgaggaaacaggcccggcttaccaaaacttgcagctgtaaggcccaactatttactccttcaaataaagcaagattccaagaataagtatgaatgttttgttttgtttttcactgaaatattccggtctgtagctactccaaatcacactaatctttctggagtctggtat

SEQ ID NO: 471158 - DNA, 798 bp, Homo sapiens
gtccagttcctcccggctccggccgctgagcagcttctggagcagctgcagcttgccgtcacgggcggcgttgtacacggcggtgcgggggtctttggttcgggcctgcgccaggccatgagccggccgcagggggagggggagacagaggatcacagcccagacaggcgggagccaaccttcacggtctccctcgccgccatcttagggtgtcctagagacttttaaatatgcagattattgacctgagaaaccatttcgcaaacgatacggtgcagcaagtgaaagagagtgcgggcatggactgggagtctgaaagacatcccaggttgaaagctacccagggctccaagtattcacagacacagagtgtgcattctgtctccagtgtcaaccaccaagattctgtgctaggaatcatgctttcaggagggcttcgaggagaaattctcaacaagccttttatgtctccttgtccatcattcagcatccaattccaactccatgcttttccttacttccaacttccatttttgccccgagcaacctgtgcaggaaaccatcagtttccctgctccactggacatctaaagactatggtggtgatagaaaatgagagtcatcaaaaaggtccaagtttagtgaagatgcgcaaagggaaccagcccttcccaaagaattcagtgaatgagccaagattctccagaaaccgctcagctttgcagtgataattttctgtgaagacatagactgaaatgggaataagagatagaaagttgaaaaagaattttctcagaa

SEQ ID NO: 471159 - DNA, 626 bp, Homo sapiens
gattggcctacgatatgaccgttgacactgagacgttcctgcacgtagacccgcatcaggacttgttgcaaggacttctcgaggctgtggtattccagatccgccaccagcacgggatagtgacctggcaacggccgcctccaccagcaaacagacgccagctcctgcagaatcaaagacaaacttcaaatgctgagaatgtcaacttcatccagtttaatacttttatatgtgttgccaagaaagaaattcccagaagcaaaaatgtcaaaataatctttggtgatagagctatccagtggaatggctcatccaggggaaaggggaagcctgagaattctagagcaggatttcccagtcctgaagagggggctcctgaattacgatatgatccagcagttccacttctggatatatacccaaaagaatttaaagcagaaactcaaacagatatttatgcaccaatgttcacagcagcattattcacaatagccaaaaggtggaaataacccaaacgttcatagatgaatggataaataaaaagtagtatgtacatatcatgaaatagtctttaaaaggaatgaaattctgacatgttacaacgtaaatgaaacttgaattatgct

SEQ ID NO: 471160 - DNA, 644 bp, Homo sapiens
ttcaagcatttcctatacttggagcttttttctttttggtttctaaaactagaggaaaaaggtttaccaggtatggttggcagaacaaggggcccccaaagatatccacaccctaatccccggaacctggagtggttttgcacagggtggagccatgatgagctgggctttggggtgcctgctgcttcctgcattcctgtgggcaggcccagtctacaccgacatcgggagaccttcgtgcctggtgtccatttccccaactctatagacttctcccctcctgggtctgctgcctggagtccagtcaccctgggtcccctcatttcccagtccagctccctggtgcagtctggggctgttaagatgcatactttcctgtttgctgtacatggctgtttagcagaagctgcgctgggattggagcctcggtctctgtcctcaaagcccacattctcacctactacaacaccttggcaggctgcaggtggacagaggctgttaagtttccagcagagcctattgcccaccacaggatgttcttggaaaaaccttgagcagtcttgtgcttcctaaactgtggttggcacagccttttctttaaaagaaattttatctggaaatgttattacttcaccttcattctt

SEQ ID NO: 471161 - DNA, 742 bp, Homo sapiens
gactcagctgcaagggagtcaagggaacatgactttttgttcccagaaggaacaaagaaggacaccagaaggaagttggaataaacactgcatgctaacctgctgcccccaattctatggtgactctgattcctcctggggagatccaggaaagcctcctaaaattgcttcccagcctccgacgcagggtggtatattgccaggcagagaggagcaaagatggatggccttccagttaggagaaagcaaccagggtgtgatgtgggcaggagcagggaccctgggcagcgatggggccaggatggaggctgggctaaatgaaaggggcatttcaccacaggttacagagttgcaattttacttaatttgcaataagagactcacagaaagttttcaggaaatgatacgatttgctgtgtacctacatcactcactgctagcatattctatgctagctctgagagccaaagataacaatcaaagagatctactgagaaactatcactataatcaagatagaacatatcaaaagcctatgctaggacagtggaaagaaggaaaaaaggtttgagaaactcagaaatagaatttccatggtttggtcagtgcttgaaaggagctgaaactggctctcaaatttgaagcctgagcctctgagagaatgaatgcagcgcaggaatggcattgttaacaaggtgcaacactatttgcatgcaagaggggacttcagtacacccattcc

SEQ ID NO: 471162 - DNA, 559 bp, Homo sapiens
cagtgggacctgactgaattatgggggcggatctttcctgtgttgctctcatgatgctgagtggagacttgttgaacggctttgcccaaaatgctgatagcaatatggacaataaagtccaggcggaggtggtcttagatggagatggggaacttgttggcaactggagcaaaggtgactcttgttatgttttagcaaagagactggcagcattttgcccttgccctagagatttctggaattttcaacttgagagagatgatttagggtacctggcggaagaaatttctaagcagagaagcattcaagaggtgacttgggtgctgttaaaggcatttggttttataagggaagcagagcataaaagtttagaaaatttgcagtctggcaatgtgatagaaaagaaaatcccattttctgaggagaaatccaagctggctgcagaaatttgcataagtaatgtggagccaaatgttcacactcccacccagtatctcccaggtactctaaatggggtatggaagtgaacctagggagccaagtgtgtaacatgggggga

SEQ ID NO: 471163 - DNA, 1127 bp, Homo sapiens
gtatataccacatcccgcacccccacacaacacagtcacactctatacccagagagtctcacatgtagcacccaggttgtgtcctacacaagggtgcccagctgagggtctgaggcagctcccagggtcctggggcagggctgggcacctggagggaggaagggtgcctcctaactggcatgaaggtgccctgtgcactggctgagactctggcacccatgaccacagagcactccccacccaactccagtcctctctggacgccaggaaaagtggtcctctttttggggtggggacagagtagcaagtccggggcagagcttggtgtcttcatgatctcccgcaagcacctctccaagcccatgggccacccacagtctagactatccttccccttcttctgtgactgcgtgcacagtacagcttatctcaccttcctgcttcccttcctccccaccgctaactgcccaggaaatccctctcactcactgttcggcacccagctcacacatcacccctcctctgtgtgtctgctggccaccctcccccagaaccttttgctccctagagagctgaggaacttgttggatatggagctgggcacagcaaaatctccacccccagctcagatggaggagaaacctggtgctccaataaaggaatacagatacccggtttgtaaagtctgctctgctctgactggcgtggtggagtgtggctctctgctgcttgcctgtgaccctgagcgttttcctcccctggtttcctgcacatttttttccagtcatcccccagccgggcctgcagagctgccactgtccctgcagcctgcacgttccccagccctggcagcaaccactggggcaggaggtcctgggctcctcagcccctggaagaccctgcgccagccccgactctagacatctgagctttcgtgctgcaggcctggagtttaagaagacatgaggtgaaagtgtgagagctaagggaaggtcctaacccctaagattattttccacgaacgggacaatccaacagctctgattgaaagtaaattggcctttctgcaattctttttttcttccttcgaccaaatatgctctcttctgtttttccccctccacacc

SEQ ID NO: 471164 - DNA, 2258 bp, Homo sapiens
ctcccatctccacatcctgctccccaggtcccagcgcctctcccacccatcagcccttgatacacagaggagggacccacatggagcaggtggtggtgatagcctgtgcctgtggctggattctatggtctgccctaacaaggcacagctcaggaacccaagagctgtctgtgatattgaccaagggcccttcttggaaacctccttgtggccaggcccagaaataggatggcaggagaagccgccagacctcctaggcatgggctccctttcagaatcctccaagctggcccagcaaacaccccagccagaggaactggggccctttgccccttcatggtgttcgcagcccctcatcacccgctcccctggaaggcctgctgaaatgcagatgccttctcctcctcctgggcaccaccctgaactgaccctacccccccagacactgctgcggcctggctgccctggggagggcaggccagggccagcaagacctgggagcctctgcggcccacgacacctacagttttagaatctggagagcagatgcctctggcttgctaagcaactcatgaaacaaacagcttgcttcagggctttcttttttgaagctgactttgttgtttgggtggggagatgtgtgtatagataagcttctcaaagtgatgacatcacaagaataataaaaatgccacattgcaccctgtgtctttcacctcccaggcacgttttcaaaactaatcataggtcaattccccttcttgccagctccagggacctgcagagatgggaggcgctgctgaaaaccctctaaggggggcagcgccgccttacctctcagagctgcatttccctctcttagaaaagggacgagctaggtggattttaaagttcctgccagttcccaattatttacccagaactgattttaactgagtgtttgaccaaagctttggtccatgagccttccattgccggggtgtttattttacataaaatttatctggatactcacacgtagaagtttttcttttgcatggaccctggagggcacacagcaagcctgggacggctgtgactccggaaggtcaggagggagaaagacgccctctccacgctgtatgttttggtatcatctaaatcatgcgcagttgacacaaattcatgattacttatttaattaaaaagtagaaaacccaagaaaaacacaggaacagactgctcaagtgtcctccaactacccagaggctttctgccaggcagccttgacacatggaaaggcctgaaaacttagattctcatcaaaacttcagcacctaaccccttcggagccacattgggctacagggccctcagataacaatatttccccttcttcccacatgcctttgtgaagaatgagaataaagaatttctgcagaaaccccttgcaatggctaaagtgctttgtacacaccagggtgcccctgaacctgcctcaagggtaggaaggggctgccatttctccatggccctgacactgcctggaacatagcctggcccggagctggtgctcagcagatgcccgaatgaatgcacgactgagtcagtcacgaacctgaaggaatgacaggaacccaaataacccatgatatcgagcccagcggtggcgtctgagtcgtcacctggcctgatgtgtctgatctatcagcagcattcgcagggatgtcctcccccttgactcactttcttcatttccaggcataaccctcctgcctttccctcctcacacaggctccttcccctcctccccctcttcctccccttctacctgtccccttcctttttcccttccccctcctccattttcccttccacctcctccccttcttcccttccccctcctcccttcttcctcgtcctcctccttcccttctctccatcctcctcccttttcccctcccccttcctcccccctcctcccccacctcctctccctcctcccctgcctcctcctagactccttcctctcctccctgccctcttgggttagatgcccggaacttggtccttgaactccaccctgcccctttggctccctgtctccttgatggtctcatccaatcttacctgttggctgacaacatccacattcactctcccgcccagacctctctcctgaactcaacaaagccgacctcctgagcttctcctccccaaactgttcttcctgaaggattccccagttgggctcatggcagcttcgtattactcaggcc

SEQ ID NO: 471165 - DNA, 1385 bp, Homo sapiens
ccaccgccgacgttcccctgacgtctgttgggtacacctcccagacggggtggcggctgggcagaggggctcctcacttcccagaaggggcggccgggcagaggcgtcccccacctcccggacggggcggctggccgggcgggggctgccccccacctccctcctggatggggcggctggctgggcgggggctgccccccacctcccggacggggcggctgctgggcagagacgctcctcacttcccagatggggcggctgccgggcggaggggctcctcacttctcagatggggcagctgctgggcggaggggctcctcacttctcagacggggcggccgggcagagatgctcctcacctcccagacggggtcatggccgggcagaggcgctcctcacatcccagacggggcggcggggcagaggcgctcctcacttcccagacggggcagggaggttgcagtgagcagagatggcggcagtacagtccagctttggctcggcatcagagggagacggtggaaagagagggagagggagaccgtgggggagagggagagggagaccgtgggggagagggagagggagaccgtgggggagagggagagggagaccgtgggggagagggagagggagaccgtggggaagagggagagggagaggaagagggagagggagagggagagggagagggccaattgtattaattgtaaagttgaaaacaaatatttccatttctaattatgggcagaacgaacagttcaatattactcaataccaaatctttgttcttggcatacactttcccactgaccccaagtggatcaattgattcaaattcctggagagcccagaatggtagatccactgacagcttgcaccgtgtgcctggaaaagccacagacactcaacaccagcccatgaaagcagccagcagggggcgctgtatcctgcaaagccacagtggcagagctgcccaagactatgggaacctacctcttgagtcagtgtcacctggatcactaaaaggcatctcccattctcggtgccctttcaatctgaggtcttttattgtcccccttcccccaattggggaatttatcttcaatatttcttcaagtttcttctcaccttcatgtatacttttgtctctttcttggattcctataatttagatattatttttacttttcatttcttttttatttgaactttcatgtcttttttattttctttgaactttttatactttacttcttccttttgcaagatttcctaaatctggttttccagtttattaactcattcttcagctgtatcattttgctacttatataatcacatattaccttaataatggtatgtatataaaatcactgtcagtg

SEQ ID NO: 471166 - DNA, 988 bp, Homo sapiens
cctctactctctaacctaagctggatgtgttttgcagatatgtactaaagggaaaatccagcagttgttttcaatggtaagaatgagagtggtattaaagagcagccagagggtccttttggtacatgaactattctgtgccttcactatagtgatttatgcacaaagctacaaaggttccccagtgagggtgtttaggggcagacgatccgatccctctttcccactttcacagtttgggcactcacagtatttgggccgtctcctgggtcctacaggaggaatccacttccttcaaagggatggagagcatccagatcaccagaggaatcaaaaagagggaattctaataatggagcaaaaagctgaaatgaaaggaaagacattaaacacgagaaagtcttacaaacagaaaatatcaggcatagccaaaaacacagactgtgcactggctcttcatattacactggttcattctgaattctgctactgaaatccagttacttctaccttagagaacaaaatacattctgaattacttaacaaattacattttgcccacctggcaagcttcgccccattacttagcatttgtacagcatttttgatttgctaatactttaaaataatttttattctcttggctatcatactttctgctgagtaaccatatttcaaagtactgtattgccttctgattgcctctttacatcactaaggaggagaaatgaggatgtagtgggatatccttgcacagtattagtttgagagttttattcagagttttaatgtttcaactaagtggaaaactttggaataaatggtctcctgtgaagtaaataaccattactttcctgaaatttagatttattattactcttgcgaaactaatgagacttctccagggtactcaactttctaaagctaactttttgctgaatcagacatgtcaataagtcactgatctatggataactttttaggttcc

SEQ ID NO: 471167 - DNA, 537 bp, Homo sapiens
gggggtttgagaagtataattgagagaagacttgggagccagttgacatgactgatccatgcatgttattgcccggaagaccctccactgggacgagatatatgccttttgccttccactgtgagtgtgaggccttgccagccacgtggaactgtgagtccattaaacctctttttcttataaattacccagtttcagaagaagacaggaaaatgtgggaaagtttgaaacttcctagagacttgttgaatggctttaaccaaaatgctgataatgatatggacaatgaaatccagactcaggtggtctcagatggaaatgaggaacttgttaggaactggagcaaaggtgacacttgttatattttagcaaagagactgcttgatgtgacagaaaagaaagacacattttctgaggagaaattcaatcctgctgcagaaatttgcatgagtaatgaggacccaaatgttaattgtcaagacaatagggaagaggtctcccgggcatcctaaggacttggtgttctgcatcccagcc

SEQ ID NO: 471168 - DNA, 570 bp, Homo sapiens
gaggggctgggggataccatgtgcttgaaatgttgaaggtcagctctcaccctcctgtctattttagtctctccgtggcccaggatgaggaggataagaagggagttacagtgttggctggggtgactgacccagattatcaagatgaaaacagtctactactctataacagatgtaaggatgagtatgtgcagaatacagcagatcccttagtgcatcttttagtattgccatgccctgtgattaaggtcagtgggaaactacaacaacccaatccacacatgactacaaatggcccagacccttcaggaatgaagctgtgggtcacccaaccagatggtctatcccgggactttacccaggatatacccaggtctatcatgggacttttcccaagacagaccatctgtaagatgaggagcaaggagaaagaggtttaccttctgaacgattaaattttctcattaaaatcaaagggataaattcaattccatgggacaaaaataagctaaaataatgtgtgtaaagggctttacagagtttcaatgatacactgaacgcacgagcatt

SEQ ID NO: 471169 - DNA, 945 bp, Homo sapiens
gccaactcataacccatgtactgaatgcttgttctgctccaagcactgggaataacaaaggtgggcacaggcacgtgccctgcccgaggcacacgtagatgcttgggaggagcaacttatcacatggacagtgagcctggagatgatctagaggacaaagaggcatccagagggggatggatccagaaagtcaacataaagcgacttgacttccatgtatctggcagagacagccttctcacagaagttacaacttcaaaaggctccaaagatgcatatcatgcccagaggcagatgaaacacactgcatggtcactgaacccagaggttctcctgaaaaagtgtatttcagtctcagtcattgtctggaaattcaaagtaccactgtggctcaagaaccctcattgtcctgacatgtggagcctcctgactgcacctgaaagcactgacccaaggctcccacctgggatgaaaggtgcagatgtctcacccagccaacaagccagattctctgtgagtgtctccagatgcagcaaacttgttcatcccaagtgcctgctccaggcgaggtcttgtagctcctgaggcactttcttttttgttaaataagaacaagctaattgctgttcaaaacttgaattttttgtttacactaaacagactttaggatacaaatttcatagtaaaggttgatttaaaaccattataatctaatattaggaaacaactatctacagctctcccacgtttcttcagtcttgcaagcaaaggcattgatagtcttttctgcactatctttctaaggatgtgtgcatagcaaggagccttagaagacagggtcttctcttagaagatagggtctccctagagcaaagatctggttggtttattgcccactgtaataaagacaatgtctccctctgggacaaacggaaggcatgttta

SEQ ID NO: 471170 - DNA, 855 bp, Homo sapiens
gcacctgtgaatgtgtatgccatgtccagccaccacactggtcctcatgatgtccctgaaacatcatggttctcaggtccactcttggctcaagccacactcccacctggctgcaccttccaaatacccaaagccaccatatcctccagggcttgcctaaaagcccaccttctccatgacagtgccctgtggacccaggctggcattggtttcctttcagagacactgagggtagcaacaggcaaaagagtggaggtggggaccagtcagcagggtgaacagttgctcttacccggcgtcatcctggaagccttccaactcatcccgctgctctgccagggtggcctccaaatccaggtaggcgccattgtgagagagctgcagagtacagtcatccagctgcaagagaaagagcctgttatacccaacctgctcctcagatggagactacatatggagaaatcacatcatgttgccctcctgtatgcagaggagccagaggagaccttgaaacctagaaaaaagcagagccccaaatgcaaggagcttgggttcctgagtcactgcatggaagagagcactttgctgcccagatccactgacccatcctggactgtgacagcatcaagaaacgagcctttgctgtgctaactcattaaggttttgtggttgctacaggtggaaaattccaatggaaattggacctgttgacacgtacagtggaccatgtgtctggttgtaatcattggcagctcattcttgctttaatttctactgctgttattaactaagaaagctgatttagtgtgttcagctgatagtatcaacactttgcctatttttaatcccacatat

SEQ ID NO: 471171 - DNA, 707 bp, Homo sapiens
tggagtcactaggccaaagccatgcaggtggtgtgggacctgatccagctccctctggctcagaaccccatgctcttcctactggtcctctccttgcctcgtttacctgctatagactttccagcacttcacaagccctcaagggaaggattatcatctgtgcactcacgcaatatgtgcatggaacgtggaggcgagagtacaaaaggcatggtgcttgcctatcgacatgaggcccctacaacccagggaaggcccggtggtccaggatccagtgctgctccccatgtgcccatctcacatgctgctcggcaccagcagccatcaccactccacttctctcaagaggaagaggaggaggaggaggaagaggaagaagaagaagaagaaggagaaggagaaaaaagaagggaagaagaaaacaaagaagaaggaggaggaggaggaggagggagcgttaaacacataagcatgagcatgtcagtaattctgaaacagatgtccagtacagtagaagcttttgctgagagtgaaaaacattttttcatcattaatgggtattgaattttgtccaatgccttttctgtatcaattgatatattattttttccctttattacgttaatatagtgggctacagatgttggaattatctgacaaagacttaaagcagatgtgattaaggttactgacttaaaatggggaag

SEQ ID NO: 471172 - DNA, 567 bp, Homo sapiens
tttttccactgaaataatccccagcaatggatccaaaccaagaagaaatctttgaattgccagactacagtggaataaaattggaaattcactgcaaagggaaccctcaaaactatgcaaatacaagaaaattaaataatctgctcctgaatgatctttgggtcaagaatgaaatcaagatggaaatcttaaaattctttgaactgaacaataatagtgacacaacttatcaaaacctccaagacacagcaaaagtggtgctaagaagaaagttgataacattaaatgcctacatcaagaagtctgaaagagcacaaatagacgatctaaggtcacacctcaaggcactagagaaacaagaacaaaccaaacccaaacccagcaggagaaaggaagtaacaaagatcagagcagaacaaaatacagttgaaagaaacaaacaactaaagataaattaaacaaaaagctgattctttgcaaagataaataaactttatagaccattatcaagattaaccaaaaaaagaagagacaagatccaaacaggatcaattagtaatgaaatgc

SEQ ID NO: 471173 - DNA, 597 bp, Homo sapiens
tgccagcatgtggagccgcctgccccgctgtagcagctggcatatgaggggaacatggtggcacctgaaaacttggagacgtcagtaaccacagagccccaaagggtgttacagctcttgcctggggagtcccaagttctgcccccaagaaatgttacagctctctctcattcctgctgcccacagcttgacgaatggggtcttgttacagcttgttcagtcctgctgctcgcagcttggcaagttccgggttcttgtcccgtgaccaagaggaataagaatgggggagtacatgctgattggtccataggtgggctggaaaaagcaccatttgatcggctaaaatgtatcaagaaagttctcactccagtcacggactctatccatagctggcagctcggttttcaggcttcaggctgtctttggcttgaaggttgggtttcaccagggacctgtccctgaccccctccttttaacttattttcaagcagacaaaaatgaaaatgcaatatatcaaaatttgtgggattgtaggtaaagcagtgtctagagggaaatttatagtattagatacttgtattaaaaagatttcaaatc

SEQ ID NO: 471174 - DNA, 666 bp, Homo sapiens
agcaagcaagctcccttccctacaatgtcaagacatagaacaatgccagcaaagctcatgaaaataatcactactctgactttgaagcatctctatctgccactgacacctcaagcaccagttgatctgctgggtcaaatggcccaagtggcacagcaacttgcacagccacctggacctgttgcagagccttctcctgttcaggactgtactcaaaactggcagcctttcaggtcacttgataaatgggccagagtaacacacccaaataagccttaccctaaggcttttggcaatggatttgtccattttattggagaatccacagaaggtagtatctatatttattcatccattgaagaaatcttcagttacctgcagttggtatcccacaatagccagggtgtaggcagatggttgattgatccaagatttggaatttgcagaagaaagaggaaatgcttgaggctctggcaataaattggttaaagttactcatcattagttctgggctcagcaggcaaggaaatgaaaaatgaaaccatgaggtatacgggaaatgggggacgagagactgttgagtttattcaggtgaaatgctttaaagtgaaaaagggaaagttgggggttgtaagaaggacttggcacattgggctgtaagatctc

SEQ ID NO: 471175 - DNA, 648 bp, Homo sapiens
tctagcaaatgggtggcccagcagcactggaggctgtgggtgactgggtggggatggcattgccagggtcctggtataatgaatgggtggggggccggctgggaccctcgacgaagttgatgcagctcagccagaaagctcgaaggatgcaggctctccaggccagaggctctccaggccacaggcccaccgggagagcggagtacccagggcaaagtctggaagacccgcccttggggcttgcgtggagggcagcacgggagaacagtgttagaaaacacagccttccactccccaacaggagacccgcagggctcagcgcagggctcatcacagggcagcttctgcccatccagcccctgtggcaggtggcaggggctgggggtgctccagtcctagagtcccagttggggataggcagccgagggcagtccctgaacctccttcggattctgagcctctggagcctcctaggcatcttcctctttgcagctggggtgcccagggcccggctggagtgacaggctccctgcggctcctcccgcttcgctgccctcctcctcccctaccctgccctggaaggtgggtttccctcgagcctgcacgctgcccctctgttctgcatggaagctgtcacctgtctcctgt

SEQ ID NO: 471176 - DNA, 1030 bp, Homo sapiens
ccagcaccttacaggcttgctggcataaggcttagaaaaaaacgaatgcaaacttgtgaaatagcagcaccaccgctcttgatcttctctccaacttctttgggagagccaaggcccatgagggccacgtgcatccctgattaccagggggaatccagtgacctttccggaaccagctccggccagggatttccaggccgtccctcaggtctgatcattgctagaaagactggcggaactcacaggaagccgtcagagccacagcgcttcagcttaccatcagccaagaggagacaggtgttggacagggcaggcacacagggacatgcaggcaaagatgaaggcagagaccacgatgatgcttccatgagccaaggaaggcccggctgccagcaacccccagaagctgggagagaggcctggaacagcttctccctcctgccctcggaaggaaccagccctgccgacaccttgtcctccacagctttcagcgaggtatcagtaggctcccaagaacagtctatcgagaaagtccaatttggctggtgtggtctgtcctacaacaaagcacatgtagtagagatttaaactttttctcactgattcaatttggtgctatgctaagaaagcccttctctctaacattaaatgtaattccccttattttttagtattttttttatatttagatttatcattgtgtgaaggataagaaggaaatttaattttatactttccaaatggatatctagttgtccccaaatcactgattgataagctcatcattcttcccagtctaagatgtctttttttaggattctgggcatttcttagaattccatagaataatgcgtgttctgatccattgttccatgtccctatcctgaatctcagattcgagttttacagctttcagggtcactgtcacactctgaggctgcattgttgggggagtctagaaattatcctcctcatcttggaattgatcaccccaagtgaaacgactagcttggggtcacagggagcattt

SEQ ID NO: 471177 - DNA, 474 bp, Homo sapiens
cttctgggtgttctgatacctggagatgcctctgagccaactggggctcatgcaaattgttccatctgcccaaagtggcactggcatgccccgtaccaccaccaggagcagggcctcatgggaggcatttagagaaggcagcgttccaggtaccatcttggaagcagagagcagttctcaccagacactgaactgcagccctctggccttggacttccctgcctccagaatggggcttctgttccgggaagtggctcccaagaaattactggtggattgttggtgctctgagggtgaagaggtgaaggaggaagataaaaaggagcagccgcagctttccgttcattatagtgttattagtcagtcttcataaaagtgctatgcatctttattaaaaatggaagttcacatcattttatgttcccataaaaatgggtggtggtagctttgattaatttcttcacatacagtgaa

SEQ ID NO: 471178 - DNA, 1007 bp, Homo sapiens
ttgagagcatggatgaatgcctcattacatgtgggtgaatccaggggcagaactggaaggggtgttgaagccattgaagggacagtcaccaggaagcaggcataaaccttgcggaatgacgagatctgcaagctcaggaaagccccacgcctctgtcttgggatactcaaaccacacctcccgggcaagggctcccctgggcggcaccaatgctgcaggcctcttgcgatgtcgtggttgctgtccacacggcctcctccatggttgtttcccctggtggcctgacaggaccccgcagacccctaatctgctcacccggctgctgacctgccctgcaccacttcacccgcgcagccctgggacttggctggacctgcagaagagatggcaaaagccagggcctgctttggtggctggtgttcagggacctccctggcacctgaactcccactccaagagtggctggaaggacgtggggagcctgtgcacacctcccagacagccgtttccagagttctcctctgtgcctctctcattccaaggggaacgcagggagaggagctggtatgactgagggctgggcatcgggacaggtgctctctgccttatgggaaggcatccacaggttagggttattattattcctcctgcatagatgacaaatgaaaatgaaaaatctgaggttcctgttggttaaaaatcttgcccaaagttgtggcgacaatctatggaagagtgggctttgagcttaggccagtctgacttgcaggcacatgcaggcaagacacaagtcccatcacccagtggagtctccccagacagcacccttgtccatttggaacggggtcctcacatgtgagccaggcacgatgggcagaatcctaaagagactcttagtggaaggatgaaagttgggctagtttatctttgatagtccttcttatctttccaagggtttagtattcagtgttctgttcacttgctgaatcattcatctggcatattgg

SEQ ID NO: 471179 - DNA, 3123 bp, Homo sapiens
gtatgacctcctccctgcctcactcctgcagtaggtaggggtgagggtatgacttcctcctcctcacctcacccctgcagtaggtggggggaggttacttcctcctccctgcctcacacctgcagtaggtgggggtatgacttcctcctcctcacctcacccctgtagtgagtggggtgacctcctggctggccctgccaggctcttccctgtccccagtcgcaagggtactctcccagcctccacgctccacgcccacaccctcgccccacttgcccagccccggcaggagcttctccccgcagagtccccagtgttttctagaagctttgcctccccctgtgggctctcccttccgtcccgctctgtagctggcaggcggcctgtcctccctgcagcaaggggccagggtgggcgcaagccctcctgccctccccgcgtggacgtggacggggcggtgcgggctggcccagggtccggggtgcctgcagcgtgctgggccagccaggcggtagagggtcggctcagccagtgcccatggcagcacctgcatgaggtccccgcttcctggaaactgagcccgggaacggccttggcccggggaaagcagggctgagtgcatctcccctctgagagcatgaggtgctagcagagctcgtgggccgggcctttacctgtgttcttctatttctttttactggtaaagtcaattactgaagaaaaataatttcgaactagaaattatctttttagtttgaaataaaattatgtgcaaggagcttctaaattatctaatattttttcctctttgcaaaagtgttaatattatatggaaaaattggaaaaacacagaaaaataaacaaaccaaaaaaagcattattcaagatcctcctaccccaatgtagcttactgtgaacattcttatctgaattctttcagggtctttttctttcttgttttttttttgctctacagatatttttcaaacaaagatgggaggatggtagtatttattggcttgctttttcactcactaaatggtgaacagctttttacacaattctttatacattttcattattctttctttagggtttttttttttttttgacattgcttggtcaagctttggcacctactgcaaacctgttttcaaaatatatccatctatctttccatttctagtgcatgaaaacgatcatattcctgggccgttgccagcatgggtattttttaatttgacaatctttgccagtttagtaactgtgaagtagtgttgtttcagcttgcatttcttggattacacgtgaggggggagcaatttttccatatgttttatgagacaaaggtattttttcctttttgaattattttcggtcatgttatttgctaatttttctgttgctttgttccatcatcttactcatttggaaaagctggaataaaggtgttaactcatcgctttagcatctctatacttgcagtccccaccttctgttgtcttttaagattatgcaagtgatacaggcttattttagaaaaacttgaacaaagaaaaaaatttaaaaattaatgaaacttatttgaaatcccatcatccagaaattaccaaaattgatatttgggtatatattcttctggatcacttcctatgcagatctattaatgtctgtctgtctatctatatttatctctgtctctgtatctatttatctatctttgtcattttcagtgcatgtatagtatcccattttgttgttatgcacaaattactggagaaatcaaccattgttggaagtgtggttttctcccactttcatattataaacagctgtgtaattaatatctttgtatgtatatcttggccatagtctcatcatttccttgataaattcccacaagtaaaattaccaggtcaaaggttttggatgttttaaattattttgttgcgtgtactgccaactggccttctgggaaggtcgtgcacattttcagtcccaccagtgacatgcatttctctgggttatggcattttttgatatattgagttgtttttatgtagtttagttggtcctttcttgcatagtttctgcttttaaagtgatgtttaaaggtgccttccaattctcaagattatgtaaatattcagttttatttttatgaattgattgttttatgtttaagtatttgatacatctaaaattaattttggtatatggtgtgggaagggcatctcaccttattatttttctaaatgccatttatttaaaaatctgtttttcctaattggaattctaaatgctaacttcattgtacaccaagaatatagatatatgtatatatgtatatatttgcgattgtctttcaaattccattttgatttcaatgaacaatctgcctctgttcctgccctgtgtccccttgttttaagtactatatctataaaatacaatttaaataatatagctttctacccaccccctgtgcccattactttccttttttcaatgaatacttttttctgttctcctaaagaaactttagaatcatttttgtcacaccttgggtaatttgactgaaatggtatttaataagttaattctggaatactcagcatctttatagtggtaaattttccattctaaaaacaactttggtatattttcaagtttattcaaatcttatttgctactattaagttttgtgagttttttcagaggtaatcgcctaggttatttatttatctgtttttgtgattttctcctttgtgaatggacttttctgttatattttaactggttgtgtattgagatgctgttgattttgggaatctttctgattagctgtttgtattagcagatgctgttgtttgcctttgtatgtggtagctagatttcagtactagattttagtacttttttatcatgaccttctcttgtggcttttctattttgagaaaatactataactcttcaacattgctgaatcaatggggagtgtttggatttttaaaaaatcaaatatcagttgacaatgatgccttaacgcatcttctgcaaataaataatcaatggttaaaatcagcccaggctgcagcagcatgggaactcccgctcttcagc

SEQ ID NO: 471180 - DNA, 3348 bp, Homo sapiens
cggccttttttttttttttaagtgaaattggtgatgcacttgctccatgcactcctggcaggtagcaccctgactgctttcactctctccacagtgagaacgcttcatgttagccaagcgctttagcattgtagagaaggcaggagaacagaaccatgggagagcagctgtaagcacaattaggtataactcagaagtggccgccaagtatgtgccctcagtgctcattaattggacagctattgaagagctgcttataagcgccaatcgccatgtcctgccaggtgtcgtgagggtccagggtagacacacgtggggcagtagcacacccacgcagatggtgtctggtttcccagagctgccccaaaagagtaccacgagctggtggcttaaacaacagcaatggactctcacacagcgctggaggccaacagtccaaggtcaaggtgtcgaccacatcggctgccagtccaaagccctcacaaaggccttccaggcccgtgtgactcggacctttgccttttctcttgctcctccacctcccactctgtcttctcagcaatgtcagcctccttctgtttctcgggtttgcctggtgtggtccagcctcatggcctctgccctggcagttcctgctgtctgcaccagccttctccaggcacctgccccaccagctgccctacccgacagttctgcctgagatgccagctcccacatgctgcctccaaaccccacccctggaagtccaattacctttattgcttcataagtaatttttactgttgatctgattgattctgtaatctgcattcaaataaaatccatacactgcagttgattaatatgtcccttaaatatcttttaatctctaaattgtcttctccccctgcacctctttgttttctttgtgatgtgtttgatgaggaagctgggtagtctgtcctagagttcagtgctgtctgggctttgctgatggcagccccctggtgtcctctgacatgtgacattgtcccctgtatttcctgttgttgggtagttatatttagcatctgggtaagatggaagcctttttttatgcctatggaagtgagtatttagtctttctttttccctttgcacataaaaatatgtacttgcttcttcaacagactttcaagtaattgtccttatttcagatctcttttcacccccacctccaggggttgcaggagctgccagctcctgagctttggtgggaggctctggccacacatcagcctcctctgggctgttccatgctcctggctcacttcagcgcttttgggtctgctaagacgattgctgttgttccatctgctttacagcttcccacattttgctgctgacatctctccccttctctttgtcctcatgggtttatggtcccccctcttgttttttcattgctctcctctcacattagagtggtttcagcagggagccaacgtgaacatgtgggcttaatccaccatctttagcaggaagctgctccctccttctttccccatcagctttcggtgagcaaatggtactcagcacctcctggaagccaccaagagcacctctcatacctgtgcacacaaggccagccccaccgcctgctgctcaggccgcggttccctccgttccttccagaaactcatgcaggcacctgggagaagctgccttcaatgctgcctgctctgttgaaggagaattccattttctctttcgtggctactgtcttatctcaggtccctttgcccaagtctctagttcctttttttcttccagccagtcatttaaagtttatggaccttttcctggcaaatccatagattttttttccccctatctaatcatgaccctaattttaaatctgacctaagcagggcacctgctgtggtcctcccatttacagttctcttgagcatttcattcatttattcatctgccattctctactctagaagtctctagtagcctttgtgcttaatcattatattgatgttgattttgaggactgtgaaatattttatgatctcaacgtgtctcatcaaagcaattgtttcatgcttttcaggtgcagagtttggaggtctggtaataggtgctccaaccaatctgaagttctcatttcatatactgttaatttcctttagaattcatactctcaaagcacttatagaatgtattatttaccttgctggtaatttgtatttccttctacctcaattatgcaatcttagcaagactactcaagcatttgtcattgtaacatttctataagattcttctgctgcatgttcttccaagatttagaaagtaaacacactgtcagctggtgtcagaaaacctcacactctcatttgaaaaagacagctatggagtcctcttctctacactgtagtgttatataataattataatatgaataaggttatagcttgaccttagcttttcagtacttttcctccttttcttttaaaagattgatttaaaaagtatcagtggggaaaaaacttatagaaatacgacttgagaaatagaagtaggtttgcatgtatcaatttttttctattgtcagagatggggcagttagagatattagggtacacacacacacacacacacacacacacatacacacacatgatttattctcaacaaggggcacagagtgagccgttaacgcacaatttctattaacaataatgataattgtgtaagtgagtctccattcatgcctctggaaatttaccccttacggtccacataaatttgagctgttgaccatgtgaaatgttattttatgggcaataagggcactcagaagcagctgcatgttttcctaaacctggccacctaccagtatatgtctgcataattcttccatttttcttcctggaatccaaatatagtatacaccttgctggtaagatataggcaatcctatacttctccatctccctgcagtgatcatggaacagctgcatcttttgttgtgaaatcagacagtggcctataattcctcctttccggtgttttgattagaaatcttcaagctaatgtagatcagtgagctctatttctttatttctgtacttcaggcagtatttgtaggatagtatttgaaaatgaagcctctcaccacaaacaggttcttttctacccacactcaaccccaacacaaacacacaaacacacacacagaaacatacacacacaaacacaaatacacacaaacacacacacagacacacacacagacacaaacacacacacagacacacacgctggacaactgctgggtagagtgttaatcatatggaattttgtctttgttggggt

SEQ ID NO: 471181 - DNA, 495 bp, Homo sapiens
gcagccacctgcaactcggaaaagggccacacagaacccaccatgcagacgagggttctccaacaggtgcacgtgtttccccagggtgtgcaacctggagagctgaatgaaagtattcgaatttccctgactgttcatgtctatctttacctaagaatagaagttgctggcttttgctcacttctcttcgacaccagacctctggcatgtccatattctgactgcagccacactcgcaatggaacaaggggacaaaaacaatgtttacttaagtacattgtgaaagtccagaggaacgcttctgttttctggctgaaatctcacacgggaataaaagcgacagaaaactctaccctttcctgcacgtggccagcccctgtggaccctggtgacaggcactctgctcaccttctgcctggaagttttgccaagcccatgatggttttatgaaatcctttctttgatttggctcctggcagtttgcagtttgaagtc

SEQ ID NO: 471182 - DNA, 544 bp, Homo sapiens
agttaacaattaacaagttaatcttgttcagaaactactgccatgttaaaagatgaagattctcgtggacccactggccctgcagaagtggcccacttcccctggtcagaaggagttttggaacactttgaaatgaattcccgggatcctttttttgtttcccctaaattttcgggcgcgggccgccccgggccttcccctttgttaattcggggggttccaaaccgccgttccccaaaaaccgttccttccggagggggcctggacctggacctccaaaaaattttaaaaccagcccccgtttttacttttaccgcctccctttttggcgggggggccgcttcagcctctcgccgaaagaaattacccaaaagacctaacaaagaaccccaaaggccaaattcattctcccacctggaacaactaaaaaactggataaataaatgaaaaatgttttttatgtattagatacaaggcactgagtgatgtaaaatgaacgaggtgagccctacacttgccccagctgacttcctagagacaattt

SEQ ID NO: 471183 - DNA, 1753 bp, Homo sapiens
cccaacagctcattgagaacgggccatgatgacaatggtggttttactcttcctccatgcctcgccgctcttcggttctactctgtccactgccatggcccaagctgacatcgtgctgatcagattggcagtcatgggccagaacttaattctgaccatgaaagaccatggctttgtggtctgtgcttttaataggactgtctccgaagtggatgatttcttggccaatgaggcaaagggaaccaaagtggtgggtgcccagtccctgaaagagatggtctccaagctgaagaagccccagcggatcatcctcctggtgaaggctgggcaagctgtggattatttcatcaaaaaactgataccattgttggacattggtgacatcatcattgatggaggaaattctgaatatagggacaccacaagacggtgccaagacctcaaggccaagggaattttatttgtggggagcggagtcagtggtggagaggaaggggcctggatagagtatggggacatgcagctgatctgtgaggcataccacctgatgaaagacgtgctgggcatggcacaggacaagatggcccaggcctttgaggattggaataagacagagctagactcattcctgattgaaatcacagccaatattctcaagttccaaggtgctgatggcaaacacttgctgccaaagatcagggacagtgcagggcagaagggcatggggaagtggaccaccatctctgccctggagtatggcatacccgtcaccctcattggagaagccgtctttgcttggtgcctgtcatctctgaaggatgggagaattcaagctagcaaaaagctgaagggtccccaaaagttccagtttgatggtgataagaaatcattcctggaggatattcagaatgactcttggtggtgggcagtcagcactggggtccaggctggcattcccatgccctgttttgtcactgccctctccttctatgacaagtacagacacgagatgcttccagccaacctcatccaggctcagcgggattcctttggggctcacacctatgaactcttggccaaaccagggcagtttatccacaccaactggacaggccacggtggcaacgtggcggccgcggctccgttggctctggtagctcccacctccccagcgctggcagcatacccacgccagcccggaggagcagaggatattgcaaaggatacagatgaagagatgcatagaccagaggcagaaatcaaagtccaggaggccacctccaatgacccatggggcccatccagctctctgatgaccgagattgcagacctgacctacaacatggtggccttctcggggatcatgagcatgatgtggaagcggctcaatgaccatagcaagaactggcagcatgtgtacaaggagctgctgctgctggactaccccatcaagacaggctccgagtgcatggcccagcagtgccgtgagatcatctttgccatccagaccctgaaggacttccagtacattgaccaagatggcaaggaccagggcatcaacgtgcatgagaagtcaaagcaactggtggccctcctcaaagatgaggaatgactgaaagctgagggggcccaggctctcaaaaccaaagagcacatggcccaggttgccactggcatgggcagcaaccagatcaccttgggcgaggctccagccagcccaacctctccaccagccactcggagcaggagtatg

SEQ ID NO: 471184 - DNA, 1854 bp, Homo sapiens
agtcaccagttgagtcagttccttcgtatgggtccaggtggagtcagttggttatcagaatgcgaaagtctaagaaatatctcaaagaccaatcaatcttaggtttgacaatagtgatgtcatctataggagcaactggggaagttacatatcttgtgacttccagctttatgactcctgagcagaaaaagaaatttaaacaagctgcttggaagcagagtttattagttctagagggtcaaagccagagttgttttcagttcgctggtggagatgccattgctcggcaagtgttcttccgagtgtgtcttccccgaattgctgcagtcctaaaggatgtctataaggccatttttacttcctgcagaaaggatacacttgccagcagttttgccacgagagtacaccgaacaaaggagacagggtcatttaacctgatgcgtccaccctactgctgtgtctggtttccattggctgtaacgggacctcacattctgtatttgtcctgattggttagcaacttagaactttttaaaagaggcaaaggtagaggagaacaaaggaaggaggaagtaactttcggaatgctgaaaaagactgtgccttgaaatatattaaagaacaaagcccctagtaatgctcattcctaagccaatcaaaggctctaaaataaaaagtttgttctttctagttttagtgttgtgttgaatttttaggcaatttttcaggatggttgtctccagcttcctccatgttgctgcaaaggacgtaatttcattcttttttatgaccgcgtagtatcccatggtgtatatgtacctcattttctttatccaattctcagttgatagacatctagatcgtttccatgtcttcactattgtgaatagtgctgcaatgaacatacaagtgcatgtgtctttttgatagaaagtttttttttaatgtatacccagtaatgggattgctgagttgaacagtagttctgttttaaattctttaagaaatctccaaactgctttccacactggctgaactaatttacattcccaccaacaatgtattcccttttctttagccttgccagcatctgatgttatttgactttttaaaaatagccattctgactggtgggagatggtatctcattgtgattttgatttgcgtttctctgatgattagtgatgttgagcattttttgatatgttttttggccactcgtatgtctttttttgagaagtgtatgttcatgttttttgctaatttttaatggggttatttgtatgcttaattttgtaagaaatggtctttcacgtggctggctgtaccattttgcattcccaccaggaatgaatgagtgttcctattgctccacatcttcactagcatattgtcagtgttttggatttgggccattctaaagttatgtagtaatatttcattgctgttttaatttgaaattccttaataattaatatgatttgagaatcctttcatatgcccatttgccatgtgtatgtcttctttggtgacttgtctatttagatttttaaaaattgttttgctggtttccttattggtgagtttttagagttctttgtatatttttgataacagtccttttctatgtgttttgcaaagatttgctcctagtttgtgtctttttttaaaattccttaaacagtgatgttttgcacagaagtttctaattttaatgatgtacatcttacccattttttcttttatgcttttggtgtggtagctaagaattcaggccaaatccaaggtcacctagattttctccaacgtgatcttcggttttatagtttgcatcatatattctattccattttg

SEQ ID NO: 471185 - DNA, 584 bp, Homo sapiens
caaagaagggccaacaccattggtagctctcctgtccaaagttttcttgggagttaataagttatgggagcttcttgttcgcaatgtttccaatcagtgcagatggtgctgagggtgactggctctgagagtgttgtgaccttgcccccaggcattaaacttgggccctccaggatgacaaggaccagcagccctacacacttcctcttgcagagttgcctgggcacactcaagtgctccaaggaccagcccactgggaatggggtggctggaccagagcacttctggtacagctgtgtcatcaggtaccttcgaccccctcttctccctgctgctcccatgttcctggggtctaaggacgagctctcctgtaccctggcccctgccccacctctcccttattctcccttcacatcagtcactcatcccatacttcatagacagtggcagaggagtctaagaggggagggctccactccccagccccaaccagagcagatctgcttggttttgagatacatgtgtagcatttcacttgggggaagaaaaggctttcgctgattaaaaagtttgaaaaccactgt

SEQ ID NO: 471186 - DNA, 614 bp, Homo sapiens
acactcaggggctgccagcatggaggtgccgtcctgggccagccttccagagggtgccatcaccgcgggcaggagatgcggctgggggtgctggcccgctgcccccgtgggcgatcccagagcctggggcaatcccgctgctcctccaggaaccggggaccccttgctcttccgcgtcggggagaacctgctgcatctcccctgcatgctctgttcactcgaccacacgacccagcagcagaggtccccgttctcgctgcccctgcagcaccacctgtatttccacactgtgtttaaggaggccttgcagagcctcattaacacccccatgaagccagaggggactcggccaagagcagaacaaggggccaccttggtcccagcaggaccaaccacacgcagaatcgccttcagggagaaaccactgtggaaggagggaaggtctcccagcctttcccagaggtctccacacagcatcaaggcctcgttcatcggcccctgcccccaccccccggcacattactccctgcacgttttgtgcccctccctataaactgtagaatcttctgctttctttgggtatcaacttgtacatctatttttgttttctgtcc

SEQ ID NO: 471187 - DNA, 1193 bp, Homo sapiens
ggcaggggcatgacagcaggaggattcagggcattgcagcgtgaacatgagttctctctctctctcctgccaccatattggaggtgccttgcttctccttcaccttctgccatgattgtaagcttcctgagacctccccagccaggtggaactgaccatgagaagcataagtctttcctggaagagcagaggattcagccgtggatgcccctgcaagctggtgatgggcggcagacgcatcacgccagtgcacagtgtctcaggcccccagcctacgggctggcctcctccaaacacagacccagcaccctgcaccagacccccacccccaagcaaaaaaccagagagaatgttctaaaagccaagttctcaggacaaaacccctggatggcagaacctcacccagtttccctggtgatccacagccaagttcatggatgtgaacaagggtctggaatgtgccagcgaggggctcagaacaggcctcagtcaccagctgggtgccctgtgggctgcagcattaaggccagggtgcctgggcagaggtggggtctggacgacaggcagtgcagacagtgtcctggaggagccttcacggtaaccggggacatcagcgaggatggcagaggctgctcactcgaagctgtagccaagaaggctacactgtccctgcgcgtggcagagccttgaaggtggggtggggaggggaagcttcccattagaagatgggaaggctctggttggatgtgcttctgtgtccgctaaatgctgccataaacgctattgactagaacaagaatagaaacatcaaagacaagttgtaattgtccattagtgataggaaaatagcaagagtcccaataattcactttgttactggaccttacaagattgattatatagtttatctctctctctctctctatttatatatatatatatatatatatctatatatatatacgaatatatgtatatgtatatatatatactttctctcaaataatagaaatcaccctatatattaaatgtgtatatataaattaagaaatattgtggttggtttaatgacacaaaacttctcccctcttagataaatatatatcttgagaataccttttctcctgggctctattaataataaataaggttctataattttttttaattgcacatatgcagtaataaaaaat

SEQ ID NO: 471188 - DNA, 1001 bp, Homo sapiens
tcacaaacgtagttctgatctgcagacccactggcagagtccctgggaacttaccccatgccaggacccacaggccacgcggtgagaacctcctgccatgggtgagaccaatccttcacggaccgggagggaggctgtggatggggctggagccccgggtatgtcctcagctggctggagagcctcccccaggggcgatgtgggcaagtccacgtctgctggggtcccttccctgagctatgaggcagccaggaagctgggccacaggcgggaggcctggggtccgggcgctacagccagtgccagctcctgctttccacggccggcgggttctaccatagcctcggcaagtcatcagcaaacgtcccttacagacactccatccggacacgtgtgcctcattgccaggtggtctctctgccgaacccacatctgtgatggcagaactcagctcagagcagacggtggagccgtctccccaggccgtgtcgcaggtcctttctgctccgggcaaaagaatcgcagagcctgattccacaggagagcatgagtcggccagctcctgcggagcctcccgacagagcacgaaggagcgtggacagggctccagcttagttctgacatgcgttggaagcacctgcggacatccactttgcaaagcagctgctgtactggtgcggctggggtgtggcctgggccgttcctctattctaggaggagtggggctccagatgctgccgtgctcctggtcacccatgggagctgccaaaggggaccccaacttttcttgggaaagtgcccatccctgggcctgtgggcccctccggcgatgggtcagcgccaccctctgaagggcacaggggcgtgggggcagcggtgtcagtttgcttcctcggcgtcgtagccacagccgtgacatgccagcctgcttcccacatggaagaggtattttgctcctcccctgaccctgggaggtcctgggccccttcacacctttgcat

SEQ ID NO: 471189 - DNA, 1488 bp, Homo sapiens
gggctccttctctgcatttgcccgtggcccggagcccaccctgctctgctcatccagcacctggacccctcgccggctcccgagctcgtgccttggcttccccactgggtctgcgctcctctgtgtgctggggctcccacacccagtctgcgttccccgccaggtctacgttccccgccaggtctgcgttccctgccaggtctacgttccctgccaggtctgcactcctcacctggtctgccttcctcacctggtctctgctcctcacctggtctctgctcctcacctggtctgcgctcctcacctgttctctgctcctcacctggtctctgctcctcgcctggtctgcgctcctcacctggtctgcgctcctcacgtggtctgcgttcctcacctggtctgcgctcctcacctggtctgcgctcctcacctcacctggtctgcgctcctcacctcacctggtctctgctcctcacctggtctctgctcctcgcctggtctctgctcctcacgtggtctgcgttcctcacctggtctgcgctcctcacgtggtctgcgttcctcacctggtctgcgctcctcacctcacctggtctctgctcctcacctggtctctgctcctcacctggtctctgctcctcgcctggtctctgctcctcgcctggtctgcgctcctcacctggtctgcgctcctcacctgttctctgctcctcacctggtctgtgctccccacctggtctctgctcctcacctggtctgtgctcctcacctggtctgcgctcctcacctggtctctgctcctcacctggtctctgctcctctgctctgtgtcgcctctggccctgctgtcaccactgctcccaacctcctccacatcccagttctccaggactgcagtccatgtgcgaaaatgcacagacccaggacactcgtggagactgcgaaatgggcttaaaacgcagccggggctcacgccctcttgggggcttccgcgtggcctgtacctgtgaggatgccggcaggcttggcgcacgggtggctccggggtcaactccacgggcgctgcccccaccctcgctcccgcagtgcctgagccccactgccctccccactgctggtgtgcgtgcacctcaggcccctccgggagctgcacagagttcacgccgggtcaatccaccatccactgcatggagaggccagcggcctggggcagctgtgctggcccagggtaaacggcccctccgtaagccccaggaagacgggaccccacatgctccaggaagacaggaccccacatgccccgggaagacaggacctcatgtgctccaggaagatgggaccccttgtgccccaccgtgaccacaggacaccgtgcactctcaggcgcgccatcctccctgactgaccgagctcccccaaggccgtcatcacctcctgggtaagggctttgcctgggtgagtggaaagtgaccgcgaaggacttgctcc

SEQ ID NO: 471190 - DNA, 577 bp, Homo sapiens
tttggccagcacctcgccacacgatgggtcatggtgcgttgtctccgtacctccgtgacttttctattctttgcaaacagcaggttctgccgggggtcagtgctgctaacacagacagcagtgactccacggtggcttccgttaagccaggggagggcggcacagaggtgctcccctggctgcagcatggggagctgcctgcgtggtttcgaggctctcagtggggggccagccggagcccagtggatgggacgcagctgagacgtctgcagccatcccaggatgcgcagaaccaccaccaggctgtgtcaactcccgtcggcgtagagcagctgatgcccgcgggtggactccgggttcagggcactgggaccgctgcagagacgccgtccccggcccccacctatacccgcgtcatcccccgaggcttctgaggactctgggctgtccccaaacctcaaacaaaatgtcactttaaaaactggtacaaaagcacctcttaaagattcaaacgataattcgaaaacatcgtggtggcgctgcccaggttcagctgtgagccggtccaggtgtggcc

SEQ ID NO: 471191 - DNA, 1002 bp, Homo sapiens
gcacagttcaatatggtcaccaccagccacaagtgggtgtcatacacaaaaaaagtgaaatttgacaagccagatggacagacagacaagccttctatgggcctagcgagaagtacagtgaactactctaaggtcgctgagcggcaaggcccaacaaaaaggcagtgctttgcattgataagacgatttcatttgatcctgaaagacaggggcagtcgcctatggttcccacactctcggggtctatctggtcatctgccccctcttccagatccctccattcccagctctaaaacattgcaagagcaaaatgatcaaagctatccaagtacactgcctgtgtttcctgaagtcgccctgcacacgctgttgtggggggaagatgcgaacaacagcaaagctgtgttcaccctgactctttctggtcttgtggaagtgaaagagctgcagcgggagcccctaacccctgaggaaatacagtctgttcgagaacaccttggtcatgaaagtgacagcctgctgtttgttcagatcacaggcaaaaagcaaaactttgaagtgggttcttctagtcagcttaagttttccatcaccaagaagtcttctccttcagtgaagcctgcagtggaccctgctgctgccaagctgtggaccctctcagccaacgatatggaggacgacagcatggatctcattgactcagatgagctgctggatccagaagatttgaagaagccagatccggcttccctgcaggctgcttcttgtggggaagggaaaaagaggaaggcctgtaagaactgcacctgtggccttgccaaagaactggaaaaagagaagtcaagggaacagatgagctcccagcccaagtcggcttgtggaaactgctacctgggtgatgccttccgctgtgccagctgcccctaccttgggatgccagccttcaaacctggggaaaaggcacttctgagcaatagcaatcttcatgatgcctaggaaggg

SEQ ID NO: 471192 - DNA, 699 bp, Homo sapiens
ggtgcgtctatcaagatcatcaggcattagattctcacgaggagagtgcagcttaaatcacctgcatgtgcagttcacgagaaggttcatgctgctatgagactaatggcaccgctgacctgacaggaggcaaagctcaggcatctgtggctgtgccaaccagtgtcgtcacagttactcctggaaagccattgaatactgtaactaccctgaagccttcaagtttgggagcatcatccactccttcaaatgagcccaatcttaaagcagagaactcagcagctgttcagattaatctttctccgacaatgctagaaaatgtgaagaaatgcaagaacttccttgcaatgttaataaaactagcatgtagtggatcacagtccccagaaatggggcaaaatgtgaagaagctggtggaacaacttttgatgagaatgttaaacatgatgatcgttgatgtttatatgagtgccaagatgctgtgtcttttagctaccaaattatatgcctttggtttcttacatcctctttcagatcatggtggatattctttagagtctactggtttatcctgcatgctgaatggatcttttacccacgtatgatttttgtaatgacattcattgttcattgggaaaatactggttcactgagttatgcagatctttcaaatgtttccagatttattatttaagatat

SEQ ID NO: 471193 - DNA, 667 bp, Homo sapiens
aactattaatcaaggaaattcgtctgtgattttctttttcttttttttttttttttttgcaatttgttttcctggttttggtgtcaggtcagcaggtgggggtcctgccaggactgggtccttctctttaaggtatggattcctttccagttcagggagtgtctagaaatgttatccaggagctagagcctggaataggggcctcacaactgtgcccaatgacttatcctactgtgactgagctggcatccaagatgcaagatacagtactcttactctttcttctcctgtcctcaaatgaaggaaaggtgtttcttgtagccatgaatgtgcaggttgagatgaggggagggaagcaggcagagggagtcaaagtcataggaataggtggtatgatgctggaaacagggactggggtgaagtgctttgaagatggaggaaggtggccacaagccaaggaacacaggcaaccactagaagatgagaaaggcaaggaaatggattctgtcctaggagcctccagaaggaatcagctttgctgacaccttcgccggtgaaatggattttagacttctgatctccagagcaatacgcaaatgaatttgtgttatattaaaccactaaggttgtacaaatttgttacaggagtagtattaacttcatatga

SEQ ID NO: 471194 - DNA, 1112 bp, Homo sapiens
tcccaggcgttgcattttggtggcctttgatcagctgggagatggctcagggcctgctgtcttctctttctattgagctcacagcgccatctcttgtcctcccaggtgtcctcgcaggagtgacatcgtctttaaatcctatgtggcaatccctgacgcaccgtcgtgatgcccacggaagacagggtgacctggaagtccaactacttccttaagatcatccagcttttggatggttatccgaaatgtttcatggtgggagcagacaatctgggctccaagcagatgcagcagatcctcaagtccctccgagggaaggccatggccatccaagggcacctggaaaacagccgagctctggagaaactgttgcctcgtatccagggaaatgtgggctttgtgttcaccaaggaggacctcactgagatcagggacatgctggcatcatcactaaaacctttgggcaccactgaaatcctgagtgatgtgcagctgatcaagactggagtcaaagtgggagccagcgaagccacactgctgaacatgcggaacatctctcccttctcctttgggctggtcatccagcaggtgtttgacaatggcagcatctacaatactgaagtgcttgacatcacagaggaaattctgaatcctcacttcctggagggtgtccgcaacattgccaatgtctgtctgcagattgattatccagctgttgcctccttcaaggtgttcttggttgatccatatgcctttgcggctgctacccctgtggccactgccaccacagctgctccttctgctgctgcagcctcagctaagattgaagccaaggaagagttagaggaattggatgaggatacaggatttggtctctttgactaatcaccaaaaagcaactaaatcagccagctttatttgcaaaacaagaaaataaaggcttacttctttaaaaaaaaaagtatatttaaaaaaaaaaaaaatatatatatatatagccaattcgtgaaataattatatttcattttaatgaaaaaaattggggggatgttgttccactttatctattttttattttactttttattttagactcaagggcacatatgtag

SEQ ID NO: 471195 - DNA, 605 bp, Homo sapiens
acactgatgctaaatcagtggcgtttaataagtgctgactgccatgcctggactcttggtagcgcccctgacacggctcctccatccgcacgtggccctcccaagcaccgagtttctccactggccattagcagttaggctggaagggggttcagagccacaactactgaaagtctcactccttgagtttggaagagataatgaacattttcctgaacattcaacaaacatggtcaagggggctggggattcccaagatcaaaagagggatctgtcacaagatcattatgtccagaattgttgggcacaggggtgtgctgtctcctatgtcactgtccgtggttctgaacccagctgggcaattctctgggaagttgggggcggaggaaacttgcacccattcctaggcccttgtatatatcgtaagtcctcacttcacatcattgatgggttcttggaaatgacaacattaagtgaaacaacgtaagatgaaaccaattttaccatcggctaattgacataaagaagaggtaccccaatcagttgtaggttcagtcttttcacataatcccatagttcttagaggttgtgttcattccttttca

SEQ ID NO: 471196 - DNA, 736 bp, Homo sapiens
cagaccgtgctgcagctgaagcaaaagcattcacgcagttgatgccagtgaggtttgcatggacttgggatgttttgcccaccctcagagccatccaaggggcatcaggacacaatgatggcaagggattgcagaggcaattattaaaatggacactagaaagtggggccagagattctggacagccgcctctaaagtgccagtgccttcattctgcactcctgctgccacacagaggggctgaagggaaccaggatgcagccacccagcaggagattgctctgctccccaacaatgcagctgacctgggcaagtatatcactggtgacaaggtgctggcctcaaacacctaccttccaggacctcctggcctgcctgggggccagggccctcccggtgagtgtggaagagggcacaggagggtgatcaccaacagaaaaagcctgccaaaagctcacatttgctggggcctggacaatgttctccagcttccatcgaggagaaacaaggcaggtgtccatgggactgccacacacccatgcaatgagagagcctgggaaataggccctcaagcctgagaaaccctcatagccaatagcaatgtgggagaaaaagctcattgtcctgggattggataagattcctaaagatcattttaagttaaaaaaaccaaatgaaaactatcttaaacctttttctggaaaaattttaacatatacaaaaatggaacagtatt

SEQ ID NO: 471197 - DNA, 565 bp, Homo sapiens
gcggctgtttacaactctctgtgttgtgggtcaagatagatgatgcctaaaggtctcttccccatcagcttccatgataaggtgtggatgtatgactggcagtccgcgaaaagagaggaagatggggaagccgcttttgatcgtatcaagtttaaaatgcctgtgggacagcctgatggagatgtcagaaggcaaaggcagagagagtacaaagagaaatggctgcaggggtcctggactcttgttagccagggccctttgtccttctcatgtgctggtccaccaggggcaccaggaagagatggttctaagggaccccctggttctttcgacttcctgctacttatgctggctgacatccgcaatgacatcactgagctgcaggaaaaggtgttcgggcaccggactcactcttcagcagaggagttccctttacctcaggaatttcccagctacccagaagccatggacctgggctctggagatgaccatccaagaagaactgagacaagagacttgagagcccccagagacttctacccatagcacatcccaacaccgtcac

SEQ ID NO: 471198 - DNA, 921 bp, Homo sapiens
ggtgatcaggagtatcgatggaccactggtttaggctctagttaattgaatattctggttacatgacaggatctgcaactttctgccttctgttgcccaggggactgtccccggggaacggcacattcctggaaggtggcatgaggaaagggttccaaacaagctcagaacagcccacagtcctcacttctctgaaggacattacagtccctccgggttggagactggaggtagaatcttcatttccaagaaatggccctggatgccaaatgattatccacaaccctacaagcccggtcagattccgagtgtggggggcacacgctgttgccatgtctcactcactgatggctgccaccacagtgcaaacctgggaaaactatggttacagccagcgttttgcccaatcaccactcgctgaggcttttcaaggaagaactgggtggaaattggctaggcctgaggaggaatctgcaggtggggcaggggcagcgggtgacggggaggtggaagcggaaatgctaagaaagctaaatattgtggttaagtcggaaatgtggatttctgacccttttaggaggaagaggatgtggctgagtgtggcactggggcacgtgaatgcccacatgcagaggggatgcttgacaattaaaccacccataaagcaaggcattataaatggctgtcctctaaggctgtgctctcctagccgaatccgcacatcagccctctccggagacctgctggatggtcctcaccgccgtgtcatttgaaagcgctcttggcctttgtttcctcctagaacatacattgtcctgcaaagagcatgtgcttcaggtaaaattgtattggaatccagctctgttcctcacacactgtgcagcattggtgaatcccttaagtttcaacacatgtaaaaac

SEQ ID NO: 471199 - DNA, 2593 bp, Homo sapiens
tctgatgccaaaataaatccatggtgaaatagccaaaatggttttggattacagtgatagtgataattgtgacaatgaagatgatgttgttaacattgcagaaaaagggtctatagatgacatggtgaaaatatgtgatggccttatggaaagactagagcagtgtgtattcataacaggaccagaaatcatgacacaaaaattgacaacctgtaaaggagacatgggagcaggtgatagtgctttagaaatcaccaatgcagccaccaatgaggaagctgaattacagagacagcagggcacagaaacaggtttacagtggaattctgggctgagaatagagattcggtgcctgcgtttagtatggcattcagaagacaaagaacaggagactcgtagctgtcaaggaaaatcagaaaactgtgccgacagagagaagtcatctcaggctctgaactcagaagaagataattgctaacattatggttgtctggaaagagtcactattagggctttctccttccttttgtcgttatgaagcaacattttccataaggttgtttttaactggtgatgagcgacacttgatttcttttcttttcttttcctgctttgtaactcagaagcccaattttaaattatgcgattcttcactttaaaactttttcacgtttctctaatgatttaagtctaacaatatttcctgcttagtttctagcctaaggcagagctgtggaaaacattataatttcctgcaggagttctatttgatgatgtagttcatatcattggaaaaaatcatttgtaaccctatttccataaacccgtttttgacattggggaattatatccagacatctttcctagcgaggctacactaaaggcaatacgctgttttactggttctttctcctgagcctgttagagttcatggaccacctgaatgggaatcacccttagatctttgttaaaaatgaagatcctggcatctcatacacaagattctaatttagtagggctgagatggaacgcaggctttccattttttaacaagcatcttcaggagtttcttctggatacctgcagtaaatatgagacacattggaaataaagtttccccatacatataatgtgtactcatagacaaaatcaagtggaaaaatgaggtaataatttgactattttttgatgaaaatctttagtaaataggcatatcttcttagaggatcctgcaactcattttgttacaaaattgcaactctcacagcctcatttttttccccctatgtggccatagtaatgaattaggagctcaccaaatcagtcaaatagttgttcacatttggaggtttttaaaatataactcataaattctttgatatctctcccttcaaaagaggcagcctaatacctcccttctcatgaatgtgggctgctggagagagagagagaagagacagagggaggggggggagagagagagagagagagagagagaagatcttgtgatattaattactttttacctttgttcattcccacttatttatttattggtctttaacattgtttgttattatttctttgttattgctaaatatttactgttggttttttgtttatttattttgagacagatgttggccacaagtgatggacttagccgccagcttggcatgtctaaggttgaccagacagctctggccagtcagtgtactgttcaggtccagcagagagtttgaagatgtggaatgcaaacattttgattctttgctgtcacaaatcactcaactttttaaaattggcacttcctaaagcatctccattttcacacatcttttgaatataacattctaactattgtcagaatggcgggactgctatgagatggctatatcttcaatatgatgcaataactgttgacaaccactgtagtgtgcaggctactggagaatgatgtgagactatcacaatagatagtacatgtacattttcaacaaatatttgctaattgaatcatggctttattatagtattttgcctattattagtaagttgaccaaaataaaatatttactggaaaaagaataaaagtgggcactagttgtttgagtgctattatcagtgtaagtatgcttttgtctatctagctcatggccatgaatatgatacaggagctaatcaaatagtaatttagcttcctgtcattaaaaaagtctatgtacatctttaatgaaatcaaatcaattgaaaataatatccttcttagagtgaaaatttgtcaccagcgatgttttatataatcttgaaaaaatatgctatttgatgccatttagaatcaggatagaagtatttaaaatgcaaattataaaatttaaaggattctttttttctagcccacgtgtaacattttctgtgaatatattattgatttttccaaaataaaaacaataacatataatgcagtgcactctaaattcatggtttagagtgtttggagatctgaggatgtagttcttctataggagacttgaagtgagttttgatgtttcaattagtgccaattcacagcccacaagagctgtggagagct

SEQ ID NO: 471200 - DNA, 669 bp, Homo sapiens
gtgagggtccgcggcttcattcttgaagtcactcaaccataaaagacggccaccccccgaagcggccattttagaggcctaccctcagggacgcattctctttctcagggatgttccttgctgagaaaaagaattcagcgatatttctcccatttgcttttgaaagaagagaaatatggctctgttccacccagctcaccggcggctacacctatatcaatactttaaaagctttttgctgctttgaaacacaggattggtttcctgacaatgatttatgtactaatatctctagcatattgcctctttttcataataataaacctgttcaagttgggatattggaggagcacaaaagtgagactctgcccaccctttgcttcttctccctgctccaagcgtggaggagaaggaaggaggagaaggataaggagaggtgccaggacaccacttccaagattaaatttaagaagatagtgacttgttcctatttatactctcttgtccttttccgtggtttctctgaagaaagccagctgtcatattgtaagctccaatatgaagagacccacatgggaaggcgcaagatagaggagacctccaggaaaaagtctgtgagacgctgaatcctgccaaaatcccttttgtggatttatcccaagtcacgcc

SEQ ID NO: 471201 - DNA, 532 bp, Homo sapiens
ctcctcaagtgccgccaaagtgggagcccaggcagaggagacagccaagtctctaggagctatctccaagcccgtgaaaatgagtgcacagtgcaagctgcaggtggatctaccattccagggtctggaggatggtggccttcttctcacagctccactaggcagtgcctcagtagaacaaattcccattcacaattgccgcagaagaataaaatacctcggaatacagcaaactaaggaagtgaaagatctctggaaggagaactataaaacactactcagagaaatcagagatgacacaaacaaatgcacaggaagactcaataccgttaagatggccatgctgcccaaagcaatttttagatttaatgctatttgcattaaactaccattgacattcttcacagaacaagataaaatgtttaaaattcatttggaatcaaaaaagagcttgaataatcaaggcggttatgggcaaaaagaacaaaactggaagcacaacactacctaacgcaaactatactacagggct

SEQ ID NO: 471202 - DNA, 641 bp, Homo sapiens
tgattatcacacaggaaaagtaaacaatttagagaaaggcaatggtctcaagtggactgccttcaggggaggaagtatacctgaagcttggaaagccatccccagattcatcaaaacagatgggtaccccacaaatgagtgcaataggagattatactttttccctgaaatttggcctcaaagagaagacagaagccaggtttttggacatcactggaaaagtcagagaattggacatagagtccagtcttcttttccctcctcagagagaagccaagagctgggagtttcctcctgatcacgtggcaccatcctcggagaggaactatggtgagagaatgacacagattttcatagtaacttcgatacagcagttttctggtgtacggacacattttaactggtttctagatatttcaccgtagaaactggtttatgtattgtcattgaattagtgtctccatgggaagaaggaaggtctagggctacccattccgctatcttgctgatgtcacccctctaaatcattagtttttaaagatattatccaagatttgttgtcagaaatttagattttctttgaaatatgtaaatcatcttcttcactgaaactgttaattactcaagattcatcttctgtt

SEQ ID NO: 471203 - DNA, 1270 bp, Homo sapiens
aaaccatatcaatgggaaactgtcttttttacagataaagaaactgaaaatcgaagtggtaatgtggcttcttctaggacacatgggtaataaacagaaaatccacaaattaaagataccggttaagatgcatctaataagtgaagttaaaactgtagaaaaggtttaccctatgctgctactcactgtgtgggaggctcagtggagcaagacgtgtttctgtggagagacccagagatccccaaatataccaaattccattgaagacttaaagggctcaggagacaggaagatgtgggaaagtttggaacttcctagacacctgttgaatggctttgaccaaaatgctggtggtgatatggacaatgaaggcatgtcagcgaccttcacagcagcctctttcctcaccagccagaggcttagaagggaaaaatggtttcatgggctgggaccagagccctctggctctatgcagcctagggacttggtgccctgcgccccagttgctttggctccagccctggctaaaaggggccaacatatatttcaatcagttgcctcagagtgtgcaagccccaagccttggcatcttacatgtgatgttgggcctgcaggtgagcagaagtcaagaattgagacttgggaaccttcgtctaggtttcagaggatgtatggaaacacccggatgtccaggcagaagtttgctgcaggggtagagcactcatggagaacctctgctagggcagtgccaaaaagaaatgtggggtcagagcccccacacagagtccacactggggcactgcctagtggagctgtgataagagagccactgcctccagactccagaatggtggatccaccaacagcttgcactgtgtgcctggaaaagctgcacataacaccagcctatgaaagcagtcagtggctgggctgtctcctgcaaagccacaggggcagagcttcccatggctatgggagcccacctcttgcatcagacacagtgaaagataatcagacattagattctcataagaagcatgcaacctggatccctcacacgcacagttcccaatatggtttgcacttctatgagaatcgtatgctgctgctaatctggcagtaggcagagctcaggcaatcctactctatacttctctggtaaattcactctgtcattcaactcttattggctcttctttcctcaaagctctataaccttgtctttcttctaactctaagttactaaccatgccattcatgaatagaaaaa

SEQ ID NO: 471204 - DNA, 550 bp, Homo sapiens
tgagaacgtcaacagcacctgccctgcctatcacatgtggccattgtgtggatcaaatgacatctagaatatgcaagtggcttgttagctgcaaatgcctttgtgaatatttagtattatttgccctggaagataaatttgattttcatctgcagaatccagttttcccagtgaatttttatgctatggtgcaatgtggaaaacagactgggaaaggcagaggagatacagagggcctagttagagacatttcaatagttcaggggagatatggtggaggtaataagtatgaagtcaaggtatacactggtgatgtaattggtgcagggacagatgctgatgtcttcatcaatatttttggagagtatggagacacaggactattttgtagatggggttcccacaatcctggcagaggaaggcagcttgagccccactttgggctcctctattgagcatctcacttcttgtgatgtggtttggagtgacctgtcctgggcagcaggtgttcattttgtgttgtaaagtttatgtgtgtgatgtgttttcc

SEQ ID NO: 471205 - DNA, 614 bp, Homo sapiens
gcagcattatggctcttcacaaaggaaggctcttcacagaggaaggtagaaaaatggataataagcatatgaaaaaagctatccacttctcttcctccaacaccttctttagccacagagctgcctgtcagctcaattatgttattttctccagtagtggggacagcttggaagcagaagtggatgacgaagtcatcactgactgtggattggccaggaagcagatcatgaagaccaaatgcactaacaccagggaggcacttacaacagtgcctagcacccaacaagaacccagtgatgctgttgttgtagctgttgttgcttttcagagctttggagaacctgaggagcagggacagggtggaacatgtggtaatgacatgggtgtcttcactctgtgataatttatggagagctgtatgttatgatttgagcacttttctgtacatatgttacacctttttgaaaaggttaaaaagatggtgattttgtagcatgcagttttgaatcctaatgtatttttaaagttcatactcaattacttatacagctctcctctgcatccattcaaatgacattaaaaattatgtttaagaatctgaaaatatccaggt

SEQ ID NO: 471206 - DNA, 657 bp, Homo sapiens
gcacagctttgggtgccctctgaggcgtgcactggctggtagcagtgggtatcaaccatggaagttcacggaagattaaaccgcaagttcccacgcaaggccaagtggctgccaggacttggaggcactgaccctgagtggtccttccacctcagctcagcgagccctcagccggatgctcccgtgctggccactcctgtcatccctgctctgtcctccctgcaaactcctccctcaggaccctgcttgaagttacgtcctgcacagtcatccctggccttccctcagcagaatctgtcactccctcaaggtgtccctgcagtattctgctcatgcccctgctacgtggcagaactctgttgtcctatcctgtccagagctccaaagcccccagaccctgtggctgctgagcacttgaaccatggacagtccaggagcaccctcaaagccatcctgggaggctccactcagctctgctccagggaacaggatcagattggaacctggatgaatgccaagaagaatcttgtagttatctataagatcatcttctaattcaggctagagaatttcaatgaacgtgaactttgattttaatgccctacctgttactgcttggcattgagttggcagtactgacaaatgatatgaacgtgt

SEQ ID NO: 471207 - DNA, 566 bp, Homo sapiens
ccaggctggccatgcaggaagggagcaggattatatcatcatcatcatcatcatcatcatcatcacgtgtacttaatgatcagcctagtcaacatagtgagaccttgtctctacaaaaaatcaaaaaattagccatgcatagtggcatgtgcctgttgtcacagctacttgggaagctgaggaattggacgttgaacttgaagaagagaaggagacatgtcatgatggtttttcaccatgataccatgatacccataaagaagagagattcacattatttcttgaagtcccagagagagtttaacagagggccatttggtagaagttactgggagagagaactgggctcagtatatgaagatccttctgcagactacattgttttaaatgggaatccaaagagtcagcaaatgaatcctaggactggaggattgaagactaggacgtgagaaatttctggaacagaatgattgtcaaatttgaagcctatagagataatagcaagcaaatgatcagaaagcaaatgacggattcagcaatgacaatgtccttagtatcattgacaa

SEQ ID NO: 471208 - DNA, 716 bp, Homo sapiens
tgtgcttaggccacacttaagaattcattaccattttagctgtttccttccaacctgctttttctggcagccatgtcctcctccatttctgacaaaggcaatgaaatccacatcctcctaagcgaagcagaactcggcctcattcattttaacaaacatttgctgaatgccttgcttgtcaggctctgcacatgcagacaagatgaaacatggccttcgctgtctgctcgcagagcatctactgaatcagacgaggagctgtcactgcaggatgtggtcattgtctttgtttatgacaattgggcacccgaggctgtctgggacagccaagagagctttcatctggaaagtaaagctcatgtggatgtcttgcagaggaatagaggtttccaggtgggcaaaggagggcctggccctgaaccccaagtttgctgctggagctccctgacagtcaccagccatctagattttataccagacaactccccaccacaaacacaagcctatgcagtcacaaaagatggcaaaaactacagccttgcacaaaagccacagtaaccttacatagaaaatacttctgcaaggacgtctatccagcaactgccgtctaaccttggactgatgccacccttgttattgaaccttgtaggcaacgatacttgattcaaaatgcttgatgtatttcttctcattttgcctttaaaaccttccccttt

SEQ ID NO: 471209 - DNA, 939 bp, Homo sapiens
tgcctgctaccaggagcctgagagctgcagggccgactcaggattggtacatcgtcgctgctttagcgtgcttctatcgccacctagccaccttggggagaaatgccctctccgagcaagtctgtccagacttcccctgaatgtagtttgcccacttacagctatgagcaccatcctgcatgaggttcctcagcaggggactgagcactcgcaggtcgctgccaggacgtgcagaggaaagcaagaccatcgcgtcagtgtgggaaaagtgaagagcgaggcccaggactctgagagaaaggagtcctggcccagaggttgtgtgaggaaagcatcaggcctgtcatcgtcactggtgaccctccctgccgggggaggtggccctggcagcaagcacctgtcctgctggctgagcggcagcccacgtgtccggggcagggtggccagctggccagctgggccagagcccagagtgctgaggctcgcagcccgatctcggcagtcctgtaccgtcgcatcaggccacaggccacaggccacaggtggctcttcccgcatgccggaggaaacacaaaatccctgccagcagagaaggagcggcccagccacttgcctgtgggtcttgcctgtgggtttcatgaaatgtgcgactctgatctcataccccttagaatttctagtaaaagatccagaatgtctgacttcccaagaaggaaccttcatgggaaagaataggcaggaatgttttcagagccagttcctcaatttctccaggttccaaaaagctgcaagaccatactcacctcttcagggtctccacatcccctgaatatcatattcagctgttgttctcatcacatcttgagtaaatttttgtggctgtttctaattattccctctgcctggggagttcattttgcatcaccgtgttactttggg

SEQ ID NO: 471210 - DNA, 1123 bp, Homo sapiens
ggtggaagttttttcttctcgatttgtttcattaagatcaatggcaaggtctgaactaatgtaacctaccctgctggattcatggacgtcatgagcactgacaagacgggagagaatttccatctgatctgtgacaccaaggctccctttgctgtacatcgtattgcacctgaggaggccaagtacaggttgtgcaaagtgagaaaaatatttgtggacacaaaaggaatccctcatctgctgactcatgatgctcataccatctgctaccctgatcccctcatcaaggtgaatgacaccattcaggttgatttggagaatggcaagattactggtttcatcaagttcaacactgagaacctgtgtatggtgactggaggtgctaacctgggaagaattggtgtgatcaccaacagagagaggcaccctggttcttttgatgtggttcatgggaaagatgccaacagcaacatcaacaaaccctggatttctcttccccaaggaaagtgaacaatatatcctagggtttttgtgtcaatacgcaagggcctctttttttcttttatagttgtacaatgtcctctcctgttggtgtaccacagtttatttaggcagccctctattaatggatacgtgggttgtttttaattatgaagtgtgctacagtgggtaatcttgtacatatatcattttgtgttgtgcagagggggatttggcaggatcataggacaatagtggagggaaggtcagcagataaacaagtgaacaaaggtctctggttttcctaggcagaggaccctgcagccttccgcagtgtttgtgtccctgggtacttgagattagggagtggtgatgactcttaacgagcatgctgccttcaagcatctgtttaacaaagcacatcttgcaccgcccttaatccatttaaccctgagtggacacagcacatgtttcagagagcacagggttgggggtaaggtcacagatcaacaggataagaatttttcttagtacagagcaaaatgaaaagtctcccatgtctacctctctctacacagacacggcaaccatccgatttctcaatcttttccccacctttcccccctttctactccacaaaacc

SEQ ID NO: 471211 - DNA, 789 bp, Homo sapiens
aaaataattcacacggccaaagatttgaagagcttcccggttgaatacatccacatgcagggagggtgactgaacccccaactccatggggacagaagctgctgtgcttgggaatcttgcgaccttgccctatgtacatcttcatctggctgttcatgtgtcctttgtgcagtacagtaaattgcctctgctccagaatatttccaatgctgacttgcgaccttctgctcagaagggcctggagagtatgctgagttctgggtatttccatggctggagatttcacaagctcatgcctgacccatgtggcctggagaatttccttgggttgggtttctggtttgctcctgccttccctgtgaggcagcagcagttccgcccgagccgcttccctcttcagtattcactgttcagctcctgtcaatcccactgcataagtacaaattcaacttgtccacccctcactgagaaagccaggtacacccccatggagaaaattgcatggatgtatttggaattaactcaattgatgatgtataaaaatacttaaagacatttgggaaactggggctggagttttgttcaaactggcagtagcagaaatttctataactaaaagtaaaaaaggcagaaacaggactggcagtgatgggtggagggtgagtctttgttataattgctatgttttgtttttttgttttttaagtctatgtgtaccttggttacaaatatactagtacttaccttctagggttgtagtaaggattgaattggtgaatatatattaaa

SEQ ID NO: 471212 - DNA, 727 bp, Homo sapiens
tctgaataaactatagacttcagttaataacaacatatcactattgtttttggaaatgactcagaatgcccagttactccaccacattctaccctgtaggaattgtgataaagaagcagtgctttccggtgatagctaggtgcaataaaaccaaacaagtagattccatacctcatcgtgcatatgcaaagcctagcccattctttcctgcagtagttggatacaaatcctcaaaaagatctaatggatcatggaatctaatgccctatgaggaccagagggtccagaaaaaccccgggggtgggagttgtcttctaggttctgagatgaataattccaggggctgcatggcaccggggcatctctcccttcttccagcacgcagtgcaattttctttactctgctggtggctcattgtctatctcttcccaataaagtgcaaactcacagggtggggaccctctggtttgctcactgatggtctctagtgctgtacctgcctggcacagcttggggctccctaagaacctgctgaatggacaaaagggacattttcaaatattaacctgttgaaaacagcttattccatatccagttcaggtgtggaagcagatatcccctccatggctgggtgagtgggctgcagaggatctaggttgtcatccctacccccacaggagtcagggcaggggtcacacatttctgtttaagcttcttcttgggtta

SEQ ID NO: 471213 - DNA, 1517 bp, Homo sapiens
tttccatctctggcataatcaaccacatagtgacaatctcctaagttgatggttgattctgtggccactgcagtgagtgtgtgtgtgtggtcacatagtgaaaatgcactgagtattcactatgtacgaagcacgttacacaactgccctttgaggaacggcaagggggacacccaccccaaccaggcctttcctccaacactaggaattacaattcgacatgagatttgggtggggacacagagccaaaccatatcaacatccaagcctatgtcagatcaaggcctagggaactcgtgcaaaggcagtatcaaatgcatccaacttcgccaggaggagggagctaaaggatcagaccaggtgggatggagagtgaagggagaaagtgcaagtagatgccagagtggcctgattttgtgggtcacttgcagctgctgcaaattgaaggtgcctgaagccaacacatgcttcctctttcaaagagatggaggacaaggagcctgtgcacaactgaaattcaccaatgaagtgctgaggagctgtggatttatctgcatatcttggacagaggtcacctggggcaagaatagctgtcacgattcagcagctgatttaaatatgacatagctgtcattcaggaggatacatgatctgtgattttactaatattttaggtttacttggtccttctatcctttcctatctacaagtagcacacttggtatttccattcttttaatctatgcttaccaaacatatgttctgtatatgctatttatgtttaacctaaaagatttctaacttagtacatttgctatcattcctcaacatgttttatgagtgtcacctattgttctacttgtttgtttctcttgttaatttcagaagaattgaatattctcaaatactacagaaaaatcacattatagaagtaacgatagcataaatagactttttgtactcaacacttggctgtaatggaaaagagaaaaaaaagttattgctatagggatttacagaatcatgggaagcttaaaaaaaaagaagctgaagataaagaacagccagagacagaagttaatttgatgaagcatgattactgagagagaataaaaggtggagggagaattggtaggagatcgtattctcttacaggagaagagggaaggaataatgggtggcaatgcaaatatgtatccagtggtgggtgggattcaccaggtgtgtttcagtttactttgtgaaataatttggctcttaaataagtacttccaggcactggttgattgatttacaaatgtttactttttattaagtgtggtgtggtggccttgtaatgtattgacttggctaagctgaactacgttttccacaattttgtttcttgtatgtttctggttatggtgggccacgagggagattcttgtgagattcagaaagcagatgggaagctgcagtcattttgtagctcacacacattgttgctgatctgctgactcacctcatcagcatgaagc

SEQ ID NO: 471214 - DNA, 2237 bp, Homo sapiens
ggactggctctccttgctcctcaagcttgcagacagcctattgtgggaccttgtggatcgtgcaaggtaatgttgattctcctctggagccacccccaacacctgtttgcttctagacctataactagactaaagtcccagtcggtccctagaggtgaggttgagagtgtgacccatgaggagagagacctccagccttttaccagtgtgactgtgcattgcagaaagggaaatgaccagacatttgggggaccactggacgctggctctgagctgacattgattccaggggacccaaaacatcattgtggtcccccagttaaagtaggagcttatggaggccaagtaattaatggagttttagctcagtgccaccatcaaggacttgaaagacgcaggggtggtgattcccacaacatccccattcagccctcttatttggcttgtgcagaagacagatggatcttgagaatgacagtggactattgtaagcttaaccaagtggtgattccaattgcagctgctgtatcagatgtggtttcattgcttgagcaaattaacacatctcctggtacctggtatgcagccattgacttggcaaatgcctttttctccattcctgtccataaggcccagcagaagcaatttgccttcagctggcaaggccagcaatatacctttactgtcctacctcagtggtatatcaactctccagctttgtgtcataatcttattcggagagaccttgattgcttttcgcttccactagatatcacactggtccattacattgatgacattatgctgattggatccagtgagcaagaagtagcaaacacactggacttattcacagctcttggcctgttactggctttggtggaaactgaacatttgactataagtcatcaagtcaccatgcgacctgaactgcctatcatgaactgggtgctttttgacccatctagccataaagtgggttgtgcacagcagcattccatcatcaaatggaagtggtatgtacatgattgggctcgagcaggtcctgaaggcacaaccacccctgtcatttcccaatggccccatgaacaatgtggccatggtggcagggatggaggttatgcatgggctcagcaatgtagacttccactcactaaggctgacctgaatacagccaccgctaagcgcccaatttgccaacagcagagaccaacactgagccctcaatatggcaccattcctcagggtgatcaaccagctacctggtggtgggttgattatatgggatctcttccatcatggaaagggcagaggtttgtcctcactggaatagatacttactctggatatgggtttgcctatcctgcatgcaatgcttctgccaagactgccatttgtggactcacggaatgccttatccaccatcatgatatcccacacagcattgcctctgaccaaggcactcactttatggctaaagaagtgcggcagtgggctcatgatcatggaattcactggtcttaccatgtttcccatcatcctgaagcagctggattgatagaatggtggaatggccttttgaagtcacaattacagtgtcaactaggtgacaatacttggcagggctggggcaaagttctccagaaggtcgtgtatgctctgaatcagcatccaatatatggtactgtttctcccatagccaagattcacaggtccaggaatcaagggctagaagtggcaccactcaccatcacccctagggatccactagcaaaatttttgcttccttttcctgcaacattacagtctgctggcctagaggtcttagttccagaggaaggaacgctgccaccaggagacacaatgattccattaaactggaagttaagattgccacccagacactttgggctcctcctacctttaaatcaacaggctaagaagggagttacagtgttggctggggtgactgacctggactataaagatgaaatcactctcctactccataatggaggccgacctccggggaccttgtgtctccgtctcacttgtcagcgaccctgtgttacagagaccctcctgcctgaccaatgcagccaagaaatgactattttcagccttccctgcccgactccagggcccggtcagtccgaggacagaatagtcatcctctccctaggccaagcatgtgaccccagcctgagtgcttcccgccccaatgaatgagataatga

SEQ ID NO: 471215 - DNA, 2212 bp, Homo sapiens
cctccacttcccggattccaggtgggcaggaattgaatatggctgttatctttctaagaggaaaatgctttaggaagacactgacatacagaaagaacagccacatgaagatggaggctgagattatagagttatgtggccacaagccaagaaactcatgtggccatcagaagttggaggagacaaggaaggattcgcctctaaagactttagaggaagcatggctctgccaggacatggatgaggctggaaaccatcattcgcagcaaactaacacaggaacagaaaaccaaacactgcatgttcttactcataagtgtgagttgaacaatgagaacacatggacacagggagaggaacatcacacaccagggcctgaagacagagacacaccaggacaccagggatgcacacactcagagaagaggccaggtgagggcacaatgagacggtcatctgcaagccaaggagctcaaggggtaatttggggccttcgtaatgccacaatcaagccaatgatttagcagagcagggtccataagtgatcagaatgctaaggcagaggagccaggatttaaaatttaatcttcaggcctctgacttcagaggtggtactcttcaccccgctctatctctgtgacaaccaagctgactgcctcctcagtattcccacaggtctcctattttcagactctttgagtgtttcccatgtctccagttgaaaaactctctgaagtaccactcctaggctcccctgaagaaactggctgaggctgagactttatctcccttggcttctttactcccttcattccacacccttatgggtctctgcagagagttcttgctcagtaaatcacttgcacacagtgctcatctcaggctccacttctggcaaacacaaactaagcacaaagggttaattactagagagagattttgagagaaagtagaagacctcagtgtgtgaatagtgatgttctttttaacacgcgataaacatctctacagatggaggtgttgaggaagcgtatgtggggcttgtggaaactgaccaataaaatgacacagtgggagaaatccaatagaaacaactatttctgaacgcttgagaatatgcacatgaggttgactatcatatgtataacagaagttcattcaatgaatttcacaatattctttcactctgctcaatagcttgatgaacagttgcaacagcaacaaaatctctcagtaggtagtaggcagagactcagcatgtaattcacattttgaaggcatagaaatagaaaacttttaaacctaaactatcttaatgttgataaaatcccatcacatgctatacactttcttatttaattttcattgaagaagcaaataaaagtggaagaaactgaggtatagtcaagaaatagtgtataaatttgtttgattgaaaaggtactttcaatacagaaatactgagaaatgaaggtaggaaatgacacttcttccctgatttcagaggagtataaatatccagttaaggagttttgaattctctttgaggttttactaaatctattttagtttgaaagtgacaatgaagaaagaagattaattgtgggtcatatagttttaaggatattaggttaagtgaatttttcagtaatttcaatggaaaattataaaggcctctcctatactaatgctacatgggtaaaaaaagacaagctatattttgaaggaaaagaactatcaaattaaacaaaaatttcaattaaatatatgcacacacttaacaaacactactgagcatctcctataaacaaaattccatgattataataaatgatatataatcatatttcatttctttcattccataacatttattgttcttattaatgttcaaattgtctcttcttttgccaaggatgtcttcttcaaattgactctcaagtactttttgataacatgcttaatttatgatctgataagatgtaccagcataattaacatatatacataaacatatgggagatatatatatatatacacacaaaaatgcacatatgtttatgggaatatatatatttatatatataaatatatgtttatgggaatatatatatttatatataaatatatatttatgggaatatatatatttatatataaaaatatatgtttatgggaatatatatatttatatatataaatatatgtttat

SEQ ID NO: 471216 - DNA, 835 bp, Homo sapiens
agaccggagctgttcctattcggccatcttggctgccagaaccgaaaggtaaaatgaggctgagacctactggattacattcccagaaggttagaccttctaggtcacagggtgagatagaatgtcggcacaagatgcaggtcacaaagaccttgctgataaaacaggttgtggtaaagaggccagccaaaacccgccaaaaccaaggtggaccaccaccttcctatgcccactacacagtaataaacaaatacattgagacagtagggtttgcagcagagaaagactttaatgattgcaggaaagctgagcaagaagacaggaggagccctcaaatccatctatctgaggagttctgggctggggattttaagagcatcattgaaagaacagtttcacaagtggaggttagcatattgttttgttatcttgaaaccaatcactgctccaagaccatacttcttgcctcttgatatctccaggagggatgaaacttcatctaactgggtggatttgccacttatcacttaaacaggaatttaatggtaattttcaggattttctgcatccttagaagtattactctatttgctttatagaagtggttgtaatagaatatttatatgatgaaaaattaattttggtgtgtatctaggcaaaactggaaatattctacagaattctggtattttttcaagtgtaattgtaaagtattaattgacagtatcttgcttaaacggttatattcatggctaccatttagtcatggttttaactacttaagcaaaaattttttaattagtaaaatcatattgtgctttttattagtttattt

SEQ ID NO: 471217 - DNA, 625 bp, Homo sapiens
ccctttgcacttcctgggtgagatgctgtcatgcttgagaagtagtcacgttaagagtatgacagcatactttgggggactaatgattgttcagggcaagactatggacaaaagaaataaaaatttaaaaggcagagagaataaaagaaggtatatgcaatttgccccatccattgacggctttcggatggcactaatattactgaacatccaatgccttagtcgtaattataagagatttattgaatgcctgaaaaagtgggaacagaagaagagtgaggcacaaaacactcaatgggtgcagttgacagaaaaaaaggctgaaaagcaaacttcatcttttgcagttaggccctatgatatctggaagctatctggaaacattgttttggtagagttttcataattcaaagctactcagaattttatttgatatttgtctttaacagtggtttgtttagttgtctgttctttaaaccattagtgtgtatcgcagtgtgtaacatggagtagtgttctaactcaattttttattcttcacttatggcagtaattttccaccaattgttgactaagaaataatttcttaaattatttaaaatgccccctttatcttaaatttaaa

SEQ ID NO: 471218 - DNA, 602 bp, Homo sapiens
ttcatgacgtatgaaccctctatgcttaacatacttgtctccgaagaatctgtcctctgccctgtcttctttggagtacagcacacttcctcattgcacctcacctttaggggcctctgggacttgagtccagtcattgttctagaagaaaagaggcatggtgggggtgggttcccaggagaaccagcattgtcttatttgtcaactgcctcagcagatgccattattgtttcttcaggcaatgcatggttaattcctccagacagaggcagaaagatgaaaaccactgtgagggctgttgccactgccactgggagtagggaggccacttcccctggcaaaaaaggctcatcagaatttaggagctcattgtccccaagcttcatcggagtcctcccatacatccttattccaatgtacagtatcctattcttttccaatcaatgtcctcattttaacagtagtcacactacaaggctgagagttcaccttttgttgtaagtcagctaatgacatgatgagggcttgtgtttgattttcaacaatcgaccttgtggctacaggagagaagattctccttcagagaatacttagaagctttt

SEQ ID NO: 471219 - DNA, 628 bp, Homo sapiens
agcagctgaagactgacactgcctgattgcttcggaagccccctagaccatcacagacgccgagcttcaggtaactctcacagtggaagattattgatggcagttccgccaggcctaatcgccactcagcagcaaaggcaggctatgctacagtatcttccacatctgtcattgagtgactctaaatatgcctttcatattctgcaccaccatgctgttatacaggctgaaagaggtttcctcactacgcaagggtcctccatcattaatgcctctttaataaaagctctgctcaaggctactttacttccaaaggaagctggagtcattcactgcaaaggccatcaaaaggcgtcagatcccattgctctagacaacgcttatgctgataaggtggctagacaagcaggtagctttccaacttctgtccctcacagccagtttttctccttcacatcagtcactcccacctacccccccgcccccccgctgaaacttctacctatcaatctcttcccacacaaggcaaatggttcttagaccaaggaaaatatctccttccagcctcacaggcccattctattctgtcgtcatttcataacctcttccatgtaggttacaagctgct

SEQ ID NO: 471220 - DNA, 1320 bp, Homo sapiens
ttctcacgagatctgatggttttataaggggctctgcgtgcttcgctggcacttctctctctcctgctgccttgtgaagaaggcgtctgcttccccttctgccatgattctcattaatcccacatataaaggcaatcaagtatatcttcacagatgccttcaagggcttcctgtctcagagcagaggtcaaaagtcattacaatggtccacaaaacccttgtgatgtggatgctgagctctttcccctcacccttgctgccttttcctttgcccctgacctccacttatactgagtcctcattcctctgcaacacagcttctccctcatggtcaccaaaattgattgcccttctccctgttatctgcatggcctactcactaacttttccagatctatgtttaaacttctcaacaaggtttttcccaaaaatcctatttaaaaaagaatggccctacttctgggcacttcccgtcctcctttctcctttccttcttttctgtttcacctaaatttatcaccatctgccattctggacattttacttaccttatttattgtagtccctccccactgccagctataatccctaagagctaggcatttttttttttaacttgttttgctcatgctgtattctggccctgagaatagtagaatatgagagagacaataaatacttgtagaatgaaatgaataaattatcgcattgtaacaatgccacactttgcaatatatcaagtttcttaataattgaggtagctctaatacatactttattctcagagacagaataaatgccttcctacaaataataggcaaagctaattagcaacttagcactcttattttggccagaagccaccttgactgagttctataatttgtgaatataacctagctcttagagtgttaattaatctgttctttcaatagccacattttcaaaagaattccttgtttattttaactataactttctttttctatactgaatttggttaccactttactaccttgcaatagagcttcttgtgggtgggtgtttagttatatgtggctatataacaaatcatccccaatttaatggcttaaaataacaattattattgctcttggtttggtgggttaactgtggaaaggctctttcttggggtctgttagagaaaaaatgattcaatgatattgttaaagcatcattaaggatagcttattcaggacccttgcaataggtatagcaatcactgcaatggggtctcacagtggaggagagagattgggccaaacttgactacaacatgggcaaatggaaatttatagc

SEQ ID NO: 471221 - DNA, 577 bp, Homo sapiens
ctgtgtatgacttgctttattgcagcagtctggaaccaaaccctcaatatctccaagggcacaatgcccatcaaacactctggacttgttgtaggaagtaagctccaaggagacacaaaacaaagcatccatccatccatctccaaaaacgttatgcctcttgactgtgcttcctatggtgatgtctttttgctattaaatggctgcacagccagggaaagcatgacaggttttatcagccttgacagccgtctagaagaaacagcaggcaacctaaagcgtcaacggctgtgtgcagctctctcttcaggtcctgccagagctcgcaaagctgatatcttgaaaaataagtgtgtcatccaggacaagtgtgtgcacttcagaaccagaaacaactgggatttcactgattctcaggtcaatagctctatcttacatcctgtcttctgtttccagacctgcactaaagctgcaaactgacatctctaagtgaaactcattttctttgtctccgaaatactgtggccttgttaggggttaaagtgatgttcagaaaatgaaattaaatgatgcagaa

SEQ ID NO: 471222 - DNA, 787 bp, Homo sapiens
ctgcctcctcaagtgggtccctgacccccgagtagcctaactgggagacatctcccagtaggggccgactgacacctcatacagccgggtgcccctctgagatgaagattccagagggaggatcagcagcaacatttgcccatctgcaatatttgctgttctgcagcctctgccggtcaaactccaacagacttgtagctgagggtcctgactgttagaaggaaaactaacaaacagaaaggacatccacacaaaaaccccatctgtatgtcaccatcatcaaagaccaaagcaacggaacaaagctggatagagaatgactttgaggagttgagagaaggcttcggacgaccggtaataacaaaattctccgagctaaatgagtatgttcgaacccattgcaaagaagctaaaaaccttgaaaaaagattagatgaatggataactagaataaacagtgtagagaagaccttaaatgacctgatggagctgaaaaccatggcactagaactatgtgacacatgcacaagcttcagtagtagattcgatcaagtggaagaaagggtatcagtgattgaagatcaactgaatgaaatgaaagaaaaaagagtaaaaagaaatgaacaaagcctccaagaaatatgggactatgtgaaaagaccaaatctacatctgactggtgtacctgaaagtgatggggagaatggaaccaagttggaaaacactctgcaggatatttgacaggagaacttccccaacctagcaaggcaggccaacattcaaattc

SEQ ID NO: 471223 - DNA, 713 bp, Homo sapiens
cacactcacacagcttaatctagttaattcttacccaacgtttatgaataagtctcacaagacctggtggttttataaggggaaacccctttcacttggctctcatactctcttgctgtcgctatgtgagaagtccctttcaccttccaccatgattgtgaggcctccccagccacgtggaactgtgagtccattaaacctcttttactttataaattacccagtattggtacatagcaaaagtgtccaccattccctgctggctcctttatctcctatatctgtggaggctgcttctgtcagtgctgggtttatctgtctggagtatgcagacttggttgctggcatgtccacagtgcctgctttggtgacagccatgctgctgcccctttgcgaagcactgcaatgttgtgactccgagaaggaatgtgtttccatgtgcaggaatgttgattttcttctccatcagtgtaaccagaagaggggtcaacaaacagaggccataaaaagattcctgctgtttacctgaactttataaccttctccatggacctctatgtcctctggactcttcttgtcttctgcctcaaacacaggtatgtccattgtgtctccagctgggatggtctacactacctacactactggaagcttccaccaatggtcttaggaagtaaacaacttattctcagtaacttcaaatgccttttctc

SEQ ID NO: 471224 - DNA, 1061 bp, Homo sapiens
gggaagagctgcccaatgtcatgggagccacctcttgcatcagcatgacctggatgttattcgggggtacagatggtgcttggttgcatgaaaacccctgcatggccattcagacaaaggtgttactatattcagtcatcattctcattgaaggttatcaccgagaggaaagtaacttgaaaatttcgaagtgcatcttgttgagggtactgatgcgattaaaagaagaagaagcagcagaagaagaaggaggaggaggaggaggaggaggagaaggaggagaaggaggagaagaaggaggagaaggaggaggagaagaaggaggagcagaagaagaaggaggaggaggaggaagaggaagaaggagaaggaggaggaggaggaggaagaggaagaagaagaagaagaggaagaggaagaagatgaagaagaagaagaagaagaggaagaagaagaagaaagagaagaaaggagaagaagaagaagaaaaccctgttaaatgttaactagtaaaatatgaccaaggaagagatttgacttgatgggggaatgctggtgccttagggtgccgtctggatgggttacaaattgtagtagtcaatgaattcaatggctttttattttcctgataaatttacatgcatgtctcttaatttcaagaagataaaactttttttttttttttttttttttttttttttttatgatttgccagcctgtgaagaagacataaagccatttgggaatattgctgggtatatccatccagttaggaagttctttcttttttctgtaaacagtaagactgttcccagtaacatggcctcgtcaaaaactgttaaattagatcccatagtgtttgtggggatggtaaacgtcacactgacatggtacttatgttttcattggtcacttgcagcagaactgacatgttcctcactcttattttttaatgaccgtatcctccatgtgaggctcacctctccagtaactcatgcttcttacttttacaattcacctaaacgtgattttcttgtgaggctttcctaggctaagccaac

SEQ ID NO: 471225 - DNA, 590 bp, Homo sapiens
catccaattcatgtcagttcccctcccctgtctttccagctgttcagtcgtattcccacttcccaccaccatctccccgcaccgcacgctggccacgtggaagggtcacgcagggattcagaaccactgggtactccgggttcacagtgtgatctttccaggatgccacttactgactgaggacttgggagcagtcctgctcagtcctgcaccccagccacctcagtccttgcccctctggcctgccctgcccagggtcaccacatcccgcagggcctccttccccacagagtacctcacaccttgggcaccactctcccctcccctctacctaaaatcaccccttcagacagcttctggccacatcgcagctgtcaatcagaaaaagaaggcagcctcatttcaagggcatgggtcaaagcagagtgtacccactttctggatggaaagcatctcactccagcacatgggcctgaggacccatgatctctattggcactgacagatgattctacccctgctgtgggagtcagagagctgtgctgtaaagaatgactggcagatgtccctgaaccccttcctccatggac

SEQ ID NO: 471226 - DNA, 757 bp, Homo sapiens
gcggtatttttaatagaggcttttcagcaagctcaagtgattgcaaagggggcctggggaggtgagcccactggaaaacaatgtgtgcgcgccccctgctggctgcgagcagaggtcccgcctgtccgctgggggtcttcaggtggttcgtgttagcaccacctgctgctgccgggtcaattgacccaatattcacagatcaccccccaggtgtcagcaaagaaatttgtaagaaaggcaaactgtcaggccccaccccagacccactgaattgggaactctgcggaagaggcccagaatccgtgaatgagcgtaccaggggcttccgatgcatctctgagcaaagcaccatatggcagtttcatcaggcccacggcctggtttccatccagcccactctaatttccttccagtcatggatctgcagaataacccatcctgtggaaggagctcagaggaagaaaaagataacaataacagtaaagatatacagagcacaaaccacagcggggagctgttccaattatgtgtatgtttgacgcttgcaacagctctaggaatatcgctgttagcatccccattttatagatgacaaaactgggagacagatgttccgagacattctcaaggtcacatggctagtgatgacagagctgggatgggagccatgttaaccgtcagactttgctgattcgctgaatcttggctaaaagatgttggcaggaagggctgagagcttagaagaaggggtcctccc

SEQ ID NO: 471227 - DNA, 581 bp, Homo sapiens
tacgcaagagccactcgagcatgaaatcccaggaacaacgtgattcgctgagaagccccgggggaggaaagcctgcaccgcctgccaggacctgcccagcctggggcgcgcgggcagccgggctctccacaaggatgctattcactgacctggttgggttaaaacaaatacccacaccccaaaaaggggggttggagaggaaggaagccttggacggcaagaataggcagaaagctggcagggcggccgaccaggccacagccagttcccactggcccacaccgacctggggatttccaccgtccggctacggagacccgttgccgccggcgctttcctgctggggccaccagaaggcggggcctcagagcgggaagcccctccctgcagcctcgccatccctcggtcaggtctgggctcggaagagcattcccagacattatttcaccaatccctacatcaaccctgtgaagtaggtgttactttcatcaacctcctgtatagctgtatagacactcacccaacatgtactgtcctgtccttaggctaggggccacatgattgtggcaggctacagtcct

SEQ ID NO: 471228 - DNA, 676 bp, Homo sapiens
tctggccagaggtgatattcacaaattttaacaacctgcacagcaacacagccccagcaatcagaatggacattccaactgcgttaggatcccggagacagaaggagctaagtagggacctgcacagaaagtcaggctttattactgaagagctgaatgcagaattggcagggtctccgactgccttcctcgaatctagtccttgcacaactctgacaaatcttccaattgcagctaaagaacttagaacccagagagcaaggacccacctgaacctgccggcaggagaaggcctgctctgtctgcttaatccaggacagctggaagtagagccccagctgtacatcctgcctccaccagcacagaacaagagtgaggagggcggtgaaggaggctatggtaggccaaacaatgcctgccacccagaagaaatctacacccttatccccggcacctgtgaatccattaccctatgaggcaaaaggactttgctgttgcaattaagtcaaggaccttgagctggggagattctcccccatcatccagaaggtcaaaagtagaagaaggagatgggacaatggaagcagaggtggagtgatgagctttgaagatggaagtaggggccacaagccaaggaatgcaggcggcctctagaatctggaaaaggcaaggaaac

SEQ ID NO: 471229 - DNA, 1655 bp, Homo sapiens
ggagtttagtgcctgcccccctcctttgttgtcaatcagacacttggggcccacctgtgctgtcctcgcactgcccacccacccccactgtttttgggaaagactttgcggggccacctttttgcttggtcactttccagaaccccacactctgggctgtgcactcactgggctctcctctcagtcccctttgctgggtctttccctcctggcagtcttcgtcacgctggtgttcctcgggccttggtcccttttcttctctgcccgggaccatgaatgacaccctgcaccgttaccactgctgccccgggaactccactgaacttcaacgttgcagctaccacagggaattctctgtagcccttggttctttggcctatgatactgcgctgcccacaccacaccccccagtgctgctggcccctggtcttcccaccccaccctccaagaccatggacaaattcttctgttttaatgccagcctgaagccatggcctgagattggaacaccccccatgtccagcctggcagaggggcggggaggcaacgtggctaagccctcagggagccacagctgtattgccagggcctggatcttggcgttgctacttactggctggggcaccttgggcaaaatgcttaaattctccacacgcccccctccgcccccgtttccctggctgcaaaatggggattctacagtgctcactatgcagaatcactgtaaggatgctaggagtgagtgcatgaagccgcattgagtcgggtatggaaggacagcaagcacagggtgccgtctctctgggttgcagcctgaccacctctgaaggctgggccagcgcctctgagccatctttgaccttgacgcccctcctgctcctgcaaggcccctctacctctgcctcgtcctccatgggaaagctgcagctgctgctggggtcctcctgcctgccagcctcctgacctgccaaactgacaaagcgcttgtgcagtcctgtcctcatggagcaggactcctctctgcggtctgcccagcttcagggcgggctgactggagaagatgaataaatattcatggagctcttcctgggtgcctgattttcttcctcacaagggtgcaagatggtcacaatgaggacacggagccttggagaggtctgcccaggggttgggctgctggacctttcgaggctcagattccaagttggcgttcctcaggggcagaagtttgggagatcagagaaacttgctaagaccccaagtttaggagaaggcaaagcacaattctccggatgacttttggagctgacctgacacctagcggccacaagtgggaattactccacctttggaggctcccagggccgctgaggcagatgggcttggccacccatctcttacttgagtgtcaaggggtggcctggagggttggggtggggtgtgggggagattttaacttccctgtaatctccatcatttcgccaaagccacccaaacaaaaataagatttgataagaacaactgctgccttttccattttatgcaaaagatgagaacaaaattatcttgaaaaaatgtgtttttattgatccataagcattacaaatttataacttgtccatcacacattttgctacttcatagcctctccttct

SEQ ID NO: 471230 - DNA, 1263 bp, Homo sapiens
tgccctgccgtgtacgagagtatatttcagaccacagagatttggaaatttgtttgaaaagagatgagactccaggttctggtgtctccactgtatgggaaagcagctgagacacagtcacatttaaataaactttccagaaactgcaacttagccctccaagtgccaaaatggtttttctgattattgtttttgtgctgccatggattttctggtacatgtctcctgtgaccattgcaagagtttctctctgcacacgtttaggaatgaaactcctggatcaaggactctgcacatgctcagctctccaaggtgctgccaaaccagattctcaagtggttgttcttctaccagtgattggggaactgctcattgctccgcatgttcaccagcactggataatgtccttcccaagcagctatcccttggccactggctgcacaggctaccttgagagggtggaccatggaaacaggcccacccagaacctggaagtgggcttgggccattcgggcagagattctggggtcctgagctggaaggtggtcgcactggctggagctggagcagtcatcttggactgttgtggaatttggaaatatagcccatgcatggtggaccaacagatagaaggaacttgggttaaatattgcacaaagagccatatcatcagcagaagccatcttgaacttgttcaggcaataccaaagaaagcttcctggaagaatcctgggatatccatggaagccagggccagcaggctttctccaggaatagaagcccaagaactggaaaggcactgggaaccaggcagtatctctgcattttgaatctgcagctctgtttttttctcctctctgcaaaccaagctgcttttcttctcagtgtttcatgaattcataatatagttagattcctttgtcacaatctgcatttcatgctgcagatgatgaatgatgatgtctggcctcctacatgatttttttaaagtttgcacacattaatgttcactcttcatgctgtaaagttctatggggtttgacaaatgcataatgtcatgtatccaccaatacagtatcatacagcatgattccaccaccctaaaaaaatcacctgtacttcaccgatccaaccctctcccctctatccaaatccctggcaaccactgatctttttactgtctctatagttttgccttttccagaatgtcatacgattggaataatacattatgtagcctttccacaccagctttttccactt

SEQ ID NO: 471231 - DNA, 606 bp, Homo sapiens
tgagattaactgagtacattagctcaaaatgcagaaatcacctgccttctgcgttggtctcactgggagctgcagacgagagctaatttctgattcggtggatttgggattggggctgaagataagcattcgtaataagcttacaggtgatatgatgctgctggttcacaggaagtattttgagtatccattttttagatttctagtctttcaggtttcatcggagatcaagaatgggaaaactgagacctcaaatgtgataacacaaaacaagcaaaacattcttatagttttaaagacatttaattttttaaaaaaatatccaaccaagacatttgtttggaaatccccttatttggacataaggaagctgccatctttgaggagccagccctcaccagacactgaatctgctgtagccttgatgttggatttccagtttccagaactacacagacgctgataatcaatataggaagttcacattttttgctcctaccacaagcacttttcctagtttaaacgtaacatcctcagaggctctactttaagcccaagtctaaattacctcttgttatgaatcagaacactctgctatttatcttt

SEQ ID NO: 471232 - DNA, 511 bp, Homo sapiens
gagggtccgagtcttcattcttgaagtcaaagccacaggaaagacagcatgaaaaagattctccttccgaacccccagaaggggacaaattctgccagcactttgattttggacttctggcctcctgaatttgagaaagatccacctatgacctcaggtcctcagaccaaccagcccaaggaacatagcagcaattttaaattggacaaatcccagccacatctccagcatacaagaacttccaaacgcctgaactgcagcggccaggcattcctcctgaacctcctcccccaggagcttgctacaagtgccagaaatctgaccaccaggccaaggaatgcctgcagcccaggattcctcctaagccgcgtcccatctgtgcgggaacccactggaaatcggactgttcaactcacctggcagccactcccagagcccctggaactctggcccaaggctctctgactgagtccttctcggcttagcggctgaagactgacgctgcctgatc

SEQ ID NO: 471233 - DNA, 850 bp, Homo sapiens
ccacgagagtgacctctggtggttctcaatgctacactcccaccagtgccatgacagtttacaaatgccatggcaacattacgaaaaatgttgttagactagaagagtctggctgttcaggggattctaggcaggtgatgctccagcccctccacttggtcaaggatgggagtaaaaatgacctgcaaggtgctgcagacacagtgtggataaaaaaagggaaagaagtgtataaactgctggatgataagcacattgagggtaatcagataatggatatgttccctactggggtaggccgaaaactaaatcataataggaattccatagcttgcaatttatttcgtgaatatcaagtgactggagttccatttttgaaaatgaataaacagaatacatatagttttctactcaaagagagtgagctgattaaaagtaaaatggatgtgaaggtggcactttacctccggtaaaggaatgacaaatgaactcagattgaatgtgactgtaaccacatggtaaaagatcacagttcaccctgtttatatattgaaatggaggacactttaccacagcagagttgaaatgagaacattgaggatctgaaaactataagtaacttgttttgtggagtcaggaaactaatcacaatgactatattcgtttccacgtaaaggctgcgttctctagtttatctttattaaaattccctagggggtatatatttgaataaaacagtgtaaccaaaacttttcatttatttgaatatattttgtgggccttcactgagacccttatgctagaaatgatttgaaataactaaagtgaactagagctgtataaagagctt

SEQ ID NO: 471234 - DNA, 665 bp, Homo sapiens
ctggaaaaacccagtagatcaaaaatagtttcatcacctaagaacggcaactataccaatatttgatggcaaacttaataaatgtatgtgttctaacttctccaccaaccagcatttcctctatctctcttccagttcttgggcctctctatattctaagacataacaatattcaaattaggcaatttaataatgtgacaatgtctgataagtgttcaagtgaaaaagacagtcgcatatctttcactttaaatcacaagctagaaaagattaagcttactgaggaaggcatgtcaaaagctaagacaggccaaaaactaggcttcttgtaccaaacagtttgccaagttataagtacaaagaaaatgttcttgaataaagttagaagtggcacatcggtaaatacacaaatgataaaaaagcgaaacacaaatgataagaaagtttgttgtggctggtctgcatagaagatcaaaccagccacaacattcattaagccaaacttaatctagggcaaggttctaactctcttcaattctttgaagcccgagggagagaattgtaactcaccattggacggagaatatgcatcctagtgacaattttcctcatgaggacagagtctgataaaaggtatgtaaatatcatttgtacaaaattttctg

SEQ ID NO: 471235 - DNA, 2608 bp, Homo sapiens
ctcctgtcgcatgtcttccacagctggagctgaagcagctggaatacacggcaccatgtcttgaggctgcatggaccggggggccctgggcctggcccagaaaaccatttttccctcctatgcctcggggcctgtgccaaagtccgggctacagcgcctgggcttggcttcaactttgttccgaaatcagagagggttccaggagctgcgagaagccagggagcgggagcaggcacttctgagcctgtgggggaagtgggacttcctggaccctgagaacgcaaggatgcctggtccagagccccgactggcgacagtagctgcgctgaggagcactggactcccgctcccgccaacttgggaaaccaagtatctttatcaccatttggtatttagcagggtaaacaatatctttgatgaagtcttgcaacaaagagcctcagcagatagaggaatagataacacacaaggaaaataaaactaagtatgggtgaaatagcaatataagaaattttaaggttacattagatatgataatattacttttgatcttatgtaaatgcttggtcctagggaagagggtttcattcgatcagtaaatctttgttaatttcagatttaattgaagacttcatgtatttattcacccttctcgtaagcaaaatgacttttaaatggtttttaattaatctgtgtaatttaggtatacaatgaactgatctgaacaaactcacatttaaccattattttttgtgttaatctccatgaatataattaactttctttgctatcaccagctaccctttgaaaaaaaagtgagaagaaaaatggtgcattgttgaaaactaggtgctatgaatattttatcccaaagcatacctgcaataattctctgaattaggtttcattgtaatctgccagacaatttgtgtatcacctaaacttctctgctcatacactatctcctctacaaagtcttccttgaatgacttgaaccaattcatgggtcatctctgaattgtacagcctatacaattttcaccttaacatatcatttcatactatctattcactataaatatatgaatattatctccttatatgactgtaatttccctgaggacagagataatgtaccaatacatcgccaatacttcttgtcattacaaattggtatgcatgtgctaatttcagtgctttctaaagctttattgaaagaacaacagtctttgcttcacacctattctttgctaagatatctgttcggtataaaaacaaacatgtaatcaagctttaaaatgtattaagtgatagatgcaggttatcttaatagatgaatattattcaaaacatgaaatctttcttcacagcattttagagtcattgtcctacccacacacaagcacacactcattttgattatccgtcattcctagaatagtcttgaacaaataaactcgttacatggtttaacaatccatattagtttgcaaatgatctccacagtcattttaagtcacgctttgttaatggactaaaatgttgaattcgattagaaaaggggaccaataatgattcttagttaataatcaaatcctgatcctttgaccttttattcgtatttctgaattttttccttagacacattgacagcttcgaatgtgtctcagcactctaccgtgaatgattgtgcatgtcaccaatctcaggcattcctagtttttctgttaaactatatagactcattaagctctagacctcacatttttctaccaatatcagctatttggatgtcaattgtgcctggcctttcactggttgtggaaaaggtaaggttcaggtagtttataaatctcctcttaaaatttgtttttgagctctttgaatcctgatgcaggcttgtcgcctatgttaatgaccattaatttttcatcaacctgtccaattttaccttaatgtttcttcaagaaataagatacttcagacttacatattattttatattattttctaatatttcttaaaaaataaaagtcacattttgatattgaggaattcaacattatatagattagtaatttacttatttttgataattatgtcactttgttttatcttagaggctagtacaaatgagaacattgaatctaataaatgtaaccatgtacatttgctatatgaatatagatttgagatgtatggttatgaaaatttctcataaagcattttgcaaatataaggacaaatactaactagtaattatgcatggactcacaattagtaatattttgcaaagagaaaacaagtgtacaatatctaaaactcaaattttacctatgtttactggaaagaattatatctgattaatatttatgtatctctgaaatataaaagaggatctagattgtgataccttacgaaacaactaaatatatattctgcagcgttctgatatttgatgtgttaaatttcgaattacatgtatagaatgtatatttaatttattactacatatacatgatattttaggaaatgacatatatgaataaaatgaataaatttcagatgcattagatctaaaggctagactttgaaccatttaaagtac

SEQ ID NO: 471236 - DNA, 723 bp, Homo sapiens
aacattcagctagttgttacttatgcaaatttctgcagcagccgccctggttcagcggacagtttggggtggagcaaaacctccttctgtcagctctgaaaattcagatgtgtcagttctttctccctctagctcaactgaaagttctattgagaacccttcataccctcccccatacatttctagtcccactgtatacccatcgctccctgaggaacttagcccaatgaatactactcgtagtggagcctcctatccacctccaaaggaaaatctttgtccccttagaaaggtggcaaacagagaagaaggcactggagccatcggcagccgaaccaatgatggcagaaatagccaggcaatcccaaaagtgatggagcctgagagcttccgccacagctctcagacaactagccatatctctagagaagacttgggtaatcacgacgtgccagatgctgttttgctgcccatggaagtagttgtaatccattgcagaggacatcaaaaaggagactctagtgtggctaaggaaaacttttttgcagatgcagttgctaaggaagtaggttaaaggaaccagttggacttatctcgtaatagacatagatactttcaagctacagaattatgtgatcaacttaggacaaaagcaaaatgtattccttcaatatggaaatcaaagactcccttcccccactaagaaagacaatcttgttataa

SEQ ID NO: 471237 - DNA, 1492 bp, Homo sapiens
acttctctcgtatgttcttgtttgtttgtttgtttgtttgagacaggtgacagtggctctttacccttctaagtgcagaggaggaagcccagcgcattctgggtgcacttccagctgaggaaataaggaggaggaattcctgaagccctgaacaagtgcctgggatggatccaaactccatcttgctttctcctcagccccagatctgctcccacctagcagaagcttgtacggaaggcgagagaagctcatcccctccagagctggatagagactccccgtttccctggagtcaggtccccagctccagccctacagaccccgaatggtttggtgatgagcacatccaggcaaagagggccagagtggagaccattgtccgaggcatgtgtctctccccgaatcctctggtgccaggcaatgcgcaagctggggtcagcccacgctgcccaaagaaggcccgagagaggaagaggaagcagaaccttcccacaccgcaaggcctcctgatgccagcccctgcctgggaccagggcaacaggaaggggggccctcgtgtgagagaacaacttcatctgctgaagcaacagctaagacatctgcaagagcacatcctacaggctgccaagcccagggacacagctcaggggccaggaggctgtggcacggggaaaggccctctgagtgcaaagcaggggaatggctgtgggcctcgcccctgggttgtggacggtgaccaccagcaaggtaccagcaaggacctctctggggcagaaaaacaccaagagtctgagaagcccagtttccttccttctggagcaccagcttcactagagattctgaggaaagagctgaccagggcagtgtcccaggctgtggactcggtattacaaaaggtactattggatccaccaggccacctgactcagctgggcagaagcttccaggggcaggtggcagagggtagaagcgagccctcacctcctgtgggaggggcctgtaaagatccacttgctttggctgccttgcccaggagggtccagctacaagctggggtcccagtaggaaatttatcactggccaagcgtctagattctcctaggtaccctatccctccaagaatgacccccaaaccctgtcaggatcccccagcaaactttcccttgactgcaccttcccacatccaggaaaatcagattcttagccagctactgggtcatagatacaacaatggccattggagtagcagtcctccccaggactcatcttcccagaggcacccctcctcagagcctgccctacgaccttggagaactactaagccgcaaccattggtcctgagccagcagcagtgtcccttgcctttcacctctgcccatctggaaagtctaccccttcttccctcggtgaagatggaacagagaggcctgcatgctgtcatggaggcactgcctttctctttggtccacatatcctttaatagcaattgaag

SEQ ID NO: 471238 - DNA, 893 bp, Homo sapiens
gatctgaaagacaggggtaaacagcatgctaatgaaacctgcagatgattggtgttacaaaccccagagaggacagagaaatagcacaacgagacccagagagcttagaaatatgggcaggagactgtcaaatgagactcgtcctaggaaaatgaaagtcgacacgtcagggaggaatgatgaaggtgcctctgggtgggggcctgcaaacctgaaaagcagagatgggtggcagggtcaggaggttgagggatatgataaggtttggggtgtgttggagggagacagaggagctgaccttgaggacccaggggacaaatacccttgtgcatttctggtcaggactgaccatggggccaacagttcatgcagctggggaaccaagcaggttgtactggcccattggcctgtgtcagctccaggacccctctgcaacccaggacctctgatttcacagtcacaagctatgcctatttgcacccaagccattaaggctaaaagcgccattttgacccgacctgctattttcctaaaatgaaacaagccaaaatacatctttaacattttgcactaaattattggggaataggaaattcaagagcagagaaagcaaaaaatgtccgtattttcaagggtttcccattcaataaagatttatcagagcgtaactcatttatattaaatctacaaatcttaagtgaacagctcaatgatttttttccttgaccaaatcacttcacttcaccaagtcttggtttcctcgtctgaaatgagcataacagcagaacatatctcacagctgtgttgtaaagattaaattagactcggtaaagccccttgggcacatttccttttccgttaaagggggaaaataactacttcaccaggttgtc

SEQ ID NO: 471239 - DNA, 586 bp, Homo sapiens
tgcagtgtgtaggcgtttttaattgagcggatggaaatggttgacagagtaatggttgcaattgttcaccattcacatggaaaagaatttgctcacagagcacgcagaaggtcatgtcttcaattttatggtcagttagcagtacttagatctaccactgtggcagatgggactgacacaagaggtggagtgaatgagttcagtccagcgccagacttttatgacccctgggctcctgggcatgttcctgggaatgtcgaactcatgcacatttacacagaccacacaagccacggcttgaacagccacttatctgagtcttggaggaactctgtgataattccagaacttgaaaggagaagaggcctgaagttttgttataaagctgcaagagatccacactcatgccccatactacttgtgtttgaaggcagagagtctaaataagagaaccaatcaaagcaaagcaaagaaataggcaagctcactgtcaaacaacttaacaaagtagcaaattgaatccacaaaacagccttaattcacatccagtttccttttcagtttaacatcaagacaactgcattta

SEQ ID NO: 471240 - DNA, 565 bp, Homo sapiens
ccaacagacttagcatctcctcatggtagttctgaggaatccaggcagcccaaatgacaattgtgcggtactgcggcggctgactcaaagtatgacattaccaaatctgaaaggggttaatcgtgaaattaaacggcttagttatttgtgtctgtgtgcatttttggagagaaaaaataaacaggttggaatattcaatataagctcagcttctacaacggatttggtaggaatcaaatccgagtacggctacagcagattcagaggggaccaggccttccgtgatgacaagtctgatgacgagacagttggagcagatgctgtccgtgtcagcaagtcccacatttctgagaccttcctcaataaactcattcctctcaaattcttgtctcatgatctgcttttgaaagaactcaaacaccacaatgttttagagagaaatgcaaatgcaaatgcacattgagaggttaatgtttttatattttcatatgaataatgctgtattttattccattgtattccattaggtatatttgaaagcattatgtaacacttctatttgtat

SEQ ID NO: 471241 - DNA, 2234 bp, Homo sapiens
acagtcactcctacgccacatcaaacttaattatgccaacaacctcaatgaggtttaaagtggattcttccccaaagcctccaggtctttatgtcactgtgacctcatcaaatagtgtgtccctgaccattgtactaaaactagtcaccattgccactgtcgccaaccacttcattattgtgttttcatttttatacaaaaagtcggtatctgcggaatctgaagaagttcctggatgtttcactgatgaatcaggccatacgcacaactctgagctaaagactatcagagacaaggtagaaaatatgagagtgaagagtgacctctatatggaccacaagatattgaaggctttccacttactggaggaggtggagtattcaggaagcaaagatgaaggaaagattgagttacagctgggaaaaatttcacaaagattaaatgtgtttgtataactcatatattatgtccccctccaccactgtcattttgaaaatgatatatttttggaactctcttatgctatacttacatttacactgatttatttctattttataacctgaaacattaatactaagtgccaaactaagctaatttgtaggaaagaatgacagataaatatggaaatattggcttcattctgtattttaaaatacccaatatctaatttattaaagtcttaataaatgcagtccattattattcttaaatttttggttatttcaagcatacttttacaaagtaattgaaatgctgcctttattcttgaatgtgaaaaccacaaaattacacagaaaatatttgtttagaattcaaccaggacttctgtgggttctggaatgagtaattaatgaagcattagtgtttgaaaattttctgaataaaagtcagcaaggtagaacacaggcaaatgaacctaaaggcagacatacacaaaaaatgcagtccataaaatttctggtccaaatatggattttagatttttgtactattttctccaaatttatagttctagtctaaacaatatatgctataatacttttaagaagtgggatatatcaccattaaatagtgggagtgatttttttaaaaaaggttggttggtattaaaaaggaattaggaaagattgaaaatatactgatcaggcatataaaagtgaataacaatgttccattacattataaaacattttaagtaactaaatcatagtcccaatattaacagatttctagtggatatttgagatctattactcttcattttgacaattattgcaagtgtcatatgaagacatagctaaattctccaagtattttgtgagctctccttgttcaggatattttgtacttctcacaacttccaatgtgacaggtaataaatgtaaataaatcaatacagatgaatgaaacatattttcattaagaaggaacaaatcttaatttctaaatgcctggtagttattttccaggtattcaatatcagcatcacatcaattatttcttatgacttaaagtttcatttcagggcataattacaactatagtaaaagtttacatcaatatctcttcaatattacaattacaaggatgcttgtgagaaacagctcctttttagcacgggggttgaagctagaactgtcacaattatcaattttgtgatttgttgattttctttatttctatgacaccaagtaaaatctggttgatcaagatattctattaataactgtgattttcaaatctgaccacgaattaaaatctcctggggatccaaacacaactatttcatttatttttttatgtgtataggaaattaccaacaacctagcatatttctgtattcccatttccaatcaaacattaactaccagcggcatccactattagttttgactgttactgaacttcatataacttgaatttcatcccatgcattgatttagagaataccaggcaaaaacagattttagatcccacttagatttggtcatgtttcaaaatcaggtcaacagctatcatgagagctttttcaatagaagttgcctaacctctaatctagattaattggcatcgattttcctgtatattcaaggattgtattaatatcttttttgagaaattgaccataaacctaaatcctcttcacttaggaacattttgtagaactggaaagaacacttgtgaaaaatatttgctgattcaaaagctctatacaaatatacaggactatt

SEQ ID NO: 471242 - DNA, 3737 bp, Homo sapiens
cggcagcacccgttccctagtcccctgacaattataaaaatgacgcaaaaatcacaaaatgattctattatagctgtgtccaggctcaccaaaatccaacaggaaaatatcttctcttctctaacaggaaattattcacatattggaaaaattatagaaccaccaagaggtcctaggggaagaaaaaaacccacagaatatgtgcagcagtcctggaaccagcctccatgtgcccctcaggagtacttcaccatttgggcactgcccttcttcagagtcctaaccctgcaaggtccttcctctgagctcctggagtaccagcaccagtctgagtcccaaaacctcaaaagtagggaagccaacagtgtagccttcagtctgtgggccaaggcccgagagcccctagcaaaccactggtgtttgctcaggagtccaaaagctgaagaacttggagtccgatgttcaagggcaggaagcatccagcacgggagaaagatggaggacagatttagccaagatccttgtttggatattcctcgttttaaatacatgttaaattccacctgttagtcaaactccagctagaaaatatagatcacactagtttttttaacagaaataaattgatataaagaggtttttttaactagatataaaactgttacctaggcttattttctttcaacattgagtgtattattaccttgaatgtttcagataggattcattaataaatttacttaaaatgtgaggggatataggcaaataaacatcatgtgaaacagaataattaaaattaaaaacacaacagaaacaaccaaaaaagtgctacgaaaaaaaagtgttatcagcatgtgggtcttagtttgctaatacatgtctcctggaaattaaggcagtattgagaaacacagagtaacaaaactagctaaatataataataatcatctgttcatttatatacaaagacaacgttgatcatggcacaagtctttgctgtgcatatatttgttattgttggatgaaatgccagtttcatgcttgagatcccaaacacaaggggtataatgtttttattcagttatcaattgctttcaatcagagattcgctcatgtgtgggttaacagagaggtttacatatagagttaataatttcttataaatacgttagtcttcttaatcacatggacaagccctaaattcctcaatactaaaaattgaaaaaattcttaacttgaaaatgtttatgaaatttataatgaactaaaatcctcgttatctttaggatatcagaataggtcccttccttttaatctaagaaggtcttgatgaacctacagggaattttaattaccataaataatcacctccaaacaatcaaatgccttgacatttgggaaagaggtatttgagaatattgaaatatattttaaataacacttctttaagatagagtcttttgtgggcataatttcaaaaaataatcaatggattcatccaaattttaatattactcctggtcctgggtagtacatctatacatatgtacattaagatggggaacacagaaagacagaaagtttttgtgtgtctacatattttgacaacttgcatggcaaagaatattgggaataaaatatactaaatgctccccaaattttagacgtaatcaccaccagctgaacaagcaaagacaatttagctaatttaagcaatggattgactcagtgtttgaacggagacatcctacatatattcagcactttgctttaaaatgatcatatttaaaacacagtttttaagaaattatgtcacttgtgaaagggagcaaatgcacaggaaagaaaacaactccttatttatgctgacttctctataaaaggattttaaattaatgggaaatttcaacatgaaaataagaaagatgagtaatttagatgagaatagagtttctaaatggttcaaagtgatttcctgatggcattttaatttaaattcccacaaacaagtcatttcaaaattacattcgtagcagttgaatccaatttctagtgaaattctaaactaattgaacctagttactcttaagagaaaattctcaattgcatatgcctgttttgtagaagtgaatgaaaaatgctattctcaaattaatagtatgtctcagaagattttgtttaaagcaaatcttcttactagtattaactcttataaatatatgtatatatatataaaattttaaaatatatatcacaagaaaatcctaggaatttgtccgtttcaaaaaggttatctaatttgttggcatagaattgttatagtactcatttaatttttgtttccttatggaggagaggtgttttcagaggtgattgatatgtgagtcagtggactggtagacctgccctcaatgagaaaaagcaggatccagtggactgccagtgtggctagaacaaagcaagcacaggaggaggattctgcttgctgagttcctcactctcttccttcccatatcagggactaatatgaatagtatgcaaacactttgttcatgtatagctctgttctactccttcctttatgctagtattttattataatatctctattcagtgtgtgcaaacttacatagatttgtaattgttgctttatgtagctgccctttgtatcagaaaaaataaagaggagtcataaacctaaagtatatttatgctattatttctacttatgtagttacctttactggtactcattaatttttatctggatttatgttattttctaatgtttttttcacttcagactataggacacactttagcatttgttttacattgatcttctagaaacagcactctcagaatttggtttatccttaaatatcataatttctgttgcattttttgaatgaaaattttgatacatatagaattattagtttacagttattttacttgcacattttaaatgagtcatctcactgctttttgggttacatagtttttgattaaaaaatgatgattaaccttattgaggattcttgtatgtgttgagttgattcattctggctattttcaaatatgtctcttttttgtttgtttttggccatttgattatgacatgtgtctacatgtacatacatatctttgaatttatctttattgaagcttgtcgagcttcttgaatgtgaagattaataattttcatgagatttacgaggtatttgttttatttctgcaaatagagatgctccttgacttacattagggttatgtctgattaaaccatttataaattctataaaatatgtattccttatttcgtgtggccactgaagtttctgcttggttgccttagtggtcagctgatgattggaaggaaaggtgtccttaaatgccccaactcaataaattctctatatttaaaaaaaatgtggtgtgcatgtcacggcatacccttaacactcagccttgccatttaccagtttgccttagccatcaatttcctgcttgtgcagagtttcaatgtcagctagaggtgagagctttgggccttttcaggtctttcctgagcatgcacatggccgcacaagtaatcatggaattctagattcccagaaatacgtcaatagttttcaaaagcactatagcatctgctataaactctattgtgtcatcctatccgcaaattcatatttaagccctgactcccagtatgaccgtattcagagagaggg

SEQ ID NO: 471243 - DNA, 1283 bp, Homo sapiens
tctcgcttgtcgcccaggctggaatgcagtggcccatcttggctcactgcaacctccgcctcgcaatttacaatgattccattaaaatggaagttaagattgcctcctggacactttggggtcctcctactaagaaaggagttatagtattggctggggtgattgacccaaactatcacgatgaaatctgtcaactactccataatggcggtaaggaaagagtatgcatggaatacaggagatccattaagacgtctcagtattaccatgaccttgacttagttcatttgtactattataacaaaatacctcagagcagaagatttataaaggacaaaaatttaattctcacagttctggagggtgggaagttcaagttcaaggcaccagcagttgagctacatcttttgacagagaaaattcactttgaaagtaggtcaaaaatgctggtaaacctcactggatttccctgtgaggaattaatgccattatgatttaaagctgtatttaaatttgccttatcatgagagaggaaatccactggaaataaatattaatcagtcttttcaaaaccaaatttaccaaaacttgaaaatacaagaaaataataatgaagatacattttctggaaatacgttgactagatactatttcacaggaaaatgaggaccttaatttttaaaacagagagccctggggggataaaacaagaaatgtctcgatcataccaacacttgtaatcttttgtctttgtgataatgtaacgcctaaggttcttgcctaaccacgccaaagaattggtgtggcggctgaccgtgttgagtgatagagacacgaccgagagagagagagagagagagagagagagagagagagagagagagagcagtaggttttactgagcagagcaagagtacaaagcttccaaggcgtggaaggggtcccgaacgggtagccagagttagcttatacgattgccttttaaactctttaaggcgggaaatacgtgcagcgggaagatgttaccagagcgagaaacaaaggcagtaaactattttgtgacatgtcctagattttgaggaagaccggaattgcagcttaggttttatctactttatgaccttgcagcggcatggcaaaggagacaggatcttacaggactttacaagttgtctggatgcgctagaaatttaggatcattttaaattaaattactggttaagattttttaaatgacacagtgtcttggttcattgtggcctgctattacaagttaccatata

SEQ ID NO: 471244 - DNA, 882 bp, Homo sapiens
taatcagcagctgaaattaatgaactagagctgcatgaatcaaatgtttaaaattatggaacgatgtgcagtggaaaataagcaagttgtagcagcaggaaatggacctgaatatcctcttagcagccatgactggatgccaaatgggacaaagaagaactttgaatatgacatcacactacctcctgcactgtggttcctgataagaaatcagccattcatcttactgagactccttttgctgggttccacggctctcttccatgacccgcggcttcaaatagagctagaacactcaccgcatggccgacggttccattccttggaatccatgaggccaagaaccccaggtcagagaccaaaggcttgccgccatcttgggagcagcctgccaccatcctgggagctccaagaacaaagatccacctgtaacaataagatttattgtccagaagaagaatgtcacaaggtcgattgatcagaaacttcaatagttaaaactattaaaaatattcatgaaaaatatcaagatgacatggaactctgaaaaatgcaaatgaataagttacgttcttacatgccatttccgtggagttgtgtttctctggactgaatacctatctgccagtgcaaatcaaagactagtgttattttaaatatttaaatggtgtctgttttccaaggatattcatgttttgttgaaatgaaaactctctgatcattgaacactataatgccaataccacttgcaaacctcttgaagagaaggaacatggcaacatgctttctttgtggtgctcaacaaaagacaactattggaggaaaacatgcattcggatgactttactatgatttttaactgtcaaactattttcaaactta

SEQ ID NO: 471245 - DNA, 622 bp, Homo sapiens
gcaagggtccgcggcttcattcttgaagtcacagcagtagtaaacccgggaagctgactcaaatgagcgaatgccaataatgctggtaaacaagtattcacacctgttaacagctgtgtggatttgctgcaccaggtgtaaatgtgtgagtgccaagaatatcacttgggatcctgctttgcatgaggattctagagccaattttcatgcagagatggatgggaaaggtttcaggaaagctattgaattttcatacgggagctcaaatgaaaccttgaagccattgctgcagttgagtgaagcacagaatgttgagactatgaagaaggagtctattagagttacagaactcagtcgctatcatgagaacaatgagaactcactcactatcctgagaacagcatggagcccattgactcttacagattcatctgtttatagaagcagtaatgtctgtggcccacacaccaaagatttacagtacctaacctggtttccaactccccacaaatctgattcatttaaattgtgattttaacagcttacctgataaatctgatgttatcaggaagtttagaattttatactcattttttttaaatctgcaaggaatgagatatga

SEQ ID NO: 471246 - DNA, 932 bp, Homo sapiens
ctgaagggtccctcaagtgccgccaaagtgggagcccaggcagaggaggcgccgagagggagcgaggtctaggactcaaggttcataaaatgagcagaaattcagcaggtagacatggccttcttgatagcccctgtcttttcatcattcatgatcagcagcacctcatatctgccgctgaagactctgcctaaatcaaggattcttctttgcaagacgttgatgactgtctggatcagggaagtggtcacaaccgggaagttgtttaaggcagatatctggattgattacaccggggaactgagagttggtgtaggactagaaactgtttcaagagtgactaagctttacttctggtataaaaaatcaatttctccaaacagagcaagtgaccagtcaccacagcagcctcaagccccaaatttcaaaattttctgtggaaaattaaggttgctatttgaaacaaagagattgaagccaagcaaagtaaataacaaaaaaatcacaggagaaaccaaagatgttttggcatcaactaaacttggattgtaacattgactctgccactttctagttgtaatgagcttcaatttttgtcttcttataaaatgaggataatattccacacttcacagagttattgtaagaatccatttaagtaaatgaagtaactgacatgaaaactgattatgtaacttgcctaagtcttccaactaggaatgatgctgcatatatttaaatctctgtctgtgacactaaggttaagaaatgattttctcttttaaatctacgttcccactagcctgttcaatgcttttctaacactgatattaatggaataatataactaccataatttcacattttcatttctttaagagaaaaaactctcagaatatctcttatggttcatgctttaataatgatgtcag

SEQ ID NO: 471247 - DNA, 1482 bp, Homo sapiens
ttgtcacggtgaccacagtctcagcaaccactaccctgatcagtcagcagccagtctgtcactggccttcttgatggctgacgcgctgacgttcactctggtgacatgcaacccatgatcttcatggggagagaacgacccagtgcaggtcccacctccccttgctgactgatttcatctcagctctcgctggcactgtatcacttcaagctactttacacttcccccacggggaatgtggatattgtggtttccttccacgcacataggaaccatcgtcctccttttgtgcctgcaggtactcagaaggaacaggttgaatcctggagaggggtatccagctagtaatttcctggagtttaacagcagtgggggtgctcaacaacattcaataagggcccttccattttggttgccaaaaaaggtgacaccaagattccccaaagggaatggggaaattcccctcaattctagagggaatgtcagtgctgaaaatcctggagcatccagcagggtggacaacagtaccactgtcaaaaaacccagagcaaccaaaacagtgagtcctccacaaggcagcagtagtgtggccacttgccctttagcttggctccaccacctgccaggaaagatgacagccctgaaaagagcctttgaaagcccactagacaaattataaaagagctataacactcaaaatttctttcaaattttcattgacctgtaaaagcaaatgaatgtatgctttttttctactatcacatgcatctttgttttaatagaacaattttcaaatacttttcaataattttttcacaatgaaatcctggaatgaaattctaatatgtataagtaatgaaagcaattcagaaactcaacagagaatttgatttactgagggaaaatacttctttatttgcagaaggcttggagtaaatatttaaaagtacaaaagttttaatagtaaaatcttttgctcctttggttcccctctcagatatcctctttattccctctcttaatattactatatttatacatctttttaagctttcactatatgtgaatctattttgtgtatttttaaaacttcgtgtaaaaataaaactctgcatcttgccttttatagtgattagcatgttttaagatgtatttttcttaatatatgtatactaaaatttcttcaattaatttgtttgttttgtggggtttttttttaaataatcaaaaaaggagcagttggaaaaacactggacaagctggctgaatgaagaatgaatgtgtgtgctgtatttaggagggttagagagtgtggagaacaaaagggagtgcagaaaaggatacatatatttcagcattattgactgtactctgaggagtttggaggtgaggaagtttgagcaatagggagatattagcaattgctgtcccatggaattaatatttgagaggctaagagccagcagttgccctgagaaagcc

SEQ ID NO: 471248 - DNA, 479 bp, Homo sapiens
aaggacacagtgagaagaaacatgattaacaactcgtgtattttaaatctgattgtaaaagttgagtcattcttttggagaacactgaagatagtcttcatcttttgctactcaacgtgtggttcatgcaccagttacattggcatcagctggcagcttgttggaaatgctgaatctcagatcccattctacatccaaagtttcaatgatataaagatagttatgtatcagttattggaaaatgagaaaattttaaatgggggaaaatatttcataaacaattcattcaatagacggttttggaatgaattaacacacctgacagtaattaaatgtgaggaagctgagaaaaaggcaacttcaggagaagtcaaaaggaccacaattatctggataatttggttgactattcacgtgagaaatcagcaaagttttataaaaaaaaaaaattgaccagttatttcctcacacttttattt

SEQ ID NO: 471249 - DNA, 869 bp, Homo sapiens
catgtaccctgggtatctgctgggaagagaaaggagccagcgattcctgcttccctttttctagatgggtagccattcatctttagtttgcacccctttcaaatgcattctgaaccctcaggactactttaaaaaatgtcttcgtatttttcctttcttttccttggttctctcttcactaagagtgggggtccctggaaaaactccaaccggcctgcacactggggtggaaccttgggaagttcacgtgccatttgcagcagaaaggagcctggctcctcctcttcttgtgtgggaccagggattcaaactgctgggtgggatgcaatctagcggagggactctggccttgcgagagtccctgtgtcacctttgcttccttttcatcgaaagaaatcctgtcttactcactattcaaattgtctgtgagcctgaattttcgcggtcatgggacaaagaaccccttagctgaactaaggaaaagtcctgcaacattaactttgttgaaataaataattttcacagataaattttaaataaaattctcataaattgtatggataagagaatatagagctatgtggtgattcaaatgataaagaaggaattgaacagttttctgtacctgccagtctttccatataatagctgtttgtaattttatcaataacggtatattctaaataaatatcaatgaaatgacctgcacaattgtcactgtctcttccctgaaatctaagattggctacaagccccaatataaaactcagctctcctctatgaagtttttcttaatgatctctcctttgaatttttatgtttgtttttgtaaagactttttggaacacagtcatacttgtttatgtatt

SEQ ID NO: 471250 - DNA, 2050 bp, Homo sapiens
aaaggcacatgcatgctgataggagccgaagcagcagcgcaggttgtccccgtttcctctcccccttcccttctccggttgccttcccgggccccttacactccacagtcccggtcccgccatgtcccagaagcaagaagaagagaaccctgcagaggaggccggcgaggagaagcaggacacgcaggagaaagaaggtattctccctgagagagctgaagaggcaaagctaaaggccaaatacccaagcctaggacaaaagcctggaggctccgacttcctcatgaagagactccagaaagggcaaaagtactttgactcaggagactacaacatggccaaagccaagatgaagaataagcagctgccaagtgcaggaccagacaagaacctggtgactggtgatcacatcccaccccacaggatctgccccagagaaagtcctcgctcgtcaccagcaagcttgcggggtaacctgagaccccctctcctccccttcctcaaccattggacttttatatattataggcagggatgaaatgggcacctagtcagatcttctcagcttgctagccaaaaatgactgtgattctgctgggggctgctgagaagtattaattcattttcatcgtcttccttttctgcaaagtttattttttattagattcttcataagcttgatttttagccaggaagaaaacatgttcattggcatatttcatcattctccaacaccttgagttagtattaatgaaaatgtctgttttttaaaaaatatttagtttggtaagcaattcattttggttccatagcatccatatttggaatgtgtacctcacactaatcagaaagaatgatgccattatctgttatagtggcaacaagataattaatatctagtgatagacacactcaaaatttcattaattatattatttaagcttttaattacactccaatatacttccccatttacaaaacaaactgaaaggattccccagctcactgtctcttgctgctatttatttcccaggaagatttatcaaacgctatgaaagctatgaattgaaattaccttgagctttgttttcttaactgcttttcctttctctgttccaccaataaaatctaaataacaaaataattggatgcattatttccagctaccttttttcattttctggtcttgtattgagaccaggatgcaacccaaggaattaaaagcacacagctagctatcaccttcttcctgatctcttaaaaaaataaaggcaacctcattcacaagagttttcatttgatattataataatgaggatcaaattattgaggcactccttctgtcacttgggaaagaaaacagaaacactctttgctagttagatttacgtgacttcctttggaagcaagataataatttatatttaaatgaaatgatgattagcataagggtttatcatggcagccagcccacagcaagctttatttgtacttacctgatgcaacagagataagaaatgtaagtgcagtcctagctccttccccacaattaaagcattttgaggctttactccccaaatgacaggttaaccaaaatgattttaaaagaaatgttaatctacaatttttgtaatgttcttatagaaaataatgatgtcattaaaaacaacactagctcagagacttatggcagctgttaacccaagtttgtatcaattctggaaagacaatgtatgtttccggcttccaagtcctctttttataaaatggaaatttcagaatgttttcctaggtttcttccagatctaaaattctggatttctgtaaccacaaagaggtgagtttttatcatacctatttaactcactgtgaagaatttgtattctttcaagagatggtacaatttcattttacagaaaagtctcactttttattatctttctcagcttttcctattgacttgtaataggacaagttgtgtaagataggtgataggctggggtgattaaaaagccagattctatggccatatagcctgattttaaatctc

SEQ ID NO: 471251 - DNA, 2139 bp, Homo sapiens
gaggggcgcagacagcagtcagaatgccaaagccaatggcatataagatgctgaccagctgtttcctttctccgaacattgcctccttgatcaaagcagtgcttgacaacccaactatgctgactttctccagccagggccttcgtacctccctccctgtggccagacaaaagggagtatctcatcacccaaagaacactggcagtttagactctgagcctctgaagtacccatcctctctgctgcactttattgcctgtactggatcagagaaacagatttctttatttataagctatcagagatattttggggtgatactctgtcagcttgcaggggagtgtttcctcctacactcggggctaatttatgcgctggcatttgtgaccatattgttcttgagtaggaatggaaattggctcaatccatcagccagaagcaggtctccctttaacagctgattccatgacttgtcacattttcaaattcctctgggtgtcatgaagggggtggatgagcattttatttaaaaatatgaagaagagggctgttattcctgcagccttacaagattatagtttactggagggtaatatttacttctcctaattttgtgccaaacagaattgactaaatttatacatttagaggaatgaaatatctaagactgacacttaaaaggaataatttggcatgtgagtaggaatggcagtgaatcattttggacacacattgcagctattagcctcatgagaaatgactgtcaccacaatcacaaacacatttacgccattagtatgaggggggaaatgggacatttttcttcactaatgcttttaactctgattcataatgcccatcctttttcttcttccagatcactctccaaagaatgactgactacactgaatttccacttctagcaagtaacttcgttgttgaaatttatttttttagggtttgatttatctaagaaagtaaaataaatggcactgaattgtgttaatatttatcagtgaaaaataatattgaacttctccaaagacaaaataaaattaaataataaaacacaacttagtttcaggtattgagtgggaagataaaaatgggaaccatgaaataaactctttgttctctcaaatatcatgtaccttaaaatataaaagttacacaatagtttaggattagtaatacatccagaagtgaagattctgtttcttcttgaagccagaagacaatcttaaataactttaagttctaagaccaactaataattcagaagacacagctcatttgttccactataagaatttatagaaatgatgtgggaatttcgtgttatttcttatttttaaaagagcagactttctacctcagtggtttcaaggtgacatgaattagcacactgaacacttgaattcaaatcttacttcaatctctaaaacttatgactttggacaaatcatgtaatgtcttgaagaagcaaaatgatcaaagtccccttctatccatcaaatggtaaattattttaaagtcattaatataaatttactttgtagtcattgaagagatggagaattcattttaacaaatacattgaatactttgccaaggtgtttaatgtgcctatcttttgggaaaagtgcagagatacaacaagaaatatttttatatcattagcaatttcccatcctggttcccaagctaagacctttcattgtggtatcttaaacccaagatgtgggaatatataggaaaagtttctttcatcataatattaatattagctattaaagctaccatgaaacctatagctgaacacattgatactttattttttactctaaattttactatatgttcagttttactcattttatgttatgaatttattgacggtgggaagggttttatataaatacactcaggttttagaagacttctataaatgagagaaaagactatttcctgggattcaggataacaagcaagttgcaatgatactgttcctacaaaaggaattgggtatctgtcattattcacctaaactgaatttccttgaaaaattcaaatacttttaaaagggagaaaacatactaactgccaatcttctggatttgcattcatcaaatcaaatta

SEQ ID NO: 471252 - DNA, 877 bp, Homo sapiens
tttttctggggtgtataagtcagaatggaattgatgggtcatagatatgcttttatctatgttagtttcaaaatgggtcataaagcaatggagacaactcacaacatcaacagctcatttggccaaggaattgctaatgaatgtactgtgcagtggtgtttcaggaagttttgcaaaggagacaagagccttgaagatgagcgtagtgactggccatcagaagttgacaacgaccatggattttatacagcaactggagatgaccttctcagtggttggacagagaagaagctccgaaggccagacttgcaccaaaaaaaggtagtggtcagtgtttggtggtctgctgctggtctgatccactataactttctaaatcctggtgaaaccattacatctgagaagtatgttcagcaaatcaaggagatgtaccaaaaactgcatcatctgccaccaccattggtcaacagaaagggtccagttcttctccatgacaacaccccactgcacattgcacaaccaacacttaaaagttgaatgaattgggttatgaagttttgtttgatctgccatactcgcctcacctctcaccaactgactaccacttcttcaaatatctcaacaactttttgcagggaaaatgcttccacaaccagcaggatgcagaaaatactttcctagagttcatcaaatcccaaagcattaatttttactttacagagtgatattaaaaaatacttcacagagtgatattaaaaacaactttacagtatattatattctaaacattctgtgggatcactatttaacatgttgccatggaaatacaaaaagttatctacttgaaatatcagcatataaactttataactagggc

SEQ ID NO: 471253 - DNA, 1335 bp, Homo sapiens
taagtgggagctaagcaatgaggatgcaaaggcataagaatgatacaatgaactttgaggactcgggaaagggtccacacgggctggccttgcactgggaagacttggagcctgcttctgtggggatagacctgacactggggcttgcccagagcctggggctgcaggatcttgcttggcattcacatgggcatggaggcttagtccacagttgctggcctggagcctggggcctcaggtgcctggagtcagtatctgaagaggctaggaccacaggtgctggcctgatgactagggttgtgggggtttgcctcgtgctggggcagtatttacgcaaaactgtctcggatttgactgaccagaaagtgtatgagctacaggccagttgtgtctccagtgatgtcattgaccagaaggtgtataggatccaggacatctatgagaacagctggaccaagctgactgaaagattcttcaaaactacaccttggcccgaggctgaagccattgctccacaggatatcattgatgagttcatctaccagtttcagtcattcagtcagtactgctgtaagactgctaagaagtcggaggaggagattgacttcctttgttccaatcccaaaatctggaatgttcacagtgtcctcaatgtccttcattcctgggtagacaaatccaacatcaaccgacagttggaggacgccatccaggtcttcaccaatatcctcttctacatccagaggaccaagagcatgttccagaggaccacatgtaagtatgagatgattaacaagcagaatgatcagatgcatgcgctgctggccattgccctcatgatgtaccccatgcatatcgatgagagcattcacctccagctgcaggagaaatatggggacaagttgctgcgcaagcagaaaggtcacccacaagtctatgaagaacttttcagttactcctgccccaagttcctgtcgcctgtagtgcccagctatgataacgtgtaccccaactaccacagagagcccttcctgcagcagctggaggtgttttccgatgaagcatggcagcaggcccagctttcaagcatctgcagcttcctcaagctctacaccaccatgcctgtggccaagcttgctggctccctggaccttacagaacaggagttccggatccagcttctggtcttcaaacacaagatgaagaacctggtgtggaccagcagcatctcagccctggatgggaaacaaatagaataaaaaacttaaaaattgaattaaaaagaaagccgaatgtattactttcctagggctgtcgtaaaaagtaccacaaact

SEQ ID NO: 471254 - DNA, 1004 bp, Homo sapiens
aaaagtgccagatataagtcacgggtattggatacaccgagtcatagtgcagtcaccttcaaggactctcctggccattgggggctcagaagctgagaaagacctactctccaactcacacagcgtctacggcatctaccatataatagaggaattaagacacagcaaactgtaatccaagacactagtttaatcggaggcccgtcggaatagcgcagtattcgggtgggagtgacccgattttccaggtgccgtccgtcacccctttctttgactaggaaagggaactccctgaccccttgcgcttcccaacggcgctccctcgctctctctggctctctctctttctctctctctctcttcttttcctttccaaacccttgcggggcaggacctaaacatggaagcaactgcacgtttctggccatggccatctttgagcagctgtttcctagtagtcccttggaaattaagggcaattgggtggggtcactccctagtgctgcctgaaggcctaggaatgaatgggaataattgccctggcccgaagggtgaaggatcttttctacgcatggtccctaatccctacggtggcagcagagctcacagctgggagcaaattcgcacaggtttcagggaacttaaaacttaccttatgctaaattcttcctttattgatggccgccttgttcttcctgagtccttaaagattttattattaagagttctgcattccacgactcatcatggaaaagataaaatgatccaagttgaatacattggtgtagtgacttacaaattgtttaaaatggtttataaccaattcttgataccatattcctgggaaaacaattaaagcttcaggtacatttggtcacctgatgggccatttaaacattttataaagagatttcattctattgttattttcaatgcacgttttctggttgtataaaagctatcccatgcaagaggactgatgttataacagtagattaataata

SEQ ID NO: 471255 - DNA, 793 bp, Homo sapiens
ccagcacgttgtcacctttcacgtttacatggggggaatatagttcacaatgtggtaccctcctcaaatctccctccacaggggtaatatacccagtctccagctcctggaaatattggctgttagtggttcacaggttcattcctcactgagcattgccttaagccacagggaagtacctcacccgaggttatgtctcatccctggggtggcttgtggccaaagactgacagatgaaggattacagagaactgactcctgtgtctcattgtgggacaatccccaaagctcatctccattccagggctccccatatgattgcctgaggcctaaaaggcaagtgcatttcaggccggcttttccctctgctaaattctttttctccccaatttctcacaatgtatctctcaggagcaaccaccaatcaaccttttgcatgcaactcccatctcaaagtcaatttaagacaaggggatagcaactgttcagctccaccaactgttgccatgcacaatcatgtagacccattgatgtcagatcttgtttttcaagagaagctagaaatgcaagtataatcttttatatgtctgtaaatatacttcggtctggataaaagatgattttcttataatctttttacatcattaaccaataaaacttattcttctgttttctagtatctaaagttacagatggaaaattagtgttagtttctgtattagttttgtagggctgccatagtaaagtaccacagactgggtggcttatgtaatgaaaatttatcttttcacag

SEQ ID NO: 471256 - DNA, 840 bp, Homo sapiens
cggacacaatggtactagttttgggtagttttgttggcttatcgtttagtgtttttgttcattctcttcccactcaagaatcacatctggaactaataaaatatgatcacaaaatactaatctttgggccaacatcaagattgaatggaactttggagaaatctactttgggaaagggcaagggaatttctatctttctgggcaggcttggtgaccttgccagctccagcaggcttcttgtcccctgctttgatgacatccatagcaactgtctatcttatatcacaaacaacaaaacaacccagaggagtattgtgagagaagctctcaacacacataggcttgccaggaactataccaaaaatagcagcatcaccagacttcaagaatttaggatcatcttccagctccttaccaaaatggtgatccatcttttccttcagttcaacaaagttgcaagcaatgtgagttgtgtgttaatccattacaggggcataaccaacactgatttggcctggatggttcaggacagttacctgggcagtgaagccagcttcttccactggtgggtcatttttgctgttaccagcagtgttgccacaatgaacatctttgacaggcacctttttgacattgaagcttacattgtccctaggaagagcttcactcaaagcttcatggtacatttcaacacatctttagttgcaatgttgactggagcaaaggtgaccaccatgccgggtttgagaaacccaggctttgctcggcccacaaagatagtatcagtaccaccaactctgcccacaaagatagtatcagtaccaccaagtctgtagacat

SEQ ID NO: 471257 - DNA, 1052 bp, Homo sapiens
gactatgttttggtcgtgactcctttattcctctttttttgtcaaagaaagaatgccaacttgggggttgtggtgggtcaggagcccagggctgattaaaagggaggccacagtgtaggggtcatgggggtcagagcagcagcagcagaccctctaagaggctctctggagtggagaaaccagttccccaagtgggtcttctacaaccaccgttaatggccaaaggtctacagtgcaacaccaggctccagcaacagaaggctggaattctagtcttccggcttgaacaggtgccagccccagccatggatgtccctgtggttgggaaaggggagctcagggtaatggagtatcctcaagaacctgcagatattacctccctccagaaccgtggtctcagccctggctgcatattccttcaacgggagggctttagaaatgctgtgccagagctgcaccccagaccaacaaaatcagactctccaggatgcggccaaggcatcagtatgtggaaagctttcaggaaaactgagcaaaatgaaagccaattcaaagaagaaggaattaagtacataattgtgcagatgatacatggaaatggtaagaatggtgacaatgggacgtaagtgactgaaatttgggatacattggattagaagaaaataagcccccaagaaaccggtaagaaggatattgcaacagcacgagagattttaaactccttgatatcagaaagacttatcttctattaattttgttttcctctcaggaataagtctggagggcagcaagagtgactgtccagctaagaacctcatcagcaatacaaaacattgtcacagatgttgaaacagaccctgaggttaatgcattctttccaacattaggtcctaaaacttctcctgaaaagctaccttaaatctaacttttgaaagtgcacaataaaggtgaattaaataaaagcaacttgaaatttttacttatccttcaaattcctcaaatatcacttcctctgagaagccttccctgatttttctgtgtctccttggcag

SEQ ID NO: 471258 - DNA, 554 bp, Homo sapiens
cttctgcctcttttcagcttccaccagctccatagagtgcacaggatgtggccaaaattcacagtcagtccctggatccaagggcggatccacgttttagccaacattgttcctggtaggcggagcccattggatgggcaagcagccacagtactgctgccccatgtgggacctgccactcttactggcagtgcagatcttccaaagaaaggcattctgagtgaacggagaaaggatgcagaccttgggctaaagacggaagaaggtgggaatgatccatggagttgccgagctcaaggactcgatcccggcccccagtggttcctgaggaaggatcaaaccttcaaggacatcaaagaacataaaagcagaaagcccaatccaaggacagcaataagaaagattaaaggaacatccgtccacacgtatgagagagaacaggtgcaagaactctgacaactctaaaaggaactgtgtcttcctatttctaaacaaccacactagctacccagaatggttcagactgaaattgttgagataacagacatagaatt

SEQ ID NO: 471259 - DNA, 706 bp, Homo sapiens
atagtgaactgtcagcgacgactgatttataagaccgatttaccttctggagagtgtcatattctcatctttggcttctcagaaggcagaggagacagtcatcaccactgttcgctttctgtgcagccatagaactggctctctgctctgcatcttgccaagtgccatgcttgaagcccccaggcctcatcccaccacaaatgctataggggtctcaggaatagaggaagaaccagcattttatagaactcactgtgggaaaggcaggactaaaggaacattctccaggttcatgtgtttgtttactttgcttcgatgcatagaatcagacctgctcagagcacaggctgaaggtagctcaaagttcagggtcctgaggggaggagaggagcctggaagttggaatgaattagactactggatattttgtccagattggccagtgaggacaaacagttcagccaagaggaaaggcttaaagctttccattgtttttaaacctgctcctgagaatgacaatggagaacttgccagctatgtgaaagactgggccatttgctatgatgctaaaaatctagaaagaggtgaagtgactgctagaggtcagaatataagacagtttgttccatctttgatcaaatcagcctttgcaattgctaaacctcaaggtcaataagtagtgtgcaaacttagtgactcaattgag

SEQ ID NO: 471260 - DNA, 1792 bp, Homo sapiens
gtgttgagaaacaaggagtgtatgaatttaggaagctttgttcagtatgttagaagctaatgtcttaattaagtgggccttctcgggggtccaggtggtcctgctggtgttaaacaggatctgccaatgctcctggcaattgatggggagtctgctggagtttgctggaggtccactccagaccctgtttgcctgggtatcatcagcagaggctgcagaacagcaaacattgctgcctgttccttcttctgaaggctttgtcccagaggggcacctgccagatgccagctggagttctcctgtaggaggtgtctgtcgacccctgctgggaggtgtttcccagtcaggaggcatggggaaggaagatcttaaatgtgaagcagtaagatcacttgttaagacttcagaaaaatctaaggcagtatcttgtaaagtgactcagatggataaaaagtcctgtcatccttaaagctatgcttcttaaactccctcaactagatagaaaataacttttgagtatcttaagggcatgccttctaggctctcttggctagaaaaaggtcttctaagaattttaacaatgttatcttatagtaccttgacttttggcacaagtttatgtttttttttattattatactttaagttttagggtacatgtgcacattgtgcaggtgggaattgaacaatgagatcacatggacacagaaaggggaatatcacactctggggactgttgtggggtggggggaggagggagggatagcattgggagatatacctaatgctagatgacgagttagtgggtgcagcgcaccagcatggcacatgtatacatatgtaactaacctgcacaatgtgcacatgtaccctaaaacttaaagtataataaaaaaaatgcaaagtatgaaatcccataattcagtaaacattttggtgtgttttcttctagttctttgtctatacataggctaaattaaggagttctaactatataagcagctgtactttaccccttttattttacattatattgtcagtatgcttcatgttattaattataaaatttatttagcaataatgtattctttcatattaataatggaatacatttaacaatttttagatcacttattccctcactgggaaaatataaaaaaaatacccatcatagattaatcttaccaacacattaccagacaaactgattttacttggtagcaggcaagctgcctggcaaagaatctacttacagagaggaggcactacccttcccattcccttgcctctgtgctaggaatctttgatttagagcactgcagctgctgcagttcattactgtacattttagagtcaagcacgactgtatcagtgggttaccccctaaagtgctatactcattgtgataatagctaaggatattacagacaggaggagtgaatactgcctttggagcatcactactctctgcctaaagtgtgcttccaaataagagggagagtgctaccttacaagccagctgtcacctctaacagctgccccaccagttcagccttctaaaactccaggatacttgttttcactcatcaattccatatatgtatatggttctaaataagtaaactgatggccacacccctatcagagcagaaaacgcatttggttaaaaaattggtttttacagataaatttatataagttaaaaagatacctctttatatggtagtaaggaagtagtgaagaggatggtgaattggtagaaataaataaaatttagagaatcaaaatatat

SEQ ID NO: 471261 - DNA, 688 bp, Homo sapiens
taaacaacctgaaatgatgccctgcccagagaggaggactctagagaggcagtctggctacagtggcttcgctgagctgtggtggactctgcccagttcgaacttccgggtggctttgttcacactgtgaggggaaaaccacctattcaagcctcagtaatggcggacgcccctccccccaccaagcttgagtgtcccaggtcaacttcagactgctgtgctggcagtggagtgaatggttctgtctcattggcattccaggcgccactgggatatggaaaagaactcctgcagctagctcagtttcttctcaaatggccacccagttttgtgattgaaacccagggccctggtggtgtagccatccgagggaatctcctggtggaaggaaacagatgtatgtccgcggtctgttacgttgagcagcaggtggataaagatgaagacagggtaaaagttggtggcctagaagtaaagctgtgggaagtttcatacactgaattttcctatttatatctctatgaagataggaaaattcatgtcttctctgctccttttttggtgattgttgccccaggcttgctagtttcttcatttgcatttattgtgctgaatattcaaggagaagcctctaaagatctctagatctcttattacatagctctcttctctctagtactgtgccttg

SEQ ID NO: 471262 - DNA, 686 bp, Homo sapiens
atcgggaggctaagtcttagcagctaagaggaatgagttctttgatcctgaatatagaggcgatgcgtctggagttgtttgttccttctagtgagttagtggtcttgctggcctcaggagtgaagctgcaaaccttcccggtgagtgttacagctcataaaggcggcgtggaccgaaagagtgagcatcaagatttattgcgaagagctaaagaagaaagcttccacgatctggaaggggaccccagcggaagcccagctgccttcacctctcagtggcactttctgcgggactttgcggcacctagcccgggcactctggcagcccagagggagcttgacacccgatcaagcccagcaggcgtctgcctgctgcatcgagtgcagggccctcagagcccgcacccaccgggaacctgtgccggccctcctgaagcctaacagctaatgatgctgttgatgcatggcaatgctgcatttaatcaaggatttttttcattattgcacaatatccctcttacctcatcaaagataatttgtctttctattgcatttctttttggtatttaagaagtttggaatcgtagttcataggttcaagcccctaaaatgaccttatgcctaataggtgttttcacttctaattggtataattttatgactgacactactttattgaggaggcat

SEQ ID NO: 471263 - DNA, 691 bp, Homo sapiens
ttcagaggaaacaaggttcctaagaccattgtgctaaggaggagtcaaagtgttagcgatggcaattccgtatttgtacgggtctacagcatcctcaattcttgccccccacactccacagaagaaagaatttgagggacataaggcagaaggagagactgaggcaagttttagagcaggagagaaagttgaaatgttccttttcaaacttgctcttcagggacagggttattttcggaggtctctggcactgttgagagcctgctatggtctgaacgcatcccctgaagttgctgtgagtgacaggattaagcatatacaggaccatgggacatggggagtttttcctcctcagagggggaaacttgaagctgatggctgcctgaacttttcagtgtcactacctaaaagtggctacctaaaagtggctgcccgaacttttcagtgtcactgcaatggctgtttacagcttttaacaattgagtaaagtatattcctataaacaaaatttggagaatatttgtttctgtctacttaatttctccagaatttggaaacttttttatataattaaatttcatgaaataaatatggattcattcctctgaatgttaatatgctgaactctgctattagctctggccatttggggaatgttataaaagtcttttggaattttcccagaactaat

SEQ ID NO: 471264 - DNA, 1554 bp, Homo sapiens
agacccgaatccggaatactcttgagctgattcagctccagccatggctaaaaggggccaaggtacagctcaagctgtggcttcagaggatacaagccccaagccttggcagcttccctgtggtgttgagcctgtgggtgcacagaagtcacgatttgatgtttgggaacctctgcctagatttcagaggatgtatgaaaacacttgcatgtccaggcagaactttgctgcagaggaagagccctcatggagaacctctgctagggcagtgtggaaaggaaatgtggggttggaaccctcacacaaagtccccattgaggcactacctagtggaactgtgaaaagagggccactgtcctccagaccccagaatggtagatccactgacagcttgcaccaagtgcctggaaaagccacaaacactcaatgccagcccatgacaacatccacaatgggggctgtaccctgcaaagccaccaggacagagctacccaaggctgtgggagcccacctcttgcagcattgtgccctgggtgtgagatatggagtcaaaggtgatcattttggaactttaaggtttaatgagtgttttattggattttggacttgcatggggactatagtattaatttcttatcctgatgaggaagtccacagtagctgtaaaggtactattacctagtgattaaaggcatatattctggaagcagactcaggttcttatctgtccctaccaccttgtaggtggactgtgatagagttttcctctttgtaataatttcattggtattccatgaattatgatggattcaaaactctcagttggttaatttatattctatatcacaaaagtcagtggaaaatacaagacacttaccccactcagagattcttaagcatacaacctcagttaacccttgtatgtattccttaaactagttcacataatctcattttttgtcagttgcataattccttcccatattatctccagacttttataaggtagaatatctaaaccatgtatgatgccaactataactattatttatttcatttgcattttccttcacattatgatgtcataatgtgtatgcgactggtataccttgtcgtataccagtaatcaagagtgatgcatttgcactttggactcagctgtatcctttggtcaatctccaactgagttcttgtctgatctcacatttatggtactaagaacataaggactcagtagtctcatccttatttatactgttacctcacaaaatcttatcaacttgttcagtttttcataaattttatgacataactcaagttatttttcttacttatgtatcactgttttctttgatttaatggaattcccttctcaacagtattgtgtgctcaacggctaccatctgcctataataatatccattctattgcatgcttatttataatttttttattcttatgtaactacaaacttagagagaaatttgcaagcaccataaaaaacacttttccgaattatatgaaagtaaaatgctggtacaaacctacagattc

SEQ ID NO: 471265 - DNA, 657 bp, Homo sapiens
ttaatccaagaaagaagccattttatttctaatgtccccaaagggcagatgttcaacattctgtcaccatcttgcaaacctttgctttggaagatcacaattcttcacacacaagctactggagactggttggtatcaatgtgagcttccacctatttgttgtaatttctggctgtctaaaatgaagacaactctacgaacatcccattggacactggttttcaaatgtggaagaaaagtgtttctaatattaactaaggctgggagccacactttagaaagagaagaagatatagagagattcaaagaaggctgtgtggagatggaggcaaagattggagtgatgctgccacaagccaaggagtgccaggagccaccagaagctggaaaaagcatggaagagttcttctccacaagagctttgcggggaggatcttttaggattgaaaaatgggtgtcgggattcagtaagcacagtcgaaaggggtgtattagtccattttcacactgccataaagaactacgtgagactagataatttataaaggaaaaaggtttaattgactgacaattctgcatggctggagaggctttaagaaacttacaatcatgggggaaggtgaagaagaagcaagacacattggggtccaacatggc

SEQ ID NO: 471266 - DNA, 646 bp, Homo sapiens
atcacagatgctttggttcaaagcctccttcgcatcttccccttgtatctccctaccttaatccacaagtatgggatacctctactccctccttggcgatcatgcaccctttatcatcccattaaaacctaatcacccttgccccactcaatgccaatatcccatcccacagcaggctttaaaaaggttaaagcctgttatcacctgcctgttacaacatggcctcttaagggctacaaactctccttacaacctttctatcctacctttccaaaaccagacaagtcttacaggctggtccaggatattcgacttatcaaccaaattatcttgcctatccaccccatggtgccaaatccatatattctcccatcttcaatacttccctccacaacccattattctattctggatttcaaagatgctttctttactattcctttatacccttcatcccagcctctcgttcctttcacttggattgaccctgacacccatcagtctcagcaacttaacccgggctgtaccgctgcaaagcttcagggacagtccccattacttcagtcaagccctttctcataacttactttctttccatccatctgcttctcaccttattcaatattttaatgaccttctactttgt

SEQ ID NO: 471267 - DNA, 983 bp, Homo sapiens
ttccctgaccccttgcacttcctggaaaagtagccaagatcatggtgggaagtggtcagatattggatctgtctctaaaggtagattcaatagatgttgctgatgggttggatgtgtgctttgagagaaagagaggagtcaaggatggcaccaggacatccggagaaacagaattcagcttcctacggagggacttgcaggtgttagacatggcatctcagagaagcaggccagtctactgtgctaatgaggacctggatgctcagcagaacttccggatgcacaaacggaaccatcagcggtggaattcacagctcttgttagagtgctcccatggcctcttgccagtgtctgttcttacaacaatgaaatacaatcagtggatcccaccaagccccttgaccagcaggggtgtgatttcagacccagacttcaaaccagcaattcttacctcctctccatgactctgtgatttgacttctgccttatcatcctcacacaacttgcgtttcaaccacatgaatctatgtacagttttctaaaacacaatgttttctctaagattttttttcctggttttaatgactttcctaactcctctctttctggtaagctcttaattatgcttcaaaggtcagctcaaatatcatctcctttggaaagccttctcaggacctctcttagtaaaattaatcattttttcctctttccatgtaaaatagtataagcctacttttttttattaacacttatggcagtgctgtgattactatttgttagtgttgtctcctcacgtagaattcatctttccatttgtagcactgagtacagtttctgaaaaataggaaatactaatacaaccaacatatgaccaggtctccatggagaatctttgctcttgaagccaaactctgcattcatgaaatcttcagaaaacatatttaacttcagaaagcattagcagtaatatacattttataaac

SEQ ID NO: 471268 - DNA, 1797 bp, Homo sapiens
ctaaatcttaggtaaggttaaatccttctccccgatctagattttcagttttcataatgaagccagttcatggacttcaagtttcttacctgaagaaaagtttgaagaagcccttgaggaagggctgtggattcaaagcacaaaggtggtccaccagtcaaagtggtgatacctgtggtgatacaccagtaattggcgatacctggagttttaagctcaggctcttcttacattttcagtgtgccccatgtctccatgtgcagtccctgtggttgcatcccctgttcctgaataggcaaacaaagtgtatattgagattattagtgaggttaaatggagaaaaatctgtgataagaaacggagattttgccttagatattccaaatctactccctcatctaaaatatattctgtcgtgttgtgttgttttatatataaataatacatacaaagcatcaaagtcatgaagtcaagacttgaataatttggctaaaaagagtgtgcctatatcatcttggcatgtacatgcaatatttatgtaaatcaaaatattctaactgctcaatagtacatttttgaaacaatattaacattttcaatataataggtcaaacactaactttttataaattagttttattttacctctaaatggagtgctctaaaaataagacagagaaactgtccaaaccaaatttaaatatagtgtctaattaagggtagaaatttgagtgcctttatttaaaattcatatagatttatgcatgatttgccaaatatgtgctcaccttcaaaatattctgatgtatatatgtgtagtataatgtaaataattgttagtatttttttacttgaatttgatatttcaatcaaatacccatatacaaagctcagtttgccaaaagtaatggcctccagctccattcatgttcctgcaaaggacatgatctcatctttttttgtggcttcatagtattccatagtgtgcatgtaccatattttctttatccaatctattatttctaggcatttaggttgattccacattttttgctattataaatagtgctacaatgaacatatgtgtgcatgtgtctttataatataatgatttctattcctttgggtatatacccagggcaaaggacatgaacagacacttttcaaaagaagacttccacaaatttctaaaacaatctgcataggatcataatggcattgttgtgagaaccagtggtctaaagtatcttgcttatctgtgtgacccaaattcactgaaaaactgcctagaccatgtttttgattgagctgtgaagttcttgcaatgaatgtaatcaagattttgaaaataatctcccatatgtgctttacagttcatgataatttgtgtctcaagaaagggcataaaagcaaagttaaatttttgtgtttaagtatccttattagctcttatacaagtgagccaaaagtaaagcattaattaaaaacagcttctagtgaggcagttccttttatatctgaaccttactttgaaatacatttactaccctttttatcacctgaaggtactattccaatccacttgcttgcaatgttcaattgcatttcatggcacttttaagcttaattaaatttttgcaacagagtaggtctgttctttaaggcaaagcattgctttcaatccatctgattttcatatggaaaggagctagcaagatttttttcttctcatttttggaaagcaaatactctgccaataaataagtaaataaatgctagttttctatggctatgttt

SEQ ID NO: 471269 - DNA, 721 bp, Homo sapiens
cctgactgttagaaggaaaactaacaaacagaaatcaatagcatcaacatcaacaaaaaggatgaccacgcaaaatttccatctgaaggtcaccaacagcaaagaccaaaggaaaaaccagcacaaaaaggctgaaaattccaaaatccacaatgcctcttctccaaagggtcacaactcctcaccagcaagggaacaagactggatggagaatgagtatgacaaattgacagaagttggcttcagaaggtgggtaataacaaactcctccaagctaaaggagcatgttctaacccaatgcaaggaagctaagaaccttgacaaaagacagctgaggaagaagcacccttctagcctccacctgttcacttttgccacatcccttcttatactttctgagcccttctcccatcagatcattattaaaggctttaaactacaagttgagagccttgaaaacaaacaggaaggatttgacatcattacacatgcacactgagagcctgagcaataagggtgaatgactgggctgctctactgtcaggctgtgcatagtattaaattattcactgttagcatatagaaatgctactgattttcgtatgtggattttatatcctgcaactttactgaatttatttatcagttctaacagttttttgctgaaggctttaggtttttgcaaatataagatcataccctctgcaaacaaggcttattt

SEQ ID NO: 471270 - DNA, 692 bp, Homo sapiens
cacagaattaaggggcattagtttatctgtgaacaaagccttcgcttctagcatctgtgccatgctctctgctgttgacccaagctgttggtcatacaaggctgaactaacacttacttcctccctgaaggggagggcacctctaggcttcactggatcaaaggcaacaccaaaatttttatttaagcacatcaaagtctggaaaccaaatagagaatcagtggtgcttgaagcagtgcttgccagatgcccagagctgggccctcagctctcctctctgggtcccccgttcaaggcagagagagtcacagtgctgaagtccatgggcctaacaggatccctgaaatgggacagtagacctgaaattacatctttcccttggaatttaattcctaaagaagacaaattattatgttactttcacccaaatggaaattcagaaggccacaagacctatctggaaaacacttaaacacaataccgtgcacataatagcagcttagtaactattccaaacacgataattacaattctaaaaaactaaataaatttgaatcaacaatacctagcaacagtgcctgttcacatgcttgggatatgtatttggaggtcttttagcaggcatagatcttggagaaaacttcttgcaggtactccttcctttttacccatctctttgaaagtttcaactc

SEQ ID NO: 471271 - DNA, 1455 bp, Homo sapiens
ttatgctggacctggactctgtgaacattgcgcctgctgcttctgggctccttaaagatgctcagtcaacttggtgtagcccctgcgccagacctttaccattctcccgagcatcttttggcaaatcccttacttttggcaaacgatgtaattttctactttgctaagatcaggactatgccactcaaaataatttcactttcccctccttccttgtctaagttattttggatctctacatgcccaactgtaatagccgtccacagtgaggaggactcctcttctagaacctttcatccccttctcctcctgctgcttccagtaccttgttccatcaacaaaagcccccctttccttgtgcctttggtctatgcttgtctcctccattgtgaaatctttaacataccatcttctcatcaactctgcacaaaaaaacaccacgatagaatggtcctgactcccgagcccttacaagttggtgtccttcccaattacactgctgtgactgttctcttgggatgtcccagtcaaacatccagtggccagttccctgcagtagcaccagaagcttctaaactctagctctgtgtcttgccttcttcccaatccctaagagcacattttcccaataattccatcctgccccctcttctgtttttatatactttttccaagtcaatgaatttattccacaaactgagtttttaacttttatataacaatactgctctggccttgacctttctcctgaactccagaactgaatttctgactttcctgctggaaatttccatatagctcaatatgttcaaatctgaattcattttctcttgtcacaggactattttccgtctcttaacatactgcatcagcttaaacctaagctctctcccttgcctcaactataaagtgggaatagtagcacatatctcatgagattgtgtagggctaaaattttgttataaagtcattaggagagttatttctttcattaatatcaaccactcgagtagttgcaagcctgtcaattctatttcttagctacagccttttctacatgtgtcttttcatcatggtgaccgatctaactctaatctcaccaatgtttagctgaactactcaagttgctcaacttttatcaataatctactgtaagcaatgtgttttgcatgtattcttgtgagaatattccctggaaagagggatactaaagtcattcatcccagtctgaatattgctattttctactgtggtgggaatacaatgtaactaaaatgagaactgcaccagagattagagatttcaatagcattctcccgcctcccctatgcaaacctgcctgcaagtatatcaggtccaacttcagaaaaacagtctgataatttatgtcagagctcacaaattttatcccaacagagcccaaacagggtataaaatgaaataaaataggtttgt

SEQ ID NO: 471272 - DNA, 595 bp, Homo sapiens
gatgtcttgctggcatcgcagagcagcacatcagctaaaaaatgggtaaccttcatcttggcacacatttctcactcagcaaagccagcaggcaggaacatttaagtctgctgaagctgtgcccacagctgccccttccccaaggtgctctgtcccagggagatgggagttttatctataagcccctgactggggctgctgcctttctttcagagatgccttgcccagacaggaggattctgaagaggcagtctggctacagtggctttgccaagctgcagtgttccctgttcgaactttcaggtgtctttgtttacaccgtgaggagaaaaccacctactcaagcctcagtaatggtggacacccctcccccaaccaagctggagcatcccaggtcaacttcacactgctgtgctggcagcaagaatttcaagccaatgggtcttagttttctgggctccatggggatgggatccactgagcaaaactgcttggctccctggcttcagccccctttccaggggagtgaatggttctgcctcactggcattccaggcgtcactggggtatgaaaaaaaactcctgcagctagctc

SEQ ID NO: 471273 - DNA, 536 bp, Homo sapiens
gcatctgtcatgtaccagctggttttcaagatagtcttcagggatgtggcagccgccaggactgggttggtttttccatgtcaagggccatcctatccagctgcaggcatgctggctaggcacacaacattcaacggtttttaagtttgtcttgctggaaggtgaccgtggaggatctgcgccaagacaagctgctgaggcctcttctggtcctggactctccatctgggatctgtttgatgactctcggccaccccttttgaatccaatgctgtggcctgtccctggattcccaggcctttgtcctggaacttgctttcatacccccattgctctacatccacgggcacaggccaactctatgccttttcctcctgttttggttagctatgactacataacaaaccacctccaaatttcatggcccaagacaacagagccatttatttgtttacgattcggcggcttgaccaggtctcagggggcagagctcacctctgttcacgtacggtcagctgggacagcttgactggaat

SEQ ID NO: 471274 - DNA, 539 bp, Homo sapiens
tctgaagattctgagttgagctctgcctcttcccgttccatgtggagccttcagaggccctacctgcaaggccaggactgtgttctcaggcccctgggcagctggtgtaatgcgggtgatagcagtagcagtgatggagcactgaaacccaagtggtctatattggtgaaaatgctcccagacttgtccaagaccatcaaggcagtaactctacaagtctgcaagaaccccagtgttacagggcttaggatgccccctaaagcagatacagtttatatcacaacacgcaagtcctttcaagtatctggaaagacttcccaagaaggactgctaaaaatgagcccagacagtaaagactacaataaatacctaacccttgaatgcccagacactgaagaacatctaagcatcagcaccatccaggaaaaaatgacctcaccaaaaaactaagccaccagagatcaatcctgtcaaaacagagatatgtgacctttcagacagacaattcataacagctgtgttgagaaaactcaaagaaa

SEQ ID NO: 471275 - DNA, 705 bp, Homo sapiens
gtgggtcctgcataaagcccaaagcaaaatgtcctcctttaaaaaaaaaaaaaaagctgaaatgatgaagtttgagggaattagctcaacccagcatcccttcactctgttcgtggcgttaatttccgattccattaagcagcccatcggctcgcagcctcccctcctcccctccccgggcctgattcggatgcaagtcacagcgccggagttcaagctgctgcctcttaagaaggcctattttgacacagtaattacagtgcttgaacgatgctttacattagagtataaaacactcattaaattaaaattcttccatgaaatcatgaaaataaacagtctgtccaaactggcatcaacaaattcacagggtgcctctgcgttttctcagcccgggctagctaagggctgcatgtaaccacgaagtgtgaacggttcacattcctttgaaggccgcattctgcttctttttaagattattgctttaattgtttttacaacttgtaagattttaaagctattaagcttccaagttgggagtgggaaaacttgaaatggggaccatggtacccggcccagggtgggagtgggggtgggagacaggttaccattcccagcccccagacccttctgggacaattaaaatgcaagggacaagatgagatgggcaatttctccatggccccttgagggatggaaaataaa

SEQ ID NO: 471276 - DNA, 1478 bp, Homo sapiens
ggttgcaatggcttttgcccttgaacatgaaacaagcatgtgtcctggagagtggctggcattggcctgaaagctgcacagatggggcccatgactccattggtgcaaaggacgtgctttggttgaccagacccttcatgcagcaaagtgggtctgctaatccagaagaaagctttgttgaaggagaaaatccttttacaacgcaagttttctttcaatgctcaaggattctgttttctaaattccaatgtctccatttcactgtgttgggttttctacagctgggcctatctattaaatcggtgctgctaccaggccagtcggatagaaccacaggaattcagatgccttttggaactaggaacaaagacgagtcacccaacatgtttcatttttgtcatcgggtggcccctgattaatcgcatcaagggaaaaagtgttaaggtcctggggaaccattttggtaccctaagtcaatgctgccctctaaagccaatcagagctagtgtccagttagctcataccagcatctctgtgttgactggttaaagctgatgtccacctggtgcctttactttgcaccttctgccctctagtcttccaaacaacctgagaggggtttctcccttggatttggggatttggggtgaggagccgttgctgctaattggtgtcttcccaataatgctcggattaagccttggggggattacactaaagaggcgagaaggtaatacccaaaataaacacgagtgcccttcctgaatgcattcttgccagcaagttaaatcgtccagcccctagggcctgttcctaaaagatttaagtactaattcaggggagggggtgggtgggacacatagtagatttctgctgattctgacttcttctgacatcttttagaagcttcgtttctgcgctatttgattccctttgacgattgtcaagttaagtttactaaaaactggagaagactttgttccggggtgggagggggaagggggggctgctggattagaaacatgagccaatctgcagcttgtccatccgccctggcatcgttttatttctgcgtttctgaaaggattcaagtaatcaattccagaggacaagcttggggaaccttggcaaaggggcctccctcttggctattgctttgaatattttatgtagctaatagcgttctgatggggcccaaaatgtgggtacttggaaacctgcagggtcccctgtgaatttccactcagatggacgttcccagtcccccttgagagcagttctctggagtccctccagcgaggaattcacatcctggattccagctcaggagttttgcatgaattttcatgctttgaaggaagaaaatcttaacaactggccgataatcacagttcacatttattgagcatctactgtctctctgtgctaagtgcttgcactcgccctctcatttaaccctgataaggcccagtgaggac

SEQ ID NO: 471277 - DNA, 999 bp, Homo sapiens
taggtaaaatggggacagtaatacattgctcctgagtgaccgtggggagtcaggggcataatgtgtgatggtgtatccaacatagaacagccgcttcataaacatgtgtcaaatggaaaaccattagacaagtacacacaagggctttttaaacctcatttggtgaagacgacaacatggttcaccgagaatggcagacacctgtactacaaaagggtcctacacactgttagggagccgtctagcaagattccataccgcacaggggccaccggggctgctacacggatttctagtttcctcttcaccaaggcaccccagcctccagcttcctgtgctgtgtccaagggcagagacagggctgctgaccgaaacttagagtcctccatgcagcacagcaaggggtctggccagacttggggccgcctcggaggagtcgtgccatccattctggacactccattctcctgggaagcctttgacatgccccgctatcctgcttccaaggacagggcgcccgttctccgtggcaaggattcatgaattttgcttccagaaaattaaacgaacgtgaatccatttattaattcatccattttacaagcatatattgaacctctactgtgggcagatacttcctccactcccttttgtccactcccgtggcttaggtactagtaaaagcttaagtactagtaaaataattagaaaatgatgagttctgagtatttattacctttggggtttcttttaagtcactaagctattttttaaggaaagttttaggttcacagcaaaatttcacagaaagtagagatttcccatatacctgtcctccccacacatgtatagcctccccaagttccaggccagagtggaacatttgttaccattcctgaccctccactgatacatcataatcacccaaattccattctttaccatacagttcactcttggtggtttacattctatgggttttggcaaatgtttgataac

SEQ ID NO: 471278 - DNA, 635 bp, Homo sapiens
aggaatgctatgaaggagcggggcagggttgtgcagaggtggggatgtgtagcgactcaaatgcaggtaacctggttcaagaggagatgctcatgccagcgcctctgtggacagtctctggccagccctggggacatctgctacatctggggacatttttggttgtcacaaccagagagggggacaggggatggtgtgctcctggcaccttgtgggtagaggccagggggactgctaaacctcctacagtgcgcaggacagcccccccacaaattatgactcaggccaaaataccaactgtgcagagcttgagagccctggcgtacatgaatgttgactcggaggcccactctctgctgtatcagaaccaacccaggattgcctgtgtccggtgtaggccaccacagtccctttcgtggaagcaggttccagagatggggcttgggaagtatgaaccaaagaggctgaatttaagagacgaggatgggcagtgtctactaacatgaacacaggctgaccctctgacgcacaattccacccctgggtatagacccaagagaaaatgcgcacatgccccaaagacatgcagaagaatgtttataggagctttattcatcatcatcctatactagaaa

SEQ ID NO: 471279 - DNA, 673 bp, Homo sapiens
cagctccgggccttctggatggaaacaagaaaaagttcctatctcacatccctgcccacatttgcaaacggtaaatttgaagtgaaaaatagggaatggttacatagccaccatggaaatctttggcctgggagacatttggaataacggggtggcacaaagaaccctgagacatacttgcaccgatatttttaatccttgtcaccatcaagcgcctctggattttgtgtgctgcggcactatcaagctgctgaagttggaagacagaattaatagtgataataatagcggctgctattcactgatcatctactttgtgccagtcccccagagtggggtgggggtaggaggaggaggcgactgccaggcggaggggtggagagggggcactctgcaggcccagaatccttgtctggggagaaaaacctccagaaacgcctacttccacatgcttggtggggtttaccctcaggacaggcccgaggggcagcagcagctgcctgtggatccattcatgtgagtggtcctgaagaggagcacctgagtgtttcacaaccaaatgctcaacagatgtttctacatgtctggagaaatgcaatgaggggtgcactggggtaatgatgctgaaagctcccagagtcaatagcctttggggcttgattagcagagactc

SEQ ID NO: 471280 - DNA, 1361 bp, Homo sapiens
gctaattcagcttcttgaatgcctaagtctcagtgctccccattcccggcgtttccctaacaccgggagagccttctcggccgctgcctccttgtttggcgtgtgaactggtattgaatgttctcagaatccagatggctcataggggtttcgagcactgctcctgctggggctgaggcgacactgagaggggggccttggcctcccctgtggccgggcctgctccctgagacctgcgtcccaaggattgcattgccagcatgtgggagtgttagtgatgcctggggcagccgctcgccctgacccgccgtgtcccagtgactgagggagccaggttgctctctgggtctggatgtggcccccagacccagtttgtccacccctggcctaggtcgcgagcatctgtccttttccttcctagcatctccggttctgcttcttttgggcaaacaagtatccccctagggaactacccttcccctctttttaagtatacggagtccatgggcttcacttgcctgcttggctccagttgatcagcgtgctctgctctcctccacacccctctgctggtaattggtttagcaatggacacctgacccaatgggtgccagtgagagttgggaacttcgttcagtgcttggcagaaggaggcagtctttcttgccctgaggctgtaagatgtggaactcacgcagccatttgacttcctgagaggaaaccctggaactgccagattgagctttgccatgagtgttgggaagcctggatcctccagcctgtgagctctaaattctgcagcggaaacatctgggccctccgctggccccagggtgcacaccactacgtctgccataagtcacgacagcatgtcgagggacttgcctgtaccctccgccttcgggctctgtcagcctgtggtcctgggacattccatccctccaggtgcctctgtgcaaagtccctttccaagagaccccaagccagctcctctggtggaagctaagttagtgggggcacagcttcgtgcttccgaccactctcagtggaaagaccgctcaagccctgtccagcccttcttcctcctggacacttctgctgaggcaaacaccctagaggcagagagaggtgtttggctgctttgctcactgcggtatccccagctcctaggaaattcctgttttgcagtaggagctcatcaaagaccaaaaagtaaagaaatgtatgctattccaagccccatagattttcagctttcttgtgtcaccagcctcagtggccgcagaattccatcttctcccacgtgtctcctatctgatgtcccaggtgtagattctcggtgatgagcacctcctccctgt

SEQ ID NO: 471281 - DNA, 860 bp, Homo sapiens
tcttcaccaatctgacaggcacagggccatgggggacacggatgccaagcctggtttgaaaaagcatgcttcctgtttccgtgtggaaagtcatcaccaggaagggccgactgaactcagtgcccagagtgggtgggaagtcaaggtctgggcgaggcccaggggtgagctgaatgctggtggctgcagcagcttcagagcccctctcatccagctgaccttgggtgatagtgccctggagatgacagtgccctggggtgacaatgcttttgaggtgactgtgccctggggacactttacggtggctgagggagaaggcgaggcccggcctccccggggctctgctgtgtgcaggctacctggtcctgagcagactgtcccacttaatcagtgtttcaggcagcagggcatcttccagctgcctcatcttgcccctgttggggaagatgaagaaggtggtggtgttcccagcgtggtccatccgcagcacagagcattgcagctcacggtcgtgcaggaagcggtggctggccttctccttcatcatgggcacccacacagcgctgtgctcatctacaaagaactcctttgggctggtggcacagcaacacggacgtcatcctcgcagagaaccgagaacgggcttggggttacccttctagcagcttgtgggagtggggaaagcaccctggatgctggaatcttggagtccacactcaggaagccaaatcccactcactaactccctcctgagaggtcccttagtacctgcgtggccctgggggctgagcccggagcctccctgagcttctgtctcctcatttgaaaatgatcaatactattagaaactattacaatag

SEQ ID NO: 471282 - DNA, 818 bp, Homo sapiens
agcaaggctgctccgggcagccaatggcaagagcacaggtcctaagcaggaagaagcttgaccaaggaccccagaggatggaggcctctcggtggtggctgctggtcactgtgctcatggctggggctcattgtgtggccctggttgaccaagaagcttctgatctcatccattctggcccccaggacagcagccctgggcctgccctgccctgccacaaaatctctgtgagcaacatagactttgccttcaagctctacagacagttggctttgaacgcccccggggagaacattctcttctccccagtgagcatctccctggccttggccatgctttcttggggggccccagtggccagcaggacccaactcctggagggcctggggttcaccctcaccgtggtgcctgaggaggagatccaggaaggcttctgggatctgctgatcaggctccgtgggcagggtccccggctcctcctgaccatggaccagcgcaggttcagcggcctgggcgcgagggccaaccagagcctagaggaggcccaaaaacacattgacgaatatacagagcagcagacccaggggaagctcggggcctgggagaaggacctcggcagtgaaaccacagcggttctggtgaatcacatgctcctcagagaatcccagaacccaggctccaaccacagcctagccccacccatcacagcatctggaaagtgtcccctcctgacttggatatagatgacactcggtatctcgtacctatcctaagtgattctgatttcagtggagtaagtccaagacccatgactttgc

SEQ ID NO: 471283 - DNA, 644 bp, Homo sapiens
gggagctcagaggagagcctgctgtcggctccaggaggacggggatccctgaccgtgccactgccatgtatatcatccgtgcctggggctgtgtccacatggtgcagatgctccttgaatccttgttggagggcccgtgggtgctttatctccgacagttgtcgcccaaagcactgtggttgaaagacggcaaaagtcagtgcccatggtcccagggtaccttccttcttttccgggagctgctactctgccgttcaccaggtctcctttcactgactgcatcattgggtccttgccatgccctcaaccccaccaaggggaaccctcctgtatgtcctgagttccctccatggattcggcagcagctggcccaattcttccagggcagttctggctctgcgtgtgagctggtggtgctcctgctgagccccttccagtcccttcctttctcaggtccctgtgcagtcagcttctgtatctgtagcatcctgagtgtctttctttattccttgccagtcacatacgatgagaatcacaggatgccagccccagaacctccactttatagcaacgtagtgataatcaagtgaggtgataaaggagaagggcttcctgcaagacaaacacagggcacaggcaatgcc

SEQ ID NO: 471284 - DNA, 2759 bp, Homo sapiens
ggtttcagatgaagaaactggtttcttgtgctgctgttttgcttcttgccatgttcagtcccctcagatgccagccagacatccggcagggggctggagagggtgatggtgccagcagtggtggtaatattagttctggtggtgaaggtggtggtggtggtgagagtggtggtggttgtaatggtgatattagttctggtggtgatggtggtggtggtagtggtgagagtggtgatagttgcaatgatgataatagttctggtggtgatggtggtgctggtgttggtggtggtaatgaaggtggtggtgatggtgctgctcgtggtggtgatggtggaaataatagttgtgatggtgatggtggtggtgagagtggtggtggaggtggtgatgatggtgatgatggcactgtggtggtgatgaaggtggtggtggtgatggaagtagtagttgtggtgatggtgatgttggtggaggtggtggtggtggtgatggtgttggcgggggtggtggtgctggtaataatggaggtggtggtggttatggtgatgatggagctggaggtggtgatgcaggtggtggtgatggtagtggtggtggtaacggtggtgataataattggggaggtgatggtggtggtagtagtggtgacggtggtgattatagttatggtggttacagtgggtgatggagaggatggtggtggtggtgatggaggtagtggtggtgacagtggtgataatatttgtggtggtgatggaggtggtggtgatggtggtggtgctggtgatggtgttgatggagctggaggtggggatgatggagatgatggtggtgatggagatggtggtggtgatggtgatgataatagttgtgatggtggtggtgatggtagtgatggaggtggtggtggtgatggtgatgataatagttgtggtgatggaggtggtgatggaggtggtggtgatggtggtgatggagatggtggtggtgatggtgatgataatagttgtggtgatggaggtggtgatggtggtgacggaggtggtggtgatggtggtggtggtgatggtattgataataactggggcggtggtagtcatggtggtgattatagttatggtgatgacagtggtggcgatggagaggctggtgatggtggtgctggtgatggtgatgacagagctggtggtggtgacagtggtgataatagttgtggtggtgatggaggtagtggttatggaggtggtggtgatggtggtggtggtgatggtgttaataataactggggcagtggtagtgatggtggtaattatagttatggtgatgacagtggtggtgatggagaggctggtgatggtggtgctggtgatggtgatgatggaggcagtggtggtgacagtggtgataatagttgtggtggtgatggagttgatggtggtggtggttgtgatgatggtgcagtcactgaacaaatctttaccctaataatattaaataattattcataattaataattaagtaattattaaattatttcttttttgaaccatagttttcatgtggccccaaagagaaagttctttattgtattctctttcatcttctgaaaattcaaacacattttaaccttcaggacttccagttttgaactcttcttggtcgtctattctattcctgagtgagaaaaaaggctttgaaggtcgcctttgatagagaaagatacagcaggaggagataacaggtcattccgacagtgagacagggaatagaaaattgctctagatggctgctctagatggaatctcctctcttggcctgccactgccattcattaattcattcctccatgtacaggttcttactgactgccctctctgcacctggcactgtggcaggcgctgaggacacaaggctaacccaagttcccccaagctgccacacgtgcaggcctctcctgggggaagtgcaatggcctcaaccttgtacctggaatccagtgggagaaatgtctgttattcatctatggcttcactgtgccggttggctgatctatataattaggtccctgctatggtttaaatgttcattccctctgaaactcatgttaaaacaatccctaatgtaacagtattaagagttgggcctttaagaggtgattgggttatgagggctctgccctcatgagtggattagtccattcatggattaatgaattcatgagttattacaggagtgggcttttttatagaagcagtttggttttcagtgcaaccctctcgccctgtgatgtcttctgccaagttgtgacgcagcatgaggctgatcggatgcggctacctgatcttggacttcccagcctcaggctgtaagaaagaaaccttttttatttttaaattacatctcaggtatcctgaatagcagcagaaaatggactaagtccccaaacccagaaatttaataaaagaaaaaaatcaaaccatgcacataattcctcaatggaactcttaatctagtaaaagattaagtgacagtccacagggcccacagtctccagtatctttgatgtgtcaggcttaggcatgggaggagtgtttggttttgcagcacaaccattttttcaaaaataattttacatggagccccaataatacaagcacaaacaaactagaggcgctctctgattgcagggcaggctgtgaagggttggagggaacaccccactcatcctgccatggcacctgactggctggcctcc

SEQ ID NO: 471285 - DNA, 655 bp, Homo sapiens
tggagaaaggtgaaggaggagcaaaggcatgtcttacatggtggcaggcaagagagcatgtgcaggggaactgccctttataaaaccatcagatctcatgagacttattcacaatcatgagaatggcataggaaatacttgccctcatgattcaattacctcccactgggtccctcccatgacatgtagggattatgggagctacaattcaaaatgggatttgagtgaggacacagccaaaccatatcagggcggcacacaggccatgtacttggcattcatccttttagtggatgccaccgagtcctgggggcgtctgaaggcaccacgtcactgtctctgggcgcaagggcatgttgttgcagagagggcaacagatgtgcatgacaggaaagtaagctccgggatctccttacaactgatcttgtctcccaacagattcccttcgccgccgccagattttacttctgttattaattcctagtttcatttcattttaatcagaaaaagatactttgtatgatttaaatcttctaaaacatgcaaagacttgttttgtggcctaatatatggtgtatcctgcagaatgttccatgtgcacttcagaaaaatgtgtcttctgctgttttggggtagagtgttctgtatgtttatt

SEQ ID NO: 471286 - DNA, 658 bp, Homo sapiens
tctcccccgagtcattaaccaatgggaggctttgtcaggatagctgactctgctttcttctactttattctgtctgcattggggacaaatgtggccacagtagctctgggttatttagttctaactgaacacattttggcacctggaagtggaaagctgcatatgaaagccaaacatgtggcaatgactttgggatcaaatcagagtcggaaagtccttataaagattgtgagtggaaacgtgatgacccacaaggaggccattgagagaaactacacacttcaggaaggacgtttaaggacgctcctctgtaccgtgactgatttaacacgacattttcaagatgcaaccacattctacacgtggcccttgaacaacatgggggttaggggaaccaatcctccatgcagttgaagattcacaaataacttttgactccccaaaacttaagtactaatagcctactgttgaccggaagccttacttataacgtaaatagtcaattaatatgcattttgttgttatagcattatatagcatatgcttacaataagatatattttagaggtagggctgatggtatttgctgacagtgtttgctgacagatgcaatgtgtggtgtaagaaaaaaatgacaggtcaaggatgactccaaagg

SEQ ID NO: 471287 - DNA, 2663 bp, Homo sapiens
gcagattagaatagcttctgttcaagtgtttgtgatgtcgccgtgtaagccctcatcgtgatgctttaaaagtcatcgttaagtcgtgttacctgctcttcatccatgtccctgcaaaggacgtgaacttatcatttttatggttgcatactattccatgttgtatatgtgccacattttcttaatccagtctatcattgatgggcatttgggttggttccaagtctttgctattatgattagtgctgcaatgaacatatgtgtgcatgtgtctttatagtagaatgatttataatcctttgggtatatacccagtaatgagattgctgggtcaaatggtatttctggttctagatccttgaggaattgccacactatcttccacagtggttgaactaatttacactcccaccaacagtgtaaaagcattcctatttctccacatcctctccagcatctgttgtttcctgactttttaatgattgccattctaactggcatgaggtggtatctcattgtggttttgatttgcatttctctaaccaccagtgatgatgatcttttcttcataggttttttggccacataaatgtcttctttcgagaagtgtctgttcatatcctttgcccactttttgatggggttgtttttttcttgtaaatttgtttaagttccttgtagattctggatattagccctttgtcagatggatagattgcaaaaattttctcctattctgtaggatgccctgttcactctgatgatagtttcttttgctgtacagaagctctttagtttaattagatccaatttgtctattttggcttttgtggtcattgcttttggtgttttaatatgaagtctttgcccatgcctatgtcctgaatggtattgcctaggttttcttctagggtttttatggttttaggtcttacgtttaagtctttagtccatcttgagttaatatttgtataaggtgtaaggaagggatccagtttcagttttctgcatatggctagtcagttttcccaacactatttattaaatagggaatcctttccccattgtttttgtcaggattgtcaaaaatcagatggctgtagatgtgtgacgttatttctgaggcctctgttctgttccattggtctatatatctgttttggtaccagtaccatgctgatttggttactgtagccttgtagcatagtttgaattcaggtagcatgatgcctccagctttgttctttttgcttaggattgtcttggctatacgggctcttttttagttccatatgaaatttaaagtagtttttttctaattctgtgaagaaagtcaatggtagcttgatggggataacattgaatctataaattactttgggcaatatgaccattttcacaatattgattcttcctatccatgagcatggaatgtttttccatttgtttgtgtcctctcttatttccttgagcagtggtttttagttctccttgaagaggtctttcacatcccttgtaaggtgtgttcctaggtatttaattctgtttgtagcaattgtgaatgggagttcactcatgatttggcgctctgtttgtctattattggtgtataggagtacttgtgatttttcacaatgattttgtcttctgagactttgctgaagttgcttatcagcttaaggagattttgtgctgagatgatggggttttctaaacatacaatcatgtcatctgcaaacagagacaatttgacttcctctcttcctatttcaatacctttatttctttctctttcctgattgccctggccagaacttccaatactatgttgaataggtgtggtgagagagggcatccttgtcttgtgctggttttcaaagggaatgcttccagcttttgcccattcagcatgatactggctgtggatttgtcattaatagctcttattcttttgagatatgttccatcaatacctagtttattgagagtttttttttttctgcatctattgagacaatcatgtggttttgtcattggttctgtttatgtggtggattatgtttattgctttgtgtatgttgaaccagccttgcatcccagggatgaagtggacttgatcctggtagataagctttttgatgtgctgctggatttggtttgccagtattttattgaggattttcgcattgatgttcatcagagatatcggcctgaaattttcttttttcgttgtgtctctgccaggttttggtatcaggtttttccttcatttcaaccttggtgaatctgatgattatgtgtcttggggttgctcttctcaaagaatatctttgtggtgttctctatatttcctgaatttgaatgttggcctgacttgctaggttttggaagttctcctgggtaatattctgaagagtgttttccagcttggttccattctccccatcactttcagtggctagtgagaaaagagcatgggcagtgggggaatagtttcagcaaatgtatgcaggcaggagtgaacatagtttatagcacaaggcagaggaaactatcctggttagagcaggtgggctactttggggagggactttgcaataaaacctctgggggcaagactttggactggcttcagtaggacttaggcatcagctcaagttctt

SEQ ID NO: 471288 - DNA, 559 bp, Homo sapiens
atttgggtgctggctgtctctgattgtcaagctcctctcccgaaatggcaactccctctgtctgcctgaaacgtgtacaaacacactgcggtaccaagatgaagctggctgcagacaagccccatactaggcctgaggcccaaagattcctgcggcaaccctgcactggttcccagcttcaaccaaaccccaccctccacatggccctggacgaccttcttcgtgcatccttcacttgtgaagagcccctcaaggaggcggcatcaccttcaggatgtgatggacgcactcacaggcaggaggggaggcagaacactagtccaccatcttctctgtttgctggctctctgagtgaagtcgctttccttaccccaacaccttgtctctcaacttactggacttactggctgttgggcgatgactgggagctctacctgtaagggcctcaccctcatgccaggctccagcttgacattcaggtctcagctgaagtgtccccagggcctccccgacctgtccatggccctgttgaatcctctgcctggggcccatcgctgcc

SEQ ID NO: 471289 - DNA, 488 bp, Homo sapiens
tgattcctgaatctccagtcccagggaggctgctcccaacccaacatggccacacagcatactacagggcaggtcaccaaggggcccctccccaggagctgccctcagtggaaggaaactgacttatgctacatccgcctctatggcctgtcactgtggagggccaaaggtccaagcccctgcctcaatgtggagcgcccatctggcaatcccagctccagagccctagtgggatcagctgggctctctgtggcagctgcatcagagttcaacttcgctttctgcccaatcctgctgcaagacaatggaggtggaattatgaaggcgtctcctcagggagagctaaaacctgagcctgccgttcagaggcagaagctgcatttcatcctcatgtccaagaagcaagctgggggccagaaatggggccaggccaagagggttggaagccaaggaacgggttaaggatccagtcaacttggcttggctgt

SEQ ID NO: 471290 - DNA, 443 bp, Homo sapiens
tattaatgatgaagcagggacaacagggtaatggtggtggtgatggttcggttgacaatggtggtgatggtgatactcgtgatggaggtgatggtggtgttgaaggttaaaatgctggtggtgatagtgatggtggttatatggtggtggaggtgtggtggtgatggaggtgatgatggcggtgatgatggtgacagtggtaatgaagatggggtggcgatgatagtgatggtaatggcagcggtggtagcaatgatggtggtgaatatctacactaagaatgcaagaggcaaacccacaattcctcccacagtgcatcatgctttgtgcaaagcactctccgtcacagagatttccttgtcccttctctcagtggtcaccttaagaagctaggcctggagacgctcatctggtttgtggtggggcctggaccaccacccact

SEQ ID NO: 471291 - DNA, 2505 bp, Homo sapiens
cctgaacaattaggtgaagagaggcaggaatggcattccagacaaagggaatagcagcaggggggaacacagagagccaacacagctggagctgcaggcagaagggacctaaagaattcattgagtgtgtctcccatatccgactgttgtcctggctgctgctgggttccctcactcacaatgcagtgtgcccaaatgcctcctctccctgcctgcccattcctctggatgcaggctcccacgttgcagaccatcttattgttatcctgattggatttccagagcaatcaaaggaggaggatctccgctgctgctgctatgattatgaacttctgggcacctccgtgctgcacatgtgctccctcttccacgcgttcatctttgctcagctgtggacagtttattgcgagcaaagtgccgtcgctacaaatctccaaaatcagaatgaattcagcttcacggcgatactgacagcactagaattttggagtagggtgacacccagcatccttcagctaatggcccataacaaagtggcctcaaagcctgaaaagagcctcacgttttcaagctggcttatagggacctatgctccccaatcttcaaatccagtactgttgaatgtagacggctaccaagaaaggggctgttccagagctcattggaaaatgtctgggatggtagaaatggtgtgtctccatgtgattagtttaatggaggcattgcaggaatgcaattcgaccatttttgtcaaggtaggaaaaccttatgatttttaaagaccatttcttactgctaaaaacaaatgtggatttatgttgaagataaatctgctatgaagagtcatgaagatgtctttgtgtacatatatgttttcatgtatgttgggcaaatacctaggagtagaatgtctgggccatgtgacagatgtatatttacctttaaaaaaattgttttccaaaccattttccaaagctgttgtgctctgttacatccagtatatgaacagtgtatgagcattcccagttcccccacatctttgtcaacacttggcatagtcaatctttaatattaattattctaagagttgtgtactggtatcttgttgtggttttaaatagcattttcctgtttgctaatgacattaagcatcttttcatgtacttatttgctgtccatatgtctgcttggtgaagtatctgttaaaattatttgcccattttttattgggttgggttttttcctgattactgaagtttgagatacaagtcctttatcagatcaaaatgttaatttccagtttggtttcttctttgccccttaagttgtttagaagtgtgttttttaattatcttttagctgtatgtctttgttgttgtgttagtggttgattcagagtttatagtatatatttttaatcacagtctgccttcaaggaatattataccacctcatatattgtataagaactgtacaataatatacctccatttcccacctcctgactttttgctattattgtcatacattttctatatattttataaagcaaatcatacattattatttttgctttaaacagttgactatctcttaaagagattttaaacaagttttatgttcagttatatttgctataattgccatatttatatttgccattttaatgctcttcatttcattctatagatctaaacattcatctttcatctttccttctgcccaaaggattttctgtaaagtctcctgtgcaggtcagctggtgattaattgttttaggttttgtatgttttagaagctttattttgctttcaattttgaaagacagtttcactgggtattgaattctagatggatggtttcggaggttttttttttttttcaatactttaaagatattgctcctccattgtctttttgcttatattgtttccaacaagaaatctgtcattcttatcttttttgtctgtatgtgatatgtcttttttcctctgttgtctttgccactatggttaagcaatttgatgatgctatgccttggtagagttttcttcatatttctggtgcttgggtttggtgagcttcttgaatctctggatttatagttttcattagatttggaaaaatatcagccattgtttcttcaaatattttattcagtgcctctactcaacatgcccaatctttcttctaccttcttgaccatattgaatataggtatcataactgttttaatgtccttgtctgttagttctgttatctgtgtcatttttgttttattttctgttaatggatttttctcctcattcgtgtgtttcttttgttgttgttgtttcttagcatgcctggtaattttttattgtattcttgacattgttaatttgactttcttgggtgatggatatttttatattcatataaaatattcttaagctgtattctgtgacatagttacataacttacaaatatctttatccttctgaggctaacatttaagctttgtt

SEQ ID NO: 471292 - DNA, 850 bp, Homo sapiens
tacaccgaagatttatgacagtggaatatacttggttaggaagatggaaatcagatcccatctccttacacctaaagaattcattgagtgtgtctcccatatccgactgttgtcctggctgctgctgggttccctcactcacaatgcagtgtgcccaaatgcctcctctccctgcctgcccattcctctggatgcaggctcccacgttgcagaccatcttattgttatcctgattggatttccagagcaatcaaagctgtggacagtttattgcgagcaaagtgccgtcgctacaaatctccaaaatcagaatgaattcagcttcacggcgatactgacagcactagaattttggagtagggtgacacccagcatccttcagctaatggcccataacaaagtgatctcagttgtaaggttatataaatggatcggggatatgttaccttataagctggatgttctgcttgcataagcattttgattaaaaataagcattttgattaaaaacaaaataatagttcaagagatctattgtacgccgtggtgactacagttaataacaatatattctatacttgaaaattgctacgaggagatttcaaatgttctcaccataaaaaataaatttggaaaaatatcagccattgtttcttcaaatattttattcagtgcctctactcaacatgcccaatctttcttctaccttcttgaccatattgaatataggtatcataactgttttaatgtccttgtctgttagttctgttatctgtgtcatttttgttttattttctgttaatggatttttctcctcattcgtgtgtttcttttgttgttgttgtttctt

SEQ ID NO: 471293 - DNA, 824 bp, Homo sapiens
gtaaggtcaccgctacatgagagaagaggaacgggtgtttttgaatgtccttctgcgatgggagtgggtctcacatgcagaagccctccccttgttactagcaattgaacaaagaaagggatctctgagataatcaagtccaaatcttctgcaccatcactcccaccattttactttattattattattattattattattattattattattattattattttgagatagagtctcattctgtcacccaggctacagtgaagtgggatgaagtcctcatcatggaattcagacacagaaggaagagaagtcttcttgggcaggtggatgaagatgaagacaccaggtcagtgcctggattgaactgggtccagcagcatatttcaagaatccagaacagagacaggaacacagcaggtgctcaagacatgttagttgaatgtctccccttcccagaccccaaacagctttgtgtgcgctatcaagtgtgcactgtcgataaagtgcgcactgtcaataaagtgtgtgctgtcaataaactgcgagctgtcaatatagtgcgtgctgtcaataaagtgtacgctgtcaataaagtgcacactgtcaataaagtgcacgctgtcaataaagtgtgctctgtcagtgaagtgtgcgctgtcaaagtgtgtgctgtcaaagtgcgcgctgtcgataaagtgtgcactgtcaatagtgtgtgctgtcaataaagtgtgtgatgtcaatagtgtgtgctgtcataaagtgtgcgctgtcaataaagtgtgcactgtcaataaaatgtgggctgtctaaatgaagtgtgc

SEQ ID NO: 471294 - DNA, 721 bp, Homo sapiens
agcagtccagagctaatggagaagctctttggtgttggagactcaggatcctacggaacatgttgcatcaccatcaaacatggtggagtatgtttcttagaaagatggaggaagaaattcctggcaggtcatggtggctgatgcctgcaatcccagcagttttggaagccaaggcaagagaattacttgagccagtacttccagaccagcctgagcaacacgctgcacaaatggagaaaaacattaatgattttttgtttgtgtcaagcaacactgaggacaatgaattccctatctttgctatgatgaacttccatataatatcttgcaagacaaatcaggatatattaatactaggaagacagggacaggccataggaactgtcagaggccacttccgtagatgcaaagcctgagatgtgttgcaaggttataatgtgaattgaaagaatgaatatgcgcaaagcctttagaccacagctgctatctgttaagagaataaaaataactcaaccacataaatatgacataagagaaataaatgtagaatatgatgtcagaagttaatgaaaaataaaaccaggtaagggaatagagaatgagagatgggagccctggggaatttatcatatagaatattcagggaagcctttctgagaaaatgacatttgagcagagaccgaaggaagggaagaaatacctcattcaacatacaaaaaaa

SEQ ID NO: 471295 - DNA, 680 bp, Homo sapiens
tctgtgacaatggaattcattcgtgtatacctccgttcatgagcgtgcttatctgctgatgattttgaatgtggcagtggcagcgattcacgagttccccacagatctgttctccaataaggagcgacagcacggagccgtcctgctgcacatccttggtgctctgtatatgttctatgccttggccatagtgtgcgatgacttctttgttccgtctctagagaagatctgtgagagactccatctgagcgaagatgtggctggagccaccttcatggctgcaggaagctcaacgccagagctgtttgcgtctgttattggggtgttcatcacccatggggacgtcggggtgggcaccatcgtgggctctgctgtgttcaacatcctgtgcataattggagtgtgcggactgtttgctggccagcagccaacgacggggctctgctggcaggtggtccgtctgacgtggtgggccgtgtgccgagactccgtgtactacaccatctctgtcatcgtgctcatcgtgttcatatatgatgaacaaattgtgtggtaagtttttcaagtgtagttttcattgttcttttttgttgttgtttccagtatccttatttgttgggttccctgaatcgttttaaaaattatttttataaacttaagcttattaacttgtgaaagtg

SEQ ID NO: 471296 - DNA, 1068 bp, Homo sapiens
gcccaacatagggtaccctggacttcacctcgatgacgatgatgatgatgacgatgatgatgatgatgatgacgatgatgatgatgatgatgatggcagctaccacgggctccgggagtctacagaggcccacccctgagggcacctgcttggtgatctcatctcctcctagcccagccacagtgtcagctcccgtgcccagggtcccacccccaccagactctaccaccctctccccccgcaccccacaaccgcccttacactggcatgggaaagcctgtgaaggtggcgatgacaagcaggagcccatcctggaagatctggacagaaacagattaagaacagctcttctggccacaaaagaggtagccctcaagggtagacacccaacaatgaagctacacagaaggacaccgggccagcgcatcctcctctgtgcacctgcagtgcctcctgcggggctgctcactggggagccgctggagtccctcaatgtcacctagctttccctgtgttgagatcttgtcctctctactctagtataagctactcaatgacagcggcttgcatcttatactccccactacctgtccacaatagagctggacacacacgagcaggtgcttgctacacagacttgtgaaatgaaaagggggcagagattctcataggccagggaggaagatgctggaagggaaggctggccacagaccccacctggcctgagagccgggggctgtgcagtacaagggagaggcctggcacctggatccaggtgaccccagtatgtttccagctgcccaagagatcttaggaagccactaaacttctgaacttcgtgtatcttgtcttggcaaaaacgtgataaggattaaaatgtgagatacatcaaaatgcactttcattccatcattcgacccatatctatgcagtcctttctatgggccaggctgtattctggaaacagtcaatacaaagcataatgcaaaagttaactatttttaaagatattatcaagttccctccacttccctttccacaaaagggacaaggtgaggccttcctgtc

SEQ ID NO: 471297 - DNA, 1223 bp, Homo sapiens
cattttgtaaaccagcaaaggccgtgggacaaagcgaaaatgcgttgccgggtttatcctggtcctggcttcagtgcctttggattcggaatatctcctctgcaatttgaagctgatggctgctggtccaggggccacactttgaggagcactgggccaagggatgctatgatgacagtcacagcactaaagcagcagaaatttgtttccggctcgggcttctggtctaccaagagatgtacgagctcttgtccccaactggagaactcggtgtcctttggtcattacccagataacatcagaaactgcgagtcaagcaatcgggccattgcaaataggttcagtccctcagactcggttctgaaagcagattctctagcaaattcttactataggatgaagatatttcaggctaaaaccgtcctcctctgggtcatgcatgtgagcagtcatagggtcattcaagccgagagaattctaatccctcaggctgctggtaaataataatgtataaacttattattagtattctgtttcaaaggccagtgatcaaaagacggttagcagatggccagaacggtgagctttagaactcaaattgaactgcttttgaattcacacttcacaatggccctctgtggatctggacttcccatcttgcattcttggctctgcaaaaaccttctagaaccttctctcagtcctcttacaaatgcccccactgcctcgggacacatctgtacgtgcaggctgcgctttataatgggaggcaggaggagtttcctgcaaccatttctcagagtctcagccttgctctgccggaagagagcctgaagtggaaaccctggtgtctttgaacagaaagtgtctggccttgagacacatacatttgggacatttgtgcccttgagcaaaacttaatatgtggagccccagtgacctgtaagagaagaagcctttctgatacagcaataattttctccttgccacaaagcattaatattcagtagctgagttttataacgaagaaccatatgatgatttttagaagcattcacctggaaccaaggaagaaactgggggtgacatggcctgcccaagatggagctgctactggtccctctcattttcccattgtctgccctctttgccatagtttctgtcccacattcccctacctcctatcaagataccaaaatctcatctcatatagtttcacatcc

SEQ ID NO: 471298 - DNA, 1689 bp, Homo sapiens
acctctcacatgaggaaaggagtatgaacagccttgaaattaaattgcaaaaccctatggaaataggaagggctcctgtcagtgcagtaaatcatcttggagggattcgaatggggttgggagaggttccctgtactactgctttctttgacttgaactccaaatgcgtcctccaacttagtcccttctcaggagctggccttgacattcccatccaaataggacgctttggtcctcctgacatgccctccctcattgattttgcaccagagaaagtgctataccccaaggtctcccttagcaaacctagtttgtccatgcttgtctctctggccccctttggttcgcctgcccatgtggctacccaggtcttcctccctgaaggtgaagccttaggggaccagggggcaagaattgaacctgggcttaagaatctgggaaatataaagtttcctgtgagccgctccgtcacaacacatatccggttcttcggattctcaagacagaagcctggaagccaccccagttcctccatcttctgctgccctaagccctcttccaatcagccagtgactccagtcaattccatctcctacatttcctccagatttggacttcaactagtggagcccctgaaggagaatgagaagggtcacatttgtgttttgggcaagatctgttctggaagtcctgtgaagaatggattggaaaataatgagagtggaaagaagatggtcagggacctcaatggaaagcatcaaggtaaagggcctattaatgaaggtatgagtgcaataagggaagcaacaaggggtgctgaggcccccggggacccacagcagcaggaagccatcaccatcctgaggccagaggggcagggagagggagtggtgctcgtagaacccaggtggaagacaggatgtggcaaggacccagctgcaaccataccaaagaggatagcacagtagggcagtgtttctcaagcttgagctcatccgagtcacctagaaggcccagattcctgggcccaccccaatgtttctggagtgtggcccaagaattgcatttctgagaagttcctaggtgatgctgctgctgctggttggcaagccacaccttgagaacttctgcctcaagggatggggaagcagtacaatgaacctgggtccctgaatgactttgtggagctgggctggtctaccagtctagaccaaactcttaagtaagagagaaatactcctttgttttagggttgccagatctaggaaattgaaatgtagcattcccaattaaattagaatttcagataaaaaatgaatgaattcaaatattgcatagggcatatttaagctaaaagttgttatttatctgaaattcaaatgtaattgagtatcctatattttatctggcgatccaattctttgttctttaggtcagtatattttggggtctctttgtcacagcagattaaccttcctcatcaatacaacatcaagacccagggctaagtactgggtctcacacagggtcctgagcatcttgcctgctttggtgtccccatagtgatcatgaggatcctacctgctctttcctcttgtcttctctggactctagttctcttaactggatttgtgcttttctctctgtaccattgtcttgctccagtaactgcctggaagctcagtctcc

SEQ ID NO: 471299 - DNA, 917 bp, Homo sapiens
taatgatcctcctggcagggggccgtgatgattaagtaacataatgcggatgaagttctcagagcggtgcctggcagcatctgatagaatatgtcatcgtttcttcctgcataagcgggaaagaataaacgccagggactgcctgagccccggttacccacagcggtcatctgcttgccagtccaccctctggcgattcctccctttcctgtctcacatccccactccctgccaggccctcaatggattggatgatgcctcccacgttggtgagggagaatcttctttactcagtctactgattcaaataataatctcttctggaaacaccctcacagaaggtcacaggaagctagaagcagcatctgagtcagtagtttacaccaacttgaggagagctcccaagggcatgaaagagaggacggtggaattcccagataagaagaagaaaggcagaacaaacctgcaggtccctactgtggtggtcactggtgtggatgccagatacatccaactctctgccttctgtgacatcagtcctgttggattaggtcccaccagtatgacctcacttgaccttaattacctctttaaagactctatatccaaatacagtcacattgtgaggcctccatctgagaagtcccagacacaaagccatgctccttccttgcctacacactgcctcacccccacagcagccctgcagctcctatggagagcgtcctccatgatctgcggcagtgcttgtcaaaatgcagatttccaggtcctactcataaattctgggggtgcagccctggaatcagaattttgatataagctctgaagatgattctatagctttgggagcccctggctacagtataaagctcaaaagtctggatggcacctgtgacctactcagttgggttctc

SEQ ID NO: 471300 - DNA, 827 bp, Homo sapiens
ggagtccagtgatcctcctttcgcgtggggaaggatgacgggtgagcctctctgggcaggagcactgggctcgcccctgggcagcttgtcttttacagaaaactctaagcagctccgctctccagtctccagcccatggaagccagcggccggaagcaggcacactgacggtaacaagcaacatctggcagggacagagaaggcagaaagctgtgaaagccagcacaggaactcatcacatgcgagtgccccacccattctgaacgcgtgccttggagacctacgagggctcccctgtatcccagtcctgggcagtggcacctgggcgatttctgaggaggaccctgagtcattacagaaaggtcccctggggctcctggcgctctccctctgcagcaggaagtacccagtagagtctatccttgctgtcttctctactcacgagcaaccctgaagattgagcatgcagtgatttgcccattagttggggcaagaatttggatgccaggatgcccttgagtatacctgtcaatgaccagacctgccctttagtgtggcattgttgatttctgttattcccatgaccgttgatcatggcatctaacatttttgagcatctgctgtgttccagatgaaagctcaactgaggtcaagatctccatggtttggggaattatattccagaataacctgggtctcctgtacagtatgggaagaatttggatgcataaaaggaaaaaccttcagttgtctggaaaattcaacctgtggaacatttatcccaaaagcaggggaattttaaagaccctattaactgcaggatagag

SEQ ID NO: 471301 - DNA, 599 bp, Homo sapiens
ggcctgtaccaatagcttggactatggcctgcaaaatgctcaaagccaccaggctgccaggtctcctactcccatggcagagcgataagtctgtagagtttaaaatcctgctcaagaaggctatttggaggggccatgggatgttccggagactgtgtgaagtccgtgggcagcaggaaaaaggggaaaatgcattgcccacctcaagatgtttgcaactgcagggccgcagtgggagttgccaaagaacacgaggccgacatgggccagaaaccagaaacagaagtgagcaaaccagggaggaaaaaggagggagagaaggacactgtctgctgtccccaaggggggtgatcttcctgcaggtggctgtggcaagagcaggggcagaaggctcatctgtgagtcaagacttaagtgtggattggactggagatttgattttctgagtggagaccatgtttgcaaacaaagctagcttcaggatgatgtaaatgtcttggaactagacagagctggtggttgtatatcactgggaatgtcctaactgtccctgcattgtacccttgcaatcgtcaatgtttaattttatgtcatgtaaa

SEQ ID NO: 471302 - DNA, 705 bp, Homo sapiens
gcagtgaagacctaaccctgagctctggatggagtgagagacaaaagcagtgactggggaactgggtaatgggcagagactggaatagtttggagggctcagaagaagataggaagatgagagaaagtgtggaacttcctacagactggttaaatggttgtgaccaaaatactgatagtgatatggacagtgaagtccaggctgaggagatctcagatggaaatgaggaacttattgggaattggagcaaagatcacttttgctatgccttagcaaagaacttggctgccttgtgctcctgccctagggatctgtggaactttgaacatgagagtgatgatttagggtatctggcagaagaaatttctaagcagcaaaatgttcaagatgtggcctggctgcttctaacaacctatcacatatacatgaacaaagaaatggcctatagttggaacttgtatttaaaagggaagcaaagcgtaaatgtttggaaccatttgcagcctgctcatgtggtagaaaagaaggcccatttttccagggaaaaattcaagcaggctgaagaagtgtgcataagtaaaaaggagccaagtgctaatagacaagacaatggggagaagcccttgaaggcatttcagagaccttcacagcagcccctcctattataggcccagagtcctagaagggaagaatggttttgtggga

SEQ ID NO: 471303 - DNA, 951 bp, Homo sapiens
gtcagccccagtggaggaggaggagcccctggcctttgaggcctgaccttcccggccctttgccattgatgttggcaaaggtggtatcagctaaggaggccgcccaccctggggggcggtatccagtgccctgccatgtgtgcccacaggtgactcacaaccaagagaacgtgtttgacctgcagtggctggagctgcccgacgtggctccggaggagctggaggccctgtcgaggagcatggtgctccacctgcggaggctcatcgaccagcgggacgagtgcaccgaggtgcgtccgcggctgatcgtggacctcactcaggaacgggactacctgcaggcacagcatccacccagccccatcaagtcctccagcgccgactccactcccagccccaccagcagcctctctagcgaagacaagcagcacctggccgtagagctggccgacaccaaggccaggctgcggcgcgtcaggcaggagctggaggataagacagagcagcttgtggacaccagacatgaggtggaccagctggtgctggaactgcagaaagttaagcaggagaacatccagctagcggcagacgcccggtctgctcgtgcctatcgagacgagctggattccctgcgggagaaggcgaaccgcgtggagaggctggagctggagctgacccgctgcaaggagaagctgcacgacgtggacttctacaaggcccgcatggaggtagggagccttgctgtgaggcccctggatggggctgctggaaattcctgagaagcacattcagactgacctgtccttgggggcttggaggagcgggagccacagctgtctcagcagatgcttccccggcacctcagcctgcctgggcttcccagggcccccttcttgctcctcttcatctcccagtcagcaggggaggggaaggagtgtaattgattgatgt

SEQ ID NO: 471304 - DNA, 574 bp, Homo sapiens
tctggggtatttttttttataggcaccggatgggggaaggacaggctggcataggagttttccctggtcgtctgctccctgttcctggggtgattgggtcagcatccacctgcccaagagttgagagcctgataaaacaatgttggggtgtgggttctggactgatgggtctgtatttgaaaagaaagctagtgggtgaattatttactatctctaggaattggctctccttgggatcggcagtccttctaagggcagaaggcctcagatgtcctagcactatagtaaagaaaataaaagacatggctaatacagggaggaaggaaaagagagctagagaaattaagaatttgagcatgacaagtatgggtcctatatttgaggacactgaacttactaaatcagtctgtgttactctgggcagagtggaaaataaagcaggtttggaattaaaagatctgagataggttctcagttctacctcttcttagctgtttgaaatcagacaactaactcttctgaatataaattactttatctatgagctaatgacaataatatctacttttcagga

SEQ ID NO: 471305 - DNA, 881 bp, Homo sapiens
taacaagcatctcatgtgatgcatggaagatattttaattattaactttaaaacatctatggttaaaattcaactgatgaaaacatcagaaagtgagcacaagcaagaatacattttaaatatttataattatcctttagggattaagattccccaatgttttacaagcataattttggaaggaggcttccattcagcttcccatttatcacaaacctttattgaaatcctaagaatgcagagagatgcatgtggttgcattaagcagctcgaaaacctggcaggagatattgaaggaaagactgaaaaagacataaaaatagacccttggaagttgtatgcccttacaagtgagatcaggttgaaaaaactaatcaaaggcagaaatccagagaaacaatcaaacaaacaaacaaacaaactcataagcgtatttactgggcctgagaagttgggctgcgttttgaaggactctcaaggtctagtggaaaaaagtatccaaggcctatgtaaggtgggaattgaacaatgagatcacatggacacaggaaggggaatatcacactctggggactgtggtggggagaggggaggggggagggatagcattgggagatatacctaatgctagatgacgagttagtgggtgcagcgcaccagcatggcacatgtatacatatgtaactaacctgcacaatgtgcacatgtaccctaaaacttaaagtataattaaaaaaaaaaaattaaacaatgtttataaataattacagttttgatttccttaaatatatagattgattttcattttaaaaatgttttaataagtttctaactagttcttataatctaataaaataaatttagaattataaaaaaaaata

SEQ ID NO: 471306 - DNA, 738 bp, Homo sapiens
gttcatctgtaaggtgacttatgtaaactccatgagaactcacactatttgcacaacaaagcttactttcttgacacttccctgcaagtcaatagaaggaaaactaacaaacagaaagcatatccacaccaaaaccccatctgtacgtcaccatcatcaaagaccaaaggtagataaaaccacaaagatggggaaagaacacagcagaaaagctgaaaactgtaaaaatcagcgtgcctttcctcctccagaggaatgcagctcctcgccagcaagggaacaaagctggatggagaatgactttgatgagttgagagaagaaggcttcagacgatcaaacttttcccagctaaaggaggaagttcaaacccatgacaaacaagctaaaaatctggaaaaaagattagacgaatggctaactagaataaccagtgtagagaagtccttacatgacctaatggagctgaaaaccatggcacgagatctacgtgacaaatgcataagcttcaaatttcatatccagccaaaataagcttcataagtgaaggagaaataaaatcctttagagacaagcaaatgctgagagattttgtcaccaccaggcctgccccacaagagctcctgaaggaagcactaaacatggaaaggaacaactagtaccagccactgcaaaaacatgccaaattgtaaagaccattgatgctaggtagaaactgcatcaactaatgggcaaaataa

SEQ ID NO: 471307 - DNA, 4237 bp, Homo sapiens
ttccctcatcccaagttgggtccttggcagagcagaagcaggattcacgagtgaggtgcagcagggcctcacttgatggatgattcggctgctctagagcgcagctgcgtcttctatgaggctggctatgaacccgaggccagggaaaactttgccaaccgggacgctgtgctgagcaggatacctgaacacaagagtgaccgcctcatcagtctgcagagtgcatctgtggtctatgacttactcaccattgctcttggaagaagaggccagtatgagatgctgtcagaggtacagctgctgagtctggttgacatccaggtggtgggtggcagttgcacggtgaccccagggaagcgctgggctctgattaaggccagggatacagccaggagcaaggtgtggcccctgctcacaagctgcccccagcctggagctgccaggcaattggagcgagcattcaccaactgtgttgtctcagatcatccgactaaaacggtcgatgttgtaggagaaagatgaaagctcacagcatctcaaggctgcctggcccatggttggatagctcagttactgaagataggggttaggtccaccctttgctgagtgtgggccctctctccctccctctgtccgaggccacatcctactctgggtgtcccacttgtcttacttcctcatttactggggtttttctgaatccacttttttttcctcctcatctgcctttccattttctcaggactttaatttaaaagagtaactggattttttttttaattgaagtacaattcacgtaacaaacctaaccattttaaagtgtagaattcagtggcatttagtacgttcataccactgtgcaaccatcacctcaaattgcaaaaccttttcctcaccctataagaaaccctatacccattaagcagccactctccattcctcactcccaccaagttcctgtcaactattaatctgctttttttttctatggatactgatttggggtatttcatataaatataaatagccaatatttgggctttggtgtctggcttctttcacatagcataatgttttcaaggttatccacattataacatggatcaatatttctttttatggctgaatagtattccgttgtacagatctaccacaatttgtttttccattcattagctgatggaaatgtgggttgtttctaccttttggctactatgaacagtgttgttgtgaggataactggattttaaacttcctatattacctttctctgagctccataaatgttagtaattatcatttttatcatttgtcttagagatatgttatatttccctgtcttcatttcctccactgtcagcagggcgatctttctgagacacaggaatagacatgccatccttctgttcagaaatattcgacagacccgcgctccttcttttttctctttttgttttgttttcctttccgcccataatgaaattgacttcactgtttatcttttcgccatatgcaatagtcctgcatgctccttggagaatcaaacaatacatgcaaaatatggaaaaggaaagaaaagtgccttagaatccagctctcctgagatagttgactaattgacattttagaggcaatctttacatctgtctttatgaataaattgtgcattatgtaagttttgttgaatgggacagtatcttgcacattttattgtggatattccctatctctcttctctcctccactggcacctcacccatctctgcctcctcaaccccaaactcaggtcatcaacatagtgtgtcacaggctctagagtcagagagctttggtttgagctctgggtctgctatgtaccagtcgtgtgagcctaggcacatcattaacctcctatgcatcagtttcttttcctgttaaataggggtaataattgtgtgcatgtatatctcagacagttgggagatgcatattcattaatccatgtaaagtactcagaacagagcccagcacttagagctcgttaagaggcaactgtatgctgctgcagttactaccactgtatatacaggagttactaggcacaggggaagcaacaaaggatacaaaaagatcttttgccttcaagaaatttccattctagttagggagaccacatagaaacaaacaaaaagataatcaaattagagaatacataatagtgcaaagcatgttaattggcaggtgaatggaataggccaattgcagcagagtttataggttgggagtgccagtaagagattatgaacaatggatatatgaattggctcttcaaggcctgataggcattaagtggtctaggaggagagagaccctcttcatccttaagcttgcggagctgtgaaggcactggacccaagggaacaggaacccagggcttgctctcatggagaagtgggaggagaggagcttggaaagaaagtgtggggcctgattgtcagcaccacaacctgttggcagactttacatgtgccccttgaagatgcgatctagacatatcaccgtgtggctcgtgtgtgagtaagtcctctttgcctcagaaaccttgctagatcttcttttacatgggtggaagcttttgtggacagaagagttcataaaaccatcagtcaattgtgagagagagaagaggtcttaactccttctcaccctgtccttgtgctttccttccttctcttgtccccaaccagcattaacacttacacgtcagggcacagcatgtcttcctgcttcttggctcctctccttggctgacctgggcccacgggcaccacagagggtgggggcgcctctgctgccactgccagcacatgttcctctctctcctgtccttggcacccttgtgcagtgggtgtgttgtgcagcgttgtgcagacccagccttttaataactgtgctcacaggggtaagtgggagcagagcctctctttctcaaggaagctggcctttctcttatgcttattcaagatggaaggctgctctcccatctcaagaccggccgcctctgtgtgcaccacatcatcgtgcctttctttccttatggacttttcagccagatgctggccaaagagcattgtacaaaggagacacagaccaaaggtttatcacatcctcattctgacaggtttaaatagaagcacaatgtttaccatatctccagtgctgtgagtttttgtgtttttaaagactaattgtgagccctgctgaaaggtttgtgtaggaaggaacacttctttttttcctcttcattttaaacagcagcactagttggcatgacaacctgcgctattaaaagtaaagcagcaagcaccgcttcctctgtttttcagaatgaacccaagctgctaaggaggtttgtctcttgaatttgactattaatggctccatttcgacaggatattatggggtccttttagaaggttgtgtgtgtcccccctccataggcaaggcagctttaaagacaggaatggtatttttatctttcctgttgaactcatattcatgtgtttgtggtaaatctcaacaacaccatagttctgtgggtagaactgtctgactagtgattgtaccaaaaggacatttacacctccctaacctaaatgcttatttaatcagggagcacagtgaaaagcattgcacatctaacaacgtctgcttgccaggcccaccatttgtttaaagttcagcattgcgtgcagtcctgcttgtactgtagaaacccagccttgagctacgtgccaaggtttctagaaggtatcagtgggcatgacacaaatggatccgtagacttctgagaaatcaaggcagggtgtttggctaatgctaggtggttcataacaacttgctgaatgcaccagtgcttcaaagccagtgtgcaccctcatcctgccccctttcctttggttttagaggtccctagatgtgcaaggagtgtatcttccccaggcaggcccaaaggttaaaggtcattgagtggaaaatgggcagcagagtaagggatgggcctggcttggggcagagcacctggacagttcccagctctggtccagctttgtgagtcggctcaataggaaccatctttaccattttttcatgacaccctgccccaaagaatgtcagcctctgacatggcccctgggatctccattctcaccattatggaaatgttcttttgaattaagcattgctttcttaacgtggt

SEQ ID NO: 471308 - DNA, 1349 bp, Homo sapiens
gggtttcctggtgaccactgggctgtgggtcacacagatctggctggaatcccagttctgcctggccgtgtcacctctgatggggaagcactctgtctcctcatctctatggtcggggagtaacttcccttacgggcttttggggatattaacagaggtcaacctggacagggcatggggcccccggggtgcaccataaagtctttccttctttcttctatcctcaggcgaggggtgagtggctgctgggacgtgctgaggggtccctgaagcagggcaggaagggcagagctagctgcagctgaggcagagtccgagtcccgctctgcatggaggaggaggtgaggggcctggtcagcatgggcatggctgggggcctctgtgaccgccaccactcttgtctttgcctccttgaccccacagggtcatcctcgggccctgggtccagccaaggcctgaggagggtcatgcatccctgtcccacttggtcacagcacaggaggctcccatccgccactgcctgaggcggtgcctgtggcccaagggctcgggttgtgggcctgctgggctggagcctgcatcgggacctggccacctactctcctaggagccttagagcctcctgattacattggtcttacctggataatccaagacactctccccatctgaagatccctcatcaaatggcatctgcacagccccttttgccagacggtgcccccatgaatgcaaaatgcagtcagatcccgctatcggaaagaggtaacaaagcgcagtcaggtcacgccatcagaaacaggtaacaaagcgcagtcaggtcacgccattggaaacagaaacaaccatcagaaacaggtaacaaagcgcagtcaggtcacaccatcggaaacaggtaacaaaacacagtcgggtcacaccatcagaaacaaccatcagaaacagaaacaaccatcaaaacaggtaacaaagtgcagtcgggtcatgccatcagaaacgggtaacgaagcgcactcgggtcacaccgtcggaaacagagagaaggatgtggaaataggaaaaatagtaacattaccacagagaaacctggcaggacatcaccttcaccagtcaatgaaggtcagcattcccagtgatgagtcgtgtgaataccaggtacccccagatatgatgggacaaacccaaaccgatgaactttctacaaaatacctgaccaatacccctcaaaactaccaagagcatgaaaaagaaaagtctaagaaactgacgaaaaccagagaagcccatgaagacatagctaaatattaggtggtacggggtcctggatgaaaggcaccgtattagtacgt

SEQ ID NO: 471309 - DNA, 618 bp, Homo sapiens
tgtgaaccgaggcacattctgatggaaacagattgtgtttcctgtgatgatgagtgtgtaggtgtgctgctgaatgacttggatgagattggtgatgccgttctttctctgaacctcactggcattatccctgtcccatatggaattgtgtcaaacctggaaaatacaactaaatatctccaggaatctttattaaaagaaaatatgcaaaaggacctgggaaaaattaagcttgaaggtgttgcagaagaaacggacaacctgcaaaagaagctcactaggatgttagcgagtacccaaaaggtgaatagggcaactgagagaatcttcaaggagagtcaagacctggccatagccattgagaggctgcagatgagcatcacagaacatgcaacagaatggtacatctttgctagaaatcatgcagataagagacttcacacagttgcaccaaaatgccacccttgaactcaaaaaaaaatcgttggtggccacccataccatgaactctaagacaggtcaatgttatgccagaataattgagcttagttatataaaaaagtatagttacattgaaacccacgatgtgaagtgacacagagatcacaaagcattctt

SEQ ID NO: 471310 - DNA, 1147 bp, Homo sapiens
ccaccagcgtgctgccagggagccaacttctgcctggtcagctaactccaccgtcccagagcctggggaatagcgaggagcggctggagactggcgcatgagatcacctctcatggcgcgacgctgcctgatcaggtttaggagccataggaggtgcgtccagtgatgggaccctccctggtggctgtgaaacaaacttcctctggccctgcagacatcgtggttgtgcctgagtctgtaacctcctttggagagaatgtcaaaggcttatgtttgaggcccttagtgtgcaagaaggctcctgtgacaggcccagcccaaggcagccggcagccaggtctcctgcgccccaggaagcatggggacaacataggggacagtgctgtgtctggagatgggcctggagcaactgtgtgtcccatccctggcagctgcctctcagaaggaagccgagagccccacgtggccatccatcggccacatgacatcaagcacaggcctgaagtggtcgtgatggtgggtgagttttcccaggtctcatggaggcagctgggaattaaagacaaaaccgtgcctcagtttccccctcttggtggtggaggtggcagcaggagcccagagtgggcaacagtttctaggacagccagtattgaggactggtgtattcggtggcactggttaaggcagggtaaggaggacttcgctcaggaccgtcatgatagcaagtcctgctggacagttccggagcctgagacttacagaggtgcagtggcctacacagggatgcgcagtcagcaggtggacagtcgggagcagccgccaaggcccctggggctgcagggccgggaagtggaactgagtggggactcttgatagccagaggaagctccgggctgtgcatgctgctgggtgactcagcaaatggcttttctgctgcagccccggactgaatgccgaagcaagaggggactgtgagggacccaaagggacagccaggtgtctgtggccgaagcttccactgcccttccggacgtggttgttctccctcttccggccggaacctgcctcctctctcctccccagtcccccagtcctgctgtctcctctgcttccggctgcagcttaggttccaaccacaccctcactc

SEQ ID NO: 471311 - DNA, 638 bp, Homo sapiens
cactagcaaactcagaccgtgccctgtatgagaagtttgggccaactacaaagcttacaggatgccgccccctggactgcccttactttagacaccaaatgcaagttggaggggttctcagcaatcattctccaatttgataattcactagaaaaactcacagaaagctgttatagagggattccagaagaaggcattattaccataggagatgacagctccatatctgttgctgcccctgaagagttttcagtgggagaaaaagtagaggtggaagaagacactgccttccaaagcttcaaggcacaagcaagagaccctcaagttaggaaaagaggctccagcagtgatacacatgagaatattaggacttcagcactgtctcctttacctctcaccatttgacaaatatcattccatgtattaccttctctttctgcatgggcatctgtcctgggccagaaatggttcaggctttcctctttgagcattaatcttctcctgttttaaattagtcattttatctctacctattagatatctgatgtttttcagcatagccttttgaattttacctagttttaaaaaaatgcttcattttttaattgtaataaaatacacatgaaatttactatcct

SEQ ID NO: 471312 - DNA, 662 bp, Homo sapiens
gtgttttttccaagccttctgtgtttcagttgcacagactgctctgacactgcaaccagcagggggaggcttggaacataatataaacagcggctgatatgaagtatgatttaggatcaaacatttgggatacatttacagtagggatatgtgcaagaaaagaggcgctccttcacacccagccaggaagcgtatcagtttatcccgtggaacttagcacaaacttctctcctagctctgtagactcggcgccccctagggtgtgcaatgggaacacagaagaggggtacaagccaagggatgctgaggatattcgagaaaatacttgtaagcacccaattagtcgaaagccacactgtgtttccagctcccagaatactaacacaaaattatcatttcgaaatggtcagggaattcttttacggcctgcttcaggggagaagggcaaggagaagaataacatttcctggctggatctggccaaatggccaaataggaatagctccagtctgcagctcccagcgagaccaatgcagaaggcgggtgatttctgcatttctaactgaggtaccctgttcatctcattgggactggttaggcagtgggtgcagcccacggagggtgagcagaagcagggtggggcgtcgcatcactcaggaagc

SEQ ID NO: 471313 - DNA, 898 bp, Homo sapiens
cttttggaatttttttctcaccatatggatgcagagatagggtttacaacatggggtcccactgtatgtatgcaccttcaacctggggtgcctcccttcagaatcagccaagttgctgttacagacacagaattccagcccctgccccagagagtcccacttggcaagttggatgcagcaagaccccagcgccccctccccggcaggagtgtcctgattgtgaataggagggctggggagaggtctgggactcgccaggagctgagggtcccagcctttgtggacagccctttcctgccgctctggctcaggcccacccttcgaccccttaagggcaggggctggtgcctgtctagccctggggtgcttcgacattctgtgttggacactggcagtgtgtcctgccaatttagtgacatacccacgaaactgtatttacgacatggtgcatcaggacgagagctgacagacaccattttggagaatgaggggaaggggccaaaagcagaaagcatcaccctggcctcgccctgttcagaaaggagatgcaatgatcatttcatactcgtttcctcctttggtccccacaacgaccctgagagagtgggggctcctcagtgcccctgaggagacttgccccacactccttacactgcagttgtgacccactagggtcgtcatcatgaaatcaattcagaggtcaccacctaaacagaataaaatgaaaaacgccagtgtgcatcgcacatggtaggggcctcagtttgccccgctgtaaaatgggacatgggaggctggactacaatggttccttttagtgtggacattctggattctgaacctagagaaaaaggacagcttcttttactcaaagtcacggttgtgacatttggctgtt

SEQ ID NO: 471314 - DNA, 629 bp, Homo sapiens
gcttaggagcagcagcagaggggcactttgctagtatttggaggaacttagcagatggtaaacaactggccttgtgtgctcattcaatcagtcattggctttgggctgtctccctctcctttccccttctcctcctgggtgaggtggctcctgatcataggcaattatctggagaagtgggcaatttccaattctccaagcagctggaatgggtatatcagcccagatgatctggagtctgggaagtccaagatcaagaatccagaagatgctgtgtctggtggtgagagagcccatgaggctgactggtcccttgtctttggggcaggcccaaccatcaccactccagacaggcaagaatcacatcgctcaaacagggccccaccttccaacactgttgtgttgaaggttaaacttccaacacatgaacttttgcgggacacattcaagccacaccagcccctgtgagcccagttctcagcagcggcagtagagctagagctcattgccctctcttccatcctagttcagtcacatgactggcatcagcaaatgggacatatagaggcctgaaaaagcatgtatgtgttttcattttctgtattgattctctcctttccctaccccct

SEQ ID NO: 471315 - DNA, 1043 bp, Homo sapiens
gttagttggagattggtgtataatatggtacacaggattgattcggacacattcatatgtcataccattacacaaagttttgccgtgggctccatttcccctcgagactttatcgacttagtgtacatcaagcgctacgaaggaaatatgaacattatcagttgtaagttgaaacattttgcccatatcttggaattactgcgagccattaataaatgttttccctttattcacagcttcaaagaaattatattttaattatttcctttttaaatttacttagtgggatcaacaattagacgtatcatgtagatatgcctagtgacactctgaaggtgccatttatataatggtcaatatttgcaacatctcttagacttttgcagcatatatcctgtagcactgagtatagatagatacttgtagcctaaaactttgggtatacattttttaaatcctaagaaacaaaattaattgtcagatataattttatatttgaattgcttataatgcacatatccagtaactgataaaactgttaaagaaatttccactagatggctctttacataaatgtgcttttatttcttttagaaactgccggttttgatgtatccctatccccactcccaaatatgtcattctgtaaaatgcaaatgtctaaaagtgtggattttccagaatatcctccatcttcaaattatatccgcggttataaccatccttgtggctttgtatgttcaccaatggaagaaaacccagcatattccaaactagtgatgtttgtccagacagaaatgagaggaaaattgtccccatcaataattgaaaaaaccatgccttccaacttagtaaacttcatcctcaatgcaaaagatggaataaaggcacacagaactccatcaagacgtggatttcatcataatagtcattcatgataccaaaagaagaaatgaggccgttctgctataaaatcatgtgtagtatgttattgctgtttacttctaagtcaacgcacataaataatactgttaaactattct

SEQ ID NO: 471316 - DNA, 762 bp, Homo sapiens
gccccgaaatgaacaaggacagcttggaggttagaagcaagatggagttggttaagtcagatctctttcactgtctcagttataattttgaaatagcggtttcagaaagaacaagatcaaggcactggcactggcaaatttgggaacaagaagaaggaggagaaggagaaggaggagaaagagaaggagaaggagaagaagaaggaggagaagaaggaggaggaggaggaggaggagaagaagaagaagaagaagaagaagaagaagaagaagaagaagaagaagaagaagaagaagaagaagaaaggagaagaagaagaaaggagaaggagaagatgcaaaaattctcaacaaaatttagcaacacaaatgaaatcagtaaggcaaagagatatgtgtactcccatgctcatcacagcactattcataatagacaaggaatggaattaacctaaatcatacagaaaaagctttcagtttttccccattaagtatcatacttgctgtgggtctgtggtaaatggtttttcttatgttgaggagtaattcctggtggcttatttagttcatttggtgatgtaatgtattcctggatggtgcttattttagtagatggtcgttggtgtctgggcattgaaaaattaagtatttattgtagtgttcactgtgtgggcttatttttagccatccttcttggaaaggctttccagttatttgaaaggaattgagtgttgtgatctaagctgtttccactttagggga

SEQ ID NO: 471317 - DNA, 741 bp, Homo sapiens
gctgaagtatctgggagagttggtgcatgaccatgggggccaccctactggagctctccactcatcaggcatggtacaacagtgcagaagctatgatgtgggccacagggcacctgaggctgtcctacaagcaggcatggccagactgcggccctgggagaggccagcagaccaagaggtgctcagaagaaaacctagggaaaactcttctggacattggcctaggcaacacattcacgactaagacgtcaaaagcacaagcaacaaaaacaaaaagagacaaatggcatttaattaaacttaaaagcttctgcactgcaaaagaaataatcaacagtgaacaatctgcagaatgggagaaaatattttcaaactatgcatccaacaagggactaatatccagaaactacaaagaactcaaacaacttaacaacaacgacaaatcctcatcccttaaaaactctctcttgactctaattcctccatcatctaccattccatttctcaacttccttttgtctcaaagtctcccagaggatttcctatacaggcttcctctgaaacttttcccagtcactcttaaattcattctaattaggtctttacttacccaccatcactactctgacaccataactttcaaagtaatctatgatgtctgcattactaaatcctatcatttctgtttttatcttactggaccaatcagttgcatctgacacagttgacattttctcccaa

SEQ ID NO: 471318 - DNA, 1781 bp, Homo sapiens
ggtccttaaggaacttggtgagtgtgtttttcttttatagaggaagaggaagccaaattggaggggtctagaagacagctgttcatactgacatgtagacagcatttgtccccaggactctgcaggacatccctgcctgctgggtatctgtaacaatgcagcctttcaacaggaaagtcagacttcgaaagcgaagtttgcaacgcattttcatctttgcctcaggatctgtctatggagatattggactaagaaaggaccctttgcatggagcaattagtgagatgtgggagatatgtttgaatcctacagacgtcctccaagtgtgtcctgagacaatgcattaccaattccagaatggactcaacaatgtcttgtttttcggccttcgaggtcccattaaggagcatctgcctacctcaacgactcacagtgctcatttggtcaatgattttctctgtggaggttttccaaaaaatctggctggaacgggacagaaaactgataaatcttttcagaggtgcccatctgaattaccaccggtcccttatctcttggggcataatcagtgcaacttatgagttcctgttaaagttatatggcaaaaaacatcagttaagtgccatttattaactgaatagaccttctaagaagaatgcagtctggcctctttcttaattggccaaatataagttggtgtcatgactccaggccacagtgagttatgggcaaagctgttttcctcaagcatcaacaaaacagaataaaagtttccaataggaaaaataaataaataaataaatggaattatacagtgttttgtctttatcttcttttctttcactttacataatgctattgagattcaaccattctgatgtgagagtcagtagtccattcttttttatagctgagaagctttccattgtataagtatacctctatttatttatcagtttagatgacccacagtttttggctcttatgcataaacctgttctgaatttcaagtgcaaatctttgtgtgaagctggatttctgaattgcattgtaagtatatatgaactctttaagaagctgcagaagtattttccaaagtgatattcccatcaacaatataaaattccaagatttccagtagcttcacatcctcacttacatttggatcccacaggacaccacattatatttaatcatcatatctatttagattttcttggctatgaaagtttctcggactttccttgtttttgatgacccggacacccagacagttttgaggagtactgatcaggaattttgtaggatgtttttctactggaatttgtcttttgtttttttctcatgatcagattggggttatgggtcttaggaggaagaagacagaggctggccttgcatcccttggagaaactccacttagtaataatatttatgcgctttatgctttattggattcaatttgctgaaattttgttaaggagttttatattaatgtttttgagaaatattagtgggtagtgttctttatggtaatgtattgttatgtttgtggtatcaagtcttcatagagcttgttcaagttcattgatcttttcaagaaccagcttttggtctcattgattttctttattgttttactgtgttctctttcacctacttctcctctctattattttcatttttctgcttgctttgggtttaatttgctgttttttttctagtttccttaggtagaagcttagattgattcaataactttcttcttttttgacaaaagc

SEQ ID NO: 471319 - DNA, 846 bp, Homo sapiens
ccgccccctgcagcaccacctctctgttgctggggacagcgtccaccatctcttgccttcagacttttccaggttccccaagccggaaatcctggaaccgttcattcttgcctcttttgtcccttgaaccacagctgcttcatctgtaaggcacagtgctgggactacgcagagtgcaatggtttacacagataattcaggaatcaagagtccttcaaacagaaatgataaaataaaagatttaaaaaactgcagctcagagatgttgggtgtaactgatagtaagtggcagggtggagatttgagcttgggccattcaaggcctgttctgggtccactttattgcctctattatgagaatatcccccaaataatccagcctgggaagccagagtaccagagcttcctggtgttctatcctgggatgcaaaccatgaaaccatggctgatatctgaaaggaggagaaagagggaagatgtagacagtggttcgtgcctcggtccttgtaacgaagccctccagccgccactgctacctaaagtcatcccacagtttacagttccaatagaactgcagcgagctcaggacatcgggaactaccagagcaagttctgcaaaactgtcaccttttaaagggttaaagtcctggactagctacctctggagctcttctgtgtgagaaaacaaacacttgtgtttttaagccatgattgtattgagttttcttttatatgcagttgaattttatatgaactgatataaaactgaacagagtcaatggcaaagaaaagagaggccagaaggatggttttggctgtaacagaaaatacaatggaaatctgttt

SEQ ID NO: 471320 - DNA, 1028 bp, Homo sapiens
cctttgggggcaggaacgtgcatcagctgaatatttcctcggttcagaaagcactggggagaagataacttcacctcgcactttggaatgttgcattgttttaaattgctggatcgtttggagccctgttttgtgccaagtggagctcctcagcgcctcactaacctggccctgaggggtggagccacgactgggacgcagacagcctggcccgctagtccaacagaccccaaagcccccgacaaagtagttcctgtggtttacttgggagaccttgggagggatgccgttcatagcagagggctccagaattgagcgttgtgattttgcatgcgctctccatgacagccctgtgaagcacacggaagagactgcaggcgggcagcgtttagcagaagtggcggctggccctggaatccagggctgcatgtgccacccttgggctccttgcatgggaagttgccgattccgaggaaagctacagtttccctcctgtgccccgaagggaatgttgcatctgctgcaatttgcctttgacaggaaaacactccctccttcagcaccccacacccacaccctctcccttgtcttccaacggtgcctggacaaggaagcctgggctctgcagctgggacttgtgctgctctcggtgtccttggcttctaagccacagtgactgtcaccctggtcattgatcactgctgccatctgctgccaccaccctcttaggtcagctggcccagtgtctccctgctggcctggccccacctccctctccaaagagcagaagccaactgtgactccatgcgctccccagccggggcagttgctctgctgtgtcggcctacggggcccaggtttttccctcatagcaaccactgtccccctcagctcatcctcccgcatgtgaatggccttctggaccctccatgtggcccacgccaggattagggacccgccgggcatcccaggagctgagggagaagtgggcagctgaagatgtgtccttccatgcccagcgatgctac

SEQ ID NO: 471321 - DNA, 510 bp, Homo sapiens
tttctgcatctgtcccatgaacatgaggagacctagcttccaaattgtgctgttaatgatgggaggtgcctttatgacatccagccattaccccagtggcactagcaggccactgcgcatgcggacagcccgccgcaaggcaacaaccagaggagaagggatgcaagactgcaagactccagaaggtcaaattctttcttccgaggaggcaagaactgaggttgctgcagaccaatatggattcaccaccactaacagtaaacaccagtcatactggagtaagggcccactctatgttggtattaatccacccaacttaactaattatgtctgcaatgacccaatttcaaataagaggattgatacaaggattgggtaagaaatggctggacagctcttggttcagagcctgtcacactgaaagtgctcgtcacatagaagctgtcataatcactgtcaccatcatctccactttgtagttgaggaaaccagatccagagagggaaagtt

SEQ ID NO: 471322 - DNA, 619 bp, Homo sapiens
caggtctaccttccagttcactaatttctcttcagctaagtcttgatcaccctgcagcatcaatgggcatgctgtgaatgctggaggactgaccagcatgccccgattgttctctattacttggagtattagatctatttgtcatggggtactgctaaaaccaggcttatgtcctgtcaagagtagcaaccccagaggaaagagccgctcactcctgcttcagtatagagaattcccagggccaattctcattggcccagcttgggtgacatttccctactttgacctgtcatcaggtgtgaggctggtgttaggattttgcagggcggttagtcgggtgttcaggaatatgattggaatccccaccacaaacccagaatcaacaggagctggggcaaatcaacaggagctggggcaaatcagcaggaactggggcaaggcagtcttccaaaggaagggactattgatgatgcagacaccaactgtctaccatgatggtttgttctgaagagtaacatatgatttgtgcagcagaattcctcataataatgaagaaaacaatgagagatcatgaatgtttgaccccatatatacacacacgtctgcacaactacctact

SEQ ID NO: 471323 - DNA, 1332 bp, Homo sapiens
gcaggtggctgccttctccctgtgtcttcacttggcctgattgccaaacccagcgccttctgagatactgggggttacaatttcagcatacgaaatttgagggcagggacctcctagtcacaagttggttctcaccctgacgcacactccctgcctgcaacagcctggcttttagcagctgagaggacacggtccctgcctgggaggtggcagaggagagtgactagaagggaaggtacaatgggggccaggcagtcaagggccagctccaaggataagggccccaagaggatgctgttcacggggaggagacagaagttttctccgtgggacgatgccctgctctcgggaagggacccgcggtccctgctgaagcggggcatgcaccacgtcagcttcagcctggtcacgagaggaatgacagacatccccgactttctgtggggcttgtccgaggtccagaaactcaatctgtctcacaaccagctccgggttctccctcccgaggtggggaaactgacccggatcgtggtcctgaacttgtgcgggaaccgcctgaagagcctgcccagagaagtgagcctcctacagtgcctcaaggtcctgtttgtcaacatgaactgcctgacagaggtgccggccgagctgagcttgtgccgaaagctggaggtcctgagcttgtcgcacaactgcctgtcccagctccctgcatgcttcgccgacctctctagactgaggaagctaaacctcagcaacaacttcttcgcgcacatccccatgtgtgtgttctccctgaaggaactgattttcttgcacgtgggctcgaatcgcctggaaaacatcgctgagagcatccagcacctggccagcctgcagatcttcatcgcagagggcaacaacatccactccttcccgaggtcgctttgcctggtcaccagcctggagctgctgaacctcaacaacaatgacatccagaccctcccgagcgaactccacctgctgtgtagactggtgaggatcgcctggaatcccatggacaaagggctccacatttcccacaaccctttatccaagcctctgccggagctggtggaggggggcctggagatgctcttcggctacctgaaggacaaaaaacacacctgacctgggtcccggaggcctggatgggaggcagctcatctggactctgtcaaccggggtacttctctcgtctcagctttctactctcatccttagtgtctgacaatacctttgttaatatttgctaagtcgctgttgaacatccacgttaaggaggtgattgtttttaactctgtatgttcttaataa

SEQ ID NO: 471324 - DNA, 613 bp, Homo sapiens
tatataataaatattcagatcaatatgttcaatggaatcaatttcagtttaacaggaactggacacattataggcaataggacaatgcctcagcattcatggagcttggaggtttatcagggagacgaacacacagatggttacggcagtgtgctgagggctgtttgggagcacagacgaaggcgctgtaggttgtccatccctgtccttcagcagattgatgggtggtgtcattttcctgcagaacaaatgggatttgatgggacagaggaagcactgaaagttgtccccagagagtctgaccatagggctatagtgttgaaagcagggactatgaacaaagacctggatccagtcgtagctctgatctgtatccatggccagccagaaagtgcccacagcggggctctgattgggtttgctgtggccccaatcccatccctgaatcaagcactggacagggctgtggcataatttaatgggcccaaattctcccatggaaggatgtgggggaggtgtggctgctccggttctatcccaatctggggagtgttaaatgtcctcttttaaaaatgcaaatcagattgaatcattccctggcatggcatcccct

SEQ ID NO: 471325 - DNA, 766 bp, Homo sapiens
tctgtaaaccctatggtcccttgccacatgctgccatgctgcagaacatcaacccactcccagaacccctgataccaggagaaacccgtggtatcacctgcattggcagcaatgggagtttatatactttacagacactattgttactacctgcttatggagctcagtggaaactccatgcttttaatattttgaccaggatgtccctgataaaggactgggccaatgggtcaacacagtcagccaaacttcaggcagtcatctcagcactggattcttcagaattcttacctaactgggaggatgtcaaagcttcgaaaagtgctcctaaatatgcagaaggtgagaagaattctctgatgtgctacttttcacagatgttaaagaaccaggtgaaatatgttggtatcaaagtaggagaaggatgtattaatttttcaggctctttctcacatcatcatttataaaagttttatgttttaaatataggcaaggtttgctaaattaagctttttttcagtggtctgtttaatttcttaagtttgtcataaatcatgtaaatttagatatgcttcttctccagtacatctgctatatttaaactgactcttaaaaaataatgacgagttaatgggtgcagcacaccagcatggcacatgtatacatatgtaactaacctacacattgtgcacatgtaccctaaaacttcaagtataataataataataaaataaaatttaaaaaaagcggaaaaaaaatacttttt

SEQ ID NO: 471326 - DNA, 985 bp, Homo sapiens
ctatatagttcactgtctaaactaggacacttgtaagtgtaaaagtaggtgttcaacttcccagtttattgcatctcatcttcaaatgcacccttcattgcctgctctgctacaatacagatgagccctgctttgtcagcgtgtggtttctctggcacttgcttctgaacgtacatgagggctggcaatgcccagaagccagcagcttctcccaggacccccttgagcagctttgccactgagagcaccaaggagacacctttctgtgaatggcttttcctggatgcccacttgtggctttacagcaaagttctgaggctcagtacctccttgtggacagcttcctccacctgcacagcactacaacaaaggatttctgtgccatctgcgggagagcagggcacagacgtgtccaccagcaaacagcattgtcttacagtgcaccagacacagctgcacctcccaggtcccctcaggaaagagcttgcagagagccatcttaccagggtctcacccttcctgggcaacttgcagtcagttacccagcaaggagagggtataaaggcccagccatttggccattttggccccacccaggataacactgagggtgatttgtgctccagaccccccctgctggcttggtgcccatctgcaaagcccatcctgtcctccaaactccaaagtagcttctactttcagagaacccgaccgccatctagcagaggggcaagcaaggacaacgaggtgtctgagtggaggcaggcactcagggagccgctcggagcccgttctagtgacttggttatttctgccagtactgctattgcctgggagtgcctgcagacctgagtttggtttcctccacaggaaacaagagcttgtgcacgggtagtttatttgttagggttgtcttgtttggctgagtgagctctgggggcgttgaagaaagacctggggctaaaaggagtaaaagatgcagagg

SEQ ID NO: 471327 - DNA, 493 bp, Homo sapiens
tacaagtgacctgtcacccagccatgaactcccacatcctcatgaaaatcacagagccttttccagtgacggcatcgcttgctgccattctcagcctgcagaggacagacaccagaatttctcaaagaaaatctcacaatgtattgctgaattacttagtcgaggacatgtcctcttgccagactgctcagccacatagttttcctgaatgggagagagaggcctcagactctgtgtttatgaagaacacctgccagactagatggtattgtgctgggagtcccttgacagtgtcctctgcctgctatgctatgcccttgatgggagtgtgggggacttggggtctcagccctggtggagaagtggtgctttccctggcagatggctgccacatactactcattggcttctcttgccagttcttccagactcacctggtggtgatggcaagattcctattcaatcaggaaaagaatgagcctgcctaggcagc

SEQ ID NO: 471328 - DNA, 471 bp, Homo sapiens
tctctctggctcatctgctgcatgtatggaaatgcgtgcgcatggaaacagaacatatattatccaagcagattgtgctaaaactaagtgatattcggggacctgtgctcaggcaggaagggagtagaacgcccttcatggggttgaggcagttaccacctcgccccttgagtgagagaagaccagcagagaagaccaccaagatacgagtgggtgaaggagcacttgagggtgccctcctgggaagaaagttcaaaggaagcatgtgttctaaccatttacctgtaactccactcacaaccttggaaagagtgacaaatccttccttctccctttggcagcaggatgcttgcttgcacaagtccttagcgggggtagaaatcacgggacaggcgcagtcctatctagaaatcaggaaactgagctctcatcctgctctgctactgttttaagttaatgtttaaaattagc

SEQ ID NO: 471329 - DNA, 623 bp, Homo sapiens
aagcatctggaagctatattgcaacatgattggtgtccactctaagatgaaaattaaaaaaatattctcatctcatgaagaacaagaagggaggaagaggaggaggagaataggaggaggaagaagaggagaaaggaggaggagaaggaagaggaggaggaagaggagaaaggaggaagaggaggaggaggagaaagaagaggaggaagaggaagaggagaaggaggaagaggaggaggaggagaaagaagaggaggaagaggagaagaaggaagagagggaggaggaagaggaagaagaacaggaggaagaggaagaggagaagaaggaagaggagaaggaggaagggggaggaggaagaggaggagagggaggaagaggaggaagagggggaggaagaggaggagaaggggatgatggtggtataagtcagatttcctaaatctcctccatgcttctacatgttcttataatccttatgttcctcaagtgaaaggttaaaatatgacaatgatattattaatagtaagaatattcaaaaacacacattcaaaaacgcagtattttcccctgggaaattttttgccttgttttcgtatttaaaatattaatcaagagacgtc

SEQ ID NO: 471330 - DNA, 579 bp, Homo sapiens
aaaggaaggcataactggaaatagatgcagaaggctgtgtatgctgtgtatcagtgtcccatatgtggtactgtttctcccatagccaggattcatgggtccgggaatcaaggggtggaagtggaagtggcaccacttaccatcacccctagtgacccactagcaaaatttttgcttcccgttcctgtgacattacattctgctggcctagaggtcttagtttcagagggagggatgctgccaccaggagacataacaatgattccattaaactggcagaccaagcctcatcagcaagcagctagggggaagatgagacaagctgatgtcctctttctgggaagaaaatccacctacggggagctggagggaaagagaaccctgtgttcttggctgcagcgatgtggagtggagtttccacattactgagcagggaggagggaagagagaacggccttggcgcacataccacagactcacctttcttaccaaattttcatagatttctcttaaatagatgtttctctacttgctctttttcttcagaactttttcagagactttaaatggttgtctttt

SEQ ID NO: 471331 - DNA, 618 bp, Homo sapiens
tctctctctctttaaaagttttctcatggtgaacccttgatggatttgttagttgcttgagaaatggctatgatgatcttttggtgtaattggcctgaagcgaaaaccgcagcctatgatggtgaacaggccacgtgtgagcctgtgctcaaagccatgtttttggctgacacccacttgcttagggaattcctaggtcactggctggacaaattacgaagggaatggcaggtggagagagccttccagacagctctgtggttgctgcagccggaagtcgtcttcatcctggaggatgtctttgatgaagggaagtggagcacctctgaggcctgggtggatgatgtggagcagtttcggaaaatgttcagacacccaagtcatgtgcagctgaaggtagttgctggaaaccatgacactggcttccactatgagacgaacacatacgaagtagaacggtttgagaaagtgttcatctctgaaagcctgttttcttggaaaggattaacttcatgatggtcaacagcatggcactgaagggggacagctgtggcatctgttctgaagcagaagcagagctcactgaagtttcttacagactgaactgctcccaagagc

SEQ ID NO: 471332 - DNA, 2016 bp, Homo sapiens
tccctgcaaaggacataaactcatccttttttatggctgcatagtattctatggtgtatatgtgccacattttctttatccagtctatcattgatgggcatttgggttggttccaagtctttgctattgtgaacagtgctgcaataaacatatgtgttcatgtgtctttacagtagaatgatttataatcctttgggtatatacccactaatgggattgctgggtcaaatggtatttctagttctagatccttgaagaatggccacactgtcttccacaatggttgaactcatttacactcccaccaacagtgtaaaagcgttgctatttctccacatcctacccagcatctgtcgtttcctgattttttaatgattgccattctaactggtgtgagatggtatctcatcgtggttttgatttgtatttctctaatgaccagtgatgatgagctttttttcatatgtttcttggctgcataaatttcttttgagaagtgtctgttcatatccttcacccactttttgatgggattgtttgtttgttcttcttgtaaatttgtttaagttctttgtagtttctgaatattaccctttgtcagatggatagattgcaaaaatgttctcccattctgtaggttgcctgttcactctgatcatagtttcttttgctatgcagaagctttttagtttaattagatcacatttgtcaattttggcttttgttgccattgcttttggtgttttagtcatgaagtctttgcccatgcctatgtcctgaatggtattgcctaggttttcttctagagtttttatggttttaggtcttacatttaagtctttaatccatcttgagttaatttttgtataaggtgtaaggatggggtccagtttcagttttctgcatatggctagccagttttcccaacatcatttattaaataaggaatcctttccccattgcttgtttttgtcaggtttgtcaaagatcagatggttgcagatgtgtggcgttatttctgaggcctctgttctgttccattggtctatatctctgttttggtagcagtgccatgctgttttggttactgtagccttgcagtatagtttgaagtcaggtagcgtgatgcctccagctttgttctttttgcttagggttgtcttggctatatgagcgctttttggttccatatgaaatttaaagtaatttgttctaattctgtgaagaaagtcaatggtagcttgatggggatagcattgaatctataaattactttgggcagtatggccattttcatcatattgattcttcctatctatgagcatggaatgttttttcatttttttgtgtcctctcttatttccttgagcagtggtttgcagttctccttgaagaggtccttcgtgtcccttgtaagttgtattcgtaggtattttatcctcttcatagcaattgtgaatgggaattcactcatgatttggctctctgtttatctattattggtgtataggaatgcttgtgatttttgcacattgattttgtatcctgagactttgctgaagttgcttatcagcttaaggagatttaggctgaggtgatgggaggagcttgttattacccaccttctgaagactacttctgtcaattcatcaaactcattctccgtccagttttgttcccttgctggcaaggagttgtgatcctttggaggagaagaggcattctggtttttggaattttcagcgtttttgcactagtttttcctcatcttcgtggatgtatctatctttggtctttgatgttggtgacctttggatggggtttctgtgtggacgtcctttttgttgatgttgatgctattcctttctgtttcatgttgtcacatacagattttaagaacacttttggtagatgtgatccaagagtaactcagaagagcatctgtggcatccattcttccctttggtaatttttaagaaaaataatgctgctgcttctctctttgtaaatggtgac

SEQ ID NO: 471333 - DNA, 2467 bp, Homo sapiens
gtccaggctggagtgctggagtgtagtgataatcatccttaacatgttggtgaccctctccccccgtcgggttatagacagatttatacgatataaatggaggtggttctccagagttgggaaggggagaggggattcgaaggacagcatcagtgtcttgcagagttggcactctagtgatctacgtggcaagcccatcctcaaaagactcttgtggaagttctggagccagctccagctattctggcaagttggcctttggaagaccaattccaacgatccagagaagagcgtgaaaaacattgatccctcgagggcctggaccagcagaaatgagatttccagggccctggtctctgaaatgctgttaggatgccgtgcccagcaatttgaagatacggagacacagacacagacaaggagagggacacaaaacgaccgaggcggaaactggagtgatgcagccacgaaccaaggaatgccaaggattgataacaaccaccagaagtaacgaacgagatttcccattactccacgtcttcgccagcatttggtgttgtcagtgttctggatttcagtcgtgctaggtacatagtgatatctcattgttgttttaatttgcattttcctgctgtggagcaactttttatatgcttatttgccatctgtatattttctttggcaaggtgtctgttaaagtcttggcccattttttaattgggttgtttgttttcttattgttgagttttaagagttctttgcaaattttggctagcagtccattattggatatgtcttttgcaaatattttctcacagtctgtgacttgtctttttattctcttgacagtgtcttttgcagagcagaaagttttaattttaataaagtccagctcatcaattatttctttcatggattgtaactttggttttttctttatctttaattttctgtagttggaaaattatgtacctaggtttagagttttgttttgtttgggcgtttatcctgcattgtgttctctcagcttcctgaatctgtggtaaccattttgtatatactttaaaaatattcacctgggacaatgtggttattaaatagtaagtagctccttgtcttaaactaccttttctcaatgtactgaggttgaccattttttcaaatgtttattggtcattgtatggtctttcccagaagaccatacaatgttgtcctttaaaagattgaattgtctgtcttttctttattgatttgtagacttcagatattccagatactaatcctttgttaagtagatgaagcagatctcttctctctgtttgtgacatatcttttagtttctttatagtattatatattttgatagaaaaagcttataattttaatgtaatcaaatttatcactctattcatttatggcttcctcttttgccttgtttaggaaatctttctgtatatgctgaggtcatatgaatattcttctataatacaattttttctgtaatatgatttttaaaccattttaatgccgtggaccctttgtcatgttggtaaaggtaaaaaatgaaactcatagaattacaaagaaaaccaattatgctgaaatatagttattaaaatatttaaagtgatgatatataacacatgtgctccttcttaatgcattaaatatcaagatttagcagaatatctaataactgctgtaaatttccaagtactgagtgcataaataatattatgagatacctgcaataactataatacgacataaacctatctgtatttttattagtggcaaagtcacagatactgcaaggctactatggtctgttgtccatgatcataattgaatctttaatttttcagtttgggatttgtgaaaataaacattaatttttttcctatccatgatcatgaatgtactgaattatgctcaacaaaccagtggatgtctgtggaacccaggttaaaatcctttatataatatattctaaatttttaaactgttcatctttctctttttttattttatcaataagaatttgtttctttatagtgtatatatttatttttccccctctttttgactaatttatcctttcccctttggatctgcaatattagtgctggcttacatcacacttctatatgtgtttctgggctctttattccattctgatttagattttgatctatgtaaataccacattgtcttaattactattgactgtgaagtaagtctgacatctaatagacaagactccctactttctttgttggctcttcttcgtcctttgcttttttatgctaattttttaaaaagcttgtcaaattccatgaagaaaagcctatttgaatgttgattgaactgaactgaatttataaaccatttatttataccttttgatgaaattttatgtatttttttccatgaaagacttgtacctctttccccccaccaccacccc

SEQ ID NO: 471334 - DNA, 704 bp, Homo sapiens
cctccagcaagctccagcagatatgcagcagaggggcctgtcaccaacatcaaagaccaaaagtagataaatccacgaagatgaggaaaaaccagtgcaaaaaggctgaaaactccaaaaacctgaacgcctcttctcctccaaaggatcacaactccttgccagcaagggaacaaaactggacgaagaatgagtttgacgaattgacagaagtacgcttcagaaggtgggtaataacaaactcctccgatctaaaagagcactttctaacccaatgcaaggaagctaagaaccttgaaaaaaggttagatgaattgctaactggaataaccagtttagagaagaacataaatgatatgatagagctgaaaaacacagcacgagaacttcatgaagcatacacaagtatcagtagccaaatcgatcaagcggaagaaaggatgtcagagattaaagatcagcttaatgaaataaagcatgaaaacaagattagagaaaaaaagaatgaaaaggaacgaacaaagcctccaagaaatacgggactatgtgaaaagaccaaacctatgtttgattggtgcatctgaaaagtcgggggagaatggaaccaagttgggaaacactcttcaggatattacccatgtttaataaagtgattaaacatgtatgctaggcttttaaggacaatcttggttttaagggaagcc

SEQ ID NO: 471335 - DNA, 665 bp, Homo sapiens
tgtgttcttgtcattcagctcccactaataaaactctgagtacgactttttatagaggctctgtttatctctctctctctctctctctctctctctctctctctctctctctctctcgctctcatctatctggatatgctactgtttcaaatgtatgtaaatttctctggaggtggagttggtgctttccttttccttttctgtttttctaaaacttttggtgaatcttggccacctactggtccagattactctggctggaatggactcctcagatcctgtgggaatccctgtgcgtttgactgggcatgcaggtgctgggtagaagaacctggctctactgcccgtgtgggccaagggagaggtgtatgtgaggggtttgtgttgcgaacatcagctaaatcagaatccctgagggcggagctccacatcagtatttttacaaagcttcccagtggttctaacgtgcagccaggatgcattcttgggagtaaacttgtcggttcaaatgaaaggtttatcttacagcttctggtacagctaagttgcctgctgaaattcccactggtaacataaagataatcatccttaacatgttggtgaccctctccccccgtcgggttatagacagatttatacgatataaatggaggtggtgagttgga

SEQ ID NO: 471336 - DNA, 943 bp, Homo sapiens
ggtgatatttgaacaaggacctgaacaccaagtgggtggcacacgggccagacggagacagccctaggccaacagctgcagtgggttgccctggcactgttgccccagcaggcactaagaggggtagacaagatggcccatgtggataactgccccctacactgccccaggcacacaagtgcccaagggatgctctttgagtctgcgtggagtggaggcctgtgtagaggaagtggggatatttgcccatgcctgctgggtctgtctgttttctgaccccagaccagaagaggctactgcagagctcggaaggttctctattttgctttgggaaacagcccctcagaaggaagctggagatggaagaccaccattgccagcaccctctggcaccctcttgcatcctctttctgctcagcggtacccttatcatccctggagagcatcccaaatagctgatgctgggaaagttaccagatgtcccagagcctcacgttactcatctgcaaaaagagataatgatacccatttgatgtggtttggctgtgtccccacccaaatcttgccttgaattgtagctcccacaattcccatgtgtcatgggaggggcctggtgggaggaaatctttctgtatatgctgaggtcatatgaatattcttctataatacaattttttctgtaatatgatttttaaaccattttaatgccgtggaccctttgtcatgttggtaaaggtaaaaaatgaaactcatagaattacaaagaaaaccaattatgctgaaatatagttattaaaatatttaaagtgatgatatataacacatgtgctccttcttaatgcattaaatatcaagatttagcagaatatctaataactgctgtaaatttccaagtactgagtgcataaataatattatgagatacctgcaataactataatac

SEQ ID NO: 471337 - DNA, 2663 bp, Homo sapiens
tcctttcatcccagagttaattgaaaatcttaagcggcagggaggatgctctgaaggagattttctgagggaggatgctgtgaaggagaagcaaaacatggtgctggttgtgctcttcctccttgtgcggttcctttcctcacctaagagggactggcactctgctccctttgcctaccttggaagccctggtggtgtatacctagggagttggaaagaagagaaggagcaaggaaaacagatgaagaagaaacatttagtgaggttggaatgtgttgtccccaggagcagaatgaaaaagattgcaaatatactaaacactgctgagaaatcaagaaagtttgcagtcaaggcaacaggagccagaaaagataaaagacttggtcaaaagtgcagctcgttttgggcagaccaggaatactttgaactgaatgataaagacgaggaacagcataagaaaattagatggaataaaagcttattagaaacattcttgtgcaagtgcaacaagagacatgtaaataacaggatgattgtgtagagaagaaaaaatcaaagaaagatagattataattatgtttctgtagaattcaaggacagtctcaataaatgttgattaatatacataattcttaagttacatgcttattaccaagcaatgaaaataaaagaaaacgtgaagaaaagaaagaaaatgattaccaaaaaaagacaagaaaatggttacctgtggggtggagggaaggaatataaaaaggttaatcacttacaaattcaaacatatattcccatgacctcacaaaaaagacttgtacgtcatatctcaaatctgtaaatgaccaaaatgttcattaacatggccataaataaacagatgcttgtatacttatacaataatgtaaataaaaagaatgaactactggcacacacaatattgacaaatcgtgacatgctatgctgagtgaaagaacaaacacataaaagacatgcaatacaattttattgtttttctttctaattcaagaccggataaaactactctatcaagatagaaatcaaaacagtggatacctgtgaaaaggtgggaattaactgcaagggaccatgagggaaccttctggggagatggaaatattctatatcttaagtgggtggttgttatgcaaatatatatgctatggtctcaatatgtccaccaaaatttatgttttgaaaacttaatccacaattcaatagtgtttgaaggtggggtctttgggagatgtttaggtcataaaggctctgccttcatgagtggattaatgctgcttaaaaagggctttcaggattgggtgtgcactctcttgcctttcttccacataaaaacacagcaagaagaacctcacaagatagataccagtgccctgatcttggacttcccagccaccagaactgtgagaaatacacttctattatttacatattacccagtctcaaatattctgttatagcagcacggaacagactaagacagtatatgtttgtaaaataccattgaattgtgtgcttatgaattattcattttccatatgtaaattttaccttcattaagaaaaaatacaatgaaatctccctttttatattagttgtaaacctactatgaattaggctttagaatatttttatattctaataaattcaatgaattttcagggcaacaaaaacagtaaaattgctattactatattctctagaacttaaagaaatttaaagaaaatgtattatttttaaataaacattcttattctctaatatagatttaagtcttgaaattggaagtaaaactctacaaactgtgaaacataaaagcaatataatctgaagctattaaatctgtttatcaattaaaaatcacattgaaataacttaattatcaatttacagattaaactatagagtcactattaaaaattaatcatttctacaagcttaaaagaatttagtcatcatatttagtaattttttggaatacaaaggcgacagtattaattttcacatcactgataaaagcaatttaaattacactagcattgaaatttcagttttaagttgtaacgttagtgattattaatcataatcaatgtaaatttgttaatgccaattgagtaggttgatgacgatgctcatttatgaatgatatacaatacttttcagatgtaataaaatatattaaggttttttttactttcacggtttttaaacaatatgaattatttttcaagctttattaggcttaatatgctatgatatataatcattgatatgaccaagatttgctgataaataattccaaattaatatttcattttaatgcctatttcttaggccttaactccaggttctaaatttagtactaagtagcaataagctaggaaatatgcattcatcaaaaccattttaaaatatccaatgcctcaatatattagaaagcgagtattctttagcctgcagaaagttaagtataaaaattaggttttgaatttttatatatgaacttaatttcagcagacacttttaaggacccctcaatgcactatatgtaactaccagtagtccaattgtcattgtggtttaaataatcagtagtaaagacaagaagcctaactagccatctggagatagaa

SEQ ID NO: 471338 - DNA, 650 bp, Homo sapiens
gttgcttagcaatggaaaatgaactgttcctgtctgttaccactggaggtggaggtaggacaatgagctttattggacagaataggtatgaaattagtttattctttttcacttggagaaggcaattggcagccaagagagtcactcggaaaaggggtattttagaggttgagggtgactttccttctcattacttcgatggagagactatcctggattatctgatgggcttaatcattgacaaaggttcttatataaggaaaagtcaatgtgataatggaagcagatttgaagatgctgtgcaactggctttgaagatggaggacggggccacaagccaaggattgttggcagcctctaagctggaagagaacaataaaccaagaaaaagaaacaaaagatataacacttggaatcaaagaagaaaaacagatattcactgaaggtgctaaatgacgagtgaagcacaccaacatagcacatgtatacatatgtaacaaacctgcacgttgtgcacatgtaccctaaaacttaaagtataataataatttaaaaataaaaaaagattattttcataaaaaaactcaaggaatctacagctaaattattagcattaataagtgagtttagtaagtttaagggataaaaga

SEQ ID NO: 471339 - DNA, 485 bp, Homo sapiens
tggggatagtgttcatgattaaatccacttaatctggtgcaagttacttccaactttctgaatcagctctcttccgctatgctgctgatgaagacaagacacccagagcctctctccaggttttctggagtgcagagagaacaaagatgcaccctcaaggagacaccatttttgcaaccgttgtatcatagtcctcaatttgtagaactaggagattttcttcatactgttcaagagaaagaaaaaaggaacttaaaaaatccatttgaacgtcaccccatttgggaatctctcctgccagtccctccatcaggggtccacaccacatggcacataagggtgtttgctctcctgccttctcctccgctgcaagtagatgactgctcagaggcagagcctagccaatgttcatttgtattcccagcacctggaatagcaccggatgagttagggacatctaatcttttcagaaatgaatcttgatt

SEQ ID NO: 471340 - DNA, 667 bp, Homo sapiens
tcacccattagctttgcctggaatgccactctatggcctcttcctcctctctggttgtcaaaatcctacttattcttcaagagacttgttgaaaggctttgacctaaaagctgataatgatatggacaatgaagtccaggctaaggtggtcttggatggaaatgaagaacttgttgggaactggaacaaaggtcactcttgctatgctttagcaaagaggctggcagcattctacccctgccctagagacctgtggaactttgaacttgagagaggtgatttagggtatctggtggaagaaatttctaagcagcaaagcattcaagaggaggcagagcataaaagtttagaaaatttgcagcctgacaatgtgatagaaaacaaaaacccatattctgaggagaaattcaagcctgctgcagaaattggcataaagggtgcaagccccaatccttggcagcttccacatggtgttggtttgcaggtgtgcagaagacaaaaattgaggtttcggaacctccacctagatttcagaggatgtatggaaaagtgtggcagacttgtaacagttactacttgagagcatcactatgaccattactactgttactacttgagaccgtcattacaaccgttattactgttcctacttgagactgtcattaca

SEQ ID NO: 471341 - DNA, 1014 bp, Homo sapiens
gaaacgggtttccccttataaaaccatcaggtctcatgagagttattcactaccataagaagagtacaacagtatgggggaaactgccctcgtgattcaattatctcccaccagctccctcccacaacacatgggaattatgggagctacaattcaagatgagatgtgggcccactgctgtttgatagaactcagagctcctaattccctgatcaatattcttcctattgcctttgatgtttctttagagcagaagttggcaaactttttctctgaagaaattcaggctgaaatcacaaagctggtaaatggaattgggacagaaactgaagactttaaatctcaaattatgtgttctttctcctgcagtctagaagatgcaaataaaagaggcataatagcagaagttaacctgcagcacagttgtagtaaacagacaaaggcttgcgatgtctccacactgcccaggatggcctgcatacttgagctgatctactagccctttgcaattcacaatgatgtgcaaaatattgcctcaatctggtattcctcactctttgttaattctgtctttcaaaatacattctgaaaatacatctcaaagagaatctcacagtcctcaaaatctcttaaaatttcctgtttccctgatatgtggtattcctctcattcttatttcatgagagggattccaattatgcatattttagttacttttcctatttggatatctgtatattttttccatatcttttctaagtttttgacattctgacagaaggtgtttgctttcattatgtctgcagttgcttgtttgagagtatttaatgcagacatgagtatgatgttacagtttgcctctgatttctggttattttagggaaaaaaattaccagttattatgtattctctttttaaaatttcttgttagtacattgatttttattcatttttaaatactgtgtttttcaaaatcttaaaggtaaattcagggatatagagtttgaggggctc

SEQ ID NO: 471342 - DNA, 1314 bp, Homo sapiens
catctgcaaaatggggataacaacaagccctccttctcatggcgactgtcaggattaaatggaaaagcgcttaggaaagacttagcacaggagctaaggaagcctgtatcaaagtgaatgtgcgtttttaaacagtcatcaccagatgctttccccaaaggaagtacagttcttcctgcctgcagcaatgttaggcgtgccctttcctcacatcttgcccagcagtggatgctcagatcttttaatgtttttctaatctatcagggaaaactggaaaaagaaaaagaaaaagatgtgcccagatacttactggttttcggcttcctggtgaaagtactttatgaacatagtgaaatgtggaagtggagcctgattaatgtcggggctgttacacgggccatcaagttctctcctcatgatgatgtttttagcatcaaagaagcagctgagattatatgttggtctcaagactgcacagctagtaagttgcagagctgggattccagttcagttggtcagattctttaaccagttcttaacctgcaggctagattttagccttatcctggttcacatgtatttaaatattctggccggaggataccccactaagtataaaatagctttgaaataaagctatttcaagggaatgtctaagaaggaggttaaggaggtgggaggatggctagatcccaggaggttaaggaggtgggaggatggctagatcccaggaggttaaggaggtgggaggatggctagatcccaggaggttaaggaggtggaggatggctagatcccaggaggttaaggaggtggaggatggctagatcccaggaggttaaggaggtggaggatggctagatcccaggaggttaaggaggtggaggatggctagatcccaggaggttaaggaggtggaggatggctagatcccaggaggttaaggaggtggaggatggctagatcccaggaggttaaggaggtggaggatggctagatcccaggaggttaaggaggtggaggatggctagatcccaggaggttaaggaggtggaggatggctagatcccaggaggttaaggaggtggaggatggctagatcccaggaggttaaggaggtggaggatggctagatcccaggaggttaaggaggtggaggatggctagatcccaggaggttaaggaggtggaggatggctagatcccaggaggttaaggctataaaatatgcaaaagccaatgacaagacataaacaggaacatatggtaaattggtaaccagtaacatatgcctaatatttgaaaacttttaag

SEQ ID NO: 471343 - DNA, 609 bp, Homo sapiens
agctagcaaaaaagtctgtgggaggtgttgctgtttttctcctgatggtaaagctttagccgtaggtctcaacgatggaagcttcttaatggcaaatgcggatactctagaggatcttgtgtcttttcatcacagaaaagatatgatttcagatattcgattttcacctggaaagcttttacaggtcaacactggtgctaaggaacaattattctttgaagctcccagagggaaaaaacaaaccatccccagcgtggaggggaaatttggaaagtttaagaggtatgtggcccatagtacacatgtcacaaatgttcgctggacttatgatgacagcatgttggttaccctaggcggtacagatatgtctttaatggtgtggacaaatgagatggaaggctatcgagaaaaaaggccttgtgatagtgaagaatccgacattgattctgaagaagatgggggctatgacagtgatgttacaagggagaatgaaatcagttacaccatcagagccttatcaacaaatattcgcccaatgttaggaatcaagcctcatttacaacaaaaagaaccctcaattgatgaaaggtaataatttagtttagtatt

SEQ ID NO: 471344 - DNA, 848 bp, Homo sapiens
tttgataccagatggtaaatcgaccctagaaagatgacacagagaggagaatgccacaggatgaagcaggtagagactggactgacgcgtctacaggccagggctaccggcaaccacgagaagctaggagagaagcagccaggaagcagtccctcaccagacaccagatcttcaggggccttgatcttggacctcccagactccagaactgttctccacacttctactccagagactgttcagcttttgagtttctcagttagacctcaaatggcctggagctcagaggaaaggccctatgaggacggaagtaagaaggcagctgtctgcaaaccacaaaaagagacctcaccagaaaccagccctggcaccttgatctgggacttccagcttccagatctgtgtgaaaatggatgtccagccaccagtctgacccagggctgtttcctggaccctggcattgtaattgctgggcttgaaggggaggaaagggacaagaagacaaaaatgatgcctggatatccagcacctggagaccttgggctttccagtcttcagcaaactcttcaacaaagcagtcaggctgaggaggtgagcctctccctagagggtgactcaggctggcgaagctcctgcccaggtaaccacaccctgcaggaggcgggtctcatcctgggcgatggggagcaggaggtgatggtggtggtggtatttgaagtggtgcttcattccactccaggtgtgacagtgacagtgatggtgacagtgaagcaagggtagaagcgtgttttataatcagggctgccaggtgatcagggaacggggagggagtcagggctgtacagggc

SEQ ID NO: 471345 - DNA, 670 bp, Homo sapiens
ttcatttggaattcatcccagtgttaaatgaaagaatattgtgcaaatttccaggaaaatgtcaatgatgactggctaaattggaacaaatatcgaaagactccaaaatgtttacatcccagctggaggcaagtgtttcattcccagtcagggacgggacaaaaagaaattttgctgtactcttcgaaaagcaaattaggaaagcattcccgctggcaaattgaatgtgtcttcctgccattgccagcagtgccagggaaaaagaattggggaagaaaatcagggtttttccccacaacctcacctatgcttgagtgttggtatccacctagaaagaagacaattcctactgctacaaagagggcaccactcattgcctaccagaccctcatccaagtgctttcattaattcatctcatcctccagtccaccctatgacgtcagtactttgtaatcatcctcattttccggtaaggtgactgaggctcaaggttaatgtcaaccggagatacttacacctggaacatgaagggagagagaaacagaaataaatagagatctgaagataacagaaaagcaaggaaataccagtaactagtgtcatattacctccctgccaactgaagggaagtccattcggatgattaaaacatcttaggtattcaatagc

SEQ ID NO: 471346 - DNA, 639 bp, Homo sapiens
tattataccaaggtgtaggactgaccacaaacatcgggagatccacagggtaacccagacaagaacgagaggccaaggaaatcctggagggtggcgattatgctgatggggcagttcataccaggagtgacgactccttatgccaacagcagtgcaggttggcaggatgaccctcagcatgacatggacacacgctgcattactcggtgggctgggcaggcagcagttgccgtcaagaaggcatctgccagatgtggggaggaagagcgttccagccatgacctgacaagaagaaacgtgggaggccacgcacagccaagtgcccacggggtgctgcacacggagcccaggaatcgactctggcttcttccggatcacatggttcacggactgactggagacctggaacaaggtcccctatatcaggggtccccaagtcccgggccacagaccggtaccggtccatgggccgttagaacaggctgcacagcaggaggtgagcaacgggtgagtgagcattaccacccgagctccatctcccgtcagatcagcgatggcactagactctcacagcagtgcgaaccctattgtgaactggacatgcgagggatctaggctgggtgctccttatgagagtct

SEQ ID NO: 471347 - DNA, 987 bp, Homo sapiens
ctctacttgctccaccggagcacagggcgccatcatgtggtcggaaggggaccttcatcttatgtccaatttgctgagcttcctagggctggggcagttcttaatgctgtggagctatgctggagagatccttctcttagcaaccagaatcccaggttctcggccaacacaagttacggggaggatgcaaggtgaatcatcaaataatgtggctacaggcaaaaaggatgaagaatggaagaagaagaagaaagaagaaagaaaaaagaaagaagaaagaagaaagaagaaggaagaaggaagaaagaagaaggaagaaggaagaagaagatggaagaagaagaagaaggaagaagaaggaagaaggaagaagatggaagaagaagaggaagaagaagaaaaagaggaagaaggagaagaaactaaacatgcaagctccagaggtgctgaatgctcaatcaagggcaaaatacatcagaaaccagcaaggatgctacctaagaccatcatcatcaacaagaacaacatggcagaaatgcagaagaaagaggctaaatgtgctcacctgagaaaaagtcccagtctttttcgaagtttccagatctgagtcaattttcagatctagaaccatttgaccatgggtacattggattatagatctgtcatgaatttccagttgacctgtataatttccagttgcactgactgtcagagagttggctgctcctgcaaatgaactcgtttaaagttctcagggctaatttagttgagcatttcataaggtttcttatggattctgttatgacacttatagtattggagaggacccagaagtttcactgttccatgaccagtttgatgttaatttccctgtttgatatttctgaaccatgtatctaaagtgaatttgaatcccacacttgtcatagtacaagctgggtggtatgatttttctcatagaagacattatccccctcccagaactag

SEQ ID NO: 471348 - DNA, 1693 bp, Homo sapiens
cagcagcctcaggttatgggaaagcgaaagtatctgcacgtctgtgtgtgcaataattacatttcctcgagtcaaatgtgtgagtgtcctaaccctgaatcctcccgtttgagtccgatgtcgttagacaaatccctgatcggtgaggtcttccaagaacaatctctcttcacacacagacctattccttctgtaaggaaatctgcagcagctgcaaagagggagcatgtttcttcatattgtcacctatctgttggtgttatctgcagtataggggcagagtttcctgaaattgaggagagaagaggacaccgaactcaacttttcccgcagtctactcaacataaggaccgtgaggataaagatctttatgatgatccacttccgcttaatgactacaagaaccggccttctttggatacctgcttatctagagagagccagtacctgtgggattcaggactctttgcaaattctcatttaattttctctaaggtatttgtcttcaaagaaagatttgctttcgacgggctgctgatattgcggtgctaagctccatgggttatttgtttttgagactgtgcataaagtactaacattattatgacacaattaccacccttatgtgattcataaccttaagactattataggcaccacgggatatatttctttgttttggactgtgcatgtgtgtctgtgtcagtgtgtttgtgcttatataccttctcttctcaatcagactttggaaatcctgttttatttatttcagtattgcccttacaatgattcatcaaaaaacccagtgattttcttatacaaagtacatgctaaagtgatttttgattgactttaaacttcagagtgaactgggaggtgagggattaacattttaactctagcatatctttaaatataactatctacactagatcacgctcacctgataggaaaaaaggactagatcaactactcgtaagagtcttttccaactcttattctgtttctagaaattatactgtatcaaactgagaatattctattttaattcttcatttcacatccctgtgccaagcatcatccaattatagtacaagttctatgtggcaaaaaaatataagcacaatgaccaaggcaaatggcacacccctcatatcttttgccacccctttataccctatatatgccttttgtatttggaaacaaattactgctaccaggaaaataactaaaaagacccacaataacatgatgctgtaatcagctgatgtacctatatttcagaataaatatttgctaatacaggacaccataatcttcaggagctgtggagaaagatacagtcaccttcctttccttcaatttgacattttcttgatcagatctgacattgcaggatctcagatccaacatattataggaagggtttggcaccctcaactagaataggcagaagaagggagctggcatctgaaatatctttctatgattatacaaggtatggcaggatctgagcttctgtatgcaagccaaatgaaattattaaggctaaccttctcactcagcacttaataggtaatcaattttcactaacaacagtggagggtagaaatcaagaagggaatgataatgctcttccttacatttgcaaagggctttagagtgtgtaaaatgattttacatgaaataattc

SEQ ID NO: 471349 - DNA, 956 bp, Homo sapiens
tgccagttactcaaagcaaatactctagaggggcagatgtgtctctggaatggcgggaggctacatcattttcccagctggctccttcctctgcacttgcctgcttctcggagtacatgggaaaacaatgatggcagatggaaggctgagtgctggaggacaacagtgtactgctaagaggtcagcggtaaccttcagggacagcaacccaatgggaaaatcaggtgacaagtggaatttactacaccggaggacagtattgatggcatattctcaggtggcaaagtgtggtcacctcaatgtcacatccacaactggcattttcttcatgaagccacctgtattcctagactcatgccccctttctccatcttcaaggagcgtcgctgcaatttctgcttcttacgtcacgtctcctctgcctctgtcccacctggctccctcttataaaaacccttgtgattacattgtgtccactcagataatccaggataatctctctgcatctagtttcttagtttaatcacatctacaatgtcccttttgctattaagcactttaaatatgtcatgctattctctcctgggctgtaaggtttccactgaaaaatctgctgccagacatattggagctccagtgtacattattttcttttctatttgttttaggattctttccttatccttgacctttgggaatttgattattaaatgtcttcaggattggtccctgttgcattacttatttcatttggtgaggtaatgttttcctgcatggtcttgatgcttatggttgttcattgatgtctgggcattgaagagttaggtatttgttgtaatcttctcagtctgggcttttttttgtacccatctttcttgggaaggctttctaggtatttgaagggacttgatccataagcccattaatgctgtggttcttgcaaactcgtagaggta

SEQ ID NO: 471350 - DNA, 3272 bp, Homo sapiens
cctttcagagggtgaagggtgagaggagggacaagatcaggaaaagacttccgatatgaccgtctttgtggatcaggctgcctttacattcaaggtcggaagcagagttttaaatgggaaacagcataaaagtttggaaaatttgcagcctgacaatgtgatagaaaataaaattccattttctgaggagaaattcaggccggctgcagaaatttgcgtaagtcatgaggagctgaatgttaatcacccagacaatagggaaaatgtctccaggtctaggaatttggtgccctgcatgtcacctgctccagccgtgactaaaagggtccagggtacagctcagtctgttgctttagagggtacaagcctcaagccttggcaggttccatgtggtgttgagcctgccagtaagcagaagtcaagaattggggtttgggcacctccacctagatttcacaggatgtatggaaaagcctagatgtccaggcagaagtttgctgcaggggaaaagatgtaatgattaagtagaaatggaaaagcaataataaaaagttaagtgtaaaaggcaacttaatttccttgttactctgaatgttaatagtcgtgtgtgggtctcacccagaccatttcaaaatatggcaaagaaacatgttttggggtaaaataatttcaactttcttctttgtcacgtgatgttatgctagagtcagactggaaaacgagcctaaactcgtactggtaaatgagtgattggtttgctgaggttttgtgattcagtgccagccaaggaaatattggtcaagttggctgcagaggcttctgggaaatgttttctcattgagctaaagaaacccacagaaatgcaagatatttttatttttgaattgtgtgcctggaaatgcaatattcacttgctctccagaggagagcttgccttcagataagccaacagggtagcaaaaatgtggaaataatctgggttcttgatgctacctttaagttgttcaaatgatccagactggaggtaccctaccatggaatatctgttatggtgcatgataaatatcctgatattcaagccagctattgattgattgctttcttactaatgcagaggcatacagataaaaagtacatttaccgcaacagtaaggcagagtatgggaagcaaaaaaaagggaggtataaagtactatgagaattcaggagagggagggaatacggtctactggggtgaggagaggtaatcagaaaatcagactgacagcataagccacacacagacaacacatttagaccataggaactttttggtatgtgtatggattacagaatgtttaaaatttaagccaggtatcaaaaactcatgatccttcctgtaaaagttaatatttattttttcatgctttatttcagtgctcacctagcaacactggctgtggctgaggagtggtgttcctctacacagagcctgggctttcctccagacttgctgccctcttgcaagccccctgcctgatgtcacctgcctgatgctggtgcttttcgactgctgtatctatgaagggagaagcatttgctgctgaaacacttgagagtaaagtttagcagagtaagagagacataaatctagaggtttgggatagttttttttttaaaggatgtatcattcgtttattttaaaaagtctaagaagaaaagaggagagcagtgggtacattcgagagcatttgagggttagaaaagatttacatcttaggaatgaggatccttgagcttgtttccaagttcatggtgttttgagtgtggcaagactttttaataatatgaatgatgcccatggaatcttctgtaacattcaatcgacgggaatcccgaagtactatatatcccagatctttattttcccaaacacattggagtatgaaggacatgttgtgaatgacagaattctgtcattatatttaatttactatcaaatttacctactaaagtggaggactgattaagataaatacagacaatgatctcatcctggaaggaattactatggaaaaataatttgacaagaagatccactttttatctgaacaataaaacatatcaatttctcaaaacctcttatgtttggccagttcatctggtgagagaatggaaaaagggagacattcatcaattttacaacctgcagtccatcctcagaccaaatcaggaagaagagtgcatggagaaaacatttgggaagaaaaggtattttcaaaacatctggagcaagagacaaatcccatcagctcagttccaacaatatatgcaggtaagattttgttcttgaaaaatcttcaattgcccccattacctctaaaccttttacctctggccagcagtagcaaattagaattaataatgtggcttttgaaaaagcaacagtgatgtaattattgtatcagcataaggttaatgatttttaaaatggaaaggctagtgatgtgcttagaattttttaaaaatcgaagaaattatctcaattgaatttgcctccttctgcttgttcttcaggtaataaggttgagtgaagagttaacattgctgcaagtaggattatctgcaaaaacattaagccagtcttgacttgcttaacagataaaattcagccagaaaatgaaaatagggggtgaatgtttgtgtgggaaacacaggagcctagtttagcactctacccaaatgcgttgaagatgctgctgaatgtttcatttgggataccaatctagctacaagtatctggaagaatcaaaaaatgttttccaaagttaatacataggcgtgaaaaccaaagagcagacccaatgcacaactcagtcccgctaaaggcctgtgagacctctcatggttgaatactcagaaatttttaagtaactggtattctccataaacaaaaataaagatggtaatataatacaccatttttctaacaagattctactggttagaaaaatggtgtaaatgtataggctagtctaggcattgatggactgcagcaggtattcagaacactggtgatgtttgagaggcatattggggaacatggcagcagatttctggacatgtctcccatttttatctcttattaaatgtatgaccatgagtactttacttaacgttttggtggctcagtgttctcattggtaaaatatggctataaatagtactttgtgggttatttggagggacaaaggtgataacatatttaaaatgcttagtcctgtgcatcaccc

SEQ ID NO: 471351 - DNA, 1517 bp, Homo sapiens
gggctccttgctacttatttggctggaagcaggacgatttatgagtgagcctgatcctattgttttgatttatggcacctttatggagacttggtcatttcagttgattgtccaacctccagtgactgctaagggccttggaaagtgggaaataaaaccagatatagaaaagcataaagaagaaaatacacatccaatgaaatgggagagtttcctcacccccccagcaggacgtgcaacagaggtgtggcttgtcttgtttggccgccatgtgcgctcaaaccccttatgtgacagggagtatgcagacgggcaggtgcaggagctggggcaatatccaggggtgggtgtctgcaacttccaaagcctaaatgggtgtatgttacaatgtgctcttttagccttgccatccatggatgtcttaagtgttagacagttcagtggaccctctgccttttcacaagggcagagggccagtatgacagctttctgtattctgagctcttgtccagctcactggggacaattgtacaacctcatcagcccagagatggcaccagaggaatctacagaacaaacttgactaactagctttattttctattcattcttccatgtacttaccttcctattatttgttgctctaaaaactcagttttcttcctttgtgttgtcacttctctaaatatttattttcttttgttaaggtgatatataaccaccagttctaaccaccacttctagtttcttatctctgagtgttttcatgtatgtgttgctagaggaatcttttataataatgatgtgggctaatgacacagcctttcatttttggatactaagccctatatcagatgatcctagattggatctgaaatgagaaacagcagggtaaaagatgaatttgaaataaaaagtctatggataatactatggcattaacgttaatttcctgatgttgaaaattatactctggttatgttgttaacatttggagaaatctggagaaaaacacaatgcaatgctttacactacttgtgcaactgttttagcagtttgcagcatgtgattggctgaaaccttggctgcttggatgagacctggttacttgctgcaagaatataccctcaagttagaatgcaatttgtttacatattcagttaggttacaattcactgtgtatggagggagctttgggccaaattttatttatcagatagttcacagttttaatattagatcatgatatatctctgtttataatatcacctttttcccaaactccttttttggtgatggtcatgataataaacaagtactgtgtaaaagtaatacgggcaaaaaatgagggtagcagtgtccaatttgatctcaatgtttgagaatttgtgctgtgttcaactggcatatacattttattaataaatatgaataaaataaaaatgttatattttctttcatttaattatttttcaaatggctaagttgttatgatataaatatggtatttaataagc

SEQ ID NO: 471352 - DNA, 588 bp, Homo sapiens
agacatgactttctctctctctcttttttttttttttgaaacaagtttacggggtgtagctggtatctggttacatggataagttatttagcggtgatttctgtgattttagtgtgcctgtcacccgagcagtgtacgctgtacccaaaaggaaccctttgcttcttggaaaactgaaggagattttggattcccttatgctacagcagactgacagggcagcccccagagggatggaactggtgattcctggagaagaatctcagtatgaactcctgggctggtgggatcgaagagttacaggacgggaaaatgggacctcagttcaaaccattccagctcctctcacactggcagcagttccagcaaagacccaatttatgcacctctatagatccactcaatctcttctttcctgtggtagtaaattcccagatcctcctgtctcatcctcagataccagcaattgcagaaacctactcagagggtaaaggctaggctaactgagccctaatagctgcatttccccagtggctgccacaagggacttggaaacactactcagaatcatgagaaagttacacccta

SEQ ID NO: 471353 - DNA, 668 bp, Homo sapiens
taaagaatttctacagacacagtgtaatggttaatattgagtgtcaacttgattggattgaaggatgcaaagtattattcctggatttgtctgctggcttcacaggagaggtaggatttagactgaatcctagaagttttccagatgaagtcattgagaatggcaaccatggctccattgagaatggagcaaaatcaatattcaagacagtgagttatgaaaggagcagaggggcaatatctctcccggatacacccaaagccccttggcaatgtcgggagacatttgtggttgtcacaagggtcggaggtgttactggcatcctgcaggtagaagccatgggtgctgctagggctttaaaccagtattttctgtaccgcaatagtgaaaatgagaggtatgggaaaacaggagaatggctaaaatccaaaacagtgaccgcagccaatgctggcaaggatgtggaacaacagaaacactcatatgttgctggtggaaatgcaaaatgatgcatgatacagccaccttcaaagacagtttcttacaaaaccaaacatatttttatcatacactccttggtatttacccaaaggaattgaaaacttatgttcatacagaaacttagacttgcatttttatagcaactttatttataattgccaaaactt

SEQ ID NO: 471354 - DNA, 894 bp, Homo sapiens
aaaccagtggtttattagatttcagagggagtatggaaacgcctggatgtccagagagaagtctgctgtagtggcagaaccctcatggggaacctctgctagggcagtgcagaagggaaatgtgaggttggagcccccacacgaagtccccactggggtactacctagaagagctgtgagaacagggccaccatcctccagtccccagaatgatgttccctcagtggttggtgggggcggggacaagctgctgtacttatcacagagattggaagaaaacaaaacaactgcaggagcagagaagtttctgggcttttatgatggagaaatggagaatgggcagaagaaggagcagtcagtagagggggagttgaagggcttagcaagatgtgtgttaaatcagcttaagcaggagagagcagaaggaagaaccaaaagtttctcagccaaagttggagggtcaaactggggagaatgtgatgaagaacaagagggcctggtggaaggaagagaagcttaagcctcctgacattcatcttggcaaagccgtgtgccttcagtgacactgtgtttgtaacacattggctataattgcattgtgagtgtaaaataattcaatggcccaccatttttcccaaaccataattagtacccaataaatgcttatggaataagaggtatttttttattcacctctgatttttaatagttcttaacagatttttaaaatgccaaatctcatgttttaatgatatcatcattatgttttaacttaaagcaggaatagcaaactttggaatctcagaaaacatactggaaattcatttttttttaatagcatgtaatttatttaaagaacatttattacacatggtatccttgagctaaatgtcc

SEQ ID NO: 471355 - DNA, 2227 bp, Homo sapiens
gaaaatccacaggccatgttaatggaggattctgagcacatcccatgggagaaggcaacttttaagtcctcccccatccctgaatctggagttgtgtttggactgacaagctcaaatcccaaccatgaccccagctctcccaatactaaaggctcaagaaatgaaaagatggctttgttgacacttcaacttctagcccctcctcggcagctggttcaagaaggaaatgagggatactctctccttttcaaccatgctggcttctttgttgcccttgtacatgctaaatgcaaactaaagaagtacctttcagctcatcacctggcaaagaaagcagaacaagattttcttcacagtgataatttaataggaaggttcccagagagacacagtgacttcagcagaggcataagcacagcaacacggcaccggccaccagcatgcttcaccagtgattttcgtgacaatgacagagtagtttccagtttagccacagttggtcctaagtccctgaaggcaggaaccccaggacgacagcaaggtcctggattggctgctcagcctgtgaattcagtttccttgagtgtccaagtgggagtcaggccccctgaaaatagtgcctataacaactgtttcgggcttgatgatacagactgtagaagaacaacacaagcagcccctcccactcataggctgagaatctttcatctagcacagggatgcctacttatacacgaccttggagaaaaaagcatccagcacggcaggtacaagtatgggatgcatttcagctaaattattttccctggaaaaggggaatctttatatctgtccctggacctctgtgtgtgtgtctgtgtgtaatcctttaaatgcttggaggacatcttacctcctccatgaaaccctactcatttcctgagccatggttttattttgtttttaattgacacataatagttgtacttatttatggggtacagtgtgatttttaaaggcaaaataagatgaaaaattgaaaaagttatctgaataattcaaacccaatactaatgtcatttgcatcattctgtgttagcagacaactttcaacttccaaattaacatcagcatatttttttgtaattcaatctttcagtaattaactatagtaacttatctgcattgttcgctatgtttttcttaccaggtgagtaaattttaaagatattttacatctctttaatcttatgatttcatttagtatagatctattttcctaaaaagttgaaatcattttattactttacttgtaccctttttttgttctttaaaaagttttaaggtataagtgattaaaaacaaacaagccaacaaaaactaatattctctccatatatgataatagtaattattaaataagactaataaaggaaaaatgccatatatgataatagtaattattaaataagactaataaaggaaaaatgccatatcaacattaaataatagtattaaaacgtcaagagctttcaaataaattatttaatagtattacacaatctgcaaaacaaaaaaatatttttaaaaagcattaggacttttatatatacagggaaactgaggcttagtgaagttaagtgtcttactcactccatatttcataattggaagaactgggactaggcttatatcctctgacttctgggccagtgatctttctacagcagaatcgtgtagagagatctaagatctctctaagagagagagatatatatatatattggatttatatatataatttatatatgtataaaattatataattaaataaaaatcaaataaaattataattaaataaattaatttattataaattcaattataaataaatttataattaaataaaaattatatatcatatataatttatatatgtatatactttatctatataatttatctatataatttatatatgtatataatttatctatataatttatctatataatttatatatgtatataatttatctatataatttatatatgtatataatttatatatgtaatttatatgtatataatttatatatgtaatttatatatgtatataatttatatatgtaatttatatatgtatataatttatatatgtaatttatatatgtatataatttatatatgtaatttatatacgtatataatttatatacgtatataatttatatatataatttatatac

SEQ ID NO: 471356 - DNA, 805 bp, Homo sapiens
ataaacaagactcttcaattgttctcagaaataagaccccaggcccctggacagcatgtgtagtgtgggcaatggcaatagcagtggtgggataatctgttctcaaacagtccacactgatgttggtggtggctgtgatgggctgggtggggagcttacaggcctgcaggtggtacatgtgcgagtactgtgcaaggactttagaagcactgtttcattaattcttacaataagcccgagagaccaaggaatagccacccctctaattggagagtccaacgcagtgtttacaacagaatcatctgcattgcctaatacagtcccggttcacattaaaacaattgatattttcaagcatgtagaacatgagcttttaaataagcctcctttgttgtttgttattggaggctgctttaggaatggctatgaagaaaaagaagtgtctttgtttcctgtcagtgctggagcaaattactacaaatttagtggcttaaaaaattattgtcttaagtttctagaggtcagaagtctaaaattggtttcgtgggacaaaagtcaaggtgtcagcaggtaacagtcattctgactggtgtgagatggtatctcattgtggttttaatttgcctttctctgatgattagtgatgttaagcattttttcatgttttttggccacttgtatgttttcttttgagaagtgtccattgaccacatgctcagtcataaagtatgtctcaataaatttttaaaaaatcatgtcaagtacacttttataccacagttcaataaatatgtaaatcaatatt

SEQ ID NO: 471357 - DNA, 584 bp, Homo sapiens
taaatcatctctagattatttataatgcctaagataatgttgtttgtgtattgtttatgccaaagtacctggacttcattgttcacatcactatcagcattttggtcaaaatcattcaacaagtatctaggaagctccaaacattcccacatcttcctgtcttcttctgaactctccaagctgttccaatctctgcctgttacccagttccaatgttgcttccacattttcaagtgtctttatagcagtgccctactctctgtggtgaaatttctcaagattgaattactgaattcatatgaggcaatttgccacagggatctgtcccgatgtaattgtgtgagctggttaagcagtcttggtagggctattgtcctcatgtctgatgctggagcttggagtctgaaggacaagcaatcaggaagggaaaatgtatatgacgcaaatggtgttacataggccctatactataccttagattcgtaaaatacagtagttcacaagtagatccatgtataaattcaaacttaggttataactgagggagaattttaaatcaatgacagaatgatcacttattcgct

SEQ ID NO: 471358 - DNA, 656 bp, Homo sapiens
tcatcagttaaggcaggaacaggccattttcacttcttttgtggtggaatgtcatcagttaagggcaggaaccggccatctggatgtgagaatgagtattgacctacaagtagtcatggccttagaaaaaatgctgttgtggaagccttgctgtccatggaaggatgtgttaaccagctcagcagcgagtcagggtgacagtcttttacatcctgccctcttggtacctgggttcttgtccggcgtccggaaagaatcaggtcacgcagacgtgaaggatgggaatgcagatgtgaataaggacaggaagaatatttataccagagaaaataacccctacaaagatcctatgctgaaagactgcacagaaaaaattagcatggagagtaacgggaacaagagaggaggagccaaatgtggttggagacacaggcggaatcacacagcaaaagcctttgggccaagtgaagttttgctttatggcaaatgcagcagggcatcagtaaagggccagtctcactatcactgctgcttcggccctaagccagccctgacttctctcacctgattgttattattactctttcctcctcactgttctttcctccttgagcctcccaaagtctattctcagcaacagtcagtgtgattaattt

SEQ ID NO: 471359 - DNA, 865 bp, Homo sapiens
gataaaaataatttactacttaagccatgatagccaaccatggttgcctaagtcttttaaatctcttggagggcatcccgggcctgatacagcagtcagtgcagcaacagtgcaacagtgaggtttctaatggggctgtcctgcaatataatttggatgttatttctgttgtccagcctagaaattctgtgagtgtccttatgtctttgaaaatcccttccatcctactagagttctgtgagtactcaaaaattgcaaaccaggagggagatggcctaaaagttactgccctatatgaggtcctccaggtgaggcagataaccaatggggttcctggaactgccagattgcctctccctgatgtccttgcctgctgtttccaggtatgctcatccagtgaaaagcaccagaagcacacaggaggattcaaaaatgtccgtgcatacatcaaaccaagcaacttagaagtgcaatgggaaaattgatggagaaagggacggtgtttctaatagactgtgattcgtgtagctaacagattttgcagattttacataaatatgtgaacacctttgtcatgttcctttccagtgccttgaaaggagcccatgaaagttattattctattttgtggtttagaaatcatcaatttaagatttttgtttcattgagcaaaaggccatattgttcccagctctgtattaaaaaaattcactggtgtaaattttattattgtttgcaatgattttatttaccacccttccaaggatcttacactcaaagtactgctgtataactttcagaacttttctgtgggaaaagcactcttccttgtcccagtaatgtcagcactgtccatgtaacatgc

SEQ ID NO: 471360 - DNA, 848 bp, Homo sapiens
aatgtttctctccacttcaaatgtgagacgacacaaagaaagtcaaatacgctcccctgaccaagcacgtagggtgcctacttctaaagacaatagatgacaaattccgggcaggcaagccagttgcaacaaggaatcgatggttcagttgtcacaggacgtcctgatcctaggtttagtttctgatccagctgaaggctcctacacactttctgctgatcctagaaggggcattttgaaaacgaatagtgcaagtcctgaagttgaagagctgggaccagggtccgcaactgccatgcaccagctgtgtgacttggagaagattaagggctttgagtctcagctgtccagtttacaaaattgggataataatatattatatacatacatggtatattcgaagggctctcagcagagaaaggcagcacaggcttcacattcctggacctgtgaccacaggagaaaggaccaagggcagtgctcaggaggattatttaggagttctactgaaatagaatttgagctgtggaggtcatctacactgaagatgaaaaagacaaaacggcaaggaacaattgttgagcacctactgaaaggagagcactgtgctttacatacacaacttcatttaatcctcagtataacactagaaggtgatattttgatgctgagggagctgaagtcctgagtgtttgaataacttcctcatcctcaaacagcgagtaaatagcagtactagattctgacttctaaggcctcacctttctgggacattacaccagggaaattcaagaacagcccttctctaaccttgtgattgaaaaaggtcaagtttaaagatgggaacc

SEQ ID NO: 471361 - DNA, 690 bp, Homo sapiens
tagagcaggggtccctgacccctgggccgtggttaggaaccaggcagtacagtaaaagagagaagctatcggaatgatttgctggggtcacagtcacctggttactgcattcagtaagcgttggacagaggtgaaaaccaagttaggggacgtgaagagtcagagccagaatattcaggaaccaaagcaggtggaatcttgcaccaagaaacagaatccaaaaaaagtcacaagagatgtttctggtacttcacgagtgggcaagttgaagagaaactaccagagacattttgagagcaaacaccagaccattggtttaagaacccatcccctcctatgtgtacagcagctgcatggattgggaggcccaacaaaaaagcttcccgtggcctctaatgggattatgtgcttcccatggggagaaaaaccattgagaccatggaggagtggaaaccttgattgtcataagcccctgggaatggggatgagagcccactcaagtcgcatggatgagcctgaagaagagttgatctgcacctccaaagtgagctctggatgcaatcatcaagaatgaatactagaaggcaagacagcccatgtttgtatcatcagtttttgtccatatttgctctggaataatttggcactgattattattacggtttcacaattaatgacccagcggattgc

SEQ ID NO: 471362 - DNA, 763 bp, Homo sapiens
cctccctccctgcctgcctgcatgggtcagaagttctgtttccagcggtgctgctgctgctggcctgactgaacttgcataagtcacttacagatcttcaccccaatgtcttcatatgcaaatgcagactgcttttgggtgcttttgacatctactcttctccttgtaccccacatcctgaatgtatggagtcatttggactccgtgcatgtcgtgacaaagggatacatctgggaaatgaagagttcctgctcacagacgagcaggtctcgaaagtcacgggctctgatatgggccttgtctgaacaggaaaaccaggacatctcatctgtcagaaatagaattgaagaagaagaagaaagaaaggactgtgaagaagaaagaaagaaggactgcgaagaagaagaagaaagaagaaagaagaagaagaagaagaagaagaagaagaagaagaagaagaagaagaagaagaagaagaagaagaagaagaggaaagaaagacggactgccaagcctaagagttggtgtcctcatctcttcgaattcactttctgaatgctttgtttcattgtttgcaaaggtaggtgctaaaacttatccatgtttggtgaagtggaaatcaatgcagccgttttggaaagccatttgataatatttaaaaacaaaaatgcatatctatttgtctatgaaaagaacctataaatgcacttccacatgtactgaaaatatattgtaaaacgattttcactgcagattttttttt

SEQ ID NO: 471363 - DNA, 738 bp, Homo sapiens
aagcttagttttatgaattctggacccaaagtgggttcagtgccaagatcttacttagacatgtccaaagtgatcatcttcagctacctcttctggtttgtgctcaccatcatcttcatcactgggaccaccaggatcagcatcttttgcatggggtacctggtggcctgtttctacttcctgctctttgggggcgatttgctgttgaaacccatcaagagcatcctgcgctactgggactggctgatcgcatacaacgtttttgtgattacgatgaaaaatatcctgtcaataggagcatgtggatacattggaacattggtgcacaatagttgttggttgatccaggctttcagcctggcctgcacagtcaaaggctatcaaatgcatggaggctgtagaactgtagtacattgtgaatctattgtctataacatgagatgccttatgctaagcctctttgatcatcttcttgaaacttctgaaatgctgaggacttggagtcagggtctggagattggatgtagtgctgtagctccattcttcttccagtttttgcccctgctcttgtaagtttaggaaaaaagactggggagagaaactcagaccttgcctaggtcccatcagatgcttggtgtgaataagctgatggatactgggttctattacatgaaattagcaatatctatcatttgactcgaagttcagactaatatatctgtgtttacctacagtttc

SEQ ID NO: 471364 - DNA, 1190 bp, Homo sapiens
gtaagctgagatttcacgctgtctgttcatcccatagaatggaggaatgagcctgggacagaactcatcagctctccttcccctggagccggcgttcctgcagacggagactttagagagatcccgggatctatagaggctacagattcccagggctccagggctcagcactttttgtcaggagaggctgcgcttgtgagagaggggaagtctttgaagaagaggtgaacaattcagacaaggtggtgtgggagaaggctatcccggcagaggtaccctggtgagtcagggcagagataggaaacagagaaacagtgtggcccttgcaagaaaccgcagatcaatagcatcctgcaaaccacacgctctaagagggatgtggagggaggggagaagaagtgaaggagaagtggaggtagagaggctaccggggtgtttagggccgctggcagggccgctggcaaaaatctgcttgggctttcagtctgggtgagggagcgagggttggatggaggactgagccaggggcctaccctgaagtctggatgagctgttgtcatgagcagatgggatgtcacctgtcaagattgcagtgtcaggatgcgaggtccagcagtttggggttctgacaacgtcccacatacacaaaagtgtggatgattgaagggcgtgtgaatgaagacgtagtagtcaagaaactaggatttgctggaggctcagttttgggcccgtcatctgcaaagacatggatgaggctcctccatgaggatccccatgtgagaagttcccgtattccgttcaccactgtatcctcagagcctaggcaggcctctgatgggaagaaaagctgttctaggaggcctctggacacctggtcccacttgatcacctttggcagtggccaagcatcagacctttactttctgtgcatgctggagacctgtgagggggaagcagccctgatgatccttacacaccactcactagaggaggaggaaagagaggccctgaggcctgatccctaccttttctctggagctccagcatatcatgctgtgaagaaatgttccagagaatgcaacatgtactcatggaattaaaatctttcaaacccatatatattcagacaatggagagggtatttacagagcttataaaaatgagctacgtgtggtgcacctctagggttc

SEQ ID NO: 471365 - DNA, 1256 bp, Homo sapiens
ctggaggattgctgggccccactcttacagtttgattcaatagatctggggctgtcagcaccactctgatggccagatcccaaacgatctccggtggcagtgagtgggagtgacggccatgctgggctgccccctggagccagagcccacccacgacccacatgactccacaggcacaggtccctcagctgctctgggcacctgcaaggagtgggtcagtgcatggggccaaagcacaggccccttcaagtggggagccctgcaggggacccttgctgggccaaagggccttgctgcccctcacttcccaatatgtcaggagaaaagattggatgcctcagcgcagctgcagagttcttgggcattctgccactgccttctttctggccacatccccccaaccactcacgatggggtccctgaggatgtccacgtgcaaatccctgacactcgtgatgaggattatgacagggacctaaattctgctaagagcagaagccgcctggacagcaaccggaagtgcggtggctctggtgggcgtggtgggcgagtaccagcagaagccgcctggacagcaaccggaagtgcggtggctctggtgggcgtggtggctgagtaccagcagaagccgcgtggacagcaaccggaagtgccgtggctctggactctgggctgtcgtagccaaacacgccttcttggccgagtggtggcattctgcctgccccctgtgggcatcattgagattctgctccccagcttccgcagtgctccgttttgtgatggaaaggaagggcaccacttctaccaccaggagatacctgctgtgggacacagtgctgctccagccatgcagaagctcacacaggcctgcagcagttattcatccgtgcacagctgccactggccagcagagcctgtgacggggccttcacaggaatgcgataccgccaagcctgaacacagagaggacacgacgttggcacaggcctgttgggtcttgacttcagcctgcagaggagctggaggaggctggcagactctgctcacaaatgggaaggcccagctgccaatggcttttcctctctgcccatgtaacactttttgtggggaatgtgtggacacagcttgaggctttgtatccaccctgtcagttgaaatgaagtgttttccaataattagaatggtggaaaaaaaaaagtggctccaggtgagaacacccagagttcaaattccaggtttgtgactgaccacctctg

SEQ ID NO: 471366 - DNA, 655 bp, Homo sapiens
tgctcgtctccaccaagttgaaatggaagaaggtttgtccttgccagttcccttgattggaagttggtctctgttgctgtggcatgcgagttactgcagtatacatttaataatcacattcacaagctccctcattgccagtcctcaacacacaaaagtactcacttggctaactttgaacaatgcacattttccttacttgcactttggatcacaggataagaaggcggaaatggtaaaaacaaaaactcacaaaagaaatgaaacatttatttctgggatcaaggacccttcacggaagggggacctggtggtctgcagcctggcagtcctgctgtggtggttgcagccttcactgctggccacgtgctctgaatcaacagcccccatgggctcattcacactgagctgtgtctgggtcgctgtatggggtcctcctggcagccctggtgcactttcctactgacagatctcagtaaagatctgtgaatgctgcaattctaaaggaaggtattggaggactcttaatactcatcttagtattaatgaaaattaatgaagacattgtgataatggtgaaggatggtcataacgatgcatggaacagaacaggttcagggatagactatacatctattgattatttgataatggt

SEQ ID NO: 471367 - DNA, 933 bp, Homo sapiens
ccaggtctatctgagtctgatatggtttggatctctgaagcccatgttagagagctcagtgcaggtgggaataggtgcccttatcccatctgcttctcgaggacgtgggagccacaggccaaaagtgagcatcttcacatcattgctacttcatcatttacaaggttcactgtttctcaccagatgctagaaatacaaggaactaggagtgacatgggaggactgagcaaggccctagctcttttcaattctgtgaaagctgagaaaggtgagcaagatgcagaagaaaagttggaaactagcagaggtttgttcataacaaaagtgcaagataaggcagcaagtgctgatgtagaagctgcagcaagttatccagatctaactaagatccttgatgaagttggccacactaaaccacagattttcagtatggaatctactggtgaagatgctgtgaatgttgttgaaatgacaaaaaagaatttagaatattacatcaacttacttgataaagcagcagcagggttgagaggattgaccccaatttcaaaagaagttccgctggggataaaatgccatcaaatagcatcacatgctacagagaaatctttcatgaaaggaagagtcaatcgatgcttagcagccatcaacatcaagacaagatcctccactggcaaagactacaacttgcttaaggctcagatgatcattagtattttttagcaataaagtattttaaaattaagggtacatgtgcacattgtgcaggttagttacatatgtatacatgtgccatgttggtgtgctgcacccattaactcgtcatttagcattaggtatatctcctaatgctatccctccccctaccccctaccccacaacagtccccagagtgtgatgttccccttcctgtgtccatgtgttctcattgtt

SEQ ID NO: 471368 - DNA, 1008 bp, Homo sapiens
ggtgtaaaattagtggaagactgtctcgcccctatttccatgaacatcgaggacttcagatggaaactgggcttcataccagttgtgcagcgcaccacggctgtccttctagaaaacgcaggcacaggccatcagcttaggtacaagtttagaaaaagagacttccaagaaaacccaagctactccacagaagtgcatatttcgaacatgaccccacaggaatgtctgccaaggacagggcagcagtgcagtgtgtgcgcgtgtgtgcgcgtgtgtgtatgcgtgcctgtgtgcgcatgcatcacacttaaaaaagactatggtctttttatgacaccaggcatctcgtccttcccagagaattcagtttggttgactctggcagatgtttttgtcctaagagccaggcttgattgttgtgcagttcgccttgggtctgcaagcagcattgaggtctgcctgcatgttatgggttgaagtgtgtccccccagaattcagatgttgaggtctgaaggtttgtcctttcctgctgccttcttttttggcttcgtttctacttttgcaggagcagggttaggggacaactgtgcccatctcctcctgggcttttccttcacagccctcttgactgagctgaccttcctcctgggcatgttggtggtggggagggggcctgccgggtgcctacgggcaatggcgaaaccagagccttctggaagctgggctcaccagctgctgccgctcctcccaccacccaagctgccgagacctgtggcagatttttttccctcaagtttatagagctatctgtagtagctcactcatgtattctgtaatgaataccccaccttccccacccctccatctgccactttcttatctaccgaatttgatcttaactcctcaaaaagctagccaagtctgggagaaagttggaaagcttaggatggtaaaagtaatgctgttccaaatgcaaccttgtattatttttacactggaaacaaatc

SEQ ID NO: 471369 - DNA, 1096 bp, Homo sapiens
ctcctctcttttgtctgccaaatcccaacctacccagggtgttacccccagctcaagttcctcttcctacaccctggttctcagtcatcttcctcccaactttgctgagctcttgccatggttctgctctacaccacatccctcaaccctgattccacagggtctgtgatgcgggtcaaactaagctcaggccacagcccttcagtgggcacgattggctttgatgccttctatgaaggtgtagaattcttggtttccccagcaagtagaatggggctggagaaggaacaagaagtgggaaacagagaactggagaggagagaagggaagagctgccatattggggagcgagtgaaaaaggaggagaaaacctatgttttgattaagaggaagaatagccatgagtatgttaggactgtggagcgtagttgtttcctggatgtttggtttagacatttaatcttcagagagatgactttactagcaaatattaactttagatatgaagcttttatttgatcatctttatagctgttctcggtgggcaaatacacttaatgtaccttgacatcgcaaagttatttttaaactgcaatgacaacatgaagtcaatgatatcacttaccctctgactagggaatgcaataaaacacattaaagagaaatattgtcattgtacagtgcaataaatttgtatatcatgctgttaagtgttgccgtttatagcaaaatatgaagccctgtaaggacaaagccttgatttgaatccagggatggttgtagctgctgccgaggtttctgatagcatcagaacatctcagcaaaaggacttggcagtgtggaagagttactggccagggcagaaaacaactttttaaatttagactttgctttcacttttacatgttaataaaatagttttggaatcttagccatttgttgaatgctttccttcaaataatcttgtctgagaggactttaaaaaaattttatagttttagctttatagtttagctctctaaatgtaaaatttagagatcttaaatccattttgagttaatttttgcatatagtatgaggtggggatcctactaga

SEQ ID NO: 471370 - DNA, 828 bp, Homo sapiens
cctggagaggaacccgaggttactcagagggtgttgcctctgtggagccctgcatgtttgaaaacatgtcttaattccaagatgtcaaatgtttgtttgattttcattcaaaggggtattgccaatgcaagcttcatgttgaaggtcctacttgtagccgctgcaaactgttatattggaatctggacaaagaaaaccccagtggatgttacagaatgcaagtgccataaggcgggaacagtgagtggaactggagagtgtaggcagggagatggtgactgtcactgcaagtcccatgtgggtggcgattcctgcgacacctgtgaagatggatattttgctttggaaaagagcaattactttgggtgtcaaggtataactgctgctgtttcctggctttcagggtgtcagtgtgacattggtggggcattgtcctccatgtgcagtgggccctcgggagtgtgccagtgccgagagcatgtcgtgggaaaggtgtgccagcggcctgaaaacaactactatttcccagatttgcatcatatgaagtatgagattgaagacggcagcacacctaatgggagagaccttcgatttggatttgatccgctggcatttcctgagtttagctggagaggatatgcccaaatgacctcagtacaggtttgcctatttccatctttcacaagttactcggtgctcgttgactgagtgtgagtgtgtatgtgtgtgtatgtgtgtacattacaagtccagtagtgacacttgaatagaataaagtcactgtttggctagcatgtcttttaaccatttttttctatgctttatggc

SEQ ID NO: 471371 - DNA, 462 bp, Homo sapiens
ctggaatattcctaactcaggatggaggcatgtctataccacacagaaggagctcagggttctcacctgcacgacctctgtcgtccttcgtctcctgtaatactggcatcttcttctaacctctctgatgatgcttctctggccatttcactggcttcatttttctccttctgcctccagaccaagaagatgtgtggtgtgagttgcgtcctgtctctgccgctcactctctgggtgacctcaggtcctgtgtccgcagtgaaacatgtccacatcaagactgacttattctactttgtcccctccctcccatgtcccctaacaaaggaatgtgatgcagctcaccccaacacatctgggcctgattctctgagacatggcaagcacccacccatgcccagatgttgttacaaaacgtttggccaggagccccattgccatggagataaattctcttgacct

SEQ ID NO: 471372 - DNA, 567 bp, Homo sapiens
ttctgtgtaggttgtcatcatttccacttatgggccatctgcgggagccctccaggctcgggggccatgtcccttcttgcgccctcaacacctagtgctaagcctgacccatctacgacggtcatccatgaccatccacaatggccattggtcaatgacctacattctggcggcagtgtgaccgatgtgcttccgggttttaccgctttcctgagtgtgttccctgcaattgcaacagagatgggactgagccaggagtgtgtgacccagggaccggggcttgcctctgcaagatgccagttgcaagtcccaggcctccagtacttctccagtgctttgctacaagttgggggttcccacagcccactcctcatgtttataatctgctataatggctcccagaattcaggacacactttccttcctattgctgtttattataaagaatatgataaaggatacagagcaacagccaggtgaataggtgcatagggagcttgccattaaatgcgccatggtcctagtttttattcatacacttatttctttattattcaaacactcatt

SEQ ID NO: 471373 - DNA, 3427 bp, Homo sapiens
cagccacatctcccctgctgctgccagcatctttgcagcagccactccagatgggccactgctgaggatggaccctgtgatggttaatactgagtgtcaacttgattggattgaaggacgcaaactattaacccggggtgtttctgcacgtagaaagagagagagagagagcatgagagatacagcagaaacccgccccgagtgtttgacacgtgcaacaaaagtggggaaggcaggtggtcgccggtttccactctggcatatatttaatgatttagccaaataccacgttgttccaaaagaggccgcctcacacaagtttgcaaatcccttccctgggaagtcagcatccaatgactggtctctggataaattcaaaggccctgacatctctgtaggggaattcagaaagactatccctctgcagagctccagacaggttgcctttgtgaccactgtgattgtacttactggttccatacagtaaaggaaatagctttttgaactaatgtcctgggcatatagtaaggtagaatacacatgaaggggaaatggccacttgtggccacaaccacaaaatagtctctacaagatgattgaaatgcaaaccatcaatcattcttagttctcatcctctttaatcaatgaagtatttgacacaactgatgaactgctcttaaacatactttcttctatatactgaattatgtacatgttaggtaatttgctagtagttccttagatatttactttttgtttttccatatacaattttaagaagagtttattaatatagttgcctttttgcctacatacacactcagaaacatagtagtttatgtacataaatattaaatatgtatttatcagacggctgtattatgtcaaaagttacatatacttgaattgttataatttcatattatcaataaataattggtatgagaaagtaagttatatagttggttcgaatagaaggagaaagtataaagaaaaattggattatttacattatttatgagctagattaatagttaatttacaaaacagaaattgaagaggtatttgacaatagtgaaacatgaagacaaaatgacgtgatatcccataagagaaagctaaggagatacacaagcaaaattcttacgctcagggtaattatcatcaagctatttcttattccttttacaagacagagtgttagccattgataggaaaaaacacattggaaagattaatgaatgtaccttattgttaagataaacaatattcagaaaaagtcattgaaagaaatgaaagatttctaaacgtttcatttatcaactttgaaatatatttttttctactgaatttctcattgtttttatttatatatcttacatatacatataaaatatatctctatccttgtctttatgttcccccattgacaattggggtcatgtttggtagcaaaaaaaaatgactgttatgtactattcaggaaaaaaataattttcttataattctttgtcagtataaaaacaaagggatcagtaggaaacttctcagcagcaattagtgagatgcattttgaataacacgtttctggggagcaccttttggggctactctcaatctccatgtccctcaagatgaattatagcatcagcatttgtgtaatggagtgtgaacacaacatatcacaaagcaatcaacacacaactagaacaagctggtttggaataaaattgtaaagttagattgcagttgaaacaaaagtactacaatttattctgtgtgcagtttgatgacctaatgatgtgaatccagctcagcatttggacaatcttggaaactgacagaggcaaacattctattattgagaggaaattacagaaacaatacgcaagatcaacagcaacgggaccggaagtgtgtactgaagctttagctgcatccattggaataaagaaacaaaggaaacaccaaaaggcctagacttggaaggagattcaactctggagataatagagttagcatactttaaagaaataatgatgggtgataagttttcattaaaaaatatacttcatgtcatcgatcatgattaggcaggtgtctgtgactgcataagcaatgctgcattatttcacatgtgtgccatggattcagcaacagaatagctccttctcttctcctgggaccttgttgttgacatgacttggccctttagagaattaactaactcatattggctgcatttttgtatttgaataacagggtatcatagttacatacatatcaggaacctcaggactgctgatgttgtaatagttttttgtttgtttgtttttaaagaattttttcacctaagactatcactctacttctttgaaagctgtataaacagagtaaaccaaaaacagaaaaatgtcattcttaaataaagtaagatatttccctcattatttttgcataggcacagctgaaatggttttataaaagggtgaacaagtttgcctgaaaaacacacagactaagtggtttcaaatattggagtattgtagaatgaggcttattttggggaaataattcatagaataactagaaattatatatatatacgtttcatttgttgattcccaattgctttaaaaaacatttatgttttgcaatattcatatttagaggtttaagtaacaaaacatgttgttttgttgtatgtacttggctaaaattttggagataaatatgtggatttttgaacatttaccgtcacctgttttaatgggggttttggcatattgagtagtatactgaatcattattaaattatgttcaagtttaatgatagaatgtagattatatacttgtttaacatgttctttaattgcaacaaaagaacgccaattctaaatcatagtaactcctaaattagagtaatagtctatgaactggcaatagctatccatactttatcatgaacacttttgaagtaaacaggtacgacgtgacccacttaaaattgggtctggctctttttgttccttattcttttatcttttggggaataatgctcatacaaaatagcagttcagagctaataataaatggacagaaatgattctagattccttaatcttaattgatacatttttaaaaaatcataatttctataaattttataatcaaagaacatcctttgatttttcactatttatatatcccgacaactgtgatattcaactgtttcatccatatctattgattccctacggtgtgcaaagcattgtgctatactttgataattgctgcattggtaagtgaaagcctcgtctagtttccttcaatctgataccttcaattgtccttttgatcctatcactaaagttcattccttcatttttatgatataatgcatttttcctttactttataaagtatg

SEQ ID NO: 471374 - DNA, 639 bp, Homo sapiens
ccctttcaagatggttcgtgttgaccccgataggtcttgtgttggaggggcaggcactgggggttgctggtcgacccgcatgttgccccaccacagagcatccagggctaagagcgaggcaagagcctcctccgagcttaagctgcaggtccaagctcccacgaacagatggggagcgaatgctctgccagcaggcggaacaatcctgctaacgctagggacatcctggaactcgacccggtgcacagcggccacttctctctctcacgggagctccagagaacaagtgcaatacataacatccgccgccaggtggagcccgacaaccggcgcaaacggctgcagtccacgtcggatcgcttttcagacatgggtgggtggagagcactctccctacgtgactcccagtctggcccgtggaaaagctaaccgcgagcctgcgggccgggcgccctgccaggccgggctttccagagcctcgcaagtggacttagaaaataccgcgccctcaggagggaagagttagaaatattttgttattataaaatacttgcactactcataaagcaatatagtattacttgaaagtagacttgtactaatggtaaatgtacattgcaaaatctagggcaaccaaat

SEQ ID NO: 471375 - DNA, 840 bp, Homo sapiens
cttctctcattccctgcactgttttaggagcctggtgcatgagccgtgaagtcctcacgggacatgaggccaggtccacagcccaagagggtgagcgtccactcagggacaagaaccaggtccacaacccctagagggtgagcgtccactcagggacacggggccaggtccacagcccgagaggtagtttgaacattctctttgaaacatgaatactatgcacaggattcagaactggtgacatctgaaaagacgcgagcttgaagggaaagaggaaagtggatgctgttagttcctgacagctggggcttgtcctctcggtcagagccacctggcaacacggagagggagcccacttcccctgagccgggatgtagatgggacctgttgatgtcaactgccaatagcatggaagagagcgtgcaggaacaggagagagaacgcacaggttttcctcccttttcctgtgcagacctgctccagggtcatacaacatcgagtgccaatcagacaaggttcaccccgtggatgaaaaaagagctacagtttgaaaacctagtgggaaatctaactgactcatccctgccttcccaagtatgttctgggcctgttgtacccgcaaatacctctgccgtcctgcagatgggcctgagtgctgtaaattcccatggggtggggagacatgactggtgctcccgcagtggtaatgccactgtaggcaactgagagtgacacacagttaattcctcagctcattcacttcaggtcccgaaacagtcaccaggtgacccttctgcaaattggagcagcttcataagcagaggagagaagaagcttgac

SEQ ID NO: 471376 - DNA, 937 bp, Homo sapiens
agcccagcagtgtgacgcttgcggcaaaactcacgactcgagcttccaatggcaggagtgaagcacaggaaactgggctgaagctcctgaacgttgttcctgcccgggaggacgcctgcagccgcgctctgctcccacagcagctccgcatgggctctgtgaccaccgtcctctccccggcacgggtaaggggcagcctgcagaatcgcctgggtagcaccaagcgccacgcaacccgcagggcgctcgcagatggaggccacgcggcctgcagagaagcccctctggctcggttgttgattgaaccctgggccccagggaagcatgatcttcaccttgatggcaccggccagacttttatgtgcagagctggggatggcaaatgtgacttccctcacacacatttgccccctgcctatctgccaggggtcagtttggctgtttacccaggaggaaaacaaaatgggtttggggagcaggttgaatcaacacttcacttgaaaataaagttccaggttgaaatcatgtcttttcagaatttggaagacattgtttcatcgttctctagcatctaatttgtttctgtaaagtccaacgtcattctgactgctgaacttgttaaagtaacctgtgtttttcctctttctctttctttctgggaaaccctaggaccttacgtttaccatcaccattcttaaatgacacagcagcgtaccctatgtctgtctattcaacaggaggatgctgaagtaacacgtgtctgcgatctaccatgtttaaccaaaactctgatttgggaacctgtgatgttttaaaaaacggatgagagtcacagggaatgaaatgagaaggaaaatttttaagagaaaagaaaatgggaaagaaagacagaatggaaggcaggaagtaaaataacatttagattttaagtttttcc

SEQ ID NO: 471377 - DNA, 899 bp, Homo sapiens
acctgtctgctgcgaccatgagggcatcctgggtccttagcacagaataagctcaactactctatgaaccacagcagtcacggccacagcctcattcacttagagcctgggtaaacgatgctgcctgaggatgggctggctttcacaagagcctcaccgacacagctgccgtggtctccatattggtgtccccccagaattcccatggtgggctcgctggaatcacacgagtccttcaaagtggagactccttcccagatgcggttgagggagctgtgcccacagaactgtcaggagatgcagcgtggctggctgtgcagatggaggaaggggctgcaggcggaagcaggtggtggcctctggaagcctgaaaaggaaaggaacggattctctcttagagactttaattgctggtaccgagagaggcatagcttcccagcccgtcattgttccttgggccacgaggaacaatcaacacagtggggagagttcagattcctctgcatgtggagagcagctattcgcatgtcacctgtcagttgcatggtcctccccctgcctactaacggctgagagccagcggaatctttcatatccttccccttgtggcgaaatgtcaggcatatcctgcgactttgcagagttttctatgtagcaattttctgtgtctcaaaggtaagcctcaaatatcatggaatcatcaaactgacagaactagagagaacattggcaatcacttactctaaatagaataataaattgggcctcagaaaagttaagcaacttagcatgcaacaactacataataactaaccgtaagagccctgggctcctggctctagacttccctgaattctcattctttggtgtcattctgaagaacagctcctgaagaatcc

SEQ ID NO: 471378 - DNA, 1169 bp, Homo sapiens
gcctgaccttttcgctcctaagctaaaatattatgatggcttgtcaattcctgcactaaggatttaaacatagaacatgtgatacttaagatgtgcaaaatgggagaagtcttgctatggacacctgcggcgggagagcctggggtgtctaaactgcgcattgatggatcccatgagaaagccccgtcgggaccgtggggagcgccaaccgcaagcgtggctggggagggaacacggggcactgcaggggcagctctgggcgctgagaggcaggtccgggcctggaggggcacgtgggtggctgggttcccaggtgtgctggcagccctggcagccctcgctcactctcggtgcctcctctgcctgggctcccactttggcggcacttgaggagcccttcagcccgctgctgcactgtgggagccccttcctgggctggccgaggccacagccagctgtctcagcttgcggggaggtgtggagggagaggtgcgggcaggaaccggggctgcgaacagcgcttgtgggccagcgcgagttccgagtgggcgtgggctcggtgggccccgtactcagagcagccagccagccccgctgtccctggacagacctgcagcccaccatgcctgagcctccccctccccgccatgggctcctgcgtggccagagcttccccgacgagtgccaccccctggtccatggcccccagtcccatgaccccccaagggctgaggagtatgggtgcatggtgtgggactggcaggcagctccacctgtggccctggtgcgggatccactgcggctgctgcagggagggcgcactttccccaaggcggaagaaacgggagagcgcaggtctaggctgattgccggcgctgcccttgcgcgcttgctcacgggcctccaagatccttgggttggctctcgccttcgccatcctggaggggcgggacccggggatgaacgggtgatgaggaaagggaacaagaaaaagatgtgaagggaattggaaaaacgagagacagcgcctgtggcggaggccgcccagttgtaacgggccttccctgtcctgggacagcgcagccttttcaggttggcttcttccactctgcactgtgcattgaagtttcctccgcgtctttgtgtggctcaatagctcatttatcttt

SEQ ID NO: 471379 - DNA, 634 bp, Homo sapiens
tgggagtggggaatacaaacgtcttattttcttttaaagtactcctgtgtctagaccaagggccgttaatgaggtgtgatttgcccctacgggacatctgccaatgcctgcagacggtctggttgtcaacgcagggtgcagctgggccaggggaagctgctgaaaaactgccctactgggctcccctctccatgtggcctcagagcctccccaggtggactcccctgtggggcactcaaacggcccacctgttgactcaagaggccacggtggaagtggctggtcctcatcaagtgctctttgatttattcgaatcaaagtttgagattgcgaaggttcatgataaatgtaatcgaatccctccatatgcattaaggtatgatattcagatcagcattttatgcccgttgcctccagaggccaacagtcccctgagaccagcaagggcctaatagtaatgttcaccccacaatttgcagcctaatagtataatgcctagtttcatttccactcttagcctaatctcttccattggattttaatattgttttatatggaagtccccattagtgcggtgtgcacatttttatggctgactggctcctgtgcattgaaaagcacctgttctgaggac

SEQ ID NO: 471380 - DNA, 815 bp, Homo sapiens
ttagttttgacaagagcccagtggtatgctaatcgctgcttctgaaaagaatgtccgtattggagagatgatgagtctgaaacccaaaggggtgcctctgagtagaacctgcctagtttcctccaaagctgaggcagaacaaatagttcagttaggcccctctgctgcaggtatgctggagtttgctggaggtccacttcacaccctgtttgcctgggtaacaccagcggaggctgcagaacggcaaagattgctgcctgtttcttcctctggaagcttcgtcccagaggggcacccgccagatgccaagatgccctgccaagagaggaggaatctagagagggagtctggccacagcggcattgctgagctgtggtgggctctgcccagtttgaacttcctggcggcttttacactggacatggatgaaattggaaatcatcattctcagtaaactgttgcaagaacaaaaaaccaaacaccgcatattctcactcataggtgggaattgaacaatgagaacacatggacacaggaaggggagcatcacactctggggactgttgtggggtgcagggaggggggagggatagcattgggagatatacctaatgctagatgacgagttagtgggtgcagcgcaccagcatggcacatgtatacatatgtaactaacctgcacattgtgcacatgtaccctaaaacttaaagtataataataaaaaaaaaaaattcagaccaagtcattaaacttttttgcttatggaaagtaaaaaaaaaaaaaaaaaaaaaaaaaaaaaagtctgttgctagac

SEQ ID NO: 471381 - DNA, 1296 bp, Homo sapiens
gcacctggagaaagccttgccatctgctccctttggacagcctcaagtttgcctctgctggaagcaaaggcagcacatacatgggcgggaggccggagggtgcctgaccaattcaaggcactgcatgtgaaccagtgccctgaagcagtgggagtgatggacaaggatgtggccggcggggtatgaaggtcaggcagggactcaatgatgacttaggccttactctgaggaacaaaggaagccattcggataagagaaatcctcatgcagtaaagtcttcaaaaatgttacagactccaacgagtcaatatcctgaaggaactgaaagtatggcagaggcgtcttcctccgtgtctgccaccaccacaggcctgcaggttgtattgccaggctactgccagtgttcactcaaggcccaagggctcttcagtcagcttatggcaaatgtggtcaggcctgaaactcacccttcagggatgtgggttcccatatggcccagggcaggtctagaaatgctgtccaagagcttagcctggtactccaagattcaaaaatgggcacgggctctgcctcatggagtttatgagagaaggaaatgagagaaaacaaaataaacaccagaaacaagcatggtttagggcaaatggttaagcattatgtttggggcatattgaatatcactttaaggcatgtaagcagagacataaagtaggcaattggatatatgtgtcagaaattcagagaagtttggactgaaagcatatgtttgaacattatttaagtaaagaaagaaaataaaatcatctgatgaagctgtctaagaagagaatatagaatgaaaagagatgatgttttaggagagaaaattgagaaactaatatatttaatactcaaggaaatggggaatgagaaggactgaggggcaacaacaaggttttgggaaaaaatcaggaatattcgtgttcaaagatgcaagagattcttctgaaaagactgtttcaaaaagaaggtagtgatcaactatttgaaatgctgcttagagagatcagctaaagtcacactgaaaaatcgccatttaacttattgacatgtaaatgcgaagagataaccctgaagtcagattttaagcaggttgagtagtaatggggagggagaaaatggaggcaaaaagtcatgtacaagtcaacatagagtaaagtatgaggcagtaaaaaatacctttaaaatttcagcaggcacactattgcaagggttgattttgtgctcaaactaccgtgtactgtcagtcaacttcac

SEQ ID NO: 471382 - DNA, 1609 bp, Homo sapiens
gccccaactcccgtacaaccgagccgagcaacatcgacgtgccaatgtcaaaagagcaccgcgcgacacctgcttgaagcccgcgcccgccttgctgcaggtgttgcccagccgagggcgggaagcccacgcgatgcggcgggccgagcatcgccgcgcccttgccaactagctgcgtcccatcaagttgcacgcgcagctgggcgccccggccacacatcgcctcctgtggccgcgcgggcctgcgcacctcccgagccacccgcggtccctacccctacgtgcgctcttccggacatcaagccagaggacgcatgctccagcacagacgcactggacatgtgatactgcccgccccgccccgcagttccacggctgcacgtgcccgggcccgccatatggctgtcgcacaccccgacgccaagcgactcataccgtgcggatccccgggcgttctactgcgacgacccctgcctgggccccgtgactacgctgagcgccgcagtctgcccttcatcgacccgccgggccccaccagttcttctatacagaggaccccaaggcttccggggcagctttgcggccagtcccggtccaaccttcgacgcctactgccccaggccctatccgtcggaggagctcccagggcccagtccaagtccaccccggctggccaccgacagcgccactactcgtgctcctgggacaacattctggccccgggcgtgccgagaccagtggggccgtgcgagaccagtggggccgtgcgcagctatgagaacctgctggggcgtgaggtgcgggagcgcgagcgaatcccccgaagcttggtgccacctgtcgtcgtgaacctgtccacctcgcccagacgctatgccccactgtccctgtccgagacgtcgctgaggagaagggccgcgcgggtgagggccgagcgcaactggtacgtgatgcccgagatcaccatcactgacaatgacctgcacgccaccgagcgcgcaccagggcctgggacgttgcccggggcgtgcacgcggccacttcctcatgcggcccccgacggccccacctctggccgccagcgcactcctagagcagctggacgagctcatcacggacctggtcatcgacttgcgaccccccgccggccacctcagagccgcagcccactgcctgggcccccaactgcgccaactgctggactcgcggcccgggctccggggccccgcgctggtgccgccacactcgcccccagcctccaccggcatcacccaggagcccgcgccccgggagaggcggctgacatgtccccggaacccagcgccgacgaagacgacctgatgacctgctccagtgcgcgctgctggcacacagagaccatgttcaacgcctgcctctacgtcaacttctgccacagctgctacacctactactgatcacgccctctccccgccgacgactgggacgtccacaaggcgcgctgcgtgtacgcccccctcggcagcgtctcccgcacatgctgacgttttgctgtcccactccccggctgactcgctttctcccccatgctcgtctcggcctcctctcgcccagcacgctcccctcccca

SEQ ID NO: 471383 - DNA, 515 bp, Homo sapiens
ggaaaatattttcttaagatctattctcatgaggcatcacagtgatgtcctgactgctctacactgggcctgtgccaatggccatgcagaagtagtaacacttctggtagatagaaagtgccagcttgacgtccttgatggcgaaaacaggacaactctgatgaaggctctgcaatgccagagggaggcttgtgcaaatattctcatagattctggtgctgatccaaatattgtagatgtgtatggcaacacagctgtccattatgctgttaacagtgagaatttgtcagtggtggcaaaattgctgtcctgtggtacagacattaaagtgaagaacaagggtgctgatccccccatgcagctgaaaatctgctttataggaaaatctgtttcttttgactcttccaaaactctacaacattctactgttgacctggagcctgaaaaaaggtgaaagcttaagcagtcaattaacccatagtttctattttatatgtactatatactgtattctt

SEQ ID NO: 471384 - DNA, 592 bp, Homo sapiens
aaaggggcactgacttccaaggagtccctggaagccgggtgtcaggggaagatgaaaccagagtgtgcggtgcagcaggacaggtgtcagagctgggctgagctggactggtgggggctcaggggtgcttttgcgctttgtcagcactgggtgtttcggagaggagcctccgcagccagggatggggcgtgttggaatgaactgggcatccttcgggaagacttaaaacagcgtgtctgcagcagaaggttaagtgaaagcacagcctctttatctgccttcctggcctgggaggaagacctctgctgtgcttatgccacctgtgaagagaggctagcgcagggcctttgtaacactccacagagctgtgagctgcctcttaactcctttgttactatggctgtctctcttagagcagtgtttttcaaagtttgtggaggtgtaaagtatgtgtcttactctgggtcatgaaaatatcttgtacaggagtataagcttttatgagtagggactaatatagtttcatatatttttatatctttgaatcttttgctatcttattgcaaagcatcttgcacagaagaggtgtttg

SEQ ID NO: 471385 - DNA, 728 bp, Homo sapiens
tggacctctagcaaactgcagcagacctgcagcagaggggcctgactgttagaaggaaaactaacaaacagaaaggaatagcacgtccactcagagaccccatctgaaggtcaccaacatcaaagaccaaagcaaggggacaacactggatggagaatgagtctgatgaattgacagaagtaggcttcagaaggtgggtaataacaaactcctctgagctaaaggagcatgctctaacccaatgcaaggaagctaagaaccttgaaaaaaggttagacaaattgctaactagaataatcagtttagagaagaacataaatgaactgatggagctgaaaagcacagcacgagaacttcagattgaagatcaacttaatgaaataaaatgtgaagacaagattagagagaaaagaataaaaaggaatgaacaaagcctccaagaaatatgggactatgtgaaaagagcaaatccatgtttgattgttgtacctgaaagtgatggagacaatggaaccaagctggaaaacactctcaggatattatccaggagaacttctccaatccagcaagacaggccaacattcaaattcaggaaatacagagaagaccagaaagatactcctcaataacagcaactccaagacacgtaattgtcagattcaccaaggttgaaatgaaggaaaaaatgttaagggcagccagagagaaaggttgggttacccacaaac

SEQ ID NO: 471386 - DNA, 592 bp, Homo sapiens
ccggctggagtcacccggaccaggatggattaccagcagcttctggaaacttttggcacccctaccattctagctcacttggggaacatgtacgtgcatgtcctggaccaggtggctgtgcagctcagagatgtcagggaactccctccagatgcctgggccacgctgatttccacttgtcaagtaacttctgtcatcctgtccctattctcactggaatttctggtgaccatcagagcaatctgtgcctgtgaattttctgtctctcctgtagctgtctacaaggcacatggaggaggttatccggtgaggaagctagggcatagcagatgtcagcctcgaggcaacatccccgagtggggaaggacccagacaaaaatctgcaaaacggcctctaggcagggacctagacaggcagatcctgtggccaactggggagtgcccaggcatggggacaggatagctcctcacagactgtcctcagccaccatcaggccatgttgaaaaccaaatgaagtctgctaaaatgacttaggctttagtctgaaatgcattgcactggttatcaggaaagtttgactgtcagaacagg

SEQ ID NO: 471387 - DNA, 766 bp, Homo sapiens
tcaggaaatggttatcaattgatatcctgctgtgctgtttacccgacacatttctcccctctttcagccacatgcaaagagcagcctataaaatccagccgcagacatggataagcaagctggaagcttgcacaggtgaatgccagcagctgtgccaacaggaaaaggctacctgggggccaggcatgttcaacatggaggctccatcttccctttttgtcaaccacgtgtgcaataaagaagcaggcaagatggtgctggccaggtgcacactaccaacttcttatatttgcacacggcaaagagcagagagaagcaagctctctaagcattcttttaagggcactagtcagatccatgaaacgggagccctcatgacctcatctaatcctaatcacctcccagaggccccacctcctaacaccatcacattgcttcagcccactggcttcatttctggaagattttatggggccaatgttcagctcccaactcctgaactacctgtgctaactctggggaatttgtattgggcccagactttgttctctggctccttgaagttaagaattcactgctctggggggtgtaaggtgctcgcagaacgttggtcactacactccaatgggtggtgccagccaaagagttttatagtgcagtgacagcaggattctcatttgcatgtgccagcagcagcagtagcagcagcagcagcagcatagtggggtgcacactcatcaactgcagcaaggtgctagtgggtgcc

SEQ ID NO: 471388 - DNA, 557 bp, Homo sapiens
ttaagaaagtagccagatgagaaaggctggacagggatgcgttgcaaaagcagtgatctagcttatcttgccaccacccaggatggcccaggatgtgggttctccttgaatgaatggagttttcccaacattgagaaggtgacatttctactccccgttgcagtctgcacctctgacctgtggtcagcagacaggacagaggcactcagtagacagagctcagaggacagcactcagtcccggcggaaggttcaatgtccagctttgcacccaccccatgtgaccacaagcaggctccatgaccttgtgggtcagtttcctcaccctgttcaggaggaattgtactaccatcctgttaggaaatttgtgaggatcactgcgttactcatgttgtcttttgagagcaagagaggtcccttcacataccccaagaacttacctgcatttgcccacatagtctccatttagaaaatgggaaaagtcacgtctgcctacctgccaatggggtaagagggagaaaaacacttgtaataacaatgtcagaattagcatacaaa

SEQ ID NO: 471389 - DNA, 896 bp, Homo sapiens
aacggaagagaatcatagtccaggcctgtgaggcccctggagtttgcatccgtcttcctagctccagacaagtcacttcctacagtgactccatgaggatgagtttaccacaccagaaagtacaaaagctcccagatgagaggaaagagttacctgttccagtgatccaaaaggatgccagtgtgaatgttcatgatcaggaaggaaaagtaacagggaggacccttagaaggctgctgccttctgtggtgcaaggtagaattggggtagccttggacctacgtcaatggagacatcagtggaaagtggagaagggctggattggatgtaagttacatcgtggagcacttagatcaagatatgaatctgagctcaaaagaagaggtctccatctgaggattaaaatagtctatcaatgcggagaccctgaggaagaatgttccaggcagagggaagagcatgcctgtttttggcatacgatttcttttatacagaagaaccattctgcagtacaacacccataaactctgagaaaataaatgggtatgaaattttatagcttgatttccatccctggaatgattgaaatagatattacctgcacatattatgttagaaattatattatacatacccagtaaaaaaaaaaaagcaaaactgcatctcaaaaaaaaaaggcattcatgctttcataaagattgtgtttattgtaatgaaatgttttatggtgcaagtcatttgtggttatttagagtattaaaaaacccatggattttcagaattgtaagggacattagaggttacgtcttgaagaaccctcttcttaatgcttaagttttctacattaccattaataagatatcacttaatttctgctaaaacacttccagtaatgt

SEQ ID NO: 471390 - DNA, 1191 bp, Homo sapiens
cattttctgagcagtggtgggttgaggaggcctgttgcattaggtggatgatgggcaaggggagcccatgtacactacacatcactagagcactgcaagcccagttgctcagtgttgcaaaggcacacagggcaggcatctagcaccggatgagggacatggctggcccgtgtcgtgtgctgaatggtgtgagaagtctgccagtgcctattaagctctggtgtcttgcagcagacttaaagggagctgatgctggcaatgggatcagagtgtttgtacctgacatcgggatgttcattgctagtctgaccatctggctcctctgtagaaacattgttcagaaacctgtgacagacgaagcagcacagagaagtcatggatctatttattgtcttctggaaagttttggtatttatcacagactagttaactttgagtccatgactgactttattcccccagagtcttccagccacatccctggtcaccagcctcaaggccagattgaagttctgttccgctgcagggacagcttacagctccagcaagcaagactgcctgttagtaaacatgcgagatcatttcttgcaaggaatgctgacaggcaaggagatggcatagatctggaaaggcagagtggtcttaggggcagcagcacctcgaggagggccatctctgtattccctccaggaggagggcagagtgcgtgcgtggcaggccagctgcaggctgaaggagaaaaaattgattcagaagaggcactgatctatgaagaggatttcaatggaggagatggtgttgaaggcgagttggaagaaagcacgaagttaaaaatgttccgcaggcttgcctctgtggcctctaagctcaaggagttcattggcaacatgatcaccactgctgggaaagtcgttgttaccatcttactgggctcctcgggtgagtgtctcccacactggctgcacgtagcaaaaggcacaagcagtgctttggtgaatgagagaaatggttgaagaagaaatgaaggaaacagtctgttccaccacatgaatatcataactgtagctcttgtaaaactggccacatgtacaaaccacacaaaataatttttccgggttagttctagttttgatgtttttagatggtttctgttaacctctgcaaaataatctttttctatatatgctaagc

SEQ ID NO: 471391 - DNA, 2050 bp, Homo sapiens
cttcagttctggtgatgctagctttggaaacgaatgtgcagcagcctgctgagagaccccacaaagccatgccatcacaccgatgccaccaggaccaagccatcatagccatgccaccacagcaatgccaccaggaccaagccatcacagccatgccaccacagcgatgccaccaggaccaagccatcacagccatgccaccacaccaatgccacgaggaccatgacaccacagccatgccaccacagcgatgccaccaggaccatgacaccacagccatgccaccacagcaatgccaccaggaccatgacaccacagccatgcccccacaccaatgccaccaggaccatgacaccacagccacaccaccacagcaatgccaccaggaccatgacaccacagccatgcccccacaccaatgccaccaggaccatgacaccacagccatgccaccacagcgatgccaccaggaccaagccatcacagccatgccaccacagcgatgccaccaggaccatgacaccacagccatgccaccacagcgatgccaccaggaccatgacaccacagcaccattaccacatcctcatgaccacatcatcataactagagatagagagattgctcaacccattagggagcacaaatatcaaggagagtcagaaaattcaacattcagagatcgactggaccgccgccggcaggaacttagtgtagacgctgtgagtgaagacagcaacagcaaagatgtccttaattaggaccgaaataaattctgatttgtaacatagaatatacctaggaaatcactgtagaaatttccttctttatccactgtcaagttagttaaaacgtgctttcagcttgaagaatgttgacgcataagtgctggaattccttcggtaggactgaaaccttttgtgtttcaaagcagattacattgttcaagccagaagatgaaatgactccagttactctgtcctcattcactgaagattttaaaataatatttaataaagatgtccaataatttgttagtgcaacgataacctaaccctctttaaaaaaaaaaaacagtaataaaacaaatcttgagagactgttttccttcgagttcgcaaaatttatttcagtgtagaactatcaacttttcacagttaagaacctcattcattaactctttaatatgaacgatttgccttttattacttagtgacaaagttcaaaaacatatcaatcactgtgaacttagacttgggagatcttttagaaaattgaacaaatacaaatagtgttaggatagaaagtatatctttcaatggtcagagccttacaaggaggttaaatattactagaaaaataagaatgtaggtatatatatatatattattgatatatgattatttaaatacatcattttacatttagcctttctcctcataaatattttgaatgttctagtcaaaaatataatattcaagacattaaaattggtgacgaagtatttacaaatattttattataattatgtgtttctatagatatgtagtagcttcaatactaccttaaaatttatttaaataaatatatttggctgtatatttgcacaatcgtatgtgttgtatttattcttatgaaagaattattaaatcattttaatgaatggtatgtctttaaacctttctgcttagatatcagagattatcattgtcgtattgaagtgcagcgttactgaataagaaagtgtactctctcaaaggaaggttacgttgtcagttaggatggacaacagaataagtatttttctgcaacaaaaagggactataaatcaagttattcttagcctgtgattagttctgtccttcattctgaatttcttttcttgtgtggattcgagtcaacccataatgttattttaatttagttttttgtatgtaatacatgctcccgtcaggtaaatgaacttgtcatgattgaattcaatagattataatgaccctttatctgcattgctgagcgttagctcatagtaggcaggactggcttaagc

SEQ ID NO: 471392 - DNA, 1857 bp, Homo sapiens
cctggagaagcgcacctggaggagtctgctgagatctgaaggatgaggctgcgggaaagaaggaaagagggagagcagcgtggtccaggaagacgtggcacgcagaagaaatgtgtggaaggctgggttgggggaggcaagaagcacagaggtgcccttgggaccatggacaggacctgggcattcaccctgagggcagccagcacttttcagtggggacagcagaaagcaggcagcatggtgagcagaggtgcttttgaagaatgtcgctttggctcctggatgaacaaccaagggtggaaagtaaatcaaacaggtcagtgtgaagagtcgctgggcagcgctgggggcccagctcacgtgtgcggtcaggaaatgtgccacagctcagatgggctgaaagaatggctacagtgggatggacccacaagcccttccttggccttccagccactgaacagaagagctcctcctcttcctcctccactttctcctccccatcgtattccccttcctcctccgcctactccgctcatcttccccttgctccaacttcccttccacactcaacagcaacctgtgatcttccagaagatagggacttaggttactttgtgttctatcttctgccacacgtgaatattactcaggaagaagatattgaacaaatatttcatgagtacaaggatgacattcgctatgtttaaggacacaggatcatttcttgcgttacaagcaaaggaaaaaaaatagctctccaaatagaatagttcatcttgatgtgtgcaatttaaagtgacttaactctttgacagttaagcatcagcattgaaatgtttctctctcaggactcgccctcctgccaaatgcttcatttatggtcaatttggtaattgggggcgagttcatctgttcctttaatagcgcttgctgaaattccggagccactcatggaataaaactgttgtgcacagcctcatgattttcaacatttattacacccattgtgtaatgtctcttcaatcgtaaccatttttataagtttctactgattctttctcctatcagctctttggaagtgattctgtatttttaccgtcatcataattgtgttgctttatcagtcaacataatcacggctctcaagtctttacaatgagtcaatttgactaattttattttagaatgacactgtgaggtagcagtgtgccatcattcatgcatttaatactttgcaaaattattccagagttgatgtgactcatcacactaggaagacacttggatgactccttcctaaactaaagggtaatttgatacccttaacttacaccgaaatacgtgcttaaaacttttcagtttttaggttaacccacaatatcataattaacaggaaagaaatcacctttttaaactatatatttaaaaattggtttatatgtagaaacagaaaaaaattaattataatttgtttcttaacccttcccaagatgctgttatctacaaataatttttcttcattcagtgtaatatttccttaggaaacagtgtcattgcttaagtaaattatgaaaatgtacaatagttatatgaagggttcatactctttttttctggtattgaaaaagtttgagactgatcttaatgtctgtctacttttcaaagatgaaatcatattattttccacttaaaaatcaatatttatatttaaaatccactttgattttaatcagttaattaaatggagaatagtcaaaggaagaaataatgaatttactaaatatgctgcaatgcaataaatatacattttctccatcattgcaaattcattccttttttccaaattttattaatttc

SEQ ID NO: 471393 - DNA, 898 bp, Homo sapiens
ctccttcagggagcaccagcagatggataacactggagctcctggttcctgggtttctggattatggggcttcccccagcagtaccccacttctcagacctgctgcctcagagtgagaataaccccattagcttccccagttcttcagactatgtattcagactgaataccagcaccagctttcctgtttctccagttcatggacagcaagttggagagacacttcctgaaaaccaagctctgaaatgctccttccctgattcagtgatgagcactgactccagcaaagacagaagtgatgctctgaatgattccatggggataaaatgcatattcaaaaaatacaaatttaccataattgccctgaaatacagcaagactcctagcacaggtggaaggggtgaagaggagcatgaagtatgtagcagattctggaatgtccccaaagccactgtcattacattcttacctgcccatcatggagaaggccctgcggaccagtgcaagaccctctatatgagctttatagtgtcctctgaagtgttgaatattttcggtgtagtgtgtggattcagtcattctgcgcaaactcttcctttgtccccaacaggctccaagttaaagagcctttctaggagatactattacagcaaaatagataccttgatgggtagacgttaatactagagttaaggttttagtgctcagagtagggaagcatgatatgtttaggaaccccacttcataattttgcattaatgaggctaacttttctctgaatgtgctacctttgcctgaacacaggtatgcacctgattagcttgtccaaatattacacacaggatggaaagagctagttgtccaaccaaacacatcttgtgctatggctgccctgtat

SEQ ID NO: 471394 - DNA, 862 bp, Homo sapiens
tgacatccagactaatgatgcccctggctcaggtgaacaagcattagacagctcagaaggcagactggctggggcctcaggatgcaagaatggcacagaggtgagttcttggactcacctcagggcagaggactccagcaatatagaaatgctaacaggcacaaagaaagccctggcagaagaaaggagcagcctacccagacagaaaacttagacagtacccactcgactccagccacaacacatgcaaaacactgctgcccttccccatccacacaagccagatggggccccagactctcacccccacctggcagtaacaagccatcagtcacttctaagccagagcagtatcaaaggaaccagctgcaacagaaggttccagagaagtctgtcattaccgaccttctgaagcctacttctgtcaacttgtcaaagtcattctctctccagctttgttccgttgctggtgaggagctgcgatcctttggaggagaagaggtgctctggtttttggaatttttcagcttttctgctctggtctattggattttgatggaggtccactccagaccctgtttgcctgagtatcaccagcagagactgcagaacagcaaatattgctgcctgatccttccgctggaagctttgtcccagaggggcactcagctgtatgaggtgtcaagtcggcccctactgggagatgcctcccagttaggctacacagggggtcagggacccacttgaggaggtggtctgtctgttctcagatttcaaacaccatgcttggagaaccactgctttcttcagagctgtcagaaagggacgtttatgtctgtaaaggtttctgctgccttttgtt

SEQ ID NO: 471395 - DNA, 489 bp, Homo sapiens
gaggccaccacatctagggccatggtgctggaggcgaagccttggctgcaagtcagcttcatcctgtaccgccccgagatctacgatggagtcttcccactccagaaatttccaggcatttctcctggtcctaaggcagacagaacccaggcgcaaacagtccagcctggtccacacgacaggaatagccctcctgaaggtggacgtgaaagcttggacaaagctgtttgtgtccaaggagaggaaaggctaaaggattctgaccgcaggagcacccatcccgaggcactcaccactttccaccatgaccgccacaaacctggcacagcagcactcggcttcagcgaaggtgctctgaagtccaagtctgctccgcgcatccgggctgctctctgtcccagcctgcgctgcagcggcatcacccccacgctgcggggcaatcccaactttcccggcgattttcagagagctggaaagatgtgaatgggg

SEQ ID NO: 471396 - DNA, 563 bp, Homo sapiens
gcatcaaggcagaaagaagatatttgatattatgtcttgttcctctggcccacagagggccggctccttctctcctgctccacccaatgctccacccatccctcactgcagcttgcaggtggaagtagattcactccctgagctccagcacaaacctccagctggccctgtgggaaatgtcaggcaggtcgatgagaatagccaggacccagaaagtgctaagtggcccatgcctatggagagggatgcaagaacttactgctcacctccccagtggcggaaagtcactccccttttggatctgacttcaggtttctcccttgagcatcatcctttggattcactaatcatgaaactgcttagccctcctgctccacgtctctgggaagttagaagtattcatcacaagagtttttctcacttttctgcatgcaaaatgtcagttatttcatatgaaatttaagacctacttttcctaaaaagtgtttaagtaaatagactagtacctcaaagtgaatttttagcaattttaatagttggaattttttaatatgcttattttt

SEQ ID NO: 471397 - DNA, 1216 bp, Homo sapiens
ttgaattaacacaggtaaagtgtctggcatacggtgagcccttgaatgggggagaaggacatcttctcaagcagcaagtgtcccacccaacacggatcccagcctccgtccccagcctcctgccctggcgccgccgcccccgcagtccgctgaaaccggaagccccgggccagttcaagacaagggcgccccgcacccggcgcaactcccctccttccacgacacagccctgctgctgtggcatggccctggctctcagcggggcggtccccttccctgctccagaaagggtctccagggcgagatctgccctgctttcccttgtattaatataagggaaagtcctggggaggaagctctcccctgccagcgtccactccagcctccaggagtccctctccgcaggtctccatctttcccgcgggttccgctgtgctgtggcgccctctgctggtgggtcccatgcagtgcgagagtgctcacctggtcctggcgtcctgaaagcccatgtcccctaccttcaagttcctccctctcccaagaagacagcctgcagagacccatccatatctgaactctgccttcaacactttccatctcaatctggtacacagcactaaactcctttctccaccaaagtgtggctccacctacaatgtgccagaggggagtgtggaagaggagaacagacagagctatcagaaccctgcctcttgccaatcaaatggcccgccactgtccactccctggaatgtagcaccacctagtggcagcctgcagcctgacagcgccgcaagtgaaatttcagcacagcaagtctttactgattatcaaccatacacaaggcattatgccaggcctttacagtggggaactgagccgaacacggtgcaacagaagcagtatagcatgatgcttgtgggtacagacttctgagtcagaccgtccagggttcaaatcctagctgtggcacttactagctgtgctattccaggctgctcctctgcaaggcctcctccagccatgctcctctgcttcccgctctggtccacaatcaggagtgtccagaatgtaaggttcgtgagagcaggggtccagcccatcttgttctccaatggggccagtacagcattcagtgcctggaatataataatgtccaaaaatgtttgctgaatggatgaatgaatgaattaaagttttaagaaagtaattcatc

SEQ ID NO: 471398 - DNA, 1155 bp, Homo sapiens
ttcctgtctaagcgggaatttcctggctggattattagcaattgcaaagacaataaagaaatgtactgtcaggtggtaatggcgctgtggagaaacacagggcagggtaaggggagagggagcgaaggggagtggtcagggaaggcctccatggcaaaggggcgttggagcagagacctgaaggaagtgagggagtggtcactgccacagtgtcccagggccaggggcggggacatgcccgtgtgtgtcccacaacacagctccatgactgggacagctctggggccagttgtgcatagtattgtcacaatagtagttacgccaatctgtttcccctggccccttgagccacgcgggggcaaggatgtgtcctgttactctcggaatctgcgctctggagccaagcgcagcatcaggcacctgcaggcaattggcacgtgcctgtggattaagagaatgaatgaatgtctgaacatggggaaaaaatgagcagatttctggacttgtgcaaggctgtggggaggagagaaagaaggaaagatgcatctggttttcgtattcaaggaattttcagttaattagagagaaaagacatgtacacacctgaaattaagacaacttaaacctagtttagatataaagttaaataactttaggtgataccttagaatccattaattccacattttatccaggatgagtgtcaaacacttccaagtcccttagatgcccctacatttactccaagaatactccagaacgtttatttggggttggcttcccaggctgcttcagactcatgaattgttccctggactctgagatccttacttatctgtttttaaacccaaactctctccccggagtgatgttactccctcactcagcaatggttgtacatcactgattcttcctattgtcttcctagaaagcatcatgagaaactgcttctgtatgtttttctccatttgcttacctggagcaaataagccgattgtgctgtttcttaaatattttatttatttatttattttaccaattaactatgtggttttaattcttgcattgagtttgaacaagtctcaaccattttcccttcagagattgcttctgtttcattcttttttctctgggattagaattgcatgtatgttc

SEQ ID NO: 471399 - DNA, 796 bp, Homo sapiens
cagctatcctgtctgtaggaacaacaggatgcactggcagtatctagtgttgagtgactttcagcatcaaagaagcaggaccatgtggatgcctggggatgaggagaggcaagtaaaaatccgaggtggaaagacactgaagacaaattcagttacaccacgtgagaaacctggaaatgagcctgaagaggtgaagctgcagaatgccagcaaacagattgtgcagaatgcaatcctgcaagctgtgcagcaagtctcccaggagagtcagcgcagagaagagagaatcagtgacaaccgggaccacatccaactgggcgttggggagttaaccaagaagcacgaaaagaatataggacgcatctccaaaatgttgccagtaaagcaaaccgaagtgtcaccggcacctagctgtagaatgaattcacactagcccctggctgagaagcactgttttgaaaaagtgcattagacgattctgttcatatttatgcagtgcctctgagacatagtggggccaaatatgacactgtaattgcaaaagtagttttgcaggccaatttatttttaaagttcttttatttgaaaaaaagaattctatgtctcgtttatttacttctgccttttatgcgttccttctgtgaatttaacaagcagcctttttgctgaaatactgaatacagtactgagttctttatggtatattaaaaagacatgctagaaaggtgagggaatgcagttttagttaccttcaaatgtgaaattgaaggctttaagtgggttcaggtctaagatc

SEQ ID NO: 471400 - DNA, 929 bp, Homo sapiens
aatacactacccgatagagtttctttcagcagctgtttatagttgctctgccccaaaggggcaaggacttctttttgtttaatcttttctgcacatggtccctgatccttacatgcggagcagctcagggcaaatcacacatgtttcgggggacttaaaccttgtcttcaaacagcagcttcattcactgaggcgcagggctggccccatgggtgctttcaggggctctgggagtttagccagaccaacaagcccactgccagtgcagcagggcccatgggacagcctagcacttctctggctggctcagggaactgcatccaagaaagcaagaccacagaagagctggatgtggatagaacatctagaccaggaagaactcagcctggaggagtatgggagaaacacagcaacggaaaacctggaacatgcagagtactcttccatcagcgttctcaaggcagctgaatatgagtctgtaattacaagggaaacaatggctccagggcaggaaatgtgcatgaaatataatgcagctgagagcagcattagcccaaagtgctctaatggttttaggacctcaccaggtgctaaagtgggctccggcagaagaaggtgctttctggatgaaagaggagaagctggaagatgcccggcaagaggcctcggtccttcctggaagaccatgaagtccagtgcagctatcggtactcaacaccagaagcccagagaggaaagaaacaccaatgccacacatgtgacattagatcacctcacctgcacatcaaaaatgctaacttttggccctaccccaaaatctgttgggtatgggcctgtggtcttgcattttcaacaagctgtccagtaagaaaggaacatactgggcaaagaacttaatgtatgcatccatcgttagtgtgtacaaggct

SEQ ID NO: 471401 - DNA, 717 bp, Homo sapiens
cattacgtgattcatcaaattgatgaaaatattgaggctcatagagggtagagtacttgacaatgttacacagttagttctgaagttcaagtgctctatggcagcatacaaatcagtgaaatttaaatcatcaaagctaggaaatggagagagaaaaattacagcacgccaaagagaacttattcaagaagacctgtccatgaaacacaattcaagatgggtaacacagaacaaagagcctcaaatagcattaacgacatttgttgagctgcaaaaggaagtaaaaggtcaagaaaggtgtccacctggtagcaagatgatgggaacaggtccagctcatacatccattcaagtttacattcagcaggagattcaatctactcccccaacggctcaaacaaatacaattaataatgatgtattgttcttgaaaaatgctaagcaagcggataagtgctctcaacccaaaaagtgataactctgtgagaaagaaattctcatatctgccaaaattgttgtcaacaaaatcaagataaaatgttgaactgacctgatttcctacaacaaagaataaactattcaaggcaactagtacctgtatccccagtaaggtctgaacacaattctgcataagatgaatacacagccctggtgacacagatttggggatgataatggtgaggaagactcatgaatttgcagtggaaggaatttgaa

SEQ ID NO: 471402 - DNA, 720 bp, Homo sapiens
tggctcagtacatgtccgaaagcctcaaaaccagggaagctgacagtgcagccttaagtctgcagccgaaggcccaagggccccagggaagatgctggcacaagtttcagagccagcgtctgaagatcctggagtctgatgtccaagggcaggaagagtggaaagaagcaaacatcctgcacgtgaagaagaaagagccagaagactcagcatgcaaatttatctcatcttctcctgctttctttgttccagctgcattggtagccaattggatgatgcccacccacattgaggaagaaaagttcataaagcatggtgctcaatgtcagtgtctgaacatttatgtgcttattaccctttcaggaaaggagggagagaagaagggagagagaaagaaacaggaaaaagcaagagctactgggcaaggtgtagtacaaagctcattttaccttgaattctaccttgcctcttattaatattgcagacctgcttagtttttgtttgcatatgcaagaactaccttggctcatccttgtgttttaaaaatttccaaggttttttaggtttaaactttctttggtgccatatatttagactgtttttgtttaaataaatctgagagatttttctaggtagtttttttataaggtgtcccacaaaatgaaattaataaactaatgttttagactatcaaagaaaaaaggaaataggaaacaattc

SEQ ID NO: 471403 - DNA, 600 bp, Homo sapiens
agccatgacgactgagttctaactgtgaggttgtctgtagtgccccattgcgtttgcgggttaagaaagccactcagattaccgatcctatgaattctgagactgacgccttgagctttctagaccacccttctcttttggtcagacctgaggtgctgatggagccactggctcctgctacatctctggagctggaaaaggctagtgtttccaacacactggatggcagttctaagttggactggctgccgcaggatcacctgggggaactttataaagaaactggcttccaggtccacccttggaagttttcagccaaagctgtcttaatgatgctgagtttgaccagtttaggcaataactgttttttccaatcctttacttttacagcaaaaaacatgaaagccccggaagaagtgacttgtccaagtttctttgggaaacctttgctggttatgtttgactccgtaattcagtgttgtgaacatctggcctctgagttgatagaataggtggttagttgcaggtcagtcccctacaactaactttatttcaaaatatttcaataaataattattgagaaaatactgtgtgtaaggc

SEQ ID NO: 471404 - DNA, 750 bp, Homo sapiens
ctgagatctgtttctgaatttgtcctccaggtatacacgtgccatgggggtttgctgcacccatcaacgtgtcatctacattagggtattaccagcagaggctgtagaacagcaaagatttctgcctgtttcttcctctggaagctttgtcccagaggggcaccagccagatgccagccagagctctcctgtatgtggtgtctgccaacccctgctggaaggtgtctcccagtcaggaggcacggggagccagcaggcaagaatgttaaatcttctgaagctgcacccacagctgccaattcctccaggtgctttgtcccagggagatgggagttttatcaataagctcctgactggggctcctgcctttatttcagagttgccctgcccagagaggaggaatctagaggggcagtctggctacagcagctttgccatactgcagtgggctctgtccagtttgaacttcctggtggctctgtttacactgtgggggaaaactgcctactcaagccccagtaatggtggacgcctctcctcccactaaatttgagcctcccaggtcaacttagactgcttaagttgttcttcaatctccgatatccttttgaaggaatatgattgattcagctgttaatacttgtgtatgcttcacaatgttcttgtgctgtgtttttcagctccatttatgttcctttctaaactggttattctagttagcagttcctgtaaccttttgtcaagattctt

SEQ ID NO: 471405 - DNA, 747 bp, Homo sapiens
caaagttctccagaaggccatgtatgctctgaatcagcatccaatgtatgatacggtttctcccatagccaggattcatgggtccaggaatcaaggggtggaagtggaagttgcaccactcaccatcacccctagtgatccacgaacaaaatttttacttcttgtttctgtgacattacattctgctggcctagatgtcttagttccagagggaggaatgctgccaccaggagacataacaacaattccattaaactggaagttaagattgccacctggacactttgggctcctcctacctttagtattaccataccctgtgattaaggtcaatgggaaactacaacaaccaaatccaggcaggactacaaatggcctaaactcttcaggaatgaaggtttatgtcactttaccaggaaaaaaccaagacttgctgaagtgcttgctgaaggcaaagagaatacagaatgcgtagtagaagaagcttgcagatagcctattgtgggacattgtgatagcatgagttaatacttaatatactcctatatatatatatatatatatatatacatacatatatatgtatatatatatgtatatatatgtgtatatatatatgtatatatatatgtgtatatatatatgtatatatatatgtgtatatatatatgtatatatatatgtgtatatatatataatgaacttattattgtctttatttgaagattgtgtatgatctcaggagat

SEQ ID NO: 471406 - DNA, 3010 bp, Homo sapiens
cgggctgctctgggagtggagcatgtctccctctgcagggtcagcctggaaatgtgtgatgaaaaagaacaagctcaagaacactggtaattcaaaaacgtggagtgtcctcttgcttccaaagaagtccactagatccccagtaatggttcttaaccagtttgaaatgacagacataaaattcagaatctggatggcaatgaaactcatcaagattcagaaggaagttgaaacccaatccaaggaactcaaagaatctagtaaaattatccaagagctgaaagacaaaatacccatttcaagaaaaaaaaaacctaaaattcaaaaacaacatcatactgaatgggcaaaagctgaaaccaatccccttgagaaatggaaaaagacaaggatgactactgtcaccactttcagtcagcatagtgctggaaaatgaactaaaaaatataaaaaataacttttagagctaataattgaattttatagggaggtagcataggaggttaacatataaaaatcaactgtattttttgtcagaagaaaatattatgaaaatggtggggaacatcacacaccagggcctgtcgtggggttgggggaggggggagggatagcattaggagatatacctaatgtaaataatgagttaatgagtgcagcacaccaacatggcacatgtatacatatgtaacaaacctgcatgttgtgcacatgtaccctaaaacttaaagtataataagaaaatattaggaaaataaagctaataatatagtattaaacataacagacatacattttaccagagacattcaaatattccaaaattttgaaaatgcctaaaaaaaagaaatataccatgttattagaattatcaacagtagcaaaaaggcattgttcttgaattaatcttcaagtacaatgacattctaatgatgatcacaataggttttgtagaaaaaaatctagtaaaatgttaattgtaaaatctaaccagtagccatacgatgttgactgtaaaattgagtttttcagtgtgcttaaaactttcataataaaatattggaaaaacataaaggaaatatttgaaatagaacaaattacaaacagaaaagagaggtatgaaatgtcaggataataaacatcaaagtaaaagttgattcaaatgaagacaataggctctcaaaattaaaaaaagtggaccaattttgtggtgtatccttagactctcaaaattatattttacaacatttgttttgataacaaaaattatattttgcaacacttgatttgataacgtaacatgcaggtagtgtatacaacgtggttgtgctagacaaaggaatgattcacatccttggtagtacagagaagtatggtatgagatttaattacactactcagaacagcacacaataaaaaacgtatgaattgttgatttttgaaacttttcatttaatattttcagactgtggttgacctcaggactgactatatcacacttagaagaaacccagaccccagacaaaccctaaaggacatatattggacctggaaaatgtagctcagacttattttatgtaaaaaaacagaagagatgacagaaaaaaaaatttattgtttacagagccatacttatatagtatacaagtatacagtatatatatactatatataatgtatagtatatatagtatatactatagtatataatgtatagcatatatagtatatactatagtatataatgtatagcatatatagtatatactatagtatataatgtatagcatatatagtatatactatagtatataatgtatagcatatatagtatatatactatatatagtatagtatatagtatactatatactatactgtatatacattatactatatagtatatactgtatacagtataatgtatatatagtatttatagtatatatactgtatatagtgtatatatactatatagtgtatatagtatatatacactatatacagtatatatagaatatatatactatatagtgtatatatagtatatatagtactatatagtgtatatatagtatagtatatactatatattcactatatagtatagtatatactatatatactatatagtatatacagtatttatacactatatagtatatggtatatatacactatatagtatatggtatatatacactatatagtatacattatatgtactatttataatgtatagtatatatagtatatactatggtatataatgtatagtatatatacagtatactgtatactgtatacatatactgtatatagtatatatactgtatatatactatatacagcatgctgtatatagtatatatactatatacagcatactgtatatagtatatatactgtatatactgtatagtatatacatatatacatatatacatacatatataaacatttttttgcaatactctataaagaggcccatttctatgtcacttaaagtaaaaaacatacatttttatgcatgtttaaatgcacaagaaaggtattttaaactcagtgtttcaaccataatatgaaaaaagtctgaagaattatgagatgctttatgaagggtcttcagtatatagctcttccctctggggattttttttctctaaagtctcatgacttggagaggataaagacgtattcaaaaagttttttaaaaaagtaattgagtttataaattgttatgcaatccaactccaattatcattatttaaagataccgagtttgggaaaacaatcaccagagatcatatgaagatttcaagagacagcagggcagcaagaatccacactgttaatacgtttgaaactgatgacttcagaagtaaatgtttgaatcttactctcatttttattaaaaggataaagtattacatgctcaagattttaagaaaaatctttacagagatatatattaaagtaaaatttgctcctctgtttctattctttatct

SEQ ID NO: 471407 - DNA, 760 bp, Homo sapiens
gaaactatcagctttgaagtcaacgtgaatatggcaatcatcatcaaaacaattgggatgctgaagactttgttcatgaccttattaaaggctatttccagttcgtactctaccccttcctctcttctgtttccctcttcttcctcacactgctctacgactgccatgcaagtaacagtcgcggagaagtgtgttattaccaaccttctgaagcctacttctgtgaactcgtcaaagttgttttccatccagctttgttccattgctggcgaggagctgcgatcctttgaaggagaagaggcgctctgtcaggaccctcagctgcagttctgttggagtttgctggaggtccactccagaccctatttgccttggtatcaccagcggaggctgcagaacagcaaatattgcagaacagcaaatattgctgaacagcaaatattgctgaacagcaaatattgctgcctgattcttcctctggaagcttcgtctcagaggggtgcccagccgtatcaggtgtcattctgcccctactgggaggtgtctcccagttaggctacatgggggttacatttcggtgccctaaaacagaaatttactgagtatcctggttaatatggcttcctgaaatgacttttatgtctctggagaagctggctccttaaaatatactacagtcaatttttaagttaattctgaagattgggctaatggcttagctaatggtcattgctcatttaagctaaagtcagcatccctt

SEQ ID NO: 471408 - DNA, 516 bp, Homo sapiens
ggaaaatcggcacaggctgcctggctttaccgagaggccagcaggttaatcctttcaactctcccctgtggtccatgcatggtaattacagagggagggctcatctgcattgctgcaggatggaccaacccagagagggtggagacatcctgctcaggggtgaggctggggaaagaagtgcaaagacagatggaccacaggatgaggatggcgagaaaagggaagggcccgggtggaccatcctgggtaccttcgaaaggccagcacggaaagcattctgcaccaacgcagctggctgctttggggacaaactgtcaccacttcctatctccaggcagcttgagagtaatctttcagaagccaaatattgaaacccacacgcaaataagaacaagacccatttatcccattgcccagtccaaggcggtcctttccaaactgttccaagtcatgatacacacagaaaatgatggtgccatatttgtatgacactagggtagcaagagttttgttcac

SEQ ID NO: 471409 - DNA, 527 bp, Homo sapiens
gcttcagtaggagtagatgtccctttatagccctctccaggttcttatgcatacatctgtcacagcacttttcaccgtgtctctgtgctggcaatacccggaacagatatttcttggcgtggatccacctgtgttatccaatagagtagccactggccatgaaatgtggcaagacaaattgagatgtgctgcacgtataaaatacagactggattttgaagattgggggaataaaagccaaagcctaatccaaagcagggccctaactgtcttcaattctatgaaggctgagaggggtgaggtagctgtagaagaaaagtttgaagctagcagaggttgttggttcatgaggtttaaggaaagaaaccatctccgtaacatgaaagtgcaaggtaaaggagcaagtgctgatggagaagctgcagcaagttatccagaagatctagctaagatctatttcttcagtaaaggtggttacactaaacagattttcaatgcagataaaacagctttctattagaagcaga

SEQ ID NO: 471410 - DNA, 831 bp, Homo sapiens
gcagccaccttgtgagcacaaggggagtcgatctgagaaggcagaactgaaaggagggaggaggaggaggaagacaaggaggaggaggagcaatatgaggagaaggaagaggaggaggaagaggaggaggaagaggaggaagaggaggaggaggaagaggaggaggaagaagaggaggaagatgaggagaaggaagaagatgaggaggaggaagacaaggaggatgaggaggaagacaaggagaaggaggaggaagaagacaacaaggaggaggaggaggaggaagacaaggagcaggaggagaaggacaaggagggagaaggaagacaaggaggaggaggaagacaaggaggaggaggaagatgagaaggaagaggaggaagaggaggaggaggaagaggaggaggaagaggaggaggaagaggaggagaaggaagatgatgaggaggaggaagaagaggaggaggaagatgaggaggaggaagaagataagcaggaggaggaagataaggaggaggaagaagataagcaggaggaggaagataaggaggaggaggaagacaaggagcaggaggagaaggacaaggagggaggaggaagataaggaggaggaggaagatgaggaggaggaagacaaggagcaggaggagaaggacaaggagggaggaggaagacaaggaggaagaggagaacaaggaggaagaggaagataaggaggaggaggaggaggaagatgaggaggacgaggaggaagaggaggaggagaaagaagagaagggggggagaagcagtcaaaacaggattataaaaacagtggaatattttatgttt

SEQ ID NO: 471411 - DNA, 618 bp, Homo sapiens
tgtgaagtcctgagggcatccaatgaccccaacgctcagagcactctcaatgggagaaatgggagtttcgaaaattccaggaagttgctgcaatgtgaggagccctgagaggcacagggtcccagcttgctcaggtcgaagggcaatactagctgtgatgttcctaagggaacataaccatcactcacataataaaaacaataatcagacagtgtttctctatgactttgtgggaacaaaccagcaaccagaccgccatgaaatagacagatgggcactctgcaaccacaaacataaactcccccctcttctgactaacttgactattgcttctctcttcacggcagtcctagcccactttaatcttccaccctcctggacaaattatctagatacccccaatcgttccaggcgattttccagccatgggtgtgggcacgccaagcgcgcaggagcacgaccagaactttcaagttgaccttcttagtgcctttggcatgtttgaagaaatttggttgagctgtaatgaagttgttcacaaaatgtgaattgcccgtaagaagatttatttccactttttaaaagaaacttgcatggaaatggtacatgggaattatg

SEQ ID NO: 471412 - DNA, 484 bp, Homo sapiens
gcaggggggtgcccacccccctgcaatatggattttgggagtttgccctgcaagagacagtcaaccactgacttcagtcgaacgtacttggaaagggaagaacttaaaccagccatgaacagaagaaagccaggttttctggaaacatcgccaaaacccagcaatttctcagaattttcagaggcgccaggggggtgtttgcatttcaatggaaaaagttctgaaagctctggaaactattctcagttttactttctcattgaaaggcaaaaaccatggctttcaggggtacgtgtgcaggatgtgcagatgacgatcggctctaaatccaacaactggtgtccttataagaaggccacatacagaggcacagagctaaacagggaagaacaccatgtgataacagaggcagagcttggagggatgcagctacaatccaaggaacaccaaggattgccagcaactaccataaactagaaaataa

SEQ ID NO: 471413 - DNA, 962 bp, Homo sapiens
tcctcgctttgctgtccctgtccctgtccatgtatctggtcacggtgctgaggaacctgctcagcatcctggctgtcagctctgactcccccctccacacccccatgtacttcttcctctccaacctgtgctggcctgacatcggtttcacctcggccatggttcccaagatgattgtggacacgcagtcgcatagcagagtcatctctcatgcgggctgcctgacacagatgtctttcctgctccttgttgcatgtatagaaggcatgctcctgactgtgatggcctatgactgctttgtagccatctgtcgccctctgcactacccaatcatcgtgaatcctcacctctgtgtcttcttcgttttggtgtcctttttccttagcctgttggattcccagctgcacagttggattgtgttacaattaaccatcatcaagaatgtggaaatctctaatttggtctgtgacccctctcaacttctcaaacttgcctgttctgacagcgtcatcaataacatattcatatatttcgatagtactatgtttggttttcttcccatttcagggatctttttgtcttactataaaattgtcccctccattctaaggatttcatcgtcagatgggaagtataaagccttctccacctgtggctgtcatctagcagttgtttgctggttttatggaacaggcattggcttgtacctgacttcagctgggtcaccacctcccaggaatggtgtggtggcttcagtgatgtacgctgtggtcaccccatgctgaaccttttcatctgcagcctgagaaacagggacatacaaagtgccctgcggaggctgcgcagcagagcagtcgaatatcatgatctgttccatcctttttcttgtgtgggtgagaaagggcaaccacattaaatctctacatctgcaaatcctgcccctcagtcacatctttttgtgg

SEQ ID NO: 471414 - DNA, 488 bp, Homo sapiens
tttgataactgcagtcagtcttgttttgaatataattctgatgcttagtgtatgttgccttgtatttttctctactactatgctttaatcatcccaggttttaggccctttaagagtgaaacagcaagtcctgaagtagaagctgcagcaagttatctggaagatctagctaagatcattgatgaagatggatatgctaaacaacgcattttcaatgtagatgaaacagccttctactggaaaaagatgccctctaagactttcacagctacagagaaaaaatgcgaaaacaaagccttgataacagcacatctgcttatggcatggtatactaaatattttaagcccagtcttcacacctactgttcagaaaaaaagattgctttcaaaatattattactcattaacaatgtatctggtcacccaagagctctggtggagatgtacaaggagactaatgtgttttatgttagtgactcctaacataa

SEQ ID NO: 471415 - DNA, 879 bp, Homo sapiens
gactgagcaaattcctctgtgactaaaaaggggccaaggtacagctcattccatgacttcagagggtgcaagccccaagccttggcagcttacaggtggtgttggtcctatgggtgtgcagaatacaagaattgaggtttgggaacctccatctagatttcagaggatgtatggaaacatctggatgtccaggcagaagtttgctgcaggggtggaattctcacagatagcccctgctaggacactgtggaagggaaatgtggggttggagaccccacaaagagtccccactggggcattgtctagtggagctatgagaagagggccaccatcctccagaccccagaatggtagatcaacagacagcttgcacagtgtgcctggaaaagccacagacactcaacatattcccaatatttactttctggtaaatgcgttgaccctggttcttcagaccatagacaatgggttttcggagtcagccactccaggccacactgctccatgactaagatttgcccttcactaaagctgtaacaatgtaaaactcacttcatactgctcttttcttcaaaatttaggtaaaccaaatcaacctggtttttctcattcttcagagatttcagaaaaatgattaagtttctcatttcacaatgtgacttgtgtgttatttattgttaaaataaaagtcactttgtgaatcaaagtttttaatctttccttttcaatctcaaaaaatgttttgtcgggaaacggattttagtaaatacctttttttcatcctaatgacaggtaagggaagaagactggaatgttgtgaatccccaaatgtaggatcctcacttgaaaaatgtagcacattcccatcaacggggtgtt

SEQ ID NO: 471416 - DNA, 983 bp, Homo sapiens
taagtgagcagtctacacgagagcggactcgcccgggatgacccggagcagtcagggtccagccaccggccacggccccctgcagccggggccagccctgcgcggctgccgcagcctccaccacctcctggaaagcagcagccgggcgagaatgaaagtgacttccacaatcggccgcccacgggataagcgcaagcactgccagtctcaccatgtggcccaagatggcccagggaagtggaagtgtggagatccttggggagcggaaaaccgcagctcatgctgccagattgggattcggcctgtcctgttcttccggaagcagtttggggacagttgtgaagactggttaaatggctgtgatcaaaatgctgacagagatgtggatagtgaagttcaggctgatgtgctctcagatggaaatgaggaatttattggaaatgggagcagtgtctacccatacaggcccagagggctaggaagaacaaatgatttacagggccatgcccagggtcccgctatgtcgtgtagccttaggacactgctccccacatccaggatgctctgactccagccttggctcaaagggccgcagtatggttttaactattctgggtctttcatattaacatgtaaatttcagaattagtttatgaatttctgcaagaacaaacaaagagcctgctgggatatttataatgattgtttcaatctatagaataatttgggaagatgtgccatctttatggtagatgatattaaatgtgtaacaatgttgttgatcttttcaaaaaactaatatgtaaaatagcccactttcccacagccttgccaatagaacatgtttctcaaacttatagaatttggcctttttaatatgtgaaagttgtatataaaaatgatttaatatccctttttcttagtttgagcatttgtttcacatgtctaaaaattgaggaggagggactcctccttaactactc

SEQ ID NO: 471417 - DNA, 1127 bp, Homo sapiens
ccaccacttaaacctaacagccaacagtgtatttccttgcatcaaactgcagagttctccgtggagtgtatccaccatgtttgacctggtcactctgcaggtcatggatgcattccagacttccactactacacacaacaataatgtgatcaactgcagtcaagagagagttttctatggaaattttcaaaaagagggatcaagatcccgaaggattcttcaaagggttgcaacagaagatgaaacatggctttatgggttcaatcctgaagacaaaccacaaccaaatcaatggttaccaacaggtggaagtagtccagtcaaagcaaaattgaacttgccagagcaaagaactttgaatatattatccctgtctctcctcacctgcaaggtttctgctgagaaatgtgctgatagtcctacggagttttccttgtatgtgttcacttgcttttctcttgctgctttcaaaattctctttgtatttaacttttgagaatttgtttatattgtgtttcagaaaagatctgtgtatatagcctctatttacacttatttgagcttcatggatctaataatttcctttgtcagatttgggaagttttctgttattctttttttctttcaataagctttattctcctttctctttgtttgctacttctggaatagcataatgtgtaaattggtttgcttgatggtttcacatagacccactgactttcttcactcctttgttgttattgttgtgcctcagactggataatttcaaatgattaatctttgagctcattgattttttcttcagttttattgagtctgttgttaaagctttctatggaatattctagttcagtatttatgtttttaacagcaaaatttctgtttggctcttttcaaaaatatctactttgtccacttcatgtcttttgattgaggattttacttgatctatatctaaggtacaaggaaagtgaatgtgaactgtccaggttgtataactatctctggtattcggccaaacaatctgctactatataaactactactgtataaagtttaggatgaagattttaatgaaattatacactcagaatttttgttttgattttcctccttcacaagga

SEQ ID NO: 471418 - DNA, 991 bp, Homo sapiens
ccctgtagccctttgttttggccaatttctcccatttggaatggttgtgtttacccaagaatttcaaaagaatggagaagctccagtttgcagaattagtattcacctggtacctggtgtggtcacctctgaaaaagcaggagtgaactctgtagctgctgctgaagcagggctccatacggtaggagacatctttagtgatgctcaatgcaccactcaggcacaaagatcagtgcctgagagatggctggacacacattctgagctctactccattgaaatcaccttcctaggagccaaaaatagagttactcccatgaagacgaagaccataaacaagtcttacattctacatctgaaaccagtgttcatgcctacctcttctctcaagagacctgacacacgactctctgagccaccttcacactcaaatacacaagatctctgtgataaacttgggagggcagatatctctttaacacactgatttcattttctttggatagatactcattgatgagattgcggaatcatatgctagttctctttctaattttttgaggcgctttcatactgtttctataaagactgtattaacttacatttctaccaatcaaatgtaagagttttcctttcttcaccttctcctcagcatttgctattttttgtcatcttaatgatagccattctaactggggtaaagtgatacctcatagttttggtttacatttctccgatgattagtgatgttgaattttttttaatctacctgttggccatttgtatgtctccttttgaaaaatgtccattcagacctttggcccatttttattgtattatatgggtttttttgctgttgaattgtttgagtttctcacatattctggatattaatccatagacagatgcatagtttctgaatattttctctcatgtttattgcagtactattcacaacagccaaggtatgtgatatgatttgggtctgtgt

SEQ ID NO: 471419 - DNA, 715 bp, Homo sapiens
ctctgtcttttctacaaataccttgatgttggtgaaagtccacttgagtttgccaacttttctgattattgttgcattttgtttttcccgaagtgccctggttcaggaaataaattatggagtcatccctacactaggtgcttatccagatagcaaaggaaactttccatgcccaaacagcagtctctttacctggtttcttcagctagtacttttgatatcaagtcgaaaagcactggggtctatgagagcaaagcctggaaaccgaacagcagaaaatgtgaagataatgagtaattttggagtaacagattcaacttcagaagacatagaatcagctcatgttcacatccaaaaagcagggctgctgaagaccaagatccttattggagatgcagagatcactaacaatatgtttcaaagagtatgcttttcatacgggctgctgaagaccaaaacccttactgcagtgtccagtacctccactcaatcagaagtcactggagctttaggaaatgtgggagcttttgttttgttttgactttcatcttctatgggacctgcaccttatttaaatcgaagaaacactgttttgtaacacgcgtcctcttgaaagaacttgtgtttagcagacatcatacgcaaaagcctttatatttatgtattgcctgctaaagaaggctttatttctgtgaaaagaaggctttctggaagg

SEQ ID NO: 471420 - DNA, 486 bp, Homo sapiens
ttttctgtgagttcatctacaaaatgagcgaaagaaaaacctccatcctgccttcttttaaaacagaaattttacaatccaaaaaacgtgaaagtattgccaaaaaatatggttcagcagagctgaagcctccttcaggggataagaatacagcaccagcccttctgacagagctggagttgccagtagcctttaatctaaggaaaccacaggcaaagcaaacttggcatataacttttcctacattaattagcacccttcagtttaaagggggaaaaataataacactcttgggagagctgttagagctcaaacccaactcattcggattctgcacacaaagactctggggagggggacgatggggtggagaacagaacacagtcttggagagggaaaagagattattttcaggtcaactgaacagtagctttcagaagcaggccattgtttgaattgtgtttcatgatattgattatgaaccgt

SEQ ID NO: 471421 - DNA, 501 bp, Homo sapiens
ttatcatctttacatacaagagtacacaatgtttagctcacttataaaggatacgactttagagcaaggatccctagcccctggcccgaagactggtccttgtccatggtccattaggaaccagggggcacagcaggaaccctatgaatgtcagcaggtttatattgggctgtgcagttggacctacaagccagaagatggagcttggaatgggctgattcatgaggtgcactgtggtcagagctccctcttcagccctagaggggtaggggacaagatggtcaaggctggactggacaggtctatctgccagtccaccaatggcaggcacaagcaccagcaccaagggagaatccagcaggctactgatccaggtgagtgggtgctccaaatgtctagaatctgcctcagcatgaagtggagacagcctcactgtaccatgatctatgcacaggaagagtgaggaagctcatgctgctgatccaggtcagggggtgaccc

SEQ ID NO: 471422 - DNA, 972 bp, Homo sapiens
cattgggttgtgggtttcaggcttttcagctcatggtgtcccgctctgtcacccaggctagaatgcagtggcgcaatctcagctcacttcagaggagcctcttcctatggctaccaccatcacaaacccatggggaatactgccagcctattgctgatgtttacttaaggcccaggggctcttcagtcagctcgtggttaatgcttctaaatctggaactcacctttcagggcaaagtagtctctcagcataactactacaactgggaatgtgttgggtctcacatgaagccagcatgtctccgagtctcacccaaggcccatggtgtattgctgctggttcttcacgggccaagagttcttaagttagcaggggccaagaaaatccaggattgcacacatctgcctctgagcctgctttggaaagtagaaactacagcctttttggctttaatcctctttaagtggtgaaactattgtctcatttgtcttctatattgggattcctttatgtttcttaaacaaactatgcagtttacaatatttaaaattcactaatctatagcatttttaaagcttatacctcatcataattcccaaataatatttcacccgaagccaaccacaaataagtgataaatcaatttttaatttaattcaaacttaatggtatacactttatctgattttctaaaaatagatatggttaaaactaagaaacccatagactgttatccaggtatttttgcaatcaatactttaaatttgtaaagtgaatgattgggattttccaaaatagaggaatgaggctaacattcttgatgaccattcattcagtggtcagctagggcaataacattgatgctcctgtaattgccaaacaatggaaaggaagtgatgaagaatactcatggctggaatttaggcagctaggggaggaaggtacagtttggaaatgatggctacttggttc

SEQ ID NO: 471423 - DNA, 1040 bp, Homo sapiens
catctgcgtcttaacggggaatgagaaatagccataatttccaaacacttgtttttcataagggaaccgacacaagcatttctgagcagatgtatcattgcatgtcagatggaaatgaaaggggacgacatcgggtccaagaggagacaaatgctcaaaaatgtaaagtgactcgccccatggcacacaaccaagccacagaaggcagcaaagataagcggtggtgggaacctgagtcactgaccgtcaatcaagggactgcacctcctggaatactccctgctgatctggtttgcatatgtggcttaatgagtcctcgggaacaagacagaatcaaggaaacagcagcaaagaaaaacacccaactggagaggaagttaacccagccatggaagtggcactggtccacggaccctaggctgaaaggcctcagaagaagtctgaaggaaagcaggctgcgagccaaatggaaagtgaccctgggcctcgggtgaatgtcatgtgccctcttaactctttggtcctgagttcttggagaatctctctgctatatgaagggatccacaagacgaataattaagggggacctctgatcaacagccagcaaggaactgaatccctcagacccacaactcacaagaaactgaagctgaagcagattcttcctcagtcaagcttcaggtgcccagctgtattggtagaggagaccaaccacaccctccacagcacagcacctggagaggaactgctgccatgaccatagaggacaccctctggatacaatgccagacttgatgtgggactgaccaacctatggaccccaggcaccaccacccagacctgctcagcacctgaaacattcacagccgtggagagagaactgttcactgctaccatccacacttctgggccccttcagcagcagggtgacaaggaagagggaaatcgacttggaaaagagtctttatcatttccttccttctgcatattttggtttaatttgctttactttctatagtttcttaaggtacaaagttaga

SEQ ID NO: 471424 - DNA, 900 bp, Homo sapiens
gagacagggaagctctcttggaaggattaatgaggggagctcagaaggccacaaacgttaacaagctctctgaggtcattcagggaaaagaagaaagtccagcacaattctacgagagactgtatgaggcctatcatatgtatactccctttgatcccgatagccctgaaaatcagcgcatgattcacatggctttagtccatcaaagtgcagaagacatgagaagaaaactgcagaaacagactgggcttgcagggaagaatccatcccaattactagaaatagctagccaggtgtttgtaaacaggtatgcagtaagccgtaaggaaaacgggaaagaggatggaggtcagtcccggccacacgccgacctgtttgtcagctgcagcaatcagaggggcccccgcaaagagacaagggaaagggggccctgggaaagaaactcagcttggctgtcagagtttgcagcgtaaccagtgtgctgattgtaaagaaataggacagtggaagaacaaatgccctcagctcaaaagaaaagaaggtgactcagagccggaggctccggacaaggaggaaggggccctgctcaacctggcagaagggttcttggactgagggagaccgggctcaagcatccccattctgacatctgttcagaatgacagtcaggggtggagacattaactttcttgtagatagcggtgctgaacattcgctagtaaccgccccggtcgtccccttaccgaaaaagactactgacgtcatcggagccacgggggtttcagcaaagcaagctttctgcttgccttggacttgtcctgtaggaggacataaagtcattcatcagttttgttacatgcctgacagtctcttgaattttcaggaagggacttgctcagc

SEQ ID NO: 471425 - DNA, 745 bp, Homo sapiens
ttgttctaaatgtttgtgacgttgctggctaatgagttcaagggcattgatttttctttcaaagacagcatcttccctaattatacttccctggcatgcagcatggctcccacctgcctcagaccctccacacagaacctgggagctgtgaccctctcagatcaggggcagagtctctatcagtgggacaaaccgacctcctgcccatctcctgtggagaaggatgagcggccaaggtggccaaacagggaggtgagggagagagaaatgaacttagagactgcaggctggcagggccgcttctgcagggaaaccctccatcctgctgcccagcttgcccagggacaactggctcttgcccacagggcaaatgacgtctacaacaaccaagctgctgcctcctccactccagaggaactgcaggctttgcccgtctgctaacctcagctgctcgaggtcaagcaggagccaggagctcttgcattgactcagttctcagctgcacagccagaaggttctctgcagtccacagctccacagcagagcccaccattctcaggcagggaagctcgcacgtgtacagtaaagagcagaaaagatggccccgatccactggaaagtctatttgcataataagattagggtggggtgaccagccttccccactcactatgtaaatgtcgtacctgatccaaccaatctgtgaggcctctgtaaatcagacacccccttcttaaaccagact

SEQ ID NO: 471426 - DNA, 1426 bp, Homo sapiens
gcaggagcactgccctggggccatcccagaagccttgtccctgctgacaggtttgggaaagtttgcaccaggtagcgttcccagcactgagcctggcactgggccaggctgtagggacattacgtcccaggaagtgaaatcattgtagggcagtcccgatcaagacacacagcctgaggaagctagtggagaccgatgggaaagccccgccctctcctcgaatctgccttgttctcgactttacatttgttggacttttgttcaaagccaaaaggtggcctgagatgccatcgccagaggtggccaagccctggagtccacccccgcctttaaccggggaccttggttcacaggcaccaaggacgcctaaagcctggcactttgaagtcaaagtaattttgctgtgagctgaatgtgtaagatgacactttaaaggctgtgtacgtaattacaggtttctagaaaagaaacgtgttatttggtgctgtctgcattttggtgtctccaccttggcccacggtcccaccaaaaccctgccaggctctcctctcctgactccgtgagaaatctctgctctcctcctcgccacccctcctctgtccccagtccacgtctctctcaactccccactccctccgaccctcctcctcctctctgctgttctgcggccggaacatcttaatttcacgtgctgccccctgagattgtacagtctcccctgcaggtattctgtaaatatcctatcgacacttttacacaaaaatcactcaaatgagatttaaaggaagaagagccagtggctctggtgtggccacagctacgatatctccaaaggagaatgttcgccttgggttttggctccagcgtcaggcacagcctcatggatcccttaggatttacacctctcacccctcaaaaccgagagccatgccctgtttccccattggaaacacgcttttgcctccgaggaactcaaagcccagccttgtctgatgacaccactgtccctgcctcataccctgacactgcgagctttctcttccccaccgcctacccacgaggaccccagacacaggtgggagcaccgagggcccaccctagcggcttggttgctggactagctgtcttctgcccaggagagaagacgctgtacagtgccttgggctgtgacgtgccagatgcggtactgtctcgtgccaccccccttaaggtgcttggtaggtgccacatgccgtattctctcgtgccacccccctgagggcacatagtaggtcccactgtccctgcttcagagcctgtgtcctgagccagccagttcctaagtgctagtgcctgagctctaggccagctctccctgcaaaccacggaaacacccaccccgtgactggcactcaattcctcaattcctcctccatcccctggcttc

SEQ ID NO: 471427 - DNA, 3798 bp, Homo sapiens
tgccttggctttagcccacggttgaaacctgtcttccctcacaagtgggaatgaagcacacagcagcagcttctcacacacctggtgggtgggagaaagcactccccggacctccgacaacaagaagcagaggtgaccgagagtcccaattgttgtactcggatttacaccatgagttttgtagtgaggctgtggtcctcacacactgccctcagctggtgatggagcatgaccatgttaccagggagaccctcaacggcagccaggggagtcagggcagtcaccgaatagctaagcagaagatagaactcaaccatctgacattatccatccttcctcatcagcgactccagaacttgccaatggaagagagtggctgcagtggcagacacagtgggtgtgtagtgaccaagctaaccactgcagcccttgagtgtccatcaccattaacagagaatgaccgccgccagtgtctggcagaaagtcccttcaatttgtacctgcttaaggatccacttcacagtgagggatgtgagatcagataccaactacagaggcaacgaggggaatttggaacttgcctagaagaaagaggaggcactccagctgcagcccctactcgctgcactgatgactggtgtgctttgttccactcaccccactcttctaagtttccttcaggaacagggccaacaggtcacagagaaatagagaagtggatttttgagggatggactgcagggcagctttgctcagagcatgtccaccacaggattcctgctgaacctatgctcttgccatgtggctcccagatgctgagtgattaggagcaaggtggaagggctgggccaggcttccccagtgtagtgcctcagtgtagcaccaatggacagtctttgttccaaggcttccatcaattaatttctccgggctgccttgctgtccgaagatcttctcaatttactttgtttccctcttttccttgctaggtatctccactcaaacctgagtctcaacccacctctgcctgctccctcctctcttttctctggtcagcattttcttgactactttatgtctttaacatttacgtatctcttttaaatgtcccgtaaattaagttttaaaaaattcaatatggaagatctatagtttagcctctgggcttgtgatgggagaagctgctgtgaaggactctgacgtgcgctggatacattttcctcattgtcttggtgattaacattcggctcctcattacttatgtaaatttctgcattgggcttgaatttctcctcagaaaatgagtttttcttttctgtccattgtcaagctgcaacttttccaaatttttgtgctcactttcctcttgaacactttaccacttagacgtttcttctgccaggaaggacagggtgaactaaaggagctggcctggttatttctcttcctccaggtcagaattcatgaggggatttttcttccataattgctctgtctccctgagaaagctcctagaggtaaagctcacaaaagtgtagggacttccttatgctcgagtctccctggcaatgttcactctcagccttgtccattctgagcctctcataatttgttaattgcagattttttctcagtgtagtctcagtataaagatggattttctattcattcaaataaacaaaattttgattattcaacgataatcttataaatgttttaaatgacatttaaataaatatatttaaaagaaaatatcaatatgtaattaatcataatcctttgctttggaaacatcacaaaagtgatttcatttttcgtgtttctggtaaaaaattaaagtcaaaattcatgtctaaatatttagaaatatctagtcacatgtgtggcatattcaagaagtgaaaaatatagaattaatcatagattgcatcatgaatcttaaattttcatttgtttccatatttctaatagccttattaaagggaaatttttgatttataataattgtcattataaccatgtcagctctgagagctaagtatccttttggcatttcagctatttccctttcaccttcaaatgaattttatcttgattttctggtttatgtaggaaggtagcaatattttaaatagacatgacaaatatttactctttgaatgaaatcaagatatcaatgtaggtatgccttcatgctgtaaagtggaatgcatgtttgactatgcagaaaataatttttcacacacaaattgaacatgaggtattgtgacaaaatattacccattttcaaatatcttcctttttgtccaaacaccattcctattgaatctatcaggaaatatgttgcatggcttatttgttgtatattactaatgtttaaaacttaagtcttgcttcatatctggaatttaaaagacaataaaactacaaatcagtgcattccaaggatgtttcagccaaacaaaaatgcaaaaactcaaataacctgtttgatttgcttgttgccacatatccagttttattaaatgtgaacactgcctggttatatatggatttttatatatagcccatcttttgagcagcccagcctgaatagaacagtgtgtgtcttctgtacatgtaaggtgtaaactgatttggctgaaaatatatcaaaactcttcaattttgttgaaacatgctttacacatctaactaaagaattttaagtacttatattttgtattatctgggccattacaattatagtgaattaaaccttatgagttatattcatacatatgaaatataaacttagaaaatattaaaatattagtgtatataattttaatagaaaaaagtaatacaaggtttcatttaataaaataatgaacaaaaatttattcttgcaaggatactttactgctatttgatgacagacattggtgtgtagttgaaacaattgacataaacgatgcattttttattcctttgagaatataagattttacccatgtaactgatatgagcgaattcaaaacaaggtgatatgtctggtaaagaatagaaaatattaaagttcttcgttaaaatatcctgtgatattaatataaatatcttatattttagaaagttaaccagtttttgtttttacaagcaaagtttcagaagttcagaaattttttacaatgttcaggaataacaaatacacctcagacttctgtcaactctaagattagctcatgtattgctcatatgttatgaggcatattagtcatcctattgatgaatcagtactctaaccttatggtaagctgaattttctatgagttgcattgattggacagtatcattaatctgaatggttatacatccttaattcaattgccaactcattaaatgagcctaagcactaattccacttaacttcattgtgattagcaatcatatacttttaaaaatgttctttgtgcatacagcaaaaaccactttgggataaagtaatggttaggagacaacagcaacaagcacaaagctttatagttttatttcaaacatctttaaagcaactagaggtttatatcttggtcacaacctctctctgtggttgactgcaataggctaaaggatttcagcaaaccttactctcaaagagggcatcagataaggagagtgagaaaatcacaaatgtcaaagccagtctgaaattcaggcttgtgtgtgtgctaggctcttgtggttaaccgaccaagtttcagttataagttatgtgagagaaagttatcatttacactagagtaataaatctactttgtctcc

SEQ ID NO: 471428 - DNA, 2530 bp, Homo sapiens
ggctgccggtgccacatgccggcacacctgaccctggaatccagcatgtctgatgcaaacatgggcgcacccctgagaggcgaggctgcgagggagagcggccgtgcagcgggggctctggagaaggagctgctcgccggcagtcctgcgaggcatctttcccattctcaccgctgcatggaaggaaacccaatctcctcagcaaaggatcaagtatttgtcacgctcagcgtttcctcaccacccccgccccgcacccaaggctgtggcaccccggtgggagccctccatgaggaaaaggaggcaggaagccggtgcagcgatggcttagagcccctttctgggcccctgcgcagagaaacacctgaagccttccccggtcctgcccttagaatgaatagctccctcttctctgatctcggcactcgccttgtttttggcatgttgtcctgttttgttgatatttttgtttcccccatgggagctcgccacggagccagccagatctcccatgtgctaccataaggagagcctcgcagagctgtggcaggtggtattggcatggatgagaaacttctgcatgggtcttagtgaatgcattggcattcctggatgaaatacattaaaaatgaaataaatccatattaataacaaataatgatacagtcacctttgatagagtaaaaatgaacacttttgtaatcctttgttatgaaaaataatgagcctatgaagattcaatttcattatttgcaactacttgaagcatatttttatctcatttcttgtatctataggctaaatacaaattgatatcaatgctgatgatatttagcttaataagtttatatcttttatctgaattattcctaaataaaattgacagcagtattcgcagcttgtaacacagagcagccagtggcttccaggaaaagtataggtaattttcatcatcttgccagagacaaggggttctgctgggttcatctagaaatcaagacatattcctttagaggcttccctatgggcagtaagccatttgcctcacttggcatttatttgttgacagcatttacatgtctttgaaacaatgctgacaactttgcttaaataaatgaacatttccatgtccattctcaggtggccagaataatcagtggatgtgaacagtaaattctcataaatgtgactcgtgtttggattaagtatcgtcattgaccaaatcattttgtccttctccccatttgtcgtgccaccctcacatgatgttataatacccatcgaataatcatgactgtcagcaataaatgcagccactgacgccagctgcaaggaatgaagtcaagattgtccatgcgacgaatctgaccttttcaactaagctttaattttggtacgcttttccccccctttttataaattactcagatctcaaggtaataagcatgtaaaggaaaacctgttaaacatcttatgctgtactcgccattcctttaactatttttaaacgaattccttgttcagcacaaattcaagaaaaagcagagagtgtagaaaaagaggacagagagggacattttataatttttaggagatgtctgtattatgattataaaccagaaaagcacagactaatgtttttctaggttggatgagaaatctagaaataggatattggtggtaaaaggggaagagtgccttaggaagagtcttgggcgtaatttggggagtacctttcttccaagctacacacagccaactgttggtagcatcatattccacacagtgagaagcaaggtggggccaagatgccactctggaaggtcaacagataagtgcagaatatctcatgcaaatgattgaaagcaaatggtgactccgagctatgtaggagcttctcatgtaaatggctgcaccaccttcactgcagtcgaataaatgtgttatcatgaaaacattctcttctaaacatgaaccacatctgtagggtcaaatcaatagatacccatcaaagcatttactgtggttctagtaactatttgatcagaatatccttcctttttggcatttttgttttgtcatattataaagtaagtggtcttagaaggtgattgttccataaccatttttttttttttgctgccttattccataccctgaagagcagcatatgtgtttctcctgccagccctgctcctcatggtgattcagccttctagaggcattagatttatgttgcttatgcaagaccacttttgtatgcaacgggacacatccgtaatttttgcagcctcctatctctcatggctggcactccaggaatttggtagctttctcagtcactttttgaataatgcattgcttgggtattagaactataggtacttataaggtttagatttaacacatttttttttttctgagaacttattaacatccaaatactgtagtaactggagatacaggaattaaaatgatgccttctctatgtacaatgtaaaaggaaggcaagaaacataccgacagttgc

SEQ ID NO: 471429 - DNA, 783 bp, Homo sapiens
tggttctggagaatgggaaatctaacagcatggcatcggtgtctgtggagggcctttgtgctgtattataacatggtggaaggcaaagatacttggatacagttcaatgaactggtatttaataatgaccatctgggtggagcttgggctttggcactgaagagaaggagaaagcaaggtttctgcccctttggagccatcattctgttggggattcaagatttccacatggtcctcgctgtcaacgagtggtggttatctaataggggtccctgccgaagccacttagcagcactcatgctaaggggtggtgatctccaaccccagaactggggcgctctggcaaaggcagcctgtaaccacccagagtgtaatttgtcagagacacgaaggttaacatttttcttcacaaaaactgtctttaatggccatcagcagtcaggacctctgatttctgtctcatttgaaagcttttaatgctttcagagggatagatggggtgacctaataggtcttttccatctctgattttctatgattaatgaagttcaattgtgcagaataaaatgcaaaatggtcttcaaactctgatatcctttcttctgcttgattgatttggctattgatacttgtgtatgcttcacgaagttcttgtgctgttttcagctccatcaggtcatttatgacctctaaactggctattctagttagcaactcctgtaaccttttataaaggttcttagcttatttgcattggattagaacatgctcctttagctcaac

SEQ ID NO: 471430 - DNA, 1529 bp, Homo sapiens
aagggaactcctgtttcagaagttcatgcactgaggcaggctgctgaagggatggttttatagatgctcctcctcctagtccctctgaacttaacacctttctcacttgcatattggtgttttttgctggctgtttattgggacttcagctggggtcttagccagaccacctacaagtggactctccatgtggtctgggtttcctcacaatgtggcagctgggttccaaaaaagagcacctccaagagaactgagtggaagcactatcctttttttacatcctggcctcagaatttacatagcatcacttttgccataggcactggcccactcagatgcaaggatagggaccataagccctgcctgttcataggaggagtgtccatgtcagcagtaagaagagtatgtgggatgagagaacttgttgcagccgtcttggaaaatacaacctgccatgggtgaggtagatccagatattagtgggaggaattaatactttcaaacccagaataattagacagcagtacaaagaggcatctgatcaaatgggtgattgtataacatggataataatggctaagagagtgtgaaggatgagtagttcagtgaggggactgtgccaccttaacaaaatcattgttctttctaaatctcaaattctttctctcaaaattggcataatataagctactgcatggctccatatttcattttaattttgtaaaatgtgtggttgtgatagtggttttctgaggccttaataaaatctgatttaagaaagcttactctattttatatatattgaatctgaagatataatttgaggtccaatattgaaaatttataagtcaattaaaaatctaaaaatgagtacaattttgtgacttataagatgtttcagtcaatgatggaccgcatatgtgatggtggtcctataagagtataatggagctgaaaatttcatttaaaaataattttaatacttacatttctcttgcttctcctgctaggtcatgacctcttgaaaaggtttggatgattaatattttttttttatcttgtcacagggccatgaagcattactcatgtatttgtggtgatgctggtgtaaagaaacccactgtgctgccaattgtgtaaaagtctagcacagttttgtacagaatgtaatacttgataacaataagtgactatattactggtttatatattcactacactatgctttttattgttttcttagagtgtgctccttctacttattaaaaaaagttaactgtaaaactgtctcaggcaggtccttcaggaggtatttgagaagaaggcattgttgtcataggagatgacagctccatgtgtgttactgcccctgaagacctcccagtaggacaagatgtggagggggaagacggtgatattgatgattctgaccctgtgtaggcctaggtgaatgtatgtgtttgtgtcttagtttttaacaaagaagtttaagaagtaaaagaaaaaaattttataatagaaaagagctt

SEQ ID NO: 471431 - DNA, 1061 bp, Homo sapiens
caccattgccatcattaccattaccaccatcttcaccatcatcaccatcaccatcatcatcatgatcactgttattaccataataataataataattgtcatcaccatcatcaccattatcaccatcaccatcattagtatcaccattatcaccctcatcaccatcaccatcatcactatcaccatcatcattatcaccatcaccatcatcaccatcatcaccgtcaccattattatcatcatcatcatcatcagcatcatcattaccaccatcttcaccatcatcactatcaccattattaccataataatcaccatcaccatcaccgttattaccgtaataataatcaccatcatcatcaccatcaccaccatcactatcatcatcatcactgttagcatcaccactatctgtaccaccatcatcatcatcataatcaccatcaccattatcaccatcatcatcactatcatcattatcatcaccatcacatcatcaccatcaatcaccatcactatcaccattattgccatgatcacaattatcattaccatcaccatcatcactatcatcccattttcatcatcactatcatcattaccattaccattatcaccatcaccatcgtcatcaccaccatcttcaccatcattattgccatcgtcctcatcattaccattatcctcatatgtaattcacactgtgctaaaattaattggaaatataggccagaagattcatggaggaggtgagattgaaaataaagattcatgtttgattagactcatgcttacgtcatgaaaatgtgtgaactctctaagaagaaaataaagatgaaaaagaagtcaaagtatcaataggtgatgatgctcctataggactaagggaagaggaaatgtagctagttatgggttcagatatggagttggcaggcctcactaaaagctgaagttaaagcaaacatgaatctagatgagtccattgtgctttgaaatagcccgtctctgctgatgtagtagggcagtttccatggagtggtggatagaattcagattgcagc

SEQ ID NO: 471432 - DNA, 614 bp, Homo sapiens
gcagggagccttccatgattgactacatcacaccatcgtcaatgttctattctctgtcttctcgctgccagggaactcaattagcagatgtgtcacctaatagaaacacttcattaagagagagttctggaaatggaactgcctacttagttttgtccactctggtcactggaatattgatgttcatattctgcttgcctggacacaatccaggaatttttgtgttaatagcatctggaggaagacactggttctttacggattctcgtggggtggttgtagacgcctgtgaggtgttgtggatgaatgaccatctccaggacgccagtacacgcatgggggacccatggttacagactccatccttcttccgatatggtgactcagatcaaattcactttgccaaggtcatcctcctaactcacgtccgggtatcctcatgctccctgaaaggcacctacagtgaggaccggctccttggagccctgtggtgccctgggatggtgccttggcatccagtgtgcagctcccatctccaggtgggtgctgccacaaccagcaaagggaagaagacagaaaaggcggagactttctgaagctgacaagtgagattc

SEQ ID NO: 471433 - DNA, 983 bp, Homo sapiens
ccctcaagtcctcagaagtcagccatcatgaagttcccgccattctgggtcatagacaaaggtgttagtcctttcatgttcagactgaggatgccagagcccacaggtggagtcacttgcgtgccaactttcaccagagcccacatgtcagagcccagactcacactgcatttcaggactttcatcctaatgcacaaagccagagatgaggactggaaaacagagagtgatgatgacgacaccaacgacaaacggaataaatcagctgtgcagctatgggattctcctcattcaaacattgcgaagggatttaccaatggcattgagatgagttgcaacaagcccctggtacaaacagctctggtgcaaatccacaggaaagactgcagccgcaagcctgccatgaagatggccctgttcagagcaaatactactgaactttatactctgccaaccaagaaagaaaagtgcttcacctatgtatcaattccacgaggtccgatacttttgatatttcaaattcaagcgcagtgcttggagcccatgctaggtggaaattcagaatgcactgtgaaccttatcctgggctccggcccctgcaatgcagttcttatcctgtgggttggcccaccagtcccccaagagctgcattcagcggacatctttgcagatgatcaagttaagatgcggtcaatagggtgggccctaatccaatatgactgtgtccttatggaaagggaaaatgtggctacggggacagacatgcgcataggaggaaggccctgtgaagatgaaggcagggaccaggggatgcttcctcacacaaaggaatgcccaagagtgccagcagccaccagaaactaggagaggcacctggaaagattctcccaccctgccctcgggaggaacccaccttcggtccttgatcttggacctctcctccctagacctgtgggggaataaattcctcttgtttaggactc

SEQ ID NO: 471434 - DNA, 611 bp, Homo sapiens
aagattgggcagggtcaagggtctttcaacctcccacagtgggagttagttcccaacagaacatggagggagaggtaaatcagggatttcttcttggtttgaatccattgctgtcaaactatagagattgttatcagtcttctgggtctagccacccagcaagtctaccaggttccaggctggtactgggggttgtctgcacagagtcctgtgatgtgaaccatctatgggtctctcagctgtggatacctccacctgttcgggtggactctaaagcactctctgagaaggagctaagcattcagagtgttaatcagcataaacatatctccataaagatcaacacctgcggaaagagtacggcagatgtttgcccaaggatgagagggaaaatctgtgaaagttcaagagcctacaatattgaggtttatggaggacaagtggctttgtgggccatatggttcctgctgcaactatttaactctactgctgtggcacaaaagtggctataaacaagatgtaaatgaatgaatatggcagtgttccagtaaaactttatttattgcactgaaatttgaatttcagataattttatgtatcatgaaatatta

SEQ ID NO: 471435 - DNA, 471 bp, Homo sapiens
atttttgtgatggctgttttaaaattctcgtcagataattccaacatttgtatcatcttggtgtcagtgactattgattatcttttcccattcaagttgagattttcctggttcttgtgtagtaacacatggtccaggatcggaagatacttccggtccagtggggaagttggaagtatggcagggtatgatcaaggtatggcaggttatgatcaaggtatgccatgggaagacaggagagagggcagagcaactctttcagggtcagggaagggtgtcttggaagaggagaccatgttgagtgatgataaagaacaggactgcaagttgggaatgacttgctgtgcatttcttgcctttatgcagactttgcacagcatttacgggtaaatttaaacctaaaaagacttgtgttttgacttaggaagcataccatctgtcagtgggctttctccaggacaattttaaggc

SEQ ID NO: 471436 - DNA, 552 bp, Homo sapiens
agcgagcgagggctgctagcccagcagtatggaagggaaatgtggggatggagtccccacacagagtccccaacagggaactgcctagtggagctgtgagaagaggacctctgtcctccagaccccagaatgttagatccactgaaagcttgcaccatgcacctggaaaagccacagacactcaatgccagcctgtgaaagcagccaggaggggtgctgtaccctgcaaagccacaggggcagagctgcccaaggctatgcaagcccacctcttacatcagtgtgccctggatgtgagacatgaagtcaaaggagatcatttcagagctttaagatttgactgctccaatggatttcagacttgcatggggcctgtaccccctttgttttggccaatttctcccatttggaataggtgtatttacccagtgcctgtatccccatcatatccaggaagtaactaacttacttttgattttacaggctcataggcagaagggatttgccttgtctcagactttggatttggacttttgggttaatgctggaatg

SEQ ID NO: 471437 - DNA, 516 bp, Homo sapiens
tcgatggtacaccgcattgctcctaggctacaaacgtgtacagcatgctgctctgctgaatactgtaggccactgtgacatgatgggaagcatttttgtatctaagaatagaatagacacagtcgaaatacagtatgaaagacagaaaatgacccatctgtcttggagctggcaggactggaagttgctctggatgggccagagaaggccgtgtgatgaaggaagcagagaatggaggatgcactttgaggatggaggaaggagccacaggcaaaagaaggttggagccttctggaagttagaaaagggaataataacaaataaattctgtacatgttcaacacagacacaaccatccattcggtttcttccaagtatttttgattcctggttggttgaatccacagatgcagaacccagaacccacggatatagatggactgctgtctatcagtttcctactgctgccgctccccacaaagggcctctggggcctgcggatgaataagtccttga

SEQ ID NO: 471438 - DNA, 828 bp, Homo sapiens
ttaagacggactaacttaatgggtatgcgacttggacgtcctaggaagggtaaagggtgtggctggcgctcagggttccttcctcaccactcaccccggccgaaatgtccacataaatcatttccaaacgatttgactccaccttcaagactcagtcctcccagaaataggaaagatcttcaagacagctgcgattctcaaggcgatgaggcacatgaggatctctggctgggggagggggctttacaaagaacatctgcccaggaatcctgggaaggattcaggaaggagtgctttaccaatgaaataatttccacagtcaactgcggccacttctgccgaggttttacagacctcagaagaagtgccagtcttaaattgccagaagaagtttcagaggcagtgtttggacacctcagtcaattttaccaggagctggacagaacacaatggtttaagaccaagactatgcactcttggagtagatgttctgatgaccaaatttctggtaccagtcgacaatggagttgcaagggacccacattaagctataatcagagtttcattttggtgcctactctaaacgtgccattcttagatagttgcactgaagattgtgagactttgtttctgccccatgagaagaagggctcagatcaattggcaaagcctgctatgaagaggggatcagggaaagccgcctcaaagccctgagagcctccaaataagcattttctcacctgttgccatgcacttttacaatttggtcatgtgtttattgcaagctcattttgtaccttgagggagggaggtagaaggaatttgatc

SEQ ID NO: 471439 - DNA, 2369 bp, Homo sapiens
caggaagcagatcagtggttgcctgggtgtagaggtaggggcatgaatggggaaaccacaaggggacacaagaaaacttttggatgtgatagaatacaatcgaacgaggagtttggcttccctagaaatctgtcattttttggatgaatgaaggaatggaaacgacacagggactacgaagaaaagcccagccacctggccctttccaattctggccgcggacagccagtgctgtggccagtttcgcccgcccacgccctcctccccaaatatatattttgaaaattatttgttcaacaaatatgtgttggggtcgtgccctccgtgctgccctgggacgcgaccgtcacacggaacctcccctgggcctgggggccgcgctgtgttgtttgcgccgggactgcggaggacggcggcgcgggccggggctctgggcgggttcgcgttcagatcctcgaagtggctccctccgggacctcgctggctttcctgttcccgacccctcggccaagccgtgcgaccgggtgggctctgcttccccgggaccccactctgaccccatcccctaagccgctcccgcgagcacctcagctccgctcccgcgcgggtcagcaaattcgaagtccgccccagacccctgggccttcgggcgcccccggaagccgcagggactgtcggactgagcggcccccttgcttgggtgggagctggggtgcagagaggggctgttctcgcacccttccgctgcatcggtccccgggccagtgcggagactcctctttgcgtttccaaatcacttttacgaacaaaagaggcgcccagaggatatcaccccgggcgcaccgccctccaggggtgtttgaaacgtgagctgttgtcaggcccagggccaaggatgctaaatgtccgggaaaatgcgcgcggcagccggccacactcaggacgatggtccgtccccgagagccagcagggctgcggagaggaagatccagccgccgagcgcagcgcgcacggagcgggacgcctgcggcgatgcctgcccgggtggccgctgtcctctgcccgggcgccgctggagccgcgcgtccccatcgccgcgccggctagtcccacaggtgcccggagagggaggcacggaggcatacccaaccttgagtgcgtccagcatacgtgggtgtggacgaaggacatgttcagcacacctgaaagctccctcgtgcctcccccagtcggtgccctccccggaggtaaccactcttctgacctctatgccctgtattcacttggtgcacctgaatgatctaatggtcttttgcatctctggtgtttttagtgggagtttattcgcatcccgcaggtttcagctcttctcctttcccattcctttcaatggcatgacggcgtttctttccttcaaaccacttctcagtttgcaatttctgtgttagtttgtttacctgtctgctgtttgctttccagctagaaggtaagtgtcctctcccattcactgctgtctcctgagcccctagcgcagtgtcggcgcacgtagatattcaacaaatacttactcaatggatgagtatgggaatgaaaggaagaaatactccaggcatgaatttttgccgtcctgaatctaaaaccaatttacttgggcaaacactggcctatgactgagatctctgcatttgttttacaaagacagtgttcaccaaatccaagttagaagacttagagaaaaatactgaagttattccagtctgcctggaagccaaaagtggcatcattctcaccttctgtgataggactaccttctcaaccaagactaaattttcgctttaaactgttgaatcagtgttttataaaagcactccactttggctacataaaaagaccctcaacagtggtgtttcccccccacctctctttttacagtcagggtctccttccatcagtccattgctggagggcagtggtgtgatcatagcttaatagtggttatctccattggggtgatggaggatgattttgcttacttcccttatactttgtcattttttatatggacacattttacttcttcaaatttttaaataatgtttaattgtggcaaaacacatataacttaaaatttagcaccttaaccatttttaagtgtacagttcaatagtgtcaaatacattcacattgttatacaaccaatcaccaggatgcttttcatcttgcaactctgaaactctgtacccattaaacaactccccatctccctctccacttcccccagcccatggcaaccaccattctgttttttttctctgtaaatttgactactctaggtacctcacatatgtagaattatacaggatttgtcc

SEQ ID NO: 471440 - DNA, 3317 bp, Homo sapiens
tcattgaggtgggagtgggcctgacgtgtttctagaacagcaaaggggtccgcatagcagagacaggcatggtgagagagaatcctcgtcagaagtgtcacaggggccgccgctgccttagtgcagggagcccagtccctccaccgccgtccctgcagcctgcagacagggcccacctgccgcctactccccggctccagcagctgggaaaggctcccatcagcaggtgaaggggagcgggaaagccactcgccagcgcctgctctgaggctgctgtccttgcacgttcacacgtgggagaagcgactttctttctctttcttcagttccaaggagcccattagtggcctgtgacgggctcagtctcctgccctgggcgctccttgagaccaccaccaggacgtccaactctaaagccacagagacccgggcttcctgggaaaagctgaccagcgcattcctgcaggcgcaggattaagacgggaaacccagaaaggagtctctcctcattgcaaacagagataagccttcggggagagttgcacacaggagtgcgagtggccacccctccaggggctgtgacaggggaatctgtgggtcagcggcctctctgccaccaccagccacacgacttggggaggacagctggggcctccctgttcccctgtccgcagcagtcagggcctgcctgttcatacccaggttatcacgtgaaaccagggaagtcagggaccagcctctgactgcgggacagaaccacaacacagggtgttgctggggaggcccgacctggctcgggttggctgctttctcctttacaggctaaagatctgctgcccgctggctcctgcggccctccgtggagtgggggaggccgccctccctcctgcgtcaccatcctggctgcctccgttcctgcagctgactctgcaggggtggggagttttgctagcaaggcaatcccatttgtgggttcccagggcagctggtacgaatcaaggggaatatgaaacatcttccgcatctcttgactcacatctggccccaacccaccgccttctgagtccagaagactttacatctcacagtttcctctgccgccccgcaggcctgcttggacagctgtggcttgccggcacgaaggccacgaagctgcagatcaaccagtgagtatgtgttctgtcctctttccaacttcctgcacaacctgagctccagacgtgatgcacagcagagtgacgcaggccggggtctctccgtgctaattctgagcgcagctcccagaggccaaagacaggcgaggcaggagcgccgccgctattggaggatggaggcagggaatgtggactgaagtccagagtgacccccggaagtctctatatggcaaaaccccagctggccatcaggagcaggaaaagcaaggcagcaggaccaggaaaggggtcaggaatgactctgaaaggctgggctttgggacggcaggaagggctccacgctgagagcaccggcttggatggccatcagagtaagcagcaagggctaggtagagctcagttctggacactaggcgaggggggagagatggcagcccagggttccgcacacggcggctccgggattccagcgcaggagagggcaagcctggtggacctgagctttccaggcctctccttcttcacatttgttaatgcccagtggaccaaaacaagccacatggccacacccaaactcaaggagtcaaataaaagcccccacctcctgctgggagaagctgccagtgcagttcccgaggccttctacgctgctgtggcgctccgaggcttccctgctgacatcctagtggccccagcagagccccatctattggttgaagctcctcttcagcctgtcctctcctggacgtgactcttccttgtactcacaaatgtaccttgacacaataaatgtacctgttttgagtccctgcatctctctgtcaggaaccactcaaatatgagtaatactgtgaatcctgttcatatgaacgttacagttatttctatctccagtcaagagcagtgcccatcttagaagctggctaaggtttcagagcagctttggaagcaatatttatttgtagcacatgtatgtatctataaaatcctacctaagtaaaacaagtgtttctagaatcatgtgccatttggggaatggaaaactcaaaatgtaaattgttatgcaggtcctgtgatggattccccaacagacatgtcagttcgtggacaacatcccccataagtcaccgtgggtcctggggcatcctcctttccccaccagggggcagaagccctgcttctcacaccagctcagagtttctaaaactgtgactcgtgccactactggtgtttgaggcaattttagtgacatacatttcatctttttttcccttcttttcttatacgttaaacgaaaataaccaaagagtagatattccaaagagaagtgagaagaggctgagaataacatgagcagagaaatatgacatgcatttgctgtttgtaaacaagagggagaagactattgaaaaagtatggtgagaggaccaagttaagacagaagattgtgatggtgtcacaattaattaaattatcactggtggtagttatgtttctggcaataactgataggttactctgtatcaaacttgtttctgaaaacaactagaaagctgagataaatataaaaacattttttaggacattggagagctaccaaggtactgagaatttgcaataccaagattagagtattttctccaactgcagttaaaactaaaaataggtaacaaaaagttaaggagaaaaatctccatatgttgggaaattaatcaatatgcttataatacccataagtcaaaggagaaattacaatggaaattagaaaatattttgaattaagccacaattaaatttctgcatttcacaatttgtgggatttatttaaagccaagcttagaagaaaacttatagctttaaaatgcacatattcgaaaagaaaaaaagtgaaaaccaatggtctaagaatctatgtttatagcacatacatgtttatagcaacagagtttgcaattgcaaaaatatagaaccagcccaaatgcccatcaatcaacaagtggataaagaatatgtggtatatatatatatatatatatatatatatatatatatatatatatatatatatacacacacacacacacacacaccatggaatactactcagccataaaaaggaacaaaataatggcgttttcagcaacctggttggaattggagact

SEQ ID NO: 471441 - DNA, 661 bp, Homo sapiens
cgggtttgagcgggaagcggggggatttacagccatccctccagaagatgagggtgggtgcagccccggtaacgctggtgaagggtgggtgggcccagggcagtggagcaagagtgaaggagagtgctgaggtcaaagcacctaccacaaagggaagcaggcccaagggaactgccttgcctcttccactgtgtgaggacacaggaaaggtgccatctctgaaccagaaaagtgggacctcaccagacaccgaatctgctgacgcccagcctccagaacgcctctacctactagctgccactagcatcctcccacactgccgacagcaacactgtctgcagacattgccagatatcccctgggaggcaaagtcacccccagttacagtgactggtctagttacaccggcttccttcctgcggcgcgagcctggctggtctccatttagacccagtgtagtcgctcttcttcagtctgctgtgcttcctccgagagtgttgtgtcagctccttctctgttctgacctcagctcagatgttgcctccccacagggtaactgaagggtcttctttgaccaccctgacttggaaggccctcccttccaagtcaccccacattacattactgcattttaatttcttcctgtccttcatcaatatcc

SEQ ID NO: 471442 - DNA, 531 bp, Homo sapiens
tccagtttcagagtgagaactatctaaaatgacagcacttttggtgcactcaacagctgatggcaagtgtgatgagaatgcacctttatatcatggacagtttccagtagaccctgaagaggcatctgtggttgacctcggctgggctgatgcagtgcgaatcccatcccattttcctatctggcttcctctgccgtgggtctggctgggattgccttctctgcaaggcctatgtgtggtgccaggtcccggtgaaccaggctatgtagcagaatcctgcacacacgtactgcaccaagctctcctgtgtattggcgtcctgtcctcctatggattgaaccatccaaactccccgctcccggtgatctatattaacctagtgttgttttctacactttccaatatatacatattcctatggcctatatgttcatatagataggttgcataattttaagaaagtctttttcacaagcaataataaaaacagtaagaataggagtaatgaagaaaattgagaagaaacgacgc

SEQ ID NO: 471443 - DNA, 1188 bp, Homo sapiens
aagagaccaagtatagaggagggtatctgtggtgacgagggcggatttgactgaaatgtgctatgtccaatgagcgactgaatgtgcgatgtaatattaaggatggacagtactggtcaatatccctgggggttgggtgttatgtgggggttaaagttgatgtgttacctgtatttttgaataccctgtttaagacgtgccaatcagcttgtgttttttgcacatatcatgttgcatctttgggatgtctagaatttttctcttctatcttactggaatgctttctctacattgctttcccatacaacatattatctctctttgaagacttttcacatatctgggtaagtccacaccaggacttcgtggtgcatgcaaatcatctattgaaatgcccatctttctttacaggcaaaacctctcaagagccaggactatgtcttattcatttttatattcatcaggctcagtgctgagcacatgctaaatgttcattaaatgccagttgaacaaagaggggagagaaaaagaaaataactcgaagtataaggtgctttgccatgtgtttttcatgaaagaaagaaggagatttaaacaacagggaatgaaattctgctttatctttctttcattctcaagaaaatactagtaccaaattatgacccaataggcaaatagacattagttaatgtaccttgaaatttccactaattctcttgtgactttggatcagctacttcttgttgtattaaattctctcataaatactgtgagttgtgacttattgactttaactaacagaaaagtgaatctcactcctgttcaagtgacctcactgctttctgatgacccccactggctatgccacatttctggtgctgaatggatgcacaacacgtccgtactcatctgggcttcgatgcagttgttcaatttgaaaaatgatggaatgaacaatcctgcgtatggcttccaaactgaaaactcagaacttaaggctctggtctgaagtggccacagttcatctctggccttgacaagccatttgttggccgtggaactcattacttgaaagagatttgctacagctcccgttatggtgcctttagaagaaataaagatctcctgcctcacttccaatacttcttttatggtagcaccagaaatcttgatttcattggcttattt

SEQ ID NO: 471444 - DNA, 510 bp, Homo sapiens
tactacagtcttcggctaaatggatagtctatttctcctaggctacaaacctgtacagcatgtcactgtactgaatactgcaggcaactgggccttccccgactttactctacacctctctttgctgccaccagttggtggcagcaactggggagtgctggctggcctggtgaagaaggacgtgtttgcctccctttccaacatgattgaggcccttgcaatgatcggagggagagatgatggtggctgggacccacgggtagagatgaggaatggaaagaagaagtcaaatgctggatataaaggtggaatcttcacctttgaaattttacataaccctgaaaatgcttctccatacttctgctatgtccctgggaaacagattatacaaagtagaaacaattatggaacaactccgcaattgccacattttctgctccaaaggacttagtctctccagacttccagaaaccacagattttggtctcagtacagctgacccagacactc

SEQ ID NO: 471445 - DNA, 647 bp, Homo sapiens
aaacagaaaaggacatcaggcctttacgtccctgctttgtctgcacgatggggccctgggctgttccacccatgcccactgaggggctttcatgtggacaggcccggccatggcccatacaacaccaaccaaggtcacatgagtggaattacatagatgatgacagcagtagccttaatgtgcaggtcacactgatgcaagagttaggctcccacggccttgggcagctccacccctgtggttttgcagggtacagccccagtcctgtctgctttcatgggctggcattgagtgtctgtggctttttcaggtgcacggtgcaagctgttggtggatctaccattctggggtctggaggacagtggcctcttacagctccactaggcagaaaacatgctcctgaagttgactacgtgtgtgcagttggcttggggcacacttgcaccagattcttgacattcacctttgaagcatatgccagctgcgttccagatggcatgtgaagcagaaggatgaagagctttcctcagttttcttttaatcagcattaaaggatggaagtaaatattggttgtctatttttaagcaattgaagtttgcaaagacatggaagttcacagtatacttagtatagtggtgtgaattat

SEQ ID NO: 471446 - DNA, 604 bp, Homo sapiens
gtgagctgagctatgagccagaagtttacaggtgtggttgaattccaaatggctgtcaacaaggcaggtccagtggtgacagataatgggaattttatcttggactggaagtttgaccaggtacataaatggggtgaagtgaacagagctgccagaatggtcccacgtgtggtggacacaggcctgttcatccacatggctgagagagcctacttcaggatgcaggatggctcagtgaacaggagggaacagcctttctggagggccgtaagtagctctgcaggctcagaggagctgcgactcaagtctcctctgcctgcaggacttatgtggacatgtgcagggtgtcccaggaacctcaagggccacatgaaggaacactggactttctgtaggatcactgctcctttggcatccacggagtcacagtgaaggacattcccaacaatgttttgggtggctgatgggaagacagtggtcatggaaccaaaggatttggaaaaacttacaaacgaagacacaaactggaaacgtaatccttgagttcttaaaggctttctcagacatgaccttgatttgtacttttttgcctctgaaatgggag

SEQ ID NO: 471447 - DNA, 745 bp, Homo sapiens
cttctctgtagaccagaccttacaatgggagctgctgttattcagttggaaaacttaaatgcaatgggagtaattggatcccaaggtgatagggaccaagtgacggcactcaaccgtcaaagacaagttgaatgcagttttcaaaatggtacctggtatgcacctactaaactggcaaatacctttttctccatttgtgttcataaggcccacctgaggcactctgccttcagctggcaaggcagaatcacaccctcactgtcttacatcagagatatatcaactcgccagctttatgtcacaatccagtttgcgggaatcttcactgcctttcccttccataagatttcatactgttctattgataaccttatgctgatcagacctcatgaccaagaagtagaaactactgtggacttatggtggagtccagaacagaaggctctacagcaagtcccagctgccatgcaagctgctcttcctcttgggccatatgacccagcagatccaatgatatccaagatgtcagtggcagatagcgatgctgtttggagcttttggcagggtgctgtagaagaatcacagcagaagttcttaggattttggagcaaggctctgccatcatctgtagataactactcttttgagagagctcttggccagctactgggccttaatagaaactgaacgcttgaccatgggccaccaattaccaggtgaccggagctgcccatcatgaactggg

SEQ ID NO: 471448 - DNA, 2303 bp, Homo sapiens
gtgtaggcgtcacaccaggatgaggactggggttacttcttcaatgctttgccgcttagaaatttcttcttccagataccttaaatcatctctcttaaattcaaagttccacagatctctaggagggggcaaaatgccacctgtctctttgctaaagcatagcaaaagtgactacttcagttcccaacaagttcctcatctcctatgggaccacctcagcctggatttcactgtccatatcactattaacattttgataacaaccattcaacaagtctctaggaagttccaaactttcactcatctccctgtcttctttgagctctccaaactgttccaacctctgcctgctacccagttccaaagtcacttccacattttcaggtatctttatagcagtgcccgactcctagtacaaattttctgtattagtccattttcacactgctacaaagaactacctgaaactgggtaatttacgaagacaataggttttgttgactcacagttacacatggctgtggaggactcaggaaacttacaatcatgcgaatggtgaaggggaagtaaacgtccctttttacatggcagcaggagagaaaaagataagggggaagtgccacacacttttaaacaatcaaatcttgtgagaactcattcactatcatgagaacagcaagggggaaatctggccccatgatccaatcacctcccatcaggcccctcctccaattcgacatgatatttgggtgggaacattgctgttctatttttcagggggcagtgagctattatttaaacatttttctatgaaacaacacagtccttagtgaccaaatcatttcgattgctgctgggaggtgcaatgagtactacattaaaatggcatatgcaaaagtgtaaatataattttcaaatatttttaactttctcatagagtgaagtagtttacgataattgaattattatattcattgcaagcagagaaatatcacctatatttaaagtatattaaaaggtaaaacttttattagagaagggtaacaatcagaacttgctgattagttctatggtagaattgcctccatggtttcatattgagaattagcactaagctaataccagaagaacaaaattaataagatattggccttgcccttgaaaaactttgagtccaatatttattgatatttctcaacctataaaaattaaatagtttgtgttctatgtcagacttctcacaaaaatgtcctattaaaatcctttggatatatttttaacagatttttaggtgctagattattaatctccacaaacagagaaagcaactcaattcagtttgtattgaataaaaataagtgagcttatgttcatacttaacaatagtaaccattaagaggattttctctaaaaacattaaataaagtggatacagtatctaccttaatctttttcagagagcttttttcttttatatcatcaaatatagtcagcaattacatatttttttgcatttatcagtttttatttccattatgtcccttctactggaccataaagcctttcaaagaagataatgggtctaattagtttatatttgtatcctcagagcctaggatggggtatgacatttatcattagggattcaataaatagattataataccaaaaagcaggaaacaaaatgttcctttcatttatattttaagtggaatgaagtgtttttatgttttgctttcgcgtttttgttttaatttaaaatgattctgcaccaaagactataacattttggggaaaaatgagatataataatgaaatgtactccaaatagaaaaaaagtaattgtaacccacattcttatagattgcctaaagcttccattgaattatttcttttatctttattaagtatttttatccgaagaaataaagccccaaggccaaaatacaaatatggtttttaatagtgttctaatgatagtaatgttttatgccagaggtgctaaatctattgctgcttcttcttatgttgacctatttctccccatttggttaagatcagcttttccaaattttagtaattgtttcattaaagcatttaaatatcacaagataaaaaagtgtagataatattatttgattcacttaaaagtttataaaatcatatctcaatataagttaatattatcaatcaaaggatcaactatgacaatttttgattaacttttagcaagagaatttatattttgcattgaagtctggtttcatagtttgttgtctaaagaactgtgtgcaaataaagaa

SEQ ID NO: 471449 - DNA, 1502 bp, Homo sapiens
tcaggccagaaatactgctgtggctattttaacggctattcaaaatgtctttgggctgctgtgtgcatcacttttggcggcgtggtggcgaatcctgcaactggcacaagaaagacacaggccacctgtcccagagctctggctgccaatgtggaacaggcgattatgaggtctttcagactgcaggtgaaggaggtcgagtggattatattgtctcagagtcaggaccctcagctgtaggtctgttggagtttgctggaggtccactccagaccctgtttgcctggatgtcaccagtggaggctgcagaacagcaaatattgcagaacagcaaatgttgctgcctgatccttcctctggaagcttcatctcagaggggcacctggctctatgaggtgtcagtcggcccctacttggaggtcccgatcgggagtggcaatgggcacctcgctggatcaggaatgcagcagacaccctgccggatccgaagggatggaagccagcagcgggtctgcggtggcggcggcaaacagcagtggtggatggcgagtgaaagctcagctcgagccgtagccattgccagctcgaatgcctgggtttatatcccgatcattgtccctcctgttgtgctctcaggtgatagatgattggttgtttctttacctcctgtttttgcctaattagcattttagtttctgtacagccaataataatctcttaatggcttcctgatgtttgacaagtgttcccttggaagttaggaattccctttctctccctattgctgcatgggcatggaggactaggaggcttccttggaataattattttttctagtcagaaaaatataataggtttttgacccaagggtagagttctgtattgagcttccatttgcagaactattctgttactgaagagttactgccctagaaaactttccaattctacttatttccctagcttcatattttgttgtgaagggttattattaagttttatctgaaaatatagctattttcttgtaagtaatatgggtttttttcctgattagttttaagattttctccttgctttgctgttgtaaagtttcatcaggaggtatccagttgtgaaattacttctatttattcttttgtttccctttctctttattctttcttctaagattttttcatagacatagatctttttattttatcctttatgtcactgatttgcttgtgttttctacctcttcgtctctgtatgcaatatttcatgtattttttcctgtcccctccttatttctttattcttcatctatgtctaatctaattacctatatttttctttacctgaatctccatttagatcttttcaaatctctttatttttcttagtacctttttttttctttttcagagaataaacactctttcttttaggtctgaaattatttttaaatatttcttttatattctttctttgtagtatcatgttttttccttaaattcttgaga

SEQ ID NO: 471450 - DNA, 583 bp, Homo sapiens
gcttcatggtttaagaatcttggcttctgccagttcagacaccatgcccatgtttgtaccaacggctgcagtgtgggctctcctctcctttgaaaaaaaggaggaagtctgttatgcagactccaccatcctcagccaatctgacaggcatctctggagacaagcaaaatggctgagcttttccgcatttgtctctcacagacatcagatgtgggcagcgcaagaaacgtgttgctttggaagatctcacaatgatccactctgtcaaagacaccaagcaaataggaacccaagatcaagaagtgacacaaatgtgttgatggctttgaaacaacaaacgagctccagagagtgggagaaaaaccttacggatttcatggggcctgttgtattcatgaatttattagtagtagttcaggagtctggtgcatgtaaaaaccttctctctaaataaaggacaagtaacttcatctgattattaagaaagaacaattcttgataagccaatttaagtgatgggacaacatattctacacttgccaatattttttgacccatttatgaggttatagacaaagttacc

SEQ ID NO: 471451 - DNA, 609 bp, Homo sapiens
acatgctaataaaattttgaaagatggattttggaatcttctctcaaactacctgcctgcaagccctgtctcgggctctatttctaggggcacttcttacatggtggtggcaagagaaaatgaggaagaagcaaaagcggaaacccctgataaacccatcagatctcatgagaattattcactattgcgagaatagcatggctgaggagcaaggaagccagtctgagtcccaaaacctcaaaagtacgaaagctgagagtgcagcctttagtccgtggcttaaggcccaagagaccctggcaaaccattgctgctatggaaacaatgatagacaatacccaaatgtgaacaattttcttattagagttcaaaatgggtcaggagacaagagccttgaagataaggagcatagtggctggccatcagaagttgacaatgaccaactgagagcaatcatcgaagctgatcctcttacaactacatgagaagttaccgaagaattcaacactgaccattctatgctcgatcagcatttaaagcagattggaaaggtggaaaagctcatttcatccatgtccctacaaaagacatgaactcatcattttttat

SEQ ID NO: 471452 - DNA, 682 bp, Homo sapiens
tgttcttagcaatgatggtatgtctttatcaatcgtgtgaaaatggactaacacagaaagtagagcataaaagttcagaaaatttgcagcctgacaatgcgatagaagagaaaatcccattttctgaagagaaattcaagtcagctgcagaaatttgcatatataaggagcagccgaatgttaatctccaagacaatgggaaaaatgtctccagagcatgtcagaaatattcatggcagcccttcccttcacaggcccagagacctaagaggaaaagatggtttaatggtccaggcccagggtctctctgttctctgcagcctagggacttggtaccctgcattccagtcactccatacatgggtaaaaaggaccaaagtaaagcttgggctgttgctttagagagtggaagccccaggcctttgcagcttttgtatggtgttgagcctgccagtgcaccaaagtcaaaaactgaggcttgggaacctccgcctagatttcagaggatgtatggaaacacctggatgtccaggcagaagtttgctgcaagggcagggccctcatggaaaacttccacttgggcagtgtgaaagggaaatgtggagtcagagcccccacacagagtccctactggggcactgcctagtggagctgtgagaagagggctgtcatcttccagacc

SEQ ID NO: 471453 - DNA, 787 bp, Homo sapiens
tcactccctcacggaggagcgcaatgcaagcaaatgaaagtgatgccgtgacctgactgccgtggttagaggacttcttatgctcaagcacaaagaacagaccgtaaggagcagctgtgatccagggaaccggataggaagatgttgcctgggccaggagccctttaataccattgtgtgtgtcaagcacatcttcagtgcccagaccattcccaagtctcccttagcctttatttcctgcttgtgcacggtctcaaggtcagccaaaggtgagtggttgtggattccttcaggtctgtcccagcctggccatagccctgcacatgcaaaaagcctgaagaccttccgaaagaaaagcacagcccttcaaagccctctaagtcaagtgaaaaagttggtacaaagagaaggatgtcatcaaccacatcaaagcagccaacagttgagcaagagcaagtccaacaaccaaccactggatttaccaacaccaaggccaggaagcacctttataaaagcaaccccagtggagcagtggggtcaaatctgtaaatggattcaaggaagtcatgttggggaggccatggggacagtgagtgcagaaagcttttctagttgttctgtcaagggaagcagagaaatggggtcccatcatagtggtcctgctgggtgagatagtcaaagcagaccctgggccccgctgcccatgcagagtgtgagggttttactcaggaagccttggagaatcatgtgggacttgattttcacttatgccccaatcagaaagtga

SEQ ID NO: 471454 - DNA, 725 bp, Homo sapiens
ctcgccttgctcccgctttccctttctgcctatgttttctctggatgagactgaggttgccggaggcagtgtgtcctcctcagggcagcgcagcaggaggacgtgatgttggtctttctcactcctgctgctgtgaactctgattgtttggttaaggtggtgtctgccaggcttttccactggagcttctccaagttggatcttacaggactttataatttgaatggatgcattaagaacattcgtgattcatgggaggaagccaaaatatcaacattaacaggagtttggaagaagctgattccagccctcatggatgactttgtggggttcaagattttagtggaggaagtaactgcagatgttgtagaagtagcaggagaactaaaattaaaagtgaagcctggcgatgtgtttgaattgctgcaatctcatgaatattacataaacttagctgagaaagcactggcagggtatgagaggattgacttcaattttgaaagaagttatctggttaaaatattaaagagcattgcatgtatagaaaaatctttcttgaaaggaagagacaatcgataagcaatatctttcaatcaaagcccgccactcaaactgactgcatttatagctcctttttgtagcatctgattgttcaggactcctttcattttgcacatataatggattttctctttctggtggtcattttggatcaatctttggcc

SEQ ID NO: 471455 - DNA, 1052 bp, Homo sapiens
gctaagaaaacgttattagagtcatggaagtaagaagttcagggactgatgagacactagtttcaggagagtgtgaattgaaagtcacatatcaaggtgttcttggtggaagcaaggactgggatgatcttcccacaaaccaagagacacccaagagtgctggcaactaccagaagctgggtgagaggtgtggggcggattctcccttacagcctttggaaggaaccctcccagttgacagcctaagctcagccttctggcctccagatctccgagtcaatcagtttctgttgtttaagcctctcagtatgtggtgctctgctagggcagccccggaaatgagtacatatgtatatattttatgcgaaaaaataaagtacaatgtcttacactgtaccattttcagtgagcatatcaaaatgaaataattcagacatactttaaaaagatgtcttgaaatacaggagacaaagtagagaccaaccaagagacaaacaaaacaaccaataaacgaaaaacaaatacccaataattataatattgatatctaaagccaaaagcattagttatgaataagaatacccatttgtactctttattttaccaacaagcaaaatgcggtaagatttagatgcaaaatgtagaaggaaatggtgattgttaaagtaattgaaagcacttggaaataaataatattctgaatgtactctggatcaagcaggcagttgaaaagatggtcactggagtatttgaattacgacaacgataataacatcggagagacattttcaaaagctgctttcagactgaagtacctgttttattttctttttattatcttactttagagagagaaaatgatcaatataaatgcaccaagattttgtttcaggctttcagaaaaaaaaaaacaaaaacaaaaaacacctaaaacaaataacatggaaaaagagacagggaaaaacccaataaactgaaaaatagtaagacggtagaaatgataaattcaataattggtctttgggaataacttgtgaggaatggaaaagctc

SEQ ID NO: 471456 - DNA, 606 bp, Homo sapiens
accctgacacatgcagcctgctttgtgctgcacagatatctccctgactggctgcggcgttattctgttacacactcagcaaagcggcccctgggacctgccccttctaacatgccacattgtgaaactctccctgcgtcggtaccttggctatcagctttgtagtcacctttcagcagatcaaagatttcttggaaagaatgactgctgtatcagccccaacaggcccatatacagctgcacacacatcacagcgaaacccaaagcattcgtggggatgagcaaggactcgacgcgctgcaatgtgatcaagcccaagctagcctgctggaagatgagagaccccagggagcagaagggaaccgctccagctaaggccgtcctggaccaacctgctccagctgacctgcaaactggcttcagatatgtgagtcagccccgagaaaccaaccctgctggcaccatgatcatggactttcagcctacagaacttagaaaatgaattggtgcaaataaaacacccaatgtatgtgttttgctacggcagccatagtaaaccaataaaattttctgtcagagcattctgtgcctctgaaattatttaag

SEQ ID NO: 471457 - DNA, 595 bp, Homo sapiens
tgagaatttctaggaccagactgagaatgaagagatgttatccatccctggcgcccaaacaccctgaggaagctgtttctcctgtggaaggaacggaggtttgcgctggtaaagcagaagccggggaagctgagagcccgaggagcctcgctggttgggagggggccaggaggaaacagccgagaacacagaccccggatcggcattccaggaaaagaggtcgatacaggagtcatgggttacatgaatggagaagagatgctctgaaatcaggaggcagaggacaagaggggcaggtggacaggcaggagcttgtgggaaagtctgatttgctaggtgcgtcctccaggcgaagaagtcgagaagtccttaccacctgggaagtcaccttggtggtctgcctggtgtgtggcttggggtcactgttggtctgctgggcacagcacaggaaacaagtgaggacaagctgagaccctctggaacccttgcgtctgttcaacattgaattaacacctgtttgttgaagatgtgatagttgtaggtacgtggtcttatttctggttatttgttctgttccattggtctatgtgtctgt

SEQ ID NO: 471458 - DNA, 921 bp, Homo sapiens
gctagcggctgcagatgggcctcagcatggcttcctctcgctgcacctgacagagtcactcctgctcacagcctgccaggaggaggatgacaggctttgtagaccctgctcaacctgccggtcgagatcttcatggcagtgggaagtcaccacgggctatcagagcagaggatcagattagggttcttacaagaaggctgactgggctaaagagggaaagtttgctttgcaacatcatcataaccatcatcatcaatattagaagtagcagcatcaatattacaacagctgccagttatgggccacttatctgtgccaagctctgtgctaagcactttgcatgctttatcttattaaatcatgataataacccagttgacaccccgtttttatatgacgtcacctttaagcagcttgttcctgaagtgcaggcttcaggtctaccctccaactattttcattgtaaaatatccacagatgctcagctgctttgttaataactatcacattttcatcattgtaaagataagctgaatcacaccgatccagttatctttaatgaccactaagtgactcccttattattgttgtttactaattttataccattttaaccaccaccttacaaagtcactattattttttacagaagtacttatttagatatgctcgttattttacttatcatttctttttgcattctatttttttttttttgagttcagtttacttgaggtatgtacttcaatcctggtagaacatatctatttcttctacattatccaatttgctggcatataattgtttatagtagtctcttatgatcttttgtatttctgtggtttaagttgtaatgtctcctctttcatttatacatttatttatttgaatcaattttcttaaatttgttaagacttcttt

SEQ ID NO: 471459 - DNA, 605 bp, Homo sapiens
gatattttttggcttctctacaagcctttatccaacccatttgaaaacttaccttgaatcatggcagattctgtagatagctatagctttgaccttttatctccatctctacaagctgagctttcgcttgccgtccaccattgctgtttgccgccgtcgcagacctgctgctgtcttctgtccctccagatccaacagggtgtccactgtgctgatccagtgaggcaaccattgccactcctgatcgggctaaaggcttgccattgttcctacacagctaagtgcccaggtcagagaacacaagccttgccaccatcttggaagcagcccaccaccatcttggaagcggcccaccaccatcttgggagctctgggagcaaggaccccccagtaacagtaatgcttattaagtgtggctatcttgagattttaggactgacatgtcattacagctgtgagtgctttctcctctgggaagatgctagtggctttcttgtggtccttctcattccgtgacttatgttttgctgactgctcacctgtttctccctcttgctggactataaacttctatcagatggggacactgtcttatgcatctttca

SEQ ID NO: 471460 - DNA, 1129 bp, Homo sapiens
ggagaaaggcatctttatcaagaaagccaaagcctttcagaaaacggtggggtttggctgatctatcgcctctggctgggctgtgtcacatggcagttgctgtctacaaaagagaaaaatctggaaaatgtgaatgctttttgtacacacattaccatttaaaacgcacttgcagctctggtaatcagaagaagaagcccataaggtctcagtttggaccacagagaggtgaactgaagacctctgcaggccttctgaccctgagcccctgtggttcctcaagtccctgcgccaatatcaccatggattggtaccacctttggactcgaggaaggtggagtataacttcccactgttatgggccatacatagtgagttccttccaaaatacggaaggaagtatggaaaaggggaattctccagtacagaaacctgacaggcaccatcttagtcgggtgacaaggacaatatcatccgtgaggataatgagggtattctttgcaaatcataaatcaaatacttcgctagttgattctcatcaccactgtgatagcttcgacatcagtttatttgaaagtatctaacagagtaaattatatagtcgctgttctatttcttcattattgctttcctcttggctacatctagtaatttttaattcatatcactagaaactaggtgcattctacattttgaaaaatgctgaaatgcatatatggctgcatctatgcaacagtctcattcttaatggtgctccagtctggatagaatgaatgtaaggcagtgtcaaaatggtatttgttcccattttgttgcacacagtaaagtttattcattttatctttaatatctaagatatcccttcgtgtttgtcacaaatgcacacatacataaccattcccatccataaatgggctaaagtccatgatcaggaaattgcaagatttctaagttaattacatataatggtatatttatttagtgtattgcagctgtcctcattaggagctattggttcatggtgcaatgtttgttgaacttggccaaaatgagaaattgggattctttctactctcatgtctccaaagctatttgtttttcctttaaaagctcattataatgtttcctt

SEQ ID NO: 471461 - DNA, 742 bp, Homo sapiens
ctaacgtaaatgctgaaggaaacagggagccagtacttgaaggtttggggaccattttactattttcaagctttgccaatttgttttgtgttattaaaaaaacgaaaacacaaaacaaaactgcatggcctagaaacacagaagcacagaccactggactcttctcttggccaaagagccatcattttctttccgatgccccagtttcccagcctgtctcaatcgaaagggccggggagacttccttatccacaacagcctctgggtccccgccatctccccaggaggaagagccttctgcctttgggctcatcattagaggtggctctggaagctgctctctggctggaggctgtttcctgtgggaaacaccttcatagtgttgggcaggttacccagggctttcacctcattacccacggagcaacctgtggaccaggggctctcaagtttcgtgcactgcattcatcagctccaatggcagtcacgtagagcttatttacttttgttttatgcacagttataacaaattttgtctcatccccattatctgaaaaacaacacattaaaaggaaggaggagtcattttcattaacaaacatgcaactatcagcaagaagggagcctgaaaacagaagacgagtcagaaaatgtaaaaagaagcaaccagcattccaaaaccacctgggaaaacaacgtgaatccctcagtggtctcagaaggagtaaagcacatgtgatct

SEQ ID NO: 471462 - DNA, 893 bp, Homo sapiens
ctgcctgtcccgttttggggtgatacggtctgagagggtggcttctcctggtgatgtgtttggtttgtgtcgacccttgagctgagagttcagagctgagaaggacaggatgctctgcagcacagcgcaccacaccagctggcctgggctgagcaaccaacaaaagctgacaaattcacctgccatgtggatgagtgacttccaaagcctttcatgccaaggaggggaggctctgccagcagagcacctggggctgattcctctcccctgagtgcccatcctggaggaggaagcagttctcatttgcactgacttccagcaacttcctccaggcgagcgcctggaggcagtcacctgaagtcatgtgcctgcaggcacagagcaaagccctaactctcttcgattctgtgaagcctgagagaggtgaggacgctgcagaagaaactttggaaaccagcagaggttggttcatgaggtcgatggagaaaagccacctccataacataaaaatgcaagatgaagcagcaagtgctgatggagaagctgcagcaagttctccagaagatctcactaagaacattgacaaagacattgccacagccaccctgaccttcaacaaccactatcctgatcagtcagcagccatcaatattgagcttccacccagtgtgcgagaggcttttcaagagcagaggctgcaggatatcttggaagcagaggttgggagtcactcggtgtcatttctgctacattgtgttggtcaaagctggtcacagggccagcaaagaatcaaggggtagatgaacagactctacattctactgagagaagcttcaaataacgtgtggccatttataacctctcacacttttattctaattcattatgatcac

SEQ ID NO: 471463 - DNA, 1201 bp, Homo sapiens
ctcgccctgttacctctaaaggagaaagcaacgtccgggcctgactctctcgtccttacccagaagactgcgtcttggtctcccctgccaaataaaaactggatgaatgaacatgatggcccaaggagaggtcctgtccagcttcctcaagcaggaccctcctctccccggggcaaactgtctttgcacggtgttacgagtgatgcagcccccactactgaaatgcagctccgtgtgcatagaaattcatttgtgtgatagccacatcaactatgaagcagttcaggaaaatccagaaattaacatgaactgggatccgcaggaccctggagggccatgtgatgaggagggagcttgtcatgagcgtgaccggaggttccatcccctccaccatgttgctcgtgaccctgggaaccagctatccctggcagcagcacctattgaaaatcgtgctacttcaggaacagtgaaatgccgatcaataggagaccccactgatcctccactggctatggatgtcagattcgccagcatccttggagaggctgcaacctgcttccctcgtctacagggcgtcctccgcgacctccttctacgaaagagctggcgggactgcccgcctgtacgtttagctagtatcctctcccgcttctcatctggccatgaccgcactaagtgagactcaaaatgtgtgacttatccacagaaaagccgaggtgcaaggtgtctcacacacagggaagagaattctgatagcaatgccagcgcattccaaatagaggggacatgtgatatttataatttgtgggtgggaaaacaagttccgaatatgaaaaaaaagggagaaaattgttagatgcttagtatctggagcagaaaggaatttaccctgacaaggtattttttgtgaatttgttttctttggtgtgcaatgactaggactacttcttaatggtctcctgatgtttgacaaaatctccaagctgtaattgtaccactgctggttggaaaattttatccctgtcaattttgttcctttggttatattttactaataaaaatggcaatacgcaaaacacattttgttgcctttttttcatcccaagcttgcatctcattatagtttaggactgtttctgccaaagatttgcaacttgctgactgtcccctcatgcttagagtcttaagatttgaaggatac

SEQ ID NO: 471464 - DNA, 1483 bp, Homo sapiens
agccatttgtccaggccactcaactaacatcacagtgattttgtgcgttctcggtggaagcctgcagcctggggagtgggtttgcatgtataacgatggagctgtgcttgcagatacagatgctgagaaggttgaagggaaggagatttccaggcactgtaagatgcaaattgaggccacgatagaattcagggccacagtgatggaagagcatgaaaaatatgaagaagcaaatcatcgagacttgaaagaggctggactccagacactcggatttctggggaagggggttccaatcacagcaaacgtcatcaaatgcaaaggccctgaagaacttggcagacaaattccagaaatagcaaggaagccagaggatgggatggatgaggacgaggtctatgtgggacacgggaggaaggtgggaccatcctggggagtcaccagtcccacggttgcggatggatggttggagctaagacttctgcctgacttcagcccgacttcagcccttcttcctacctgtattcctttcctcttctcctgcagatacattcttaatttatcacaagacctgggaatgccttatacagacctggggcccacacttgaccatgtgagggtggatgcaggcagtcagcctgctgatgagcccgcctgagattcctgtgaactgtatctgcctatccactgtgttctttaacccagtttcataggcagggatccagtagaaaatttcccaagattctgtctataaattgtctggcagtccttgttcttgtggtcattttgagggtctgtaaatgttatttatttctccataggcgtttagtgggaatataaaggggcagctatgtcagcaaattttaacagacgccattttaaatgaaacggtaaataggtgtttccctacctccatgcaaatccgcttttcaaatttccaaaaatccactgctttgtgaaacaggccatgctgtgcagtatttctccatttcttaagaaagcaacctgtaagttttagttttccatggatcgagtaagtctacgtacaacttctgcacttggctttgcgttcgttaaaccaaggactggctctgttccatgtctccctgatgatgagaaatgtgattccaggctgaatggatgtacatgctgcgatcaagcactgctgcttggtggcattaatattgctattatttattatttacatatttaatgaccttattgttattatgcactgttagcgctactaattataacacaataaacataatttataaacacagtttatggtgatatacataatcaaccactagtgacagtacctggaacagctgcagatatttctcgtcatcactgactattctatgggagagagctatctgctcacagaaagattttaaaataaatattttaacaaattagaaatggattgtggctaactcgagtgatagtttctccaaaataaatccaaataatcatttta

SEQ ID NO: 471465 - DNA, 2528 bp, Homo sapiens
ccttgtgggcacacaaaaaatattaggatttccagcaatacggaagccacaatgcgaatggaccacaaccctgccaacaccttgatttcagacctcttctctgcagaacgacgagagaatagacttctgttgttttcagccaccaactttgtggtaattggttacgatagccctaatccatgttccactctgtgccttaggaagctgagcctcctgaaccacatctgcaagcagcttggggtccaccagccagctcagttcagtcaacggggatccccacaggacatggggcagatgcagcacacaggaccctacagaaataggacaggggaagcaaacatgatgcatttaagggtcatctgtgtcatcgtgtgtttcagtagttggttcctatttacaccgaggaatattttcttctacggatgctccacggtttgtttatccattcgccagttgaagaacatttggattggctccagatggagcgattgtgaataattctactctgaacatgtgtgcactggtatttgtaggaacataacttgcttttctctaggataatacctaggaggggattgctgggtcaaaaggtaagtgtacggttaacttcttgagaaactgtcaagctgttttcaggtggccatatcagtaatgttcccaccagcaacgaatgagaatttcaggagttcttgtcctcaccagcactccagcacttggcatttcaggtttctttttgaaatactctcatgagtgtgaagtggaatctcgttgtggttttacttcgctttctctgtttactaatggtgttagacatcatttcatgaatttattttccattcatatgtcttctttggtgaattatccattttttgttatgtatgctttcccttattattaaacttgggaattatttacgtatgctagacacaagttctttatcacatatgtattttgcaaatattcctctcagcctgtgactacagttttcattttgctaatggtgtcttttggagagcagaggttttaaactttttgatatccaacttattaacatttttatgaaacatgctttatatgttgcatctaaaattttttccccaaattaagctggcaaagatttttgcctgttttcttctggaagttttgtagttttccattttgcatttagttctatgattcattttgaggtaaatttgtttctggtgtgtcagagaggtcaaggttttctttatgtagatgtctatttgtcataacatatttattgaaaagactaattacttttctactaaattgctttgcaccttggtcataaatcattttaccatgcacatgtggacctgtttctggattctattttatttcattgatccacatgtttatccttttcataataccatattgtcttgattactgtaggtttacatgaagtcttgaatttaggtatttgaactctcaaaaattgttcttttccaaaattattttggttgttctggttcctttgcttaactgtgtacatttcagaatcgcttctaaaaataatcctgctaggattttcactgggattgcactgagtttgtaagtcagtgtaggaagaattgacacatcaacaacagggggtcttctagttcatggacatgccatctcactttttatctttatctgtgatttctctcattcacgttgtatagtttacagcatgcaggtcatacacatattttgtcatattactcatatcatgttgaatttataacaaaatacgtttttaatgtttcaaggagctattgcaagaaatattgtttcagaaattttaattttcatttgttcattactgagatatagaaatgcatttagtttgtttattgatcttgtagctaatgttcttgctaaatttcacttattagttgtaaaagattttcttaggatccttgggattttctaagtagattactacctgtgaatacagaaagttttatttctgccattccaatctatatacttgtaatttatttttcttccctcattgcattgcctcagactatcagtgtgatgttgaattggagtggtgaaagcagtcgtattagtctgttttaatgctgccaataaagacatacctgagactgggtaatttatatagaaaaaaaggttcgatgaacttacagttccagttccacatggctggggagacctcacaatcatggaggaaggcaaggaggagcaagtcacgtcttacatgggtggcagcaggcaaagagagagcttgtgcagggaaactgccccttatagaaccgtcagatctcatcagacttattccctgtcacaagaatagcactggaaagacctgcccccatgattcaattacctcacactggatccttcccacaacatgtggttatttaagatgagatttgggtgaggacaccaccaaaccatatcatcccatctctggcccctccaaaatttcatgtcctcacatttcaaaaccaatcatgccttcccaacagtcctttaatgtcttaactcatttcagc

SEQ ID NO: 471466 - DNA, 770 bp, Homo sapiens
tctgaggagtagggttgggagtgtatggtcaggtgctcaaaagagaaaggccagctgggttcttcacctggactcacacaacacattgggcagggatgcaaatgccactctaaaaagctcaatccctgctacgtgaaagaagctaagtgctgtaacggggaggggccagtctaccggaacgccacagaaaagtcaagttacaacaaaaatgaaaagattagttggaggctcaggagcagtggggtgacacagggaagacaattcacccaagtcctgggccagttcacagctgcaagatccagggctagcacttctctctgggctcataatgcattgcttctgacaggaaaacttctagatatgactccaagattttgtgatttacttgaccacccatatgatacaaagacattaaatgtaaaaaggcaagttcaaaacaaacaaatggacactgctgacagtagaagaactcagactctcatctcttacacaaaaatgaagggttatcaggagaaaaagttcctagagtcagcatttatgttgaaaaagatttctagatttaagtggatccagtatgttaatcttctgaaaaattttgtctaaaaaacgtctattgccagagaaaatagagagattaaaataaaaaaggaaaagcactgatacttctaacatcttttatgtatccattcatttggttgtcacatagtcagctaagaacactttacaacctaagacatgtaacgctttctgtgattgccaataccattttc

SEQ ID NO: 471467 - DNA, 753 bp, Homo sapiens
gtcattgctgagagaatggaagaggaggtgttgaaagtttgtggagggaggaagacggtctttcttgtgatgaccaagtctttcttgacaattatgcttaattccaacaatgattattctgtgtggcaaaatctactggcacaagggcacgcgagcattgatgcgttctcactcacagggaactatgagaacgaggtaattatatttcaaggagctgcagccgctccattcccaggggtgtcaccaggaccttttacttctgggaatgtgtcttccccaacccatggtcctatccccttgttttctgcatcatttgctggtgcgaggctcaccatccctctgtgtagaaatgagcataggaagggtgtcatgagccctttgtactttctccttgacactctcttaagtgcccttgatgtgtgtgagtgcagaaagacattcttgagaagggcttagcaagggatccctccatctctgttacttggatctattttatagcaattgatacaaaagaaggttttgccttatcatgatgcttttgtcaataaaatctatctaattatcgattggcaaagatttggttaaatcagatgttttgcattatgtagaaagcatatgtacttagtaaaatcctttttcatgaactgaaatatataatgatgcttgaatatactttacttttctgaggtaaactaatgttttctttagtcatttgattttatttggatcttattggtagaatctaactatttg

SEQ ID NO: 471468 - DNA, 569 bp, Homo sapiens
cccgcagacacactgagatcagtccctccttcctaccttcttattcctaatcattctgcaaagacagagtatgagaaattttcctgagggcactagagttaatgggttccatgaggagcctgcatctaccataactttccggaatgcaacgtgccaaccgcatcttcagagttctaaagcttggatggcccgtgaagatttaggattcccaggcatcagtaaaagaaatgagcattcttgcccagcccaggggattttggtgactgcatttgatgtgcctgacgctggtgcacagcctgttgacgctgtgctggacagggctactccccatgtcaggccttgcccctccaagaaacagtttgatattctgtctgcatcatcttggccaaatgattgttccacagctgcaaagtgcactaatgagaagagttggcagagtgtcggagttccccatgttccaagggcctgggaagcacactgattttgcaaggcaggattaaaggcaaagaaacaaggaatgaagcatgctttgttttgcactatgccaaaccctaccttttgtagtctgc

SEQ ID NO: 471469 - DNA, 731 bp, Homo sapiens
catcgtcaggaacgaagcgcagccattcagtcaaagcggccggctggagaggcaacaagcaggtgcagctgtagccgtaacaaagaccctcaagctttgaatgatttgctgggctatagaaatgtatatcacaataggcttagactgggtaatttataaaggaaagaggtttaattggctcacagtttctcaaggctggggaggccttaggacacttacaattgtggtggaaggtgaaggagaagccagtaccttcttcacaaggcagcaggaaagagaggggcaggggaaatggccccttataaaactaacagatctccactttgttcacggtcccacaaatgcagtcctgtatcacggcacacacactcaccaacaggttctcccttgttcctgtatgtcagtgcacacagccggagcctgctgtggttctgactttgatcctgagctgagcacacacaggagacatgatgaaaattcccaaggtgcaattgaatcctgtggatttcctatgaatgaaatgctgtagccagtggactctgttagacctaattataaactggactggttacttctcctacagtacttctgtcttcacactgagagttgctgccattttttggacccaaatataactgtcaggccacattgagattgtaggtgagattggagaatttgtgtttagaatgacccctattaaaatgttagatttcttccaatagtcaacagcc

SEQ ID NO: 471470 - DNA, 615 bp, Homo sapiens
ggagaaactgccacaaaaatggaggacagggatgataagtatactttgagagctgtggcagagaaacagacaatgtggttcctggatggttggtgctcccatcacacgcagcccgcccctgggggtgaacttgctggggggtcactcttgatggtggagggtatgacggcccgtgacccgctgggccgtgctgcctctgggcagaattcaaggttgcttcttttactgtttctttttctatttgaagaacttcttttggcctacctaccaaagctaaaaagcaaaagaggcagggaacagactgtttccaattcactttactgcatgagaacaaagtttaagaatgtttatacagttgcaaaaatatccagcacccaacatagtaaaattcaaatatattgtatccatcaaaaaggctggccatgcaacagtaggataatatatccaatattaagatgaaatttgcttaatcaaaactagctcagaaatgacacaaatagaacattagttgataaggacatcgaaacagttagtaaaactatattctatatatttaagaagctggaaatagactgagcagattaagtggtgacattgagaatataataaaatccc

SEQ ID NO: 471471 - DNA, 461 bp, Homo sapiens
gggaggcagcaacagacccagatggcttgtgtcgatttagtcacaactgagttaggagacagccctggccagcccagaaagtgcctggcatcctggtggcccttgcagagccccaagaagagagagcagggatctgatgtgctgttagcccaagcacctgacccaggatggttgggtaaacccccccttcctggtgggagcagcatcatcctgttggagaagcaaaatactaagcaaaacaaggagttcaaccctggaagccctccactgatggctgagggggtggaaaagtggcccaatctcagaatgtgtgtcacctgggccagtgagcattttctgagagctcttcttccccacacgagcagtgctgcagaaccctgctgtaatgaactcattgctattgttacactaaacaccaacagtacgggttattttaatggacatattgctttaaactgagc

SEQ ID NO: 471472 - DNA, 809 bp, Homo sapiens
ttcttatatctgatttttttcctctctatggaatgttgatgctccaagtagggaggaattgtgactctgcctctcgtgcaggcctgaatctggagcatggtcctcctgtaggactgcactcaatttggactgttccagaaagcctgtctataggtgcctccatgctgcattcctgtgggagaagccccagctatatcttcacgagagtaccagaggggaacaaggacaccttctccaagctctgcccgctgctgctgctgctgctacttttatattttgcacagctctctaaatccatttcacctccagccctctaccctggcatcagccagacagtgggcattcttttctgcctgctcttgggagctattcccactcactgcagctttgcctgctgtgggcaaggtctgttagtttacggttacagctcaaactgttcccatgagagcctggcctattctgatttcccctcttatggaatatgggaagctctacaaattcaggagaagaggggctcctctgatggaagacattgtcttgtaagaacccttattagtttaggcttaaagcatgagatgttctcagtagaaatattctgaagccaaaataaataaaaaagaaaaagtggaaaagagtcaaacaggcaattatttgtaatagaagaaaactattgattttcctttttgatacatagtctaaattatccctccagaaaagtagtaatgcatctttaaacagatttattggttctaggaggggaaaatgtattatttaacttcaatgctattggatttttcttttatgttaga

SEQ ID NO: 471473 - DNA, 2278 bp, Homo sapiens
gtggccgtggaatgcccccccgacatggcctcccatgaagacacctcagccccacgttccctctgcaccacctggacggggacccactgcggcaagaccacacaggcagtcccctcacggccagctgctcctccacctgctcacctcctccaccccagccaccgcctgaagccagcagaaaggtctgagcagcttctccctccaatcctccagaaggagcccaccctgccaacaccatgatctgggacatctgacccccagagctgtcagacaatgaattcctgtgctacgacgccaggtgtgtggcgctttgtgaacagagccctcacctgtagaactcagcgtagcacagggaggtggtcctggaccatgctggtgggcctgatgcaattgcatgtgtcatcacaagaaggaggcagaaggggctttgcccgcaggagacagagccaagcaatggaagcagagagaagccgactcacagagaggctgtgctgctggcttggacaacgggggcagtgaccgtgacccacagaacacaaggaatgcagctcttggtgttggaaaggaaaggaatcgaattccttcctggaccacccagagggaatccggtcctgtcagccctcgatttcgactcactgatgctgagttcagactagtggcttctagaaataggagagaatacatttcaattgttttcaaccttcaagtttgtgatcatttgttacaacagccacaagaaactaatgcggccaccatagactgggtgtttttccacgtatttggaaccaaactaagcatttcatagatgttattacatgtagcccttgggagtaaattatattatcctcattttacagaagagtaaactgaggacaggtgaaaaaatattccccgcccaaggtcatgccagcaagtgtggagcttggatttggactcagagctatctaaggaggacctccaagctctcagccttcctcactgtgacaaatcccctctgtgtagctcccaatgcactcttcacatcctcctctgcttcctctccacctgcctccagatgctgcctccagctcgtgtcacctgctgttccccagctcaaaagctcccagaagctcctcagttgccacagacccctcagcctggcttccatggcacctaacagcctgagccaccctaaccttccaaccttgtctcccacagtttccttggggaggtctctgtttccagcgtgttgtctcacttccactcccctcccagtcttcaagccttcagaggtgcactcccttactaggacatcttcttacttcccttccacttcttaagacaaatctgattctaagtttttccaattatttgagtgcgtacaaatatctccttcctctgaatccccattctactcaacacttggtttagtatacaatgattctttattgattttgtatgtgttagttttctcttccctagctgtactgtaaatttcttcaggatgctaaagaacactaaaaaagtccctatcctcataaagcttatagttcagctgcagagacaaaacttcttaacctcagaacaatcaacatcaaaggatttgatttaatgaggaagcagcaagcttccacatgccatattgagaacacaggacaggatgtcaaaaaaatttggttccagccctggttttgtgccctcagggaagcccctccagctcgccagctctcttcctctttatctataaaatcagacacttgagctacataccccctaatgtctctccactctagcgtcctatgagccagagccggcattggaatgtgctcctgatcccaagacacctttccccctcgcccaagaattccgccagcgactgagtcacatttcctatgagggccatgctgtagctattcatcatcctaaaagcctgggtcctgtgtgattcacatccagcgaaggccaccttgccactgaagtcttcattggcattgaaaccttgaaagctgcccctgacttctgctaccttggcaggacagagtcaaacagtgccctcttatccaaggagctggaaaatgggaaacaaagccagtggacatgaggccagactcagagtctggcacaggcataagaggaagttcaaagccaagagaaaagcccatgacactgtggctctcccaccaaccatccactcatgaactctagatgtcacagttcgcttctggaaaactgtatgtgcagaagcttaataccaaatgaaggtcatgaatcatgcgttcctggaatggtccttcaactc

SEQ ID NO: 471474 - DNA, 4571 bp, Homo sapiens
aaatccaacttatatcacctgtcttcatcaccatcatcacacaacatttgctaattgccaagatgttcagaaagagtcaatgcaatacagcagcacactgttataaacagaccgaaaagacagtcatgacctggtacctgaaaaaggccttgccaaaaagggaatatgagagtgacaggcaaaccgaaccaagggagttttctttcttacaaacagcaaaactccaaaaagatgctcatcaaataattgtgaggcttgaaaacattcagaagtcattgtcttctgcgatgtgtagaataattaaatgcaacatcagcatgacatcagtggtagataattttcagccctgccaaaaaagcgattgcgtgtgcagcaccagtaacaaagtgaaaatgaattatgcatcagaaggaactgcatttgagtcagaaaacttagacttcagcatcttcaaattacaatatgatttaagaaggaatacatttaaggagatagcaatggactgaggtgaagggggcatcatatgtcccagggtaagtgtatcaatggagggttagcatttaaaacttttatagtaatttgtcggactgcattgtgtctgttttcatgtaataataaaagacacattcgggcttgtattttttaatacctgctttaatttcattttcataaatgtaatatctattttaagctcatggtattttcatatatttatttttttgtaaaagtattcatacacaatagattggtgggagaaatatgtttaaaacatatttatatatttataatacataatttatatataatatatatatttttaaaatatagtttaaaaagtgtaaccaatccggctagtcagagtagaacttattggaccagaaatcacagcctcagacaatgactgcttgataagaatgtttttaatgatctagcaactaaaatttggaggagtacgggttaatatttggagaaacaagttttctgctatccatgggactgaatcatcgtttctcactagggcctggttatttcttccaaccttggaacactggttgctctagaccaacctcagtgaacatgtattttgattgaactcatcagtaaactcagtctacacaaagatttgacttgtttttttttccatagttgttttaattcattgccaagctgttttgaaataatattgtttggaggtatttctggttaaaagattaaatccattcagtttgacaattcactacaatcaaatatctattgtctctttttcttttttattctgaaatggttattatgaagctgaacgagccggtgatgctaccactgcagttattttttcatttatatggctctaatatctgtaaacctttaatattgtcagtcataaaattatgaatctgccattagcaacttacaaaggacagagtaactcactcataaaggagaaactacattttctcttgtttctttgtatacattttctgataattgtaataataaaattggaaatataaaagaattttatggcagtttaattgggtttgcggttttaaaactatgggtttgatataactaaatgatagcagaggataagtaatgattttttaggagaacacaatttttgtaggataatttccttctttttctcctttatatggtgagaaggaagaaaagaatttgagaaattaaaggcttaggaaaggaggaggagagcttctctgtgggaaaggttgacatcgatgtagcctcagaaatgttattcttaatgcagtgggaaatctttgcatctttgtattcctcttaaagagatttggataagagcttcagtttaaactgtttcaggaaagtgatacagagacttgattgtttaacatctcatgtccacctgtgtataaaaacagagtgtatttaacatattttaccaagatctcaaaagatgtcagattctgtcaaatgtggcatattttctcgagacctcaaagagactttggatttatcaatttagtgaggaatgtgtaatttgcaccacatgtgcaaatcatcaggtggctaccacaaaaaacaaaaaagaaaaagaaaaagaagccaacattaaacaatgttgccaaattttgataagcaacattatcactcatcaggatgacttaaaaagaaacaaatttcttatttagaatttggagatgtttcacaaaaagaagtcagaaaaatttttttaggagaaatacagaaaaattgaaatttgataataaagaatatatattttaagatgagaaatatagtaaaacagtaccacttacacaacctaaatgcatagttattttaaagattttataatgaatattataaaaatatatcataatcatatatataaagtaatcaatatgaaattcaagatggcattttacaccaagtaaagagagtcatatgtagtgaattaaaaagaaaataaatgaaaagaatattttttttaaaaaaagggtttattaatcactaattggggtagccttgaatttggggataaatttagtcattgacctttagaagcatgactgagtgaagtgttacagagaagatgagaattgggagttatcacacacccttggtgaagtactttcagttgccataattttgcaaaattaaatctctttgtaatatcaaaaacttggaagtatccattaggagaagaatttataattttcacatgttgacaaatgaataaaagcattctatctgtgtagatacagatttatattgaagatttttaatgtagagtgaaaaaagaaagttgcaggatggttaaatacagaatgagactaaagcaaatagcgcatcattcatggcttataaatacatttggatggtagctcctccagacaagggattgagagtgtgttgagaaaaaatgtctatacaataataaatcacaaataggattctatttaaagctataccactactgttgaaaacttatgtttgagctttgtttttttgtttgtttgggttttattttcagctttattgaaactcggcttccatcagcagcatcagatgttgttttagagttgcaggaatatctatcacaatgacaatttagagattagctttatttgtgaaaaataccaatttctattaaagcccattatacactgtcatcattgatttgcctaaaactttattaaaaacattcagggatgaaagactctattctctgatcacaattccagaattccttacacaaatccacccagctgtcacccaagagctccccagacttatgtcctcttaactaattttctgaaaatgaagtcctaaggtagcctaagctagtctaagttccctctcataagtattcattactgttttcataggttgaaagagggaaaatttgtggaaacatgagaagcaaagaagatcaaagaagagcaggaagaggcagagagcaaaaaaggtttttttaaaggtatactgtggacttccttctattaaaagattcttgtcacagccctccaaaagtagctgcagggaaatatgagaggcttatagatgagttcgctctgagccctatgtctggcacattctttactgagaggtttggataaactatttgccaaaacagtgtttagctatttgccaagcttaataaatttagcagcaatgtttactggaacagggcatgacccatgcaaaatacatctggtgaaaatctagtaactgtgatttgagcggttccataagtctctagaagcatatcctcaagggtcagctttcatcatatttgtttggggaaaattctttctttgtagttcactctctaaaacaataataattctcataataatcatgattattatagtaacagtattaataataacaattataataaatataaggaaatgaggaaataaataaggaaaaacagcttaaaatagtgtatacttaaatctttgtacaagatagtttacttaacattggaatgagaagtcactatttagaaaagtaaaaatctaagcaaggacacaaaatagtagagaaaaacaaaactaatagcatgaaataaaacaaaaacagaaaatatattttatttatttttcaataaatttcccaagattgattttcttatcattagcatctgaaggaaactcagaaagatgagatttaacaaataagaaaaattcttcctaataattgagaattgtgtgtatatgtatagaaatcattatttaaccttgcatatgtcaggacagtcataagctttccaagtctgattactacttactaatgggtaatgacctggctctgattattcactagaaagcctcctgttacatcttcagataactctgatctctaggaatgtactactgtatgaaggacaagaattatgaggtgagaatgttaccgtgtgtacaagttggagttttctgaatgttcggtagaggttcacatgacgttagaaaataggaggacatttttggaagatgtgcaaacttctggcaagggagacaagttgcagactgggatcaggcagacaaatagatttcaatgtgaatctttaacttaatagagacttttcc

SEQ ID NO: 471475 - DNA, 733 bp, Homo sapiens
caaagattgggaggaaatggaaagatctagagaatggtagcaattgcatgtatcttacaccgtaacagcactgtgatgagaattagatcgggtaatagtgagggtaggactgtcatgaaaagcacaagaaacacttcatctaagtgcatgcatgttgacctccagctagaagagcctctgccatccaaaaaagtggacagcggggaggagatgacctcttctccaaatcggttttgggtcaccagtgctgcttccttcaggaattattccaaagtgggatctggtggaattggaaaaaactgctttaaagttcacatggaaccaaaaaggagcctgcatcgccaagtctatcctaagctaaactgtgatcttgccactgcactccaacctaggcagcaaagggagatcctgtgtcaagaagaaggagaagaaggagaaggaggagaagaagaagaagaagaagaagaaggagaagaaggagaaggagaaggaaaagaagaagaggaagagggagaggaagaagatgaagaaaaggagaagatgaagaagagagatctaactgatgaagacctaagaccgactttccctggattccctaggaagcagtgacattcttgctataaccacttgcgtaaatatttagaatgaccatgcatttggaatgaccatatgggttttctgcctggtgactgtgttgatggcaccaagttaaccatggcctaaaactctgttt

SEQ ID NO: 471476 - DNA, 1541 bp, Homo sapiens
gaattccctttcctagccaagggaagccgtgacagacagcacctggaaaatcaggtcactcccaccctaatactgcccttttccaacaatcttagcaaacggcacatcaggagattatatcccacgcctggctcggagggtcccacacccacggagccttgctcactgctagcacagcagtctgagatcaaactacaaggtggcagcgaggctgggggaggggcacctgccattgctgaggcttgagtacctaaacaaagcagccgggaagcccaaaccgcagctcaaggagaactgcctgcctctgtagactccaccaatgggggcagggcacagctgaacaaaaggcagcagaaagttctgcagacttaaatgtccatgtctgacagctttgaagagagtagtggttctcccagcacggagttagagatctgagaatggacagactgcctcctcaagtgggtccctgacccctgagtagcctaactgggaggcacctcccagtaggggccgactgacacctcatacggccaggtgcccctctgagacgaagcttccagaggaacaatcaggcagcaacatttgctgttctgcaatatttacggttctgcagcctccactggtgatacccaggcaaacagcgtctggagtggacctccagcaaactccaacagacctgcagctgagggtcctgactgttagaaggaaaactaacaaacagaaaggacatccacaccaaaccccatctgtacgtcactatcatcaaagaccaaagatagataaaaccacaaagatgggaagaaaccagagcagaaaagctgaaaattctaaaaatcagagtgcctcttctcctccaaaggaacgcagctcctcgccagcaacagaacaaagctggacggagaatgactttgacgagtggagagaagaaggcttcagaagatcggtaataacaaacttctccgagctaaaggaggatgttcgaaaccatcgcgaagaagctaaaaaccttgaagaaagattagatgaatggctaactagaataaaccgcatagagaagcccttaaatgaccttatggagctgaaaaccatggcacaagaactacgggacacatgcacaagcttcagtagccgattcaatcaactgaaagaaagggtatcagtgattgaagatcaaatgaatgaaatgaagcaagaagagaagtttagagaagaaagaataaaaagaaatgaacaaagcctccaagaaatatggggctatgtgaaaagaccaaatctatgtctgattggtgtacctgaaagtgacggggagaatggaaccaagttggaaaacactctgcaggatattatccaggagaacttccccaacctaattcaaccaagttgaaatgaaggaaaaaatgttaagggcagccagagagaaaggttgggttacccacaaagggaagcccatcagactaacagcggatctctcggcagaaactctacaagccagaagagagtgggggacaatagtcaacattcttaaagaaaataattttcaa

SEQ ID NO: 471477 - DNA, 560 bp, Homo sapiens
cagccaaatggaagagatgcacagggcaaggtatgggggaagcgccatggggcttccatgccctctccagtgtgagctacacatagtgacttccttccaaacaatacagaatggaaaagtggaaaaacccagtaactttacagtggagaaacctgacaaattccacctccgccaggtgatcaaggttaacatcaacagtgataaattgtgtcgttatgacatccagttgtcctggcaccctttgttgaaaagacaagacaatttccctattgacttgtcttggcacttgatatttatattcaatgcgactgccagaggatgcaaaagaaagccaaaagccaaaggaaatttaggattcattaataaccattcccagggtgtcagtgcttcttttctgggacagacatgtccattgggcacctccaccacccctgagcattgccactaggggcagctctgccagttctcttttttttttaagctgtacctgggtgtaaaagttagttatgctttaatagctgtactcacaaagctagtaccggaattgtacaggtcttttc

SEQ ID NO: 471478 - DNA, 781 bp, Homo sapiens
gaaccccttcaagatgtagtgcctaggagcctgccaggctggagggcctggaggaagagcctttcattttccttgtaggagcagtgagatgaggctgggccctgagaatccttcactctctccctctcctggagggcaaaagacaggcctgattacctgtcccctccagcactgtttggctcagatgtatgctagcggagcggggaattgtctttttgcggggctggctcccacctggggctcgctgaagacaagcaccctgaggacctgtcccctgggagctgcttctccgggaaaggggccacagtatgctcaatatgacaacaattatgtaaaagttgaatacaaaacagaaatatgtgaattccgcacagatatatccactattggaaatgcatatgagctatctatgggccccctggcaaccaccgttctgttttctgcctctaggaatgtgactgctctaggtatctcatccatcctaatggatgtgaggtggtaccttattgtggcttcgatttgcatttccctagcaattaatgatgactgcttgaccttgaagcagtttctggaaatgcccctgaacagctgttgatgaatccacatggtttaaagagacttgctaaaggtgggtgggtggtctggctgtctttactttattgggttccttgtttacagagtgagcccatagttttttctcaatgcccactcgtccccatctctagtcagctctagtagctgctttctgatccagagaggagacatttgtaagatgcagccc

SEQ ID NO: 471479 - DNA, 889 bp, Homo sapiens
cttgggcctggcaggcaggcaagctgatgatcactgagctgccaagtcgccatccgtagaaccagcatggaagagacctacctcatcagcagaaagaacctcttacttggcccatggtttggagtaataatcaaaatccgtgcttgggatccaagaactgggctgagccctgggctggagccgacctaccatgagggagatgacaatacagtgaccaatgtcccagtttacacaggactgaggggtttcccgggacgtgggcctttcggtcctcaaaccagaacatttctggaaatggctggccacatgacagcagcaagtcggggccagggtgaatacccttgggcctcgggcctagcccaagtggacaacccctgctcaaccacccaaaccactcataagctacctgctaccccaacatcacagtcattatttgattgtgttgttattggcggcacagatgtctcctctctgaatttctcaccactggttaagatggagttgaacatcccaacaagttctctttctacaagaccatgttgccccatcacaatacctgaaaatctgcaaccatttgaaatatgccaagagtactccacagactccactttgcagtcaccagccaaaatgccaagcatagctagaggagataaagggatgtcaatcaatcttgttgaagatgtaaaaccaggaaagggactggaggcacttcatgacacccattttgggtcagaagaagaagtgagagagaaactgggaaatggaaataaaggaaagggagagtttgaaagagcttattattagaaaccagacgggtgaactctggggtcagtttccttcccagtagcttttcttgagcccttcccagtgacaaggtgtggtttttggc

SEQ ID NO: 471480 - DNA, 1088 bp, Homo sapiens
tggcacaggaattgttaccagataatatcttagaaataggaaaattacaagctaatttcagtccatctcaaattaatgagaatgttctttgtggagtgctaccagtgtaaacctttagaaaatgacaagtctgagatatttaaatcctctgtggagcttagcacagctctgccagcacacccaattgctattatctggccaattgctgggaccacggccctgatctatacagtggttgatgagacagatgttaaaactgatgccttcagaacagtggtgtggggaagtgttttcaatggaatgttaaatgatgataatagaaggtttgagacatttgaggtaaacagctttgagcagttctgtatcaactatgcaaatgaaaagctccagcagcagttcaactcgcatgttttcaaactggagcaagaagaatacatgaaggaacagatcccttggaccctgattgatttttatgataaccaaccttgtatcgacctcattgaagccaagctgggtatcttggacctgttggatgaagaatgtggtcctgcaggctgtgactctgctcctgtgaccttggctttcaccctcatcctccctagcacttccagtgtctgccaaccagcaggctcagctgctcccacaggtcccaagggagccagcccacatgggatgagggcacgccgtggccggatcctgaacatcgctctgccctatcttgtggttctgcaggtccccaaaggaactgaccagaactgggctcagaagctctatgaccggcactccagcagccagcacttccagaagccccgcatgtccaacacggccttcatcatcgtccactttgcagacaaggtggagtacctctctgatggttttctggagaaaaacagagacacggtgtatgaagagcagatcaatatcctgaaggccagcaagggattccagaatctaaaaaggagtggtgcccggaaaactctgttatattcactctccagcaggttatcttttattaatagctgagctgcttttcccttatttttatttatcagctttattgaatatttgtgtagtatatagtggtaacc

SEQ ID NO: 471481 - DNA, 572 bp, Homo sapiens
aaatgcaattgaagaaagaaaccattgaggagaaaaaagataggatgagagagaaaactaaattactaaaagagaagaatgaaaaagagaggcaggattttgtggctgaaaagctagaccagcaattcagggaacgctgtgaggagctccgtgttgaattgttatctatccatcagaagaaggtgtgtgaggagcggaaagcacagattgcatttaatgaggagctgagcaggcaaaagctggtggaagagcagatgttctccaaactctgggaggaagaccgattagccaaggaaaagcgagaagcccaagaggcgaggagacagaaagagctgatggagaacacacgcctggggctgaatgcccagatcaccagcatcaaggcacaaaggcaggcgacacagctgctgaaggaagaggaggcacgccttgtgaacctaatcctgattcctggtgtctgatcccctggacttctgatccatttcctgaactcaggtccactgtgacccttagctttcagaatctgctccattctgtgcttgcctcatgaacttttttatctagcttctctc

SEQ ID NO: 471482 - DNA, 591 bp, Homo sapiens
gcaaacagcagtggtggacagtgagcgaaagctcagcttgagccaagccataacaaacatgcaccagaagagagcgcagttgcaagatttaatagagcgaaaacagagctcccatacaaagggaggggacccaaagagggtagccattgccagcttgaaggcctgggtttatatcccgatcattgtccccctcactgtttcaggctactgtccctggatgaatgatgttgccactcactgggatagaggagactgtgcatggttctggttggggcagagatgtgggttgtttgtgttgcggggggtatcgaaggtcctctatctgcttttaaacaagctgaacttgaagtgcctttgggatatccaaaagaagatttcaagaaggccgtttgatatacagatctggatcccagctttgcaggccatatggtctctgtcccaattatccaactctgctgttgtagcaaaagtagtaatagaaaatatgtaaacgagtaggtgtggctgtgctccaataaaactttatttacaaaaacagggggtgggcctgtgggttgtagtttgccaacgcttgttctattgtaaaagact

SEQ ID NO: 471483 - DNA, 593 bp, Homo sapiens
cagcaaacagcagtggtggacagtgaacaaaagctcagctagagccgagccatagcaaacatgcaccagaagagagcgcagttgcaagatttaatagagcgaaaacagagctcccatacaaagggaggggacccaaagagggtagccattgccggcttgaaggcctgggtttatatcccgatcattgtccccctcactgtttcaggctactgtccctggatgaatgatgttgccactcactgggatagaggagactgtgcatggttctggttggggcagagatgtgggttgtttgtgttgcggggggtatcgaagatcctctatctgcttttaaacaagctgaacttgaagtgcctttgggatatccaaaagaagatttcaagaaggccgtttgatatacagatctggatcccagctttgcaggccatatggtctctgtcccaattatccaactctgctgttgtagcaaaagtagtaatagaaaatatgtaaacgagtaggtgtggctgtgctccaataaaactttatttacaaaaacagggggtgggcctgtgggttgtagtttgccaacgcttgttctattgtaaaagact

SEQ ID NO: 471484 - DNA, 627 bp, Homo sapiens
acagtctgtacactctcgtgtttggtgcgtctttctcagcataatgcttttgagactcatccaaactgttggcttgccacgtgacttcctccagctcagccacgggacccacccaccgtcaagtccctctcatgctttgaagctctcagacttccccttctatgacccatggaagaaaacggtctgctttcaaaaggctcacgtgattagggaaggcttcctgaggagatggcctttaaacctggccttgaagactggggagatggcctttaaacctggccttgaagactggggagaattccaacaggatgagctggatgtggaaaggggcttccaggaaagacacagccaagtgtggaagcccgaggagcatttcaggaagggcaagcagccagtgtgtagagctgagaatggaggatcagcagcaggaaagggttggggctggaccgggatgaagggtaaggactaggcagaggagcgtcggcttcagtaacaatgcaaggtcagcttgacttatcttgacattagaatattcttgtcacttcccaagagggagaggctgtattccaagttaatagtccattttaacacctaacacgaaagagagagagagaaacacaagcactt

SEQ ID NO: 471485 - DNA, 1008 bp, Homo sapiens
atcatccagaagactatttgaaatacggctttacatccataatcattctggaccatcatgaccaaatttatcctgtctatctgcagacctggtgtcattggccacgttcctgatggacagagacatgttttggaggagtgtgcagtgtccttcagattgggccaagtcatatccatgcacatccaggccactcgcttctgcagaaaggcctgctgtgataccaggtttctggacctgcccgtgttggcactggaattccagcctccagcatgcatcctgcagggaaaagggagcaagctctatgcagctccacaaagttccagcgtagcctatctgtgcctggtgctactggttggggctggcatgggggagcctctgagctccctcctttttcagcacggctcatgcacccatttgcctttgatgtggacagtgggtctgaatggctccagtgggtgccccaaatgcagtggctgcacagacggtccagtgggcagctgctgccttgtagatgggctcaagaagttgctgattccaacagcacctgatgaccacaagtcatctgagggaagctgtggccaagaatggataacaaccacattttattcggacaccaaagcaagttgcaatctgaattgcaaccacaccttgcaatggcgccaacacatgcaacagaaacagaatttgcacttgcctatgaagcccctgaaaaatctaagcccacacccaggcactgatttaaatgaaaaagcagtatccaaaagcccaaggaaaatggtccattgcgaagctggacaatttcctctcctgacacatcttcacagcttcgtagactgtgagagaatgctgtgttcttaaagtgcttacctgcctcaaactaaagcaatacctccaggagctatgtgatacatgtaataaacatcttcttgtgcacctttaaaaggctcccaggtgactctaaggttcaggtgagattaagcagcaccgtctcaaggctgtgtttgccct

SEQ ID NO: 471486 - DNA, 1208 bp, Homo sapiens
tttttttttttttctttgagataaggtggaaaaaaatggtgagagtgtgtctccactccttctcaagaggcttggggcccaccaggtttcctcccatcccccctgtatcagcaaggatgctttcagctgctaagcccctcaacaggttccataggccagaattaggtcatatactcactcctcagctgcaagcggagctggaaaagtgggtgaatggcactgtcacctctgcagagggcaatgggctcttcagcaaggaagacagcagtctgactggtggccccaatacttgttgcactcttctcgttgtctctttgaaaagctgtcttcctgctgtgcctgtatccaagcagctctattccccttcaatagagtgtgaatcctatcttcagagaggtggaactctaagacagccttctctggctgacttcaataggggcctgatgggaggtgattgggtcatgggggctgatccctcatgaatggcttagtgctgtcctcgcgatatatataactcatgggaagtttcctggacgaagcaggccttgagctgcaaggggctaatctaatatgtaaaggactgctagaaatcaccaggagacagacctacaaaccaatagaaaaatgaaccaaggacaggaacagccagttcatagaaaaataaattaaaaggaccttaacacacgaaaagatgctgaactttgcttataataataagcaaatgcataaaatattatacactatagtattaatataaaatcacacaaatttgtattgtaatagttatatattatgtatatgtcaatatataattaataattataaatgcacaattctattattaatatataaagtaattattacataacataattatatattagttatataattaatatataacatataataattataactaatatataattatattatatattataattaatttataatatataatatataacataataattacattatatattaatacttatatattaatgtactaattatatattatatattaattatatagcatataattaatatataaatatataatataatcatattatatatcaataattatattatatagtaatatattatactatataattaaatactatataattatattatatttaattatatatgtaaaataccaaaaggaataataaaagaagtgtccattaatg

SEQ ID NO: 471487 - DNA, 1763 bp, Homo sapiens
cagctcgattcaagatttgtctttacctaaggtgtagctgcgagaagatgagagctatacccagcaaggaagcaggacctcagtcctgcaaccgcatgaaactgaatcctgtcaacaacctgcatgagcctgaaggcagcttctcccccagagcctctagcaggaacacagccggcaacaccttgactttaacacaacgagccctgacctctgacctgcagaactgcttaaagcccatatcacagaacaatgatggttctcctggactgctgtctcccctccacacagtgattcaggaacccgggttccttcaatcttgtccctttgccatcttatatacactcccatttttccctgggggtcttttccattccagccaagtggaaggggagaaagcctggcagctcctgggctgcctgaagcccagccacacatttcagaccctcatcttgtcctgaggtgcttgaaacggaggagagtagatattctgcatgtctgatttatgattatttatcatgaaagattactgactataatagccctaaacaagcctctattttctgggtcataattatggctgaactattgctacaaatctcaatagatttaaagaaagtagaagaggaaaaggaaaactattaacccaagtgactatgggaatacaaagcatcgggctagttcattaccttttgtcttaaagataagagaggaggttaaagaatattaacaaactgatgaacataaaatggcaaacaagaaagaacattagccagggggaacacatgtccctttaaaattatacctatatatattctgaattattaaatttaaattatcactactttatctgctattttattgctgaaatttctcacaacttcatttgcgaataaactctcctgtgatggtctgccatttacataagcatatttattggtatctcctacggagtataatcttaaccacaaggctatgaatacagtaaaactttacattttttatcttcttggcccatcgatcaggctagtaaccattttaacatgactcaccttattcacctttacttcagtagctttagacatttaaataaattaaatgttagtaaaaatatttggagaacatttgtatttaattgtaatgatgttaaagtatttaaactactacagtgcatgcagagatggatcagtgaaaatgctttgtccattactggaaatctaatacatggcaacgcaaaataattttgatggtctcaagcactaaattactaagtgggtatattatagtgaagatatatgtaacaagggcattctataccagttcagcccactcagcaaaattgctccaagaagttgcaatatttgtgtcttattaaaagactgacttcatatttttatgggaaattgataaacattctttcttggtgccctcttaagatccatatgaattgtataatgttttaaagtgggtgggagaccatggttccctgtttgctgttgtttcttgtggacatacatctatgtctttgcactgaaggattagttaattatttcagtctttgctgtgtggcttgttttggtcttcttagagtgtgtttgcttagaggttctttgcgctcttctcctcctcctctctggaagttgttcttgcttctgtcctcctccaccttcctggcctgctgcttctggaccactaagcactctatgtctttactacaccttgacattagggcctttatgtatgtttgatgggatagcagttatgcc

SEQ ID NO: 471488 - DNA, 997 bp, Homo sapiens
accatctttgaatgtcaggacggtggttctcaactgatacgtgtggctgggtattaggaagggctgctttgagcgggattaggggcggcgtgggaacctagagtggaagagattaagctgaaggaagattttgtgaaggggacggacttaccctccactgtgagagttacccagagcgtctgtgatggtcctgtaggcttccgaggtgatcgggcagtgtcagtcttcagctgctaagctgagaagatctggggaggagtcagtcagtcagagagccttgggccagagttccaggggctctgggagcggctgccaggtgagttgaacagtctgattttcagtggggtcccacacagatggaacgcggcttaggaggaatcccgggctatgggcattccttggcccagtggccagatttctggcacttgtagcaagctcctgggggaggaggttctggaggaacccctggcagctgcgattcgggcatttggagttcttgtgtgctggagatgtggctggggtttgtctcacagtggaggcaaggaattgcaactcagaaatacattgctacttggctgcctctactctattattgtacatcttgaaggtcccactcaagaagcaaaacaaggaaagttgaagctaaaaggtgccccaaaatgtcaaggattgagtgtggccactttacccccaggtctcagcaggtctgaagaagccatagttctatccaacaaatattcactgatgcccttggaagagaggatgtataagaagcatgcgccagtatctgcttctagtgagggcttcagactgcttccactcatggtggaaggtgaaagggagacagagtgtgtggagatcatatagcaaaaaaagaggcaagagtagggggagctgccaggctcttttgaacaaccagctcttgtgggaactaagagaataagaattcactcattaccacaaggatgccatcaagccagtcataagggctctaccc

SEQ ID NO: 471489 - DNA, 546 bp, Homo sapiens
cctaactgggggtggagagggggcactgcctggttaatgctgggaccaccatggctgctgctggcatcactaacatgctgcatctcagcaggtgagatcggcactggctccaaggaagaggttttccatgcagatgtggaaactgccaaaagaccttggatatttggtggatacatgtgcaggtttgttacacaggtgtcttgcatgatgctagggtttggaatacaattgatcccatcaccagcaaaaaacaaaccaacaaaccaaaatgaaaaccttaagaaccatatctcgatgctccaggtcaatttccaccccagccatcagggcctagctttctataatagccatccggatggagctgtgcctactagcctatcccttcatggaccaatattctcccacaatctcaccagtttttatgtcaacatgtggttcttctttgccaggcacagttgtatgtcatggacaggcacagaacatgcagacatggctcatccagcctatcttcgactgttcttccagctgacttaggctcctgctgag

SEQ ID NO: 471490 - DNA, 860 bp, Homo sapiens
gtcttgtgctgccgtatcgtctgttaatgcgcatgctcgagctcactcgcccaactcctgaaagctgccgatcaacagacacccacaccaataaaagcagacggcaagggaaccaggacaagcatggctgtgaagaacagtggcaaagggggatagaaaggagcagaggggccagagtcaccgaggaaggagaactggcagagctggtgaatggggtggatgttggcgagacagaagacggctctcaggcgtccgggttggtagcatctgctccaagatgtaatccaggtctgcctgactctgcggatgcatttcccacagacacacactccttctggctgtacaaatggcaggcagccaacagctccagctcacaaagacaaggctcccgcctgaacagcatgcagctctctcaagtctggcctctgctgagaacctctgtcccgctgccggacctgcaaccccaaggctcctgccctgtcagtggcttcagtgtggtcactgtggtgaggaaaatctgtccctttgcgaagacactgaggcagggcctggatctaagccgtatcttcctcagctgcagtgccagcacaaaagcaaacagcctcacagggggccattctgtcaggaagataaatgctgtctcattgattccctcaccgaggagcttgtctgaaatggcagctgctagacagaaacgctttgaagattgaacccaggagtccagttccagcctctctttcagtcttgactagcaattcaaactcgcgtgacaaatttaagtccatgtcactgcctaggatagaaagtaaactcggtgaatgacacaacttgccagggatatccttagaccgttgccacgt

SEQ ID NO: 471491 - DNA, 730 bp, Homo sapiens
agtgaagtccatgctgctggtttgagacagctgagatggagatgcccctgtgggatagtaacaagggcaggaccagcaacttctgcctcctccctcttgggcccagctgccaaactgtgggtaagcccaagcagaaaggtccacatggaggagaactgaggccactggccaatagcctcattgagctcctgggcaacgaggaccaacttgccagccatgtgaaaatgcaaattctcaggtctcacttcaaacttattgaatcagaaactctggagatccataatctggggtacagggagtgtctgggccctgctaaagtcatcctactcactgatcgagaaactgtcttgagaacctgggtttccaaactcctggcaaggctttatgaccaacaggatatgtctaaactctttggcaagactctctccaaagtcacttacttcacttatccatcacacagcctagtttccatcaaaggatcttttgaatgccttctgggctgtactgagcttttattcacaaaagcttcagaagggcagaagaaaggcttgactcagtaacccaggaatgtagcagctgatgttcgaggacaagctggtgtatgcaggagcaccagatgtcccgacagaagaaagcggatgccacagattgggaagagctgtggcaggggagagagccaactcagatttcttcttctgactaattctgattttctgattaatgaatgctt

SEQ ID NO: 471492 - DNA, 1717 bp, Homo sapiens
tccctggatccagccatttctgcagctactgtatccttggactttgccattacagaaacagcagcagacaaggtcttcttcctgaaccaggtagtctcaactaggggaactagttaagacagtcttcctgtgcatccaccaggtggagattcatttgtttgtttgtcgaattgatgtttgattcaacacgtgatgcagaagacaatgacttggctctcacaaagcttatggtgtactggcacctgctgctgctgctgctgctgttgctgctgttgctgctgctgctgctgctgctgctgtctccacgacctctgtgcaaagaaagttatctgggggtggtgaatactgtcctgcaagctcaaagatcagatttcattgcaattatttcaactgcaaatgtttataagaaaccaagaaaccaggaaaccaagcacaaagactggtcaaaagtgttccagaaagggggctgtaagcaagcagggggagaagctgagattttgatttgtattgcaggcccctttaaggcacagaaattggtaccatcaggtacatttgaaagtgaggatattctcattgttcaattcccacctatgactgagaacatatggacacaggaaggggaacatcacacactggggcatgttgtggggtggggggatgggggagggatagcattaagagatatacctaatgttaaatgaagagttactgggtgcagcacaccaacatggcacatgtatacatatgtaacaaacctgcacgttgtgcacatgtaccctaaaacttaaagtataataataataaaaaaaagaaagtgaagagagacactaataactctgacagctgaagactgtaggctgttcaaatctcaaaaacagcattgccagccagctgactgagagcacccagtgttggcatactgctcatgtccattatgtcatttttttttcttgccagtaccccttctattacgagggaggaaaataaaactcagatttcaggaatcaatcaaggtcatgtagcaacctggtggtcagccagagctagaaattatcaaatatgatgatccaggaatatatgaaggttttaaagtacttttccagaatccataataatagactattttttctgattttattttttgatatagtaagttatgttaataaatttcctgatattaaaacactatttcttccctgaaataaattcagcttcttcaaatatattgatttttgtattaccaactgttttatagggtatttaaaattttaatttttattcataagattgatctatcattttcttttttatattaccttttcaacttttgataatgaacttacgctgatttaaaaagtgaattagagagccttctatttcttcctattgtttagagaaatttaagcattctgttttcacaaggttgcatatgaacagaaagatgccagtttgattctttttgatttgtgcttatgttttctttattgtccttgttttattttttaaaaacaataagcacacatattcttctatatctattatctctttactgctactacaaagatcttttgatggtggagagacagtgtattggggaatgaacagaactgccttccatcttctttagcctaaggttaaatattaatttttctacaaatattttgtctggttttagggaattctctatttatttaaaatatgcatttgtcattttttt

SEQ ID NO: 471493 - DNA, 458 bp, Homo sapiens
ttgtgagagcaaggtagtatgtggtagtgttccacaagcagaatggttggtgccaagggtccgttttacagaataccaaggcaaggggatgttgggaacttgagtgaccagtatgaccctgtgattaaggtcaatggaaaactacaacaacccaatccacaaataactactaatggcccagacccttcagaaatgaagtctcagttctacaatgttcttttgctaatttcaatcaagctgcatgtaagagctgaagagacctcacctaagtctggagttagtcttgtggccatagcctggcttccctgccgtgagcagctgtctgtccatcctttagcctgctgtgtgaaatcgtgtgggatggtctctatgatgggtctcatctctttacttcagcttcacactctagttcccctgctggccttggagccttgctttgaactctagcccaattgact

SEQ ID NO: 471494 - DNA, 1770 bp, Homo sapiens
tgcttaacctggaatcacaaagcctgagcttgatgttgaaaagaccttcaaagaaggaagacttaacaagtaaagcaaaagaaaacaaaacaaaatgaaacgaaacgaaacaaggaaatgcaaatcaaaacagtgtcaagtaggtgaagaatgtgcaggagtaaaaacactgtccgttcatttgctacttatccgtcgctctctgaaatattttcttcagctttttatagttgaggacctgaagaaatcctcctgcaaggagtgggtgtttcatcctgatctgaaagatgagaagatgcaagttcacccaaagagaaccaggaagcactggggcacaaggaactacggagaagaccatgagtcaagaactagcagaggatattcaaggagcagaaaggaagccggagtgtggctggatgctagttcattcctggaaagttataggagacaagctggaggatgcaggcaaggggctgctcctcagcaaagggctttgaatgaaacgagtcactctaactcttatgaggaatgtgaggcacccaaagtggaaaaagccaagtcagcaggctattgagagttcagtgagaattgaggagggttctaccgaggtggcggcatgggaagtggagagaggaggagggtttcgagcacatttcaaatgtagggcagatagtacttggttatgaatctgctgtggcaaggaatgtaaacaaataactaagaatcttctcttaaattttaataaaatgtgatctagagagaccattaattttaatctcacctcttttgataggccagttttatgtttgttttgtttaagacacctctccttcagatttgtagcaggtgcaccaagacaattttttttttcaaaaatagcacattgttatacttttatttttttgcaggaaaacattagatgcatgaagatatcataattaaacctttcattaaagaaggttaggcatcctgctcatttctcactgtttttgagaggagctcatcatattaatggttgccatagccttaaagtgcctaactcttgtcttgccatttccggtctttttactttcttgtgtttttggaaatttttgtaatgaccatgaatcatttggctagcaagtgttaaagacattttatctttaaaaattaaaaaggaaaaggatggctaggggtggaattaagaagcccttctatgaaatcacagaagctcttacctgccttccttagacgcagacaccgtattggaagggagaacaagacttgagaggtgactaaaagtctggatatttatgcacaataaattaaatacctaaagaaaattagatgtacatttaaatacttaaaattattggtttgggacaaggttactggattagacaaaacataaatggtcgtaggtaggtgtggaaagatagtagagagatttgtccctcactcttgggagacagaaagacaatgaagaagattcagttgtagaaagaaaaacaaagttcattgtttttaatgtgtagtgcaagtgatactcaaaagcacaacataactgacttttattgagaattgattgcaaaggatgctttgtacaaggtgtcttatttgattcccacaataattcaatgatattaatattattaggtatattaatattattatgtgttaaaacacagttgacttcaaatacgtgttttaagtgcccaggagtaattatgtggaatttgtccttaggatatgggtgtcatttgtctttagcagtcttcttacctgtgacat

SEQ ID NO: 471495 - DNA, 661 bp, Homo sapiens
gggtatgtcttcgtagcagcgggaaacaaaaagacagcaggatttagagataatgtggaaatgcctgaaaacatgtgaagtagtaagtttctacaaatggaatgtgagtgcaaggaatgtgtgtcaaattcagaacgaggctgagaagcagcaagtgggttatatacagaggactgtgaggttccaaggatatcagggctacaggatggaagaagctgtgtccgtgaatcacccatgtggagaagccactgaagagataaacatgactgttttgtggagtcttcctcaagcacggcataaagcttacagaggacatgagaagacttccctggaagatatgttgttcaacttttatactaaaagacttaaaattgccagtagcagaggtagcactgccaccataagaaaatcctgccaccactcccatcctaccactttcatgtccttcgagtcctaagaagaattctatatagaaagcaaatatttgaatcctgattttacaacaggaatgagaaattaatttcttatgtaaaactactaaatagtatttatttcagtataatacatttgggaagctttagacttatttagttttaattttgccttgggatggaatgctttttttgcattcataaaatggattatgtttctttatatttgg

SEQ ID NO: 471496 - DNA, 741 bp, Homo sapiens
cagtgtcttttttttttttggctgcccacagcaaagtttatagatgctggtagcagccctcagagagaatcgacaatggtgaatgttcctttcagacttttaaaggtgtcagaagctcagttaatcttttctaagtctggacaagggaaagcctcagcgaaagcccagctccatcagtgcaaatcttctctacgaatgccgatctaccccagagacaagctgacggcactatcttttggagcttttcttctcccaattgaagataaaggcaaggaagctggcctgccacacagaggctggttcctggaccttctgggatctctcattccggatgtaggattctatgatcagcaagtgggcaagccagtcatgtttgttctcctcccttcagagtggcaacttccctcaggccctgggaagaccattgctgctatcattacaacggatcagatgtggcctaatgagtctgaaccaggctttttccatgaatgggctgtggttgagcagtggtagatgcagcacagacacagattagttctaactgaaaaagaataaaattagccaagtggctggcgccccctgtaggcaatctgtagtgtttatccaggcatccccatggatccagatttcagagccttagtttaagaatcagatgagtaattttagaatatatatgtgagggataaattaatatttgcatcaatattaaggtttttgcatggtatagcattaatctttctt

SEQ ID NO: 471497 - DNA, 979 bp, Homo sapiens
gtaggctggccagaccaggaagatgggcgtttgtacttttcccactgctacatagaggaaagagttgcgttgggtgtcttttctcttctaaattcagtggccttggtgggagtggggtgaagcttagccggagttggacgagtgtgaatctgcctctaaccagccacgtggcctggagcaagctcacgcggaagagtggatctcaccgcgcatgctcagccactcccccaaatgcatccatccagccattctctccagctcctccagagaggaaaggggtggtaacatgaggccaagtgggtgccgaaagaaaatcttcgaaaatgctgatgtgaggagcaacaggcggcagccatgggtggggatccgggcttccagccggtgcacgctggagaccctgacctctgcgaggccgcttctggcgtccagtcctgagcctcggggacctcgtggggatggcagtggtggtagtgtcctgaagatgtctgtccctgctgtagctaagctcagttcctggctgtgtttctcctgttgttccaggccctgtcgcctccaggcctggttcctgcccccctggagagtcagaccctatttcagcaacagctaccccaataaactgctaacattatcctaagtgaaatggctcagaaaaacagaaagccaagaactgcatgttctcacttacaagtggaagctaaacaacgggtgcacacagacatacagagaggagtaatagacattgagggcaggaggggttagagatgaaatactagctacagggtacaatgaacactatgtcagtgctgcacttgtatccctaaatccataacaataaaaataaaaaataaaaattttaaaagcagagggtaagcaaaagtttgtataaaaaaagatgaaaaacaaatattttttagaaaaattaaattaaaatgtatataaaaaaataaaataaaataaactatttaagaaaggtgccaac

SEQ ID NO: 471498 - DNA, 1379 bp, Homo sapiens
ttctgatttacagattattcattttatcaatcaatacacctaagatgtacgttggtttggtccataaaggtgggacaattggaagtggagggcttccaggttataagcagttcaaagattttctgactggcaatcggctgaaagagttattatctaaagacctggaatccatagaaaagaatgtctgggttatgataagggtttgtgaagaccaaggttttatcatgccgatgaagcctccagaatggtcaacgttgagttcttcggaaacttctcatatagttgtgagaggatcggcttcaatgattgctcccagttggttgttgtcaagttcctatgacccgccacgatgttcctcatcttcaaggctctcatctccttggcaaaacttctcgaaccacctctgcactgtacgctcattagcagttcctgggccaagcgtgttctaaccctgaaatcatgtcctttgcattatcatttttcataactcatatggtttaatccccttcaaacaaaagaaaccacatggtgcattagtgggtccacttaatttctataatcaattatattgaaaatatgatatgaagttatatgtcagatcttgctgtcatttcttttcaccattaaaattgtttgtgtttcacatctgtaccagtcattgtaataaatttttaacaacattttcttatattttccctttgatattgcatgaaagtccctgttagctcttcttaaattattgataattcttaggttaacaggtttatactttctgctctattgcattaaaaatggatttaaagcatgttgcaacattaacttagaatcattatagtttaccctctatactttgctcatttgaatgtccaaaacagaagataacatgaaaagagatatgtatttctttagtttaaaaaataaaaaggtgttagacattgattcaggacttttctgatggcactgaggacttattacatgggaatgttctagttcttatctatccagctggtgaggtggaacattttaaaaacatatataattttaaagtagtatttctattttaagtcatttatctttctggaatgataaatagcaatattcatattatttgtagagatgacctcaaaacttctcatttcttcatatgaagtgagttttatacacatatttcatttcttagaactaacttaaagtgaaaaaaattaagaacaaaatgttatttccaactacttttttccacagtattccttaatttgtttaataaatatacatcacattaggtacagagaactttgtcatgtactaagaacactcacacgacattgtctctattttaatctaattacagatgatgactatttgtaaaaagaaaaaaaaaa

SEQ ID NO: 471499 - DNA, 542 bp, Homo sapiens
aagaagcaaataaatgtcaacattttatttcatgtcatgtgagccacaatgcgactgagaatccaaattcgacctgagtttgcctgcaaaactcaagaggtcagagagccactcatgagacaccagaacacagaattaaggcctgttggcactaggctccatgactgcgagaacagacaccatgacgtcctccttggataccgcttcttcagccagattgtactccctggtgctccaaatggcctccttccacagacctggagcaatgcaattaaagcctacagtgaagcagtatccagaccaccagggtctaaagcaactgcattaggctactgccagagacacctacaaaacagcttccctccccctgaggggaatctgcgcgagtttctcctagttgtcctaaaatgcctctctgttcattaagctctgcaaatatgtagtctgcatgcaatattcaacgtgaggagagtatgggctgagggcactatccatgatgacagtgctggctcgcagtacaggcaggactggacccagggttc

SEQ ID NO: 471500 - DNA, 748 bp, Homo sapiens
ggattttgaatgttatttaaagcttcttctgcatctaagtcagccatcttggctcttaccctcacaattttaaaacttgtactaaagagccatgactgctatttctctcacacaaggaagcaaccctcgagatgcagccctgaagtccagctgttgactataatagcctataggtctctgatgatcaccatgtttctggatgagaggctaccactggggctgtcagaaaatcatcagggggacgtgtgtcggacccgaaatgtgtggcttgcagacctagtttttcatggacgttactccctgaaccggtttggtccacccgtgtcacagctacctggcactgtgtcaggggctcaaggtgcgggaggggagcacagcggacaccctgccatatccggagggatggaagtcagcggcgggtctgcgatgactgcaaacagcagtggtggaaggcaagtagaagctcagcttgagccctaacaaacacggaccagaagagtgcagttgcaagatttaatagagtgaaaacagagctcccatacaaagggaggggacccaaagagggtagccattgccggcttgaatgcctgggtttatatcccgatcattgtccctccggttgtgctctcaggcaatagatgattggctatttctttacctcctgtttttgcctaatcagcattttagtgatctctctttcctacctgattggtcgggtgtgagctaagttgcaagccccatgtttaaa

SEQ ID NO: 471501 - DNA, 956 bp, Homo sapiens
ctcactaagagtgacctggctatggccactgctgagtgccagatttgccagccacagagaccaacactgagccctccatatggcaccattcctccaggtgatcagcaagctacttggtggcaggatgattatgttggacatcttccatcagggaaggagcatcagcttgtcctcaccagaatagacacttactctggatatgggtttccctattctgcaggcaatgcttctgacaagggtaccatctgtggactcatggaatgccttatccatcatcatcatattccacatagcattgcctctgaccaaggcactcactttatggctaaagaagtgaagcagtgggcttgcactcatggatttcactggttttaccatgttccccatcaccctgtagcagctggtttgatagaatggtggaatggccttttgaagtcacaattacaatgccaactaggtgacagtactttgtagggatagggcaaagttccccagaaggctgtgtatgctctgaatcaacatccaatatatcaccatttctcccacagccagaattcactggtccaggaatcaacgggtggaagtggaagggtcaccactcaccatcacccccacttttggttcctgttcccacgacattaggttctgctggtctagaggtcttagttccagagggaggaatgctgccacaggagacacaacaacgtttccattaaactggaagttaaggttgccacctggacactttgggctcctcctacctctaagtcaacaggctaagaagggagttacagtgttgactggagtgattgacccagactatcaagatgaaatcagtctgctactccacaatggaggatcctttctttttatttatttatttatttatttatttatttatttatttatttttaattatactttaagttttagggtacatgtgcacattgtgcagg

SEQ ID NO: 471502 - DNA, 686 bp, Homo sapiens
aaactttctagagcaaaggcaaaatgctgccagtctccaaagtcaaatccagggcaaggctctgcctttatgcctttatctttgcccatttacgaaagctgagagaggaggtcaaaatgtcaatgttaacgggagtttggaagaagtttatttcaacccacgttgatgactttgtgggtttcaacatgtcagtgaaggaagtactggcagatgtagtggaaataacaagagaactaaaattagaagtggaacccaaagatgtgcctgaattactgccatctcatgagaaaactgagatggaatctactcctggtgaagatgctgtgaacattgctgaaatggcaacaaagggtttagaatattacataaccttagttaataaagcagtagtaggatttgagaggattggctccaaccatgaaagaaattctactgttcagaggtatatgagcagttttgttacttagataaatgtgtcatggggatttgttgtgcaaattatttcattacccaggtattaagtctagtacccattagttatttttcctgatcctctccctcctcctacccttcaataggccccagtgtgtgtttccctctatgtgtccatgttttctcattatttagctcccacttataatatagtatcttttggattagaatatcatataagggaagggtggctc

SEQ ID NO: 471503 - DNA, 566 bp, Homo sapiens
tgctagttaccagaagctgtgggttttgaagaagatggatggggatcctctgcagggctccagctgccactatgcaatctccagacaacacctgggctccaggtttcagcaaaaccctggtcactcttgaaaacatttatggtgtgtctattggcctaattgccacaactcttatagttcaggtcttgtattttgtccactttggcaagcccaccagtgacactgccgtcatcattcatgcagacagaaagtccagtcatgccacctgcctctctggttctatcccccatctctttccccatcatcccttcctggatctgagagcaccctgcattctgctcctgtggccaactaaagcttcactaccaaggcagcaagagtgtgtcttctgcccatccgtccccaaattatattttgttttgaaaaatttcaatcctatagaaatggaaataagcaatatctatttactcttgacctaaattcctcactgtcattattttgccatattttctttattgtcagtctttttatttttgtcttttgactgaatgatttggaagtaaatt

SEQ ID NO: 471504 - DNA, 680 bp, Homo sapiens
gtggtttgctgaatctatcaacccatcacctagtttgtgttgttcccctctctgtgtccatgcgttctcattgttcagctctcacttataagtgtggacatgcggtgtttggttatttgttcctgtgtcagtttgctgaggataatggcttccagctcctccaatgttcctgcaaaggacatgatcttctgagtgtttctgacataaagaagaaattggaaaaacaagaagggacactggagatgactccctcccagatagtagatattgccttcagtgtatacagttcttcagaagctaagaagttaaggccaggtacaatatatttaggaatggtgggaaaaatcccacaccaaagaaaggatggaaattcaggtaaggccttgggtcacagtgtgtgtactgtaatgagaaagatcactggaagttcatttgccccaaaaagaaaggactcaaggtccagaagaagaagaagatgccagggagaaggcccactggcagatggtggaagaggattgtgaccccaataaagaatgagaattcccaggggctcccctaaatctttcagagccaattaaaatattcccacaggagccctgggtacaattgaccttactaactgcttaaaggatgccctcttttgcatccaaattgacgaaaaggcccacatgttctttgcc

SEQ ID NO: 471505 - DNA, 3246 bp, Homo sapiens
tatcccagctgcttcagctccagtcatggctaaaaggggccaaggtagggctctagccattgtttcagagagcacaaggccaaaaccttggcagcttacacgtggccttgggcctgtgggtgcgcagaagtcaagaattgagctttgggaatctctgcctaggtttcagaggatttgtaggcggaagtttgctgcaggggtggtgccctcatggagaatgtctgctaggacagtgcagaggggaaatggggggttgaagcccccacacagagtctccactggggcactgcctggtggagctgtgagaagagggccactgtcctccagaccccagaatggtagatctaccaacagcttgcggcatgcacctggaaaagccaaggacgcctcatgccagcccttgaaagcagccaggggcggggctctaccctgcaaagtcacggggtggagctgctcaaaaccatgggagcccgcctcttgcatcagcgttgcgtaggttgttatgtctggctgtgggtgttggtcacgtgaagatgacagacgatgagcttgtgtataacgttcacttggctgtcaacttcttggtgtcattgctcaagaaaaactggcagaatgtccgggccttatatatcaagagcaccatgggcaagccccggtgcctatattaagacacatttgaataaattatattaccagtaaaaaaaaaaaaaaaagttcaattcacatagaatcattgagtcctgaccaaacactctgaaaaattgtgagatatgaataaaggtcgtatttatgttaagttttaataaaggtaagcaatatgaaaaatataaatgtattgtgatgtcagtaagattttaccatcccacttaatcttttgctttgaatttttaaaaagtagtgtattcattttggggagtatattgagactgagaaattttgaaacatgttttaagctcattttcaaaatctttgcattgttttaccagaactaaatttatgttagaagatcttgtgttagaagataccagtactaaatctgtgttagaagatagtaaattgctgttagaaggttgttttaccagtgctaaatttgtgttagggcacgaagattgtgttagatttgtgttcgtaaaatttgccaactataaccactaaggaaaatacatcagaatgattattggttatattgccatttaagtgttctcgataattgttttcactgaatttaaataaatataaaactcttaagttttaaaggaggataaattgctatgtgacttttcttagtaatgtcacaattagtaatcttgacaaggcatgttttaaaatagtaactattcattagcacaattacataaagaactaatataataatgtttaaagaacttttatattttttcaaaattttttccaagttgaaattcttaattctacatttctattcccgcagttgtttttcataataattaatatctttaagtaatatataatttttaaaatcaatgttatttactgaccataaagttcctttctatgtaatatctactgaaagattttccctgttagttgcccactaattttatatgaagtaactgtcatcagctatctaaaccagtaaatatttccaaatatattgtaaattttgaaacattatttattataaaaataacttcatatattatatttagatttcagaggtttaaaagctgaaaactacatcttattttaatttgacaattactttctttgtttggttgcgttttttttaaagactcagtcctaataatcttcctttcaaaatgtcttccaaatataatattttattcataaggaacaattaatgttcttcaaattttatggaaaaatcccaaatcccaaatttttactccctttggaagtattttccactgaaaacacgtcaagcaattctcagtacatccaaacacctcagttgctaagcaactgctaatgaattttccaccaaaaaggtttcagaccaggtcttcaagatatcaaatattcacacagcccttgatgcctttgcaaaatgtctctctattgtagcatgaaaaagttactgcaaataataagtagaagctactggttacagctataatgtggggggagaaagcaagcaaaaatcattttagtttactgtttctgaggcttggcttctttcattacattttacctaagaaaatgtagataatttaatagctataagtaaagactttattgtcttaattagtgtaagataatttaattgaaaatagtttaatgtaaatacattataaggctatttgaaaataaatacagcatatctttttatagaaagtgaatttttcaatagaagttatttttcttttctaatgttagtatttcataccacagatatctattttaaatagatatctattcattatatgttctttatatgctaatataacatacttgctattagctacttttaaatcagatgtataaatttacatttagcataatagttttttaatatgttaagttttaaatattttgttttaataaattttgaactcttaagaaaaatgcaattaataatattcttactgacttgcaagaagtacctctattgttttagaaattattctcatacatcaataaaaatgcatcactgtgtaatggaaagagaagaaaattagttctgaagctatcatgtaatagctgattgaattttggacaaataatattgcttatcatcagtatccttatctgtaatattttttaaattggagtaaggacaatacctccaaaggatttagcattattaaataaagttatagtcataagaatactttataaatcacacactaatatatacatatttattttaaattgtataacatgttggttttttattgaattaattactaaattacattataacattgtagtattacattataaaagtgatggacattgatcaaaaaatatattgagcttccacatatacttacaaaaatgtcaaataattttgcaattctatgttcaggaaaacaggatcccttcaatgcctagttagttgagggtttttaacataaagtatactttaactttttttttcattcattttgacactggaaaaatcttactattatatgtcttggaggatggccttcttttctagtatctctcagggggtttctgcatttcctgaatttgaatgtgcgtctctctagtgaggttgaggaagattttttcatggcgata

SEQ ID NO: 471506 - DNA, 693 bp, Homo sapiens
gccatggatattaatgtggcttttatctgtgaaacgggaagcttgggttggctttgaccatactgtgctatggagaagaccttaaattgtatctatctggagatctttgagctttcttatctagacttgttgaatggctttgaccaaaatgttaatagtgatatagacaataaggtccaggctgaggtggtctcagatagagatgaggaacttgctgggaactggagtaaaggtcactcttgttatgcaaagacactgatggcattttgcccctgccctagagaactgtggaacattgaacttgagagacatgatttagggtatctgatggaagaaatttctaagtggcaaagcattcaagaggaagcagagcataaaattttgaaaaatttgcaggctgactatgcaatagaaaagaaaacactattttctggggagaaattcaagctggctgcagaaatttgcataagtaatgagaaaccaagtgttaatcaacaagacaatggggaaatatctccaggccatgtcagagaccttcatagcagccacacctatcacagtcctggagacctaagagggaaaaatggtttcctggctgggcccagggtccccctgttctatgaagccctgggtcagcgtaccctgcatcccagctgctccagctccagccatggctaaaagaggccaatatac

SEQ ID NO: 471507 - DNA, 569 bp, Homo sapiens
gaagaccaaaggtagataaatccatgaagatgggaagaaaccaatgcaaaaagactgaaaattccaaaaaccagaacacctcttctcctccaaaggatcacaactcctcgccagcaagggaacaaaactggatagagaatgaatttgacgagttgacagaagtaggcttcagaaggtggataataaactcctcagagctaaaggagcatgttctaatccaatgcaaggaagctaagaaccttgaaaaaaggttagatgaattgctaactagaataaccagtttagagaagaacataaatgacctgatggagctgaaaaacatagcacgagaacttcatgatgcatacacaagtatcaatagccaaattgatcaagcagaagaaaggatatcagaggttgcagatcagctctgtgaaataaagaaatacagagaacaccacaaagatactccttgagaagagccaccccaaaagacataattgtcagattcaccaaggttgaaatgaaggaaaaaatgttaagggcagccagaaagctcaggttacccacaaagggaagcccatcagact

SEQ ID NO: 471508 - DNA, 555 bp, Homo sapiens
ctgtcagcagaaggggctcatgatgtggatacagcgtggactatggagatatcttcattgtgctgggctgcaagcatgtctgacctttgctttggagggagacactctctccatcttcctggactataagcaaaccagctctttccttcagagggacacattatctctttactccaagaaaattgatgctagatcctggagcctggctgagcccacaaatggggatccaatgggaatacatcgccagaagatggaattctataacaaacgttctacagttttagcagtaaagtcgaagtggctagaaaagagcatccagagtatcccaagctctgagcaggcacaagagggtgggaaaccaggcactgtggtcaggctaaggagggagcaggatgaccacagagatggctgtcggcctttgtacccgtcctcctgtaatttgattctaggaatgggtctggaagcaagacaaggtgatggggcaaatcttgtggagaatcagtaacaccaaggaaggaccacatttagtgccaaatacttgctcagaaaatcgta

SEQ ID NO: 471509 - DNA, 718 bp, Homo sapiens
cagctctgtgatgtaaggggctgctgtgaaggaaacttactatcatggcagaaggggaagaagcaagtcttaggtggaagcaggcaagagagagtgggtttgtaaaggtggaactgtcagacacttataaaaccatcaaatctcatcgtatgtcactcactatcatgaaaacatcatgggggatactgcccccacgatccaattaccttccaccaggtataggagatacatgtgaaggtttcttacatgaatattttcatgtcactggggtttggtgtacaaatggttgtgtcatccaggtagctgaatctgctggcaaaagagctatgatggcagctgctggcaaacacttcaattgggcagctgaggctgcactgcaagtgggtgcaaccaggtctttggggcaatatgaaagaatgtcaaaaaaattcatgtgtgagacctatgtcatgatatccaaataggatttgatctcaatctccagcctgatgctgaattcatatctccatttactttcagtgtgtggaatatgtaatgtatgcagactttaaatggtatgactcacaattgtaggtaatgttcttcattatgtacgaatgtatgctaaatggcattagaaagcataatgtggaacctgctaattgatactaaatagtgtataactgacagtctaggaacagttttcttgattttacatttaaaaaatatttttccatga

SEQ ID NO: 471510 - DNA, 1820 bp, Homo sapiens
cctggcatacacgtgcagaacgtgcagccccacatgcattaggtttttgtcctaatgctctccttccccttgcccccgaccccccgacaggccctggtgtgtgatgttcccctcactgtgtccatgatgatggttcttcacaaagatattatatcacatcttccaagtcccagtaacaagcagcacatgagttggaacttgaagaatatggtggagatgattgggtttagagtcagcataactgtcattgggcaaagaaatgatgcaatgactgaggttgagggtgtaagtcaaagccagtccagacaggatcccagatgctgccacattccttgcaatacagccccttccactatcttcaagttatggagcatgaaagaattaggaaaaattccacgttttatgacttcagaaaaatgcacacacacaaagatgcaggccaatcttaagaatattatacaaacagaatctacccacatataataagagtaacacatcatgaccaagaagattttatttctaaattaagaatgactcgatatgaaaaatatgtaaatattattttaaataatattaacagtaaatgttaaaagataaaagtattgtggaaaatccatgggtcaactcattattaatatttaattaacattaatacctatagaattaacattaaaacaatgggggaattctctaagttggctagatttcatgatatatgaagacaataaatttccactttaaaaacaaccaattaagagatatgatagcaaaaataccttatttatatgagcaaccaaatgacagaataactagcagtgaacctaacaataaatttgtgctatgtatttacttataaacatgtatgattttataatattcaatactatgaaacttccgattaaaaattatctataaatttattgcgatatctataaaatgttaataactatatttttcataagaggggttggggatagaattaaaaaagggatgaaaactttatttcaaagttattatggaaaagtaaaccggtaagactgactaatatgtaagaaagttatgaaaaggaagagtagtggttatggactagccttacaagatgtgaatatgtatttttttaactgttggaattgaagcggaatgttacaaatgcatcaatacagagactgctgatttttctgtccagtgttcgtccaactttgttaacagtacaaataaggtattatacaaataaattgtgaaagtcctacagatattgcattataaaaaataaatgaaaacatcctacaagattaaaataggttttctaaaagacattgtatttagaagataggctctactgtactgatagaagaaatgtttaaaaatctataaattgttgagacctaatatacatttttaaaaaatcaaccctgttaactatttccaatagccaaaacatagaaaaaaatgttcatcatagataaaaagataagcaaattttatcatatgcaaaacagtggaatatcctgcaaatataaaaaggaatgaagtactgatgcaagctctaatatggacaaaccttgaaaacgttatgctaagtgaatagccacacataaagttatatattgtttgattccatttatatgaagtatacagaacagaaagcagattagtagtttccaagggatcaaggcataactgcctagtgtgtactgcactgttctgaagggggatgaaaatgttttggatgtagaggtggtagtggtacaacattgtaaatgtactgaatgccattgaatagtttacgttaaaatagtaccaattttgctgaaattatt

SEQ ID NO: 471511 - DNA, 2946 bp, Homo sapiens
ccccgcagcagctgatccagacgggctgccaccactgtcaacaaggtttcactatgttgccctggctgggccttactggggtgcccgaaggtgcaggctgcagagatgccagggtcctgcaccggggaggacagccgcagctccacccaggagctcctacccggccaccttggaagatgcagggctcccacttgtccccagctcctgcctgcttcctggagcaagaggcccagatccacagctgtaatttgggcggctgtggccccacccaggaaggcagggctcctgcttgctgcatagagaaggaagcctgggtctgcagctgcagtttgggcagctgcattggcaggggagctcctgtcccaactcagaaggggcagggctcccaatggctccatggagtgtgcagccccagccgcgctttcctgttgcagctttttcctcatatcggtgtccactgcttcctggcttttatcctgtggagcagagaataacaaaaattatactgaaataattccacactaatagtcctgatatactttaaaaaggtaattttttattactatttctttcaaaatttgtgagcgctttgtattaaaaaaaaaaacactctctaattggataactttgtggacgacaacgctgtgctttcagcttttacatctttaaaatgggtttttgtgaagattaaaccaatgatatttgtaagcagcatgcttagcttctacttattcacattttgctcgtgctttgcgacttgatgtttctttcattttttgttttttgaatggtaatggagtttacccattttgctacattgctcttctggctgaagctgctcaatggtgaagtgttcttctgaccaacattagcctattttggtaatttaagctatctttaaaacttatcaaatttaccaagatattctcattagtattcattaaccatgagagatgctccatagtttggtaatattctttgtttagtgcttgaatttgtattcactatctttttgtcttaattgtcctcaccaaaggattgtgcaatgcaaggacattttcaagaaccagcattttcatttacttatttcccagcattttattagtatttttaattatttcgatgtgatttcattaaatttattttactcactccgaattttttatagaatactaagttatttcatatttattccaacttaataacagtatttaaagctacacattacatataggatatttaaatagctgaatgtgctgctattgatgtgattaaatttgatctttatgatcagcttgaaggattttataaatgttttatataagtgacttaagatgtcatcaaatttaatcaaggatttttagcaattgaaagaaaacttccataaaatatgtattaaattgaccctttgaaatatgttatttggctcctcctcccagttgtttattatttgccagcttgcactacatggaaacgcaaagctaaagcagaaaaccagtagtgattcccaagtttagatcatcttccaatcattgtaacaaatacatttgatgcaatgtgcaatgttatatgggaccaaagtacttgcctattttacctttaagataaaatgtttaccaagaagcattcctcaaacaaaatgccacagaaagaaaacataaaacatatcttagtaatgtaagatgttattagaagaagaaactgggtttgggatatatgggaaccctttgtactatcctcgcaatgtgcaatgtcctacaaaacattgcacattgcaaggcctaaatactttagtcctacataagattcattgcacatcacatcaaatgcaatgagaaagactgatgcctctttctttgcaagcagtctgtgtttatgtgtgcctatgtctgtgtgtgtctctgttttctttctggcagttccatttttaccctcaaaattaaaacctttcccctgaaatatattaataaaaattattttattaatatatttcacttcataaacaaaataagtcatatttatataggactaagaaaaacatagatcatagtgcttccgattatagaaataatacattttaaaagcaaaacctgagaaactacataaaattacacacataaaaacgaagaatacattcacttttccatcataacgactgctgacattttgatgaatatccttccaaactaccagagcagaaaacagcttgtgcaagatattttatcacagcattgtttcagattctataaaattcaaaaaaggcttgtttaataaatcttgctctatcacaaaatgaattactctgtaagtattacaaataaggaaataaatcaatgtgttaacgtggaaaacattccgcagcgcatttttattcaaaacaacagcaagttgcaaagcagtatgtcaggtagaattgcgttttattaataaacttttaattttagaacagttttagatatacagaaaaattgcaaggagtgtacagagagttgccacataccccaaacccagtttcttctaataacatcttaacattactaaggtatgtttcgtgtttaccttctgtagcattttatttcaggaatgtttcttcataaacatacaaatatctggatattgttatttgatgctaaaaacctttgccttttaacaaaaatgttttaatgtcttttaatttggtaaattttgataaaaaatgaaattcttattttctattctttgtcttttacggtatcagctttttcaaaaaactactgcctagcattaagcttttcatctcccaggtagctgttgtacatatctttatctatagttatgcctacgtgtacatcgataactatatttgcattttccctatatccgtgagtgttgtttgctcctgtcattattttaagaagttgataggagtgtactgagtctttcaataactgaaaatatctttctatt

SEQ ID NO: 471512 - DNA, 719 bp, Homo sapiens
ttgatggatttcccggctggagagcccacgaaagaggccccagtaacagtgccggaaaaggagcagtcagcgaagtaggaaggaactcaaagacaatggtgcactggaggtcaaacgacgaaagtgaacaggcaccaatcaggcctgaggttcaggcttctgtcaataagatccagaagcacaagatgaaagaactaaaagaacacagcatgggaagaaacagaaaggccagatgggagaatatttcaacaatgcaggcaagagatgacagcaccagggtgcagaatggtaacagtagaaatggtgacatcatagatatgtatgaaagcctctcagccgagggagaagctgccctacccagggctagtgagttcttagagacactaaagggcacagctgaagcatgtctttcctatgcaaaccaacccatcccaaatcactgccttattgaattctcacacaccaagccaatgtttcccctgctgttatcccaggaccagtgcttatagagtagatgcccttatgtactatattctgagtgacttcattagatataatttttagttcactcatttttccttcaattatttaaacaatatgttaattcatccattatatttttaaagggctttatttccaaaaattatgcttaattcttttcaaatttgcctatttccttttctcctttttatcatttttctaatatttttatttccttg

SEQ ID NO: 471513 - DNA, 2039 bp, Homo sapiens
ctctttttttttttttttcgacaagatataacagccatggttctggttgaggaaggcagattgtcagaagggcatagatcttctctgctcacttctttcttctgcccctcgtctgctcccagacagcctcggaatgactttgaagaatccaagagctcagtagagaaagtaactgcagatgtggtgaaaatagcaagagaactagaattagaaatggaccctgaagatgtgactgaattactacaatctcatgataaacctcaaatggatgaggaattgcttcttatgaatgagcaaagaaagtggtttcttgagatggcatctactcctggtgaagatgttgtgaacattgttgaaatgacagcaaaagatgtagactattatgtaaacttagttgataaagcagtaacaagttttgagaggactgactccagttttgaaggaagttctactgtggataaactgctatcaaacagcaccaaatgctacagagaaatcttttgtgaaaggaagaggcaattgatgcagcaaacttcactgtggtcttaacaagatagtatctgttgttaaatatatttttgtctcaaatatacaagtaacatattcaatgcatagaactgattcttttgctagagcttctctaattatttatgcattggctagaactaattctttagtatttctctaaagaaaagtccacatgaaaaaattactacctgaactgcttcatgtttaaaacacagtactgtaggctttatagttgaagggcatcttgtctggatagaaaatctttggttcatgttctcctccgaatatactgtaaatgttcgtgaaatggattctgtcttctgtttttgtcaagatgtttgagaccaacttaatgctctttctcttagaagcagatatgcatttatttgctaacatcttctcaaccagttgccattattcaactaatccctacaccaatcagactaataattacatatttactatgaatacatgtccagtactatactttgtgctatagtgaattagaaaagtataacagtgctctgggttttgatggactctttactgtaatcagctcttacctgaccaatgagttgactctgttaatcctgcctatgatattggaaatacaccattattggagctgttcacattcctaaagtatgtactatgagaaataagaacgtgacagaaaaactaagcatttgggcttcatagctgtttaagtttcaaggttttaatatgttcaaaatattcccattataattgaatttatctttattattcatcaatatatgcttataaatggtagcaaacatgcaggctgcacatttgttgaaataaatattttttagcttaaataatgtaaagtcttaaaaacttaattactctagaagaagaaacagagattctggaagagttggatatcttttaagttagaagtcagaaaaacttaaaaaaaaaacttgaagattgaattactaaggtttcaagctttcaagttggttatctctagtgccttagaaacaccagcattttcacagaaagaatttcatgatccaacctaaattaatatcatatataattactctttctattatataagatgctattatattagacaactgctccattactgttaaattagaactactgcctagataataattatacctgcttaagtctacaacacagtaaaatataattttatataacagattttcacaaggtggtccattaaagttctcttacagagttatcaataaaattaagacacgaaagaagtaatctgtcttggtgtcaatctcaaatactaatttgagtggatgtttttattttaagaaagctttttggttgttttacatattatgcaactttgtcatttccactgagatcttgaaagaagtattgcttttcatgactttgtcattagctcttggtacctgacctgcatttagcgaatgatgaaatttgaatgtgaattatgaacatttaggcatattcacttttataaaaatcatcatcattcc

SEQ ID NO: 471514 - DNA, 1124 bp, Homo sapiens
ggcactttgggaggccaaggcaggctgctgggaggtggaggttgcggcgtgtccggagtttgttccttctgatgttcagatgcgttcggagtttcttccttctggtgggttcatggtctcgctggcttcaggagtgaagctgcagaccttcgtgaccttcacggtgagtgttacagccgtgaaggtggcgcgtgtggagttgttcgttccttctggtgggttcgtggtctcgctagcttcaggagtgaagcttcagaccttcacgtggatcctgcaccagggccgcaggtggagctgcctgccagtcccgcaccctgcacctgcactcctcagcccttgggtggtcgatgggactgggcgctgtggagcagggggtggtgctggtcagggaggcttgggcctcgcaggagcccaccgtgtgggggaggctcaggcatggcaggctgcaggtcccgagccctgccccgcggggaggcagctaaggcccagggagaagtcaagcatagcagctgctggcccaggtgctaagcccctcactgcccgggctggcggggcccactggctgctggagcgtggggcccgcggacacccacgcctacccagaactcacgctggcccgcaagcaccgcgtgcagcccgggttcccgaccacgcctctccctccacaccttcccgcaagctgagggagccggctccggccttggccagcccagaaaggggctcccacagtgcagcggtgggctgaagggctcctcaagcaccgccagatttccctttctccatcacttcttccctaacacttagtttccctgtccccgactttctcactactaaaggacccctacattcctctagaaaccttgtgggactagattcttctgtcacataccctattcttaaaaataacaacaacaacaaaagccaatttaaatactttagaagatcatacttttcaaagattttactaaatcatttttttaaacaaaatatacattaaatctcagatttacagaatatagaaataatttatccaaagaaatttgcatttaaaattgttaatattgcacccaacagtatgtctttgacacatttgcattgtcaatctttcccacaatttgcaaaaa

SEQ ID NO: 471515 - DNA, 818 bp, Homo sapiens
agaacagaagaagaaagacggatgcggacccaaagtaaaaggaggctagaagctaagaaagagcagcggcagaaaaactttgtggacctggcctgcgagtgcagcgcagtcatctgctgccgcgtcacccccaagcagaaggccatggtggtggacctggtgaagaggtacaagaaagccatcacgctggccatcggagatggggccaatgacgtgaacatgatcaaaactgcccacattggcgttggaataagtggacaagaaggaatgcaagctgtcatgtcgagtgactattcctttgctcagttccgatatctgcagaggctactgctggtgcatggccgatggtcttacataaggatgtgcaagttcctacgatacttcttttacaaaaactttgcctttactttggttcatttctggtactccttcttcaatggctactctgcgcagactgcatacgaggattggttcatcaccctctacaacgtgctgtacaccagcctgcccgtgctcctcatggggctgctcgaccagatccagaagcatcgcaagcggttgaaggcggaggagcagtggcagcgacggcagcaggtgttccgccggggcgtgtcaacgcggcgctcggcctacgccttctcgcaccagcggggctacgcggacctcatctcctccgggcgcagcatccgcaagaagcgctcgccgcttgatgccatcgtggcggatggcaccgcggagccatcttattaacagattttaaaatttatagtaatgacaaatgacttatcagtgttcatcatctgaaagctaagtggttc

SEQ ID NO: 471516 - DNA, 2101 bp, Homo sapiens
tgggttcatggtctcgctggcttcaggagtgaagctgcagaccttcgtggtgagtgttacagctgttaaggtggcgcgtctggagttgttcgttccttccggtgggttcgtggtctcgctagcttcaggagtgaagcttcagaccttcacggtgagtgttacagccgttaaggtggcgcgtgtggagttgttcgttccttccggtgggttcgtggtctcgctagcttcaggagtgaagcttcagaccttcacggtgagtgttacagccgttaaggtggcgcgtctgcagttgttcgttccttccggtgggttcgtggtctcgctagcttcaggagtgaagcttcagaccttcacggtgagtgttacagccgtgaaggtggcgcgtgtggagttgttcgttccttccggtgggttcgtggtctcgctagcttcaggagtgaagcttcagaccttcacggtgagtgttacagccgttaaggtggcgcgtgtggagttgttcgttccttccggtgggttcgtggtctcgctagcttcaggagtgaagcttcagaccttcacggtgagtgttacagccgttaaggtggcgcgtctgcagttgttcgttccttccggtgggttcgtggtctcgctagcttcaggagtgaagcttcagaccttcacggtgagtgttacagccgtgaaggtggcgcgtgtggagttgttcgttccttccggtgggttcgtggtctcgctagcttcaggagtgaagcttcagaccttcacggtgagtgttacagccgttaaggtggcgcgtgtggagttgttcgttccttccggtgggttcgtggtctcgctagcttcaggagtgaagcttcagaccttcacggtgagtgttacagccgttaaggtggcgcgtgtggagttgttcgttccttccggtgggttcgtggtctcgctagcttcaggagtgaagcttcagaccttcacggtgagtgttacagccgttaaggtggcgcgtctgcagttgttcgttccttccggtgggttcgtggtctcgctagcttcaggagtgaagcttcagaccttcacggtgagtgttacagccgtgaaggtggcgcgtgtggagttgttcgttccttctggtgggttcgtggtctcgctagcttcaggagtgaagcttcagaccttcacggtgagtgttacagccgttaacgtggcgcgtctggagttgttcattccttctggtgggtttgtggtctcgctagcttcaggagtgaagcttcagaccttcacggtgagtgttacagctcatagaggcagtgtggacccaaagagtgagcagtgacaagatttattgcaaagatgaaagaacaaagctcccacagtgtggaaggggaccccagtggattgcctccgctggctcgggcagcctgcttttattctcttatctggccccacccacatcctgctgattggtccattttacagagagctgattggtccattttacagagagctgattggtctgttttgacagggtgctgattggtgcgtttacaatccctgagctagacacaaaagttctccacatccccactagattagctagatacagagcgtctacacaaaggttctccaagtccccaccagagtagctagatatagagtgtcgattggtgcattcacaaaccctgagctagacacagggtgctgattggtgtgtttacaaaccttaagctagatacagggtgccgattggtgtatttacaatccgttagctagacataaaggttctccaagtccccaccagagtagccagatagagtgtggattggtgcattcacaaaccctgagctagacacagggtgctgattggtgtgtttacaaaccttgagctagatacagagcgctgattggtgtatttacaatcccttagctagacataaaggttctccaagtccccactagactcaggagcccagctggcttcacccagtggatcctgcaccagggccgcaggtggagctgcctgccagtcccgcaccctgcacctgcactcctcagcccttgggtggtcgatgggactgggcgctgtggagcagggggtggtgctggtcaggga

SEQ ID NO: 471517 - DNA, 1005 bp, Homo sapiens
ccctctgtaatatgctttctacaattcacagtgagactaatgaattgggagagacctctggacctctagaatgtctaagaaggcagttggtatcctgccatagaaagggcctatggaaatttgcaaaggaagtgagggaggtctgccttctttctttcatatacctgagatcagtctggtccttcagagatgataagttgctcagtccctatgtcccaactccaaatttctgggagatatttcatttactgcaacttgggtcacattcactggtggtgcagtctgcagtaacgtgccccagtgagaggaaaaagacaggaaaaagtttacttccccatggaaatgatttatgctggacctcttggaaggtccagttgtctggctagaaacagttgaagtctaaaatacccatagctttctttctgtacaggagtggaagacaagtttcagaatgtttgagcccttcacccaaaggcacacaaggcaggtggggaggcaggaatctaacccaggctgaagtttctagatctagtatttgtactaagctgccatgctgctttatgtctgtgaccatgttggaaaaagtgttttagctgtaccatcacttagttacaactattctgattctgtttaatcatccacctaacttcatagaagttaggctcaagcttctattttcttaatgtttacatttttccaatataaaataatagaaaaaaattgctcattatactgggcccagcagtccccagtctttttggcaccaaggactggttttgtggaggacaatttttccacaaaccagggtgggggatggttttgggatgattcaagtgcattacatttattgtgcactttgtttctattattattacattgtaatatataatgaaataattatacagctcaccataatgtagaatcagtgggagccctgagcttgttttcctgcaactagatggtcccatctgggggtgatgggagacagtgacagatcatcactct

SEQ ID NO: 471518 - DNA, 800 bp, Homo sapiens
agaagctggggaaattaagtccttgggtctgtagcacagtttgagctgtgaaagtcgttatgaccagaagattgtctagccttctctgcgctcctgttctcttccgggtgacttcagctttcacatggcaggaggactgtctcgccttcttagtacagactttctacaacagcgctggggacaaaatcacaggaaagtacaagaagcagggtggaaacgtgcattcaaatgataaactggctgaaggatctaaattctatatcagcaaaccttcaaaaaacaaaggagtaattaagacatttacagatgaacaaaaactgagagaagtcatctttagcagacttgccctacaagaaattctgaaaggaatccttcagcataaaatgagagaaccctacatgttaaatccacatgaagaaataaaaagtatggtaaagaatgttcaagccatctccaaggagcaagaaaccagtcaggattcagtgaagatctgtccacaaataagaaactatgacattggaaggtacttgctttatcttgtgaccctcaagtccctgagctcagttaacggggtgcaagagaaccacgaggaaataggaagtgaggcctggtatgcagagggacgactcaaacaggtgattaaggaattaaccagtcacttgttggaggataatgcctcagtgagcaagaggcatcccgagttcatagcagacaaggacgcctgacagctctggtggtccctgacaagtctgacacccacggagaagcctgaggggacgaagctggcctgggtgatgggc

SEQ ID NO: 471519 - DNA, 606 bp, Homo sapiens
gtgacttttgtgcacctggatggggcccatagatttttcatgacacaaatggagactgaggtgggggagagtcggacagaccagggagaggggatgctgaggcctgaaggagaagagactaaggagctacacagtgtggggagagggagaaggaggcaatgggaggaaagagatgtccccaagagggaatactgtgcagctacaaagtacgctgctctgatctcccttcaaggcaacctgccgcatagagagaaactggtgcactgcgttctgcatattctgatctgtttcagccctcacagggagcccccagcacccccactgcactcctcaagctgctcccagtccatcactgagcagagtgaatgctcctttgccttgaagatctccatctgctgggcttccctgagattgctcctccccaggcctccttcctcccctcactcctcccacagctgcatggtgcttttcatcaacaaatggatctgaggtgcaattagtaaatgtgaaaggatctctcaggacagccacaaaaggggttgctaagtttggaagcttctctgagtacctcgcacatggtaagtcccattaaatatttgttaatgc

SEQ ID NO: 471520 - DNA, 1110 bp, Homo sapiens
atccttggtctgtgactttcagagatttccaggagctgctgtttcttgatttgagttctagaggctgctctggcctgtagtgtgggccctaaagccaaggtctggtgtccttatgaggaaagagagatttggagacacaaacacagagacacacagagaaggcaacgggacaacagaggcagagattggagtgatgtgtctgcaagacaaggaagtccatggatggttcgttccagcagacattgaaaggggcaaggaaggatccattccaagtgtcttaagagagtgcctggactggtccaggagattcaatattcaatccactcatcaaggtcgtctgtgtagacagccattcactacctatagacgctcctcaagaaacagatgctttctggttttctgccaagaatgtcaacatcagattactcctaagtatcactcatttccacgtgaattagacagaacagtgttaagtggtttggagccacagctggctctcaatactgcttcaactcacactctgagaagaacgacagttgactgagccagcttccacacctctcaagagagtttgctgttttattccaaggggcagtaacaggaacatttctgcttgctgcggcccctaaatgtgcagcattctttagaccattatatggtgctttccccttctcagcgttcagaaacgttgagaaggaaagagcctcatcctattttttagcttcttggaggttgcagttgcttatcttttttctccactgggatatatttttctcttgcccattttttatgctgaattttctaaactcctttataatgcttttgctggtcctgttggcacaacctactgacaaccctacaacaaccaagggcctagtctcccttctgttttaagcccatcaagcaagaacaaaagggatataaacacttcctgttccattggaacgtcgttaagaaaattagcctgattgtaaatattacctattgaatccgtccttatgtaactttgttaatcacacaaacagccacacatccatattcagaagctaaaaagagaaaacagcatatggctgacaaaaggcgtgtacccagtgcaagatttttcaaaga

SEQ ID NO: 471521 - DNA, 691 bp, Homo sapiens
ggagggacaaaaatgcaagccacaacacaaggagaggaccccagacaggcccacacctgccctgctggccttctactccctcttccccgagctttcccttcagccatagcactcaaagcccaaatccctcaaggaaggataaggaagctggcacttcaagaagttcattatctgccacccataataccagggcggtctgagttaggtatggataatgcagataacattgaatcccatgctgagaaagaaagaaaccaaaagggctcagagggtgaggcagtaggaacacaagcaacaattctactgcacacgattgccactgggttcacctcctgttacccacatttctgtgatactggctcaacactgaaattcctaggggaaagcttccaactggctgtggctgttagacacgaaccaggcttcatggagaaaagcctgattgcaggactggggtacaagatgggtcaagaatgcagctacccccacatgtgtgggacaccagacaaatagtttctgtaaactctctgtccatataaaatatttgattaaaaatgtattgcaaaattcatgagatcaggaaatgacttttattttattctccaatactttgcttgaagtttttaaaattatatttttaatttctaacaattctttttttgttgttttcaaaatgttccttatgtttagc

SEQ ID NO: 471522 - DNA, 528 bp, Homo sapiens
tccctgacctgctagtccagcgctagtctggattcctccagacttcttgtttggtcaaataacaagatgccatcattgtttaagccatgccaaaaagcgagagctgatcagtgtcaagaggataaaagccatcatcaaaagttacagaaagtcaaggaaatacaccaagaaaggcaggtcaaggtggaagcagggtcaccactaagtctgaggggagcagcttccaatgctcgcatagctaattttcttttccctcctccacaccccaagtttgcctatgagaagaacagaaaacaaagggtagaactaattgacaaagatccttcctgctctaacatctatgattcttttaattatatctgcccacaattcccagatgttcatagtctccccaaaagaagggatttttctcttgaaaccaagctagacagctacaaatatgttctaaatttcacaggccctgttccctatggaaacacttatgattaaacccaattcccaattcaaattaaaatttagcattagaga

SEQ ID NO: 471523 - DNA, 2602 bp, Homo sapiens
agaggggagagtccataatgaggaagccctctggggtgatttatttatgctgtcagccattggcagcttgcttcccactccaccccagtgcccttgagcatgaagctgtgccctactgcgtcctcctggagcaagcttggagtccccaccccccaggttttgatctgagcaccatcaatcacacacatacagaaaatccccccactgcccctctattttctatttatgttctcttcattactgtgcattacagtaaacagaattgtgcaaacggtgcttttagcaggaatatagttctgataagtgcttggatcaaggggaagacagacctccaaacatggctggggggctgtttggtggaagaaaggtttcaagtggagtcggggagcacagtcagggcttccaccgccagcaggtgaactagagtgccacctgccgggagtcttctaactgcactaagccctgcaccttccacaaggtccaagccccttccttcactttgttcctaatatccttgtccccattccccaccctgcagatcactacccatgcaagcattatcttcctagaagtagcttaaagggctttttcctggtcctttgaaactgtaacctctgcctcttctaattcattgccaaggagaaatcaacagttctgctgtcatagctctctgtgtgagatcagcgataataaagggaagaggaggcggcatctgggtgagaagacaaaagatgctgaaagactttccctctgaagaggaagagcattaccaccgctggggggcgggggattgaactatttttctccatgttgctgccttctgcaggcatgattgccaccctcaacgggatgttttagatttaggatttcctttcaagtgttactgtctgcctgcccccacgccccaccccccaggtatacacaaacggatgcttttgtttccccagatgcatgctcctgatttttgaaagcatgacttttattatattaaacaatattctcacattatagcagcagtaatgtcacaaggagaaccaactgtggagcatcaccaccttcgataaatctagaaactggatttgatttcttgagagtctagtgatgaggctctttttaataaaaaccttgccactgcttctgtccctgaccccctacgaagggccagagatgttgagtgacttcctccaggccacacagtggagtcatatggcactggccagggtgagaactgacagtaggcactgacccctgactctggcctttttcaatcagttgctttgctttatttctggttttattccagagaaaagagataggagagtccttttggtcaatgattgagcacaactcacatctctttgggtttcgagtaaaatggtccttgacttcccaaagctaattaaaatgtaaaactcttgctttatttcaaataactttagttcagacctaatttattgctaaggtggttctcagggaggtagagcattggaatagacaagtgtgtctcctttaaaagtcaagggtatgataaatgagaattttttttcccctgtgacaatttatcttcaagttccaggtggccctttgtgtaaaaggagggaaaatccatcccaaaacaaaacaaacctggtagagcattcaaatttgatgttgaaaaaaattgtttctgtgtgtctaaatgcccaaaattttgttctaaaaatgagcaggaacatatctgaatcagatataaaaatgggtgttaaatgtattttgtaagctttgactaaagaagtttcttccagctgtgtagtcttcgaatctgtggacgtgcctttctcaggagttgttgggttccactgtcaaaaccttttccagtaaaacatggatttggcaacagtaagtgtagcctttttggcctactttatatgcatcactgcatcttactaaaatgaggcattacactctacaaggacttgtactgaatgcatttcctttgtagtgaactcaatatgcttttgaaaagatattttacagaactgccacataaacaagaccttttctattatctgttttgaccctaaatactgaaaagtgtgtggagtaagataattttatgcttttctgaatcagtgccatagatccccaaacctaaaagatgtaggggaaaaattcgtcttggatgcaattgcctcctaatgtataccagagttcatttctgttcatgttcaagggacaagagtgaattctgtattcactttcaatgactaacccttctcatcctttccttcattcttctgaagaggaagaggtggacttcctgttgaagaccaaatcctctcctgccttctcaggaccccatgcttcctgtatatagatgtccctgcttttgtgaagttttctctgtcctcctaaattgggatctctttggaccatccctccctttgcatttagaacatagataggtatcgcctgctgacttgtcagtgtcagcccattagattaagatccagaagaggaggttagatacagcatacaggaggcagccaataaatatctgtgaataagttaataaatacttttcttttatatgacactgtttctacccattgtatttccccca

SEQ ID NO: 471524 - DNA, 529 bp, Homo sapiens
tttggatgcatgaattcttttttttattattatactttaagttctagggtacatgtgcacaatgtgtagctcatatagcaaaaggcaagaatcaatcggaaaattgcctgtcatgaactggggcttagtcaccttgactctagaaagaatcatctttacccgactctcaactttccttgctgcttttgttgtctcatatggaggtcctgggaagcatcattcagcaaaagtaattttagatgataacttcacaaacacttttgagtacagttatgtggaagacatcatgctagattctggggatatgaaaaggagtaaaattcagcacttacttcagagcaactcacagtgcaatgaggacgatagcaagtcaaggggtagatccccaactggaaggatcatggaagggcataggagagaccttcaatccagacataggccttaaaagcttggggggaatcagctttaccaataaagctgatttttaaaaagactctcatttttgtgtcttatttctattcgatctaaa

SEQ ID NO: 471525 - DNA, 1693 bp, Homo sapiens
ctgcttcacaggtagtaagctgatgagggggtggagccaagatggccgaataggaacagctccagtctacagctcccagtgtgagcgatgcagaagatgggtgatttccgcatttccaactgaggtaccgggttcatctcactggggagtgtcggaaagtgggtgcagtgcactgagcatgagccgaagcagggtgaggcattgcctcacccaggaagcacaggggtcagggaattccctttcctagtcaaagaaaggggtgacagacggcacctggaaaatcgggtcactcccaccctaatactgcgcttttccaacggtcttagcaaacagcacacgaggagattatatcccgcacttggcttagagggtcctacgcccatggagccgtgctttattgctagcacagcagtctgagatcaaactgcaaggtggcagcgaggctggaggaggggcgcccgccattgccgaggcttgagtaggtaaactaagtggcgggaagctcgaactgggtggagcccacctcagctcaaggaggcctgcctgcctctgtagactccacctctgggggcagggcatagccaaacaaaaagcagcagaatcctctgcagacttaaatgtccctgtctgacagctttgaagagagtagcggttctcccagcacacagctggagatctgcaaatggacagagtgcctcctcaagtgggtccctgacccccaagtagcctaactgggaggcaccctccagtaggggcagactgacacctcacacggccaggtcctcctctgagacaaaacttccagaggaacaaccaggcagcaacatttgctgttcaccaatatccgctgttctgcagcctctgctgctgacacccaggaaaacggtctggagtggacctccagcaaactccaacagacctgcagctgagggtcctgactattagaaggaaaactaacaaacagaaaggacatccacaccaaaaccccatctgtacgtcactatcatcaaagaccaaagatgatcaaactactccgagctaaaggaggaagttcgaacccatggcaaataaaactacatgacgaatgcacaagcctcagtagccgattcgatcaactggaagaaagggtatcagtgatggaagatcaaatgaatgaaatgaagcgagaagagaagtttagagaaaaaagaataaaaagaaacgagcaaagcctccaagaaatatgggactatgtgaaaagaccaaatctacgtctgattggtgtacctgaaagtgacggggtgaatggaaccaagttggaaaacactctgcaggatattatacaggagaactttcccaatctagcaaggcaggccaactttcaaattcaggaaatacagagaatgccacaaagatactcctcgagaagagcaactcagtttggaaaagatgtcagtactgtttaaattggttcttaggttcagcaaaatctctatgaaaatattagaaagctttctttttgaagttaacaggatgattctaaaatttatatggaaatgaaaagcagaaatgaaatcatcaagaagataaagaaagggggaggacatgcacgggcgggcattttttaaacttataaaactacaatgacgaggaaagcgtgacacagcactgactatactaataaatcaatgaaatagaagtaaatctgtattta

SEQ ID NO: 471526 - DNA, 583 bp, Homo sapiens
aaatgaacacattaagtggatgcattaaatgagcgatgaagacaataaatgccagaggcagggccgtcacttagggcaggtaggcatcctcttaaaccaagttcaggttttactgaataggcaatgggagtcaaaggtggtttttgagcaatgcagtgatgaaggagttaacagtgaagacataggggagatcatggagggtgggaaacaagagcaaagcccacaagaagaaaggagcgtggctgtacagggcaagaaggatgaggattcacactggggaggaagcagtggagatgaagaggagtggacagatatgggatctactttggaggtggagtcaacaggactagctgacgggttggaactacataagggaaagtctgcacacaggctgttaacgacggcaggaaagaaacttggtgcaaatgtggccaagcacgttacagacgctcctccgtatgcagcccaggggcttcacctggtttagccatttttctgatgctatattttccggctccctggcatctttagagttttgaatttggcagccttccctttgatggaaggaagctggaagtacctc

SEQ ID NO: 471527 - DNA, 741 bp, Homo sapiens
ggcacactgcttctcagggtgatgcggtgcctcacgctcggaagcgctgactggttgttgagttgttccatgatggacgtaactcttttggatgaacatgggaaacccttttggtgtttcagttccccggtgtgcctgagatcgcctgccacaccctctgacagctctagcttcttgggacagacatacaacgtggactacgttgatgcggaaggaagagtgcacgtggagctggtgtggatcagagagaccgaagaataccttattgtcaacctggtcctttatcttatgacctggccactttctctttggaggtatgtgtatgatagtgagcatgtgagagtgcagaataaagagcctgaagacagcaatcaagtgaagatgggggacagatattatgttcttgccccaaaaaatgagagagtaaaaggatttctgctgctgacaccgtcctccaccctcctgtcctccatgaccttgggccaaagtccttgggaagagaggaatttgaaatgcggtcagatgttatgggatcctggatcagaagatggcactaatggaaccacaggtgaaatgcgaaaagggctgtagtttatagcatgtcagcattcatttcctgactttaatatcaaaatgtgacgtcaccatttggtgagtctgaatgacgggcatatgggaaaactttgttatatttttgcaactgttttgtaaacctgaaattgtttcaaagtaaaaagttaa

SEQ ID NO: 471528 - DNA, 544 bp, Homo sapiens
gtggtgtaggcacccgagggaatctcctggtttgtgagttgggagggagttccctgaccccttgcacttccaaggtgaggtgacgtcccacgctgcttctgctcaccctccatgggctgcacccactgtctaaccagtcccaatgagatgaacccggtgcctcagttggaaatgcagaaatcacccaccttctgcattagtctcactgggagctgcagacctgagctgttcctatttggccatcttgtccggacatcagaatctgaatttccagcaggtccctggatggtgccactggccgtcaggcccagtgctgagaaccctggagtctcccatccgcctctcacagctcaggagtcaccagagaatctggaatcaaagcagaggaaaggtcaaaaggatgtccccgctttaggaaataactcttcatccacatatagggtgagaggagtgaggtggggcatagtcaggacaggggtcaggggagtggtggggagcccagtgagaaatggccctgagagagcctaaaccaggagaggcagac

SEQ ID NO: 471529 - DNA, 764 bp, Homo sapiens
ccgtcgagttaccctttgctaaaggaaccatttctgtattcagtacagatgccctttattgaggaatggcatacttagaaaccaagatctgggcaccagatgtgctcattgctattggggtagcaccgatcccaggccgtcttagtgatgtggtgctattgaaaatatgcgccgtgcttgtaaatcccagagagaggatgaagacgctgcaggaagctgtggagagtagaggagatgcagaggaaggcatgggcaacacggaagctcttgcaagtgcctcacagataggacacatgctgccagagaatgagggagaggagaggggagagcgaggaaacgtggaaaaagtccaaagggtggtcagtgtccaggccaccaaaccagctgtgccccctggcgggcagtcgcctctcaggatccatcttcccacggagaccccgtccttcctgagggccccgtttcccccgttgccagggagtggttctctggtccttgggaatgggcttgtttcacgtccctaaagtggcagtgttgagtccacagggaggcaagaactgaggttgctgcaggcccatacagattcgccatccatgacaatcatgtgggtagatacagatttttctctgactcagaccagagaaggcacttggttggcaaatcttttttccttagagtaatcagttaattatcatgataataatgtttatgtaaagtctggatttcctttgaaaagctgactttgcactcattctattaaagagtct

SEQ ID NO: 471530 - DNA, 593 bp, Homo sapiens
ccggcttttcttatccagaatgccaataatgtcacttacgtgtgttgatgagagggaaccctcactctgcccctgccccaaccgcaataaaaatcaaagccatgtggccctccctttgctcaagccattctgggcccacatgggagctggccctgctctaagtcccatggtcaccaccaccatacttgacagatcctgctggagagctgctgaccagggcgtcatctacaccctgactgaagtatccctggtcaaggacagcataacacaattggccggcttcagtcagaggcagagtttgtcctggccaacaccagccctatttgcacatttgcagagactcttgaagcattggcagtggtctggccttgtggtctcaccagtggcaacaacattactgtcttatccaaggttaccctctgtggggtaaggaacacttagaattcctcatctcacagagatacataaaatatgaatcaagatcttatgtgcctctgtatatgcaaaaaccacaacactaggcctcagaactccagactatgtggctctggttcagttcctctcaaggcatgccacggccgtgatcatagtac

SEQ ID NO: 471531 - DNA, 638 bp, Homo sapiens
cagaaacactgaagccacagctgtcagatgcctctgaaaccacaacaggctgattctgcacaaggcattcggcaaggcatcgtttcattcagtctcctccacaacacagcagttcaggactgcaaggtcattgatgtaagcagcagacctacaaattactcacccccaaaagtgcccgtgccacatagagcatctccatgttcaggaagcatgtgggcatcccagagggtgtatgggaaagccattaagaaaacaaactacttttcccaaggactccttcctgaagcaatgactgaatttgtatttgaatataacttgctttttccccagcaagagcatgatggcgttgtgtgtgtgcctgagagagagagaaagagagagagagagagcgcaccagttgaaagactatggaattcagaaatcatcaagtttcattatctgttgtcaagaggaacagcagctgtgaattctagagtgaatggctatgtgggccgtcccacagatttttgattattgacttcccttctaattgtcagcagcctttcagacagtttaggatgggtgtcatcttttctaactgtggctgtttttaaacagaaagacaaggggtatgtgtagtatgtctccctttcatgttt

SEQ ID NO: 471532 - DNA, 488 bp, Homo sapiens
gatgtctagcagagtgtcttgcatgcagccagtgagggctgcggagatgaaggtgactctgaagacgcgtcctttctgctgggagcagaagatgagtagggcagtcagtcaaggaagggtgtgtgggaggaccggagaggagatgaaggaggaagggagagcagacaatgtgggtattcagcaagcagcctttcatgtggtgattcagggactcaagcatcttctacctgtgtctcctcaagctctggggtcctctgttgattctgatgctttggatgcagatgagaaaaagagagagagagagagagaggaggatcactgtgggaggattttatgggtcagtcctaaaagaaaaaaccagtacttctgcctacagtctctgactggaactattacatggctacacctgcctgtaagggactgggacccacagacgagtcatgtgctcagtaggagaaggaaaatgatgttgtgaacacatcgaagtg

SEQ ID NO: 471533 - DNA, 701 bp, Homo sapiens
ttaatcaagacctgtggtcagcagttccttttacctggtacctcagggtcgtatgttcttaattaactaccctcagctttgcgggtacaagctccgaggagagaaaggaatgaagaagccaggctattgggtgattgcgggacaggggaggttcaggggaatgctggccctgggccattttctgctgcagagcggaggtcccagggatatcaggctagctggcactgcccaagggccacccacaccactgagaataggacgggtgatgatggtttcaaagtccaagaccctggttcccagtctgagatataagggagataaaggggaagcttgccgaattcacctcagtgtcaccaagtccagggatccccagaaagaaagaggcattgatgtggaaaatcctctatcctcttcttccagccacagctctgaaatggaggaagtttggaagcatgttggtcactggctgctgaggcctggacctccactttcactgttgatctcttcttttggtaacaaccagtcttttgcaaaatcaaatgagaggaggctgaaaaagagctgagcattgctggttccgtaagtgagaactttttatattgaaataataattctagttttaaaagacagagagagcaggaagattaagacatattaacatggtgatagaaagccaataaatcgtgctaatgctttccagt

SEQ ID NO: 471534 - DNA, 964 bp, Homo sapiens
tgcccacatattataatttagattgaaagggtcagttccttgaaatatgaaaactaccaaaactcacacgaggaaaaatagacaaccgaacatccctacctattcaaaattttctgcccttccttcctctaacacatattcaccggtacactgttatggagagataatggaagatgatggtgtcacaaggcgaggccttttggaagtgattaagtcagaaagctctaccctcatgaatgggttactgccttataaaagaggtggaaaggagtaccctagtgactttgtccttttcccttccacctcccgccatgtgaggatgcagcaagaaagtcctcagcagacacctgatctgaggcctggattttggacttctgagcctccagaattctacagtcaagttgctcagtatcattgtggaatccccagtccacctgtacttcagagccacgagacgtattcggaaactcttgtggaacattaaattattttattatgtatgtttaatatgtggatatatcttatttaatttttataaacttttattctttaattcaatgttaaaatttattattttatcatattttctaaaaatcatatttaggtatattttgtatattatttatataattacgttatgaatatattgaatgttttgtttgttttgtctttgcatagtattttctaacttattaatatagaaaattatattattatgttatgtaatttgaactattctggattacagaggaataataacttttttgcaagactgcattttccctctgtttctgcagtgtgctgctgattggtctgtgccaatctgtcactctgcatacctttgcatttatttttaagtggcattttgatgatatgtgtgactcatgcgatgctaatgatacttttcatattcaattcaattttgtcttatatactgtaccgacatagccacaaaattactagc

SEQ ID NO: 471535 - DNA, 715 bp, Homo sapiens
tctctgcaaccactgttttatttgcagtctctattactttgtctctttcaccggaatcaagccacgaatgatgtacgttcccttaaaaaactttcttctgattttggtgaaatctgtttgtgtcttctccaaaatttgtgatgtggccactccaaaatttgtgtttgtgtcccctccaaaatttcgttgcagagccgtgcggtcccctagccacgttttcaggcaaaatacctgtgtcagtgaacttcttccatccgtcacttggcaagagtctctgggaaagaccggacgggtggtgccccgcatgaggattgctgcagcagatcatgatggaaccctcgaaaatgaagaagaagagactgcacaatcagtaagtcaattagtcattgatacccacttgggatttccaagtttgagggaattgttcaggctaggatttcatcatgggacaacagttatcagctcaatagaaacagtatataaaagtattgaaacagctgcttaaagctagtggagcctcggttttgcaggctcaattaaggggcctaatgtaacctgttgtttcccataacccatggttcccagaagaaggcacactagacatagagctcttgtaacaagttgggagaaatcttaaataacataatgcacaagggcaacgggtcccagtaacatctctaacattatgggccttagttagggtggctttggtccc

SEQ ID NO: 471536 - DNA, 672 bp, Homo sapiens
cccctgaccatctgtgtggtaatgactactccgtgcatagccctcatccctagtcagctttgcgctagagcaatcacaattttgtgtcaagataaacatgtagatcaaagggacagaatagagtccagatatagaccagtccccatatggtcaactgattttcaacaaagattcgtaggctgtacagaaagcataacattagcatctgatcagcttctggtgaggcttcagggagcttttactcatagcagaaagcaaagtgggacccagtttgcagcagttggaaaaaggctttcatggggcagttactacagaaatccagagtttctagctcgctcacaaatgtatggaatcagatttcccttggccaaacagaaacttgtggtcacagtgcaagaaactggcctaagatctaaggaaatacagacacctacagaaaaagatgaaatgccagaacttggaacagatgtagcttgacacaagtaaaaagaagaactatgaagtttagctctcagttaattaagtaaaataaaaatatctccaaattccttgtcttaagtgaaaaacattgtgatttctctaaatgaaactaaagaagaacagtgtagcaatttaacttatgtagatctgaccaagacaatttacttcccatcatctgactggctttattaa

SEQ ID NO: 471537 - DNA, 793 bp, Homo sapiens
tctcttcacacggactcgagagcacacaacctatatccctgcatgcgcaattcacaatatggttcgagctctaggacaatctgttgccatccctgatcagacagaaggtggagctcaggcggtaatgctgcctcacctgctgctacctccctgtggagcccagttcctaacaggccatggaacagtactgccagtcaatccatgtccccagattgttcatgaccctctcctgaatcttctcatgaatctgctgatatgtccagcagaagtcgtgtttacatttggagcattgcatgtgattgcagcctccattcttctcaatgcagatgttgtattcgggacagtctttagtgtgagcactactgtagtcggctgtttcagagttgtctgcacacttcttgagccattttcggatggtgatgcggtctgtgggtgcgtgatatatttgatgacacttgaaacagaagacctcgttgcaccgattgcactatactcggtgagctctaggctcctgtacccgaacaaccatgaggcagtctgcaccagggcacagctggagctagtaatgactcttcacatagtccctgaagaggtagcacctgtatttctccctcaattcttcattgggaagcaatggaaacacaaagtcctctggtgtatggagtgggacagtcctgagccatgcaagcgactcccacacccacaccatccttaacgagaactgagcagtgctgctcccagcagctacggcaaaactggtgctgacagaccagggagagtaggtttttctttc

SEQ ID NO: 471538 - DNA, 1918 bp, Homo sapiens
gggtattttttcagactgagtcttaaaaacgcattagactttccatctgttgttactgcaatggaatgctaacgtagcagggcggcggcgggggaggtgaagtatgcaaatgtatgatttagacatacagaagaactttaaaatccactcccattgtctcagacaacagaacatatgtttaccagaagatcttgatcctaaacagattgctacagacacaaagatgaagggtgagggtatacatcctattagcagctccaagcagctgctagcatgtagcagagaatacagatgtcagtggcccagggcagatggctatcaggctctgctgaatgcgggctccagctccctttatcctggggcagctttcctagcacactggtcagcctgctccctaggctataagacactgtgggctggagttctgctaggtcctggcgttgtgacacttcggcatctaggtgaatgtggggagatatcaaggttccctgtcacttgcatgctgaattttagtgtctgtctctcttacaagctctattcatagtatggttacctgttcgctgtttggtccttatctgtggagaagattccctccattctgtcaacatcaaaatatactcaagtagagtatttaggcttattggtgaacttagagtaaaatttatgtattattttttattcatagaattgaaacaacagtatggttacttttctttatttatacttcaatgggataagattatatttttacaaaatgagttgaatatacaattattaaactgatacatttgcatattaatgtcctattttagcaataaaaaaattaccagtctgatatcttattgtttagggttaaaaattaaattagtgaaaaaatactagaaataatgttatagaactggatataaaactgttggttaaaaattatatctacatctttaaagctgaaacaagcctgataacaaaagttgatgtattttaatgttttaattgattggaaaacttgctaaataattgtgcaaattttctagattttaggatatataattttttagattataacaaattatgaggttttccttcagcataaatataaggagtgtgcggaaatgtgggtaaataatagaataggtcatctttatatcacttagttatgggtttaataagggaaatattttgttctttcttgcttttgtgccttgttttgattaagtgctattgtttttctgcattgttcaagttcatgtaaaaagtagaataaactcattctgagagaaatattccatttttctaaaacttcccacatatgtgcattactgtttttctcaaagagacttcgaatgaacaaactttatattatgagaaagtttgaagttgacttcagcgtaacagtgttttgtcttaagcatcagattcactgtattcaccaatagcgggaaagttacaaccgagtccaattttcaaagctcagcaagaatgtgctacttcagaaactaaaaattaaaaaaaaaaatgtaattttaattttaaaaagtacaaatttgtttagagtaagtagaggacatcaatcatttatttacttatttgacaatcatatttgagaaaactgggcatctgcttggcaatgaaaatttaaagacaagacaatgtttatatcttagaggagagtatgtggcaccattagcaatggagtttcctcaaataatattataaaggctttatggcaagtattttctatagggtattacatggaaattcaagaatggctaaatttattagagacaataaacctaaattttcataaaatgtcatttgtcaaccagaaactcgttatttggctccttttaccaatgatgctgtaatggcttttgttcataaataataccttaagaagttactttaggaaataacagaattc

SEQ ID NO: 471539 - DNA, 495 bp, Homo sapiens
agcattgatggttcaacttgaatgatgagtagggcaaggtttgcagagtgtggacgaagggtgctcctggatgtaggaatagcatttagtgaatttctgaactcgaaaagagcactgagatttttaaaatctgaagaagacaggaagacgtgggaaagtttggaacttcctagagacttgttgaatggctgtgaccaaaatgttgatggtgatatggacaataacatccaggctgaggtggtctcatatggagatgaggaacttgttgggaactggagtaaaggtcactcttgttgtgttttagcaaagagactggcagcattttgcacctcctgccctagagatctgtggaactttgaacttgagagagatgatttaagggatttgcataagtagcgaagagccaaatgttaattcctaagacaatggtgaaaatgtctccagggcttgtcagagaccttcatggcagccctcccatctcaggcctagatgcct

SEQ ID NO: 471540 - DNA, 1268 bp, Homo sapiens
agggtgatgtttatgattaagaagacctgtttaaacatggttatacctattaaatataagttggtgctgctgctgtttttgtttctctgggaaagctatcttgcttatgtgtggaagcccaaggatatagcagacacgatccctattattaagcagcttagagagacaagccctacaccacagatggataatataacaatgcacgatagcagtgacaagacatttagcagcacccctggcctctacttttttgatgccattgcacctcgtccccattatgacaataaaaatgtctccagacattgtcaactgtcctttaggggggaaattatccctgatgaagagccactgatccagaaccatcttagactgggaggtcctcttgggaaagagggaaaaagcctgggtcctcaactacttggtggggcaccagccacagacagcctgcctccagattttccaaataggagaaagaaattacccactattactttgagtctatgctagttgcagtcatacttaattctaattggttaaattgtctgtattttgaaatacaaaataaagctcaatagaatttattcggcagccataacaaatgaaatcatgtcctttgcagcaatatggatggaattggagggcagtatccttagtgaactaactcaggaaatcaaataccacgtgttttcactcataagtgggagataaacaatgggtaaacatgaacacaaagatagaaataatagacagtggggactcctgaaggggggaggttgggaggagggcgagggttgaaaaattacccattgagtacaatgttcactatttgggtaaagggtacagtagaagcccaatccccacaaatacaaaatatactcatgtaacaaacatgcacatgtaccccctgagtctaaaatattataaaataaaaaatggattgcattactattaaaatagtaaagcattggaattaacttgaatcagtaatagaacacttaaatgaactaccatatatatccataggatgaaattatatttgctgaaaaaggaatgacaaatatctctattttcaattagcacatgtatgtatgtttgtttgtatgtatgtatttaggtatataagtattgattcatggttttctatattatttgagaggacatattactgttattatttattttcatgctcaaactgtcccaaatttagccagtggaagttctttcaaactgacttctgtgtctttttcagttttccccgatcattcttc

SEQ ID NO: 471541 - DNA, 484 bp, Homo sapiens
cccagttgtctgcaaagagataggggacagaaacttacatgtacctaggacgaagatggctctttctgtacctttgtcccttcccttcatctgcactgcccaccttctgtgcccttttgcatgctcacacatccttctgtatgatcaacggacttgggcacgctgcacactccttggcttatgaaactttcacactgtcagcagagggcgccagagaccctccaaaagccacggaatgctccatttgctctgactgccagcaccctgccactgccaccactggtgcaagtgtaagcatggacactggcaaccctgctcccacctgcaccctgccacaggtacaagtgcacacaggaatgcagcagctcgacttctgctggtaccccaaccccaccaaggcataagcaccctgcggcgctgccacaggtgccagaacaccaggttcccaatctcacggggccagataacaaagctggggtcctgg

SEQ ID NO: 471542 - DNA, 510 bp, Homo sapiens
atcaacccatcatctaggttttaaaacttccaacgttacgatgaacagaagtcgagagaactccctcaactggatgtctattactgcatttcatacctatgacctctgggacaaacctctgaaaggtttttctgggtcttcaccttctaatggggacttttctcctttcttgacagatatcattcttaaaatgagccagagggatgccagtggcaagtttggagatgtggaaaagggacacaggcgtatttgtggaggactgacgtctcagaagtctgactctgcaaactacaattcccaggagcccctggccattggccttcagctagagagtggaaggagggaggaagaggaaattcagggcatcttcccccttctctgtgctttgagtggcatcttgggtggactggagctctttccctctggcagcctctccctccatggtccagctcccactcttctgccccagcagctgtgttccagcagaggtttcgcctactttctttgatc

SEQ ID NO: 471543 - DNA, 4226 bp, Homo sapiens
ccgaggccgaggaggcacccagagcgggcgagggctgccacacgctgtcacctctcagtagtatgtcccaagctggtgtccaggttcttgacaccatcacaagaaagaattcagggacaaatcggaatgaggcaaaagacaagaagattttcttgcgaagtgaaggcacccacttgagagagaagtgtgggtgtgttccagaaaatgacctaacattcttggatcctccttctgaaataaaaggagaaagtattcctcatgggactgtaaattacatcaactcactacctgctgtcctttcactgttcacacaggtagagctgggtcctttagccctaaatcagtttgaaaaacaaacagtctttcataaggctacatctctagaaggggaggattcagggtacagaccaaatgccttggccaaaatgtcttggctagaggcaatgagacagaaaatttcggtcacaaagaaaatgacttgcccagaagtaaaggagagtgggaatacccacatcaatctagacagatttctctaggaaggaatatattttaagataagttaagcagaataataaaagatcttatctggttaccagtgcattgaaactattccaattggaaccatatagacaaggacaatgcatcactttagaaagcacatagaatctgacagaattaaaaataaatatagttaaatttgggaaagagtagtgtaacagaaaaaacatcatcgactggatcactaaaaccaaattctggatctttgaaaagactacaaaattgttaaaaagaaaaacttaagtctcatcaataagagaaaacaaaatatatcaatagtattaccaataatatcctttaactgcacataaagaggggatttaccgtattaaaaatatataaaacatatataacaatacatttgaaaaccataccaaaactgactcaaaaattttgtaaacctaagaaaacattttacgtagataggcaaagcctgacaaggtatacttctaagaaagaatgaatccaaatgattttgcggatttttcaaaaccattaaggaaaagccatgttctgaattagagaacagaaaaagagggagggcttctcagttgattttaaaacctagcattgtctgtgtcctaaaataaactaatgagaaggacaaaaaatatatagtatatgaacactgatgcaaacacacgtgcacacacacacactatttttaaatagaacaaagggatatattttaaaataaacaaagggatatataaagagcttaatgtaagctcttaaaaattaagaatggaaaaaaaactttttaacctgataaatagtagttaccagaaacctataaaaacatcatttttatcattttcaatgttaaaatgattaaatgagatacattttaatgtatcttattaaaaacatcagacacaagatattttggcaaccattactaatattcagtaattttagtgaagtaaagatgcttgccaaagcaataacacaagaaaaagtaatgtggaaaactatatagaagataaaagctatgctaatttagatgctaagaattcctacttaaatacacatggcaagaaacaagatcaacatagaaaagcaagctttttatagcacaataattagacaattcagttcaaagaataaaaacaaggaccccattcagggaaaaataaaaccataaagcatccagaaaataacctaacaaatgccaacctacttgatgactattttaaaagtttactacagaacaaagtaataaagataataaggtatttgtagccaatactaccaaacagttttccaaagtggtggtataaatttagactccctccattccagtaatatatgagagggccagtttctctcctgtacttaatattgccttcatggttttaattttcatgtctttaatgagagattgaaacgtttttcaactttcatggaactgacttttctacatggtataagataggactcaatattttctaccaaacatatatttttatggttcagaaccatttatttaatagaccatcttttctcaactacattgcagtgtctcctttcctataaatagttcaccacacatgtgagtctgtttttggactctattctgttttactaatctacttgtttatctttgaatgaatttcagtttgttttaattgtaatacctttatagtaggtctccagatttagtagtgtaagtctaccaactttattcttcttaaagactgtccttactcatttggacttttttagtttttatatattttttaaaattagattgtccatttcaaaaaagcatgctttttgtaatctaactggggttacatttgatttaataataaattcaaagaaaattaatatatttaatacattgagtcttacaatatatttattttgttcctgatttctctaggtaatgtttcatagatttctgtctacaggcatttataaaaatatattctattgatttattcctagttatttaatacttttatgctattttaaataatatgtttttctattttatttttagttgtttcttgctttgtacagaaatactattgaccttgcatctaatggccttgctaaattgacttattggtcctaatagtttattggtagaatattttgggttttatacataacaattatgagttttaagtcttcctatccaattctcatactatttatttttatttatttatttatttatttatttatttatttatttattttatctgctttatgcaatgacaaatctccaaaataatgttgaattgaagtggttatattggcaatcttgttctgtttttgagttcaagaggaaagctttcagtatttcattattacgtttgataatgaaatatcaaatgccattgagaattttcatgggtattctttagaattttcatgggtattctttatcagattagaaaagttctatttatttactggttactttccaagagttttaatcataagcaaatataacattttattaaatgccttttctgaattgaattaatcatctgatttttcttctttattcagttaacggagcattacagtaattgattttcaaatattaagccaaacttttgttactagggctaacccatcttcattgttattatcatttttatacataccagattcaattgatttactaatcttttccttggaatttttgtgtctatgtttataagaaaaattgccatgtaatttttgttggtatcagtgttgtgccaaactcacaaaatgagttgaggagttcagcctatggaggatttatgtaagtttgttgttatttattctttaaataattgaaaagattaactgcttatgtcctttgtgccaggagattttcattatgggaaagtttttaataatgaaatcagtgtctttaatagataataggactgctcaaattttttttatttctttatgtttttgttttgttagactgtgattttcaatgattttcccaattcacctaaattttcaaatttatgggttaaatgttcatgtttatcgcagcattctagccaagtcatgagtaattttttacttgacagaaatacaatagcagtgtctaaaatcataaatggattcagtaacctagtacagattaatgacagaagtccaataaatcatttttttgccttgcttaaatatgcaagcctaatgccttcccatgtcactgacacaacaataatgaatcaatgtggtgtcaccatcaaaacaaataagaaaaattttagctaaaaatcagatacaaagttttttttcttcttatgctacattatttggggaatagcagaataagagttgaaaatgatgtaatgtggcatattttcagatatagtacataatcataggttcagtgataaaggacagaaattttagtatttcagtgtacagtgagtattttttttaacttttattttagtttcagaagatcatgtataggattgttatatatgtaaattgcatgtcaggggggttagtgtacagattactcaatcatgcagaataattgtggttggttaaatgtgtgtcattgatgtgtctaagagaatttagtcaatttaacttttaaaaaacatcaaaactgttaaggtgttgaagtattgatggaattatttatgttataacttgttatttatttttaatcctttccaagcagtcattgtcag

SEQ ID NO: 471544 - DNA, 2435 bp, Homo sapiens
agaccggagctgttcctattcggccatcttggctcctccccggaaactgcaacttttaaactgtcagatcttaatgtgcactgaatatttctttgaccttttatatttcccttggtggtatatattcaagcctccggcacccagtcaaaactccccacctattacctcttattcccactccataaaaaagggaagcaaatacccgtctatgttcagtgaatatgagctgcatctttggtggtataatgtgggaggtgagggtgttatatcctcacagacagctgtttcatacttagataaatgttatatctgtcaaacgtgtcggcaggataaagagaaagacctggaaaatgatgggttatggcctctcaaagaaaatggagccagatgtgagaaagaacactgtagggagatccagtcatctctgctcatggactctcctgggccagtcaaggaattgctttgtagcacaaaggtatgaagttgatttgacagcgaaatactaccctgttgatctaattgatctgacagttcctcttctttctctatatgaagctacaaggatggctgaagagggaagatttcccagacaaaaagaatcattactttagccttggggagctgagcaaccaaaatgtcactgaagcattttcatgtaactcctgccgacgtccatgtcctttttaaagtatccagagtttatgaggaagagtccacagctctggaggaacacctggagagcaagagggagccaatgagaacacatacaactcacttacaaattacatacacggtcatttcctgtaaacacagaaagtatagtaatcattcaattgttttgaaaaagaacaaattggaggagtcatctattgagattttgaacataatgtatatgcttgggacaattcatttgataaagcttaatagaaagttatgtatcacaataacatcataattgcagattctaatttaattatgtgattgtacatatttatttactctaggttctatagcaaatacacagtaattaaacagcatagtaaactaacaggctaaagttggggaggataacaagaaattcgtgaagcctcttgcacagtaaaagaatattaaaaaggtcaattacaagcttagggaagcagagtctattccgatttaaaagataattacagtcagctcattgcctttttctgtcataccagacattcctttcaagagtgtcaagtgaaggagaaagttacaggaggagattttcaggttcgagtatcttcatagcttagaaagcaaccaccaagcccctaatgatttccacaaaattccctttgtgtaaatagagtcatttgaggattaagtaatctgcagctcagacctttgtcctatcctcctgtgcttcttttagccttcgggtcctcataatacatttctggtcctaaactcacaagcttttgagtatctattgttttcctaatataagcttaatagcttttttcagtataatgattatcaatgtaaagggtaattaactccaagaaattaccattttttaaagacttggactctatagcaacagtacaggtatactaaacagtattttgcatcctattaagctaaatactatatttaattttaaaatacatgcccacaagtatgccgggctttgaagagaactcaaatacaagacataagaataccaaaaaataaaaaataaatagaaaatcacagataatttagaataatagaaatggtactcatattatacagaaaaatgtttcactatattctttgattttcagtttctttaaattataagctagtctatggcatttaaaatatggtttacttttcaaacttcaaaatatacacagtataataatgaaactgttgccctttcccttcctcatgtgtttattaagtattcctttcaaggtatacttttgccttgtagcagttaatatttgtattaggaacacgacttcactgagaaactaaaataatgatatttttataattatatcccccatatttatcataattataattatgttaaagagttaatttctatgtgttctcctattaatatgtaacagacaatttacaaacactgtagagctttggggaatatgtttggagaaaatgcttaattaggcaatggtgtgaattttgacatctttcttcatggttcagagaataatctcttgctgacacatatcttcaagagtttgatgaacagaaagtcttatttttccaatatgaaaaacagtattacaggatcacaatatggtgagaaatgaaaaaaatgtgttttattttttaataaatgacatattgctaagtaagccaaaattatctaatagcattgaaaaacaaaatttgcaataaaatataccattcacaaaatgtgatagatatgtgatagataaaactgactctaaaat

SEQ ID NO: 471545 - DNA, 2216 bp, Homo sapiens
aagacttgcaaccaggtagatatcaagcatgaaaagaggcagagaaagcagtttcagagaaggaattaatggggaaatggcgattgctttaatagaaacagaggggaagggagaagattcagagataagagaaaagagatcttggattcaagaagccttatgcctcttggctaaaaagagtttgaaaatcctgactcggcccattgaatgggaaggaggagaaaatcctgagggacacagccctttgcccacagacccacccaccatggggaagggtccagcctcaggagggcctggccaaggacttccaaaaggggcttcctcttacccaggtctaagagcaaccctgacaatcacaagaccatttctgctctttcagtgttactttaaagatctgcgtgcctggggccttgggcttgatgaagctgagagaaacgggaaagcaagctttgctgttactgtgtgagctttgggatcccacatgacaacaagcaggtgtatagctaataatggctaacaggaaacctctaagactttagaactcctgctaccaacattctgctgattacctccaccaggacaatcaggtcaaagccaataaaatttagctcctattaattgaggactactctgacatttcaatggaaagattttagattccctgtatcttttcttgctccaaatcccaaatcctgctgaagacacattcctcagcctcttttttttttctatgtctgttgataaaggaattttaaaataaagcaagggaatttgagacatttgagatctgtttcaaagaaaatgaattttttaaggagtaatacaaatgtaactcaaactgctacttgcggtcttgatactattgcctaaaggttttggccaggaagaaattgtttttaaaatgacttaggataagaaataagatttgctactatgactttttccttttcataattttatttattcaaatattaacatgcatatccttcactctttacctactccctccctttttctatccccttcaatacacacatatgcatacccacaccaataaaccaagagctgatgagaattgtaatagctccattttgtttaaacactatatttaactattaataaataataagcttagcaaatacatatttttggtacaaatcatgtaataaataattatacttctaaagtaataaatgcccagctaaaattaacttatttttattaaaatattaaaattttattccagtgtagctcctagaaattctgtattaaaacacaaaattcagtggtctggattttatgtagacaagcaacacagaaggtaaagtaaaaagggaagtctgccagtaccttccttagagaaaattcctctcagtttctcccagagcacacatgtattttatgacaaattggcctccttcactttgaggccagggttttattcagcagcaaagttcactgttaactttacatgaaggttaaattaaagattgtaaaccaacaagagttttcaatatcacacttaaaattacgtaaatagtggtcagtagcaccaataccttcgcgaaatacaagttccctttgctaaactgcttatgtgatagaaaattatgaatgacctatctcttggcaaaatcgaagttagtttatttggtggaagttacatttagcatgggtaactgagattataccagaaacagagcatcagaggaatacaactctgtatgcaaaattatgagatatgtttttgttttcctagaaaaatgagagcagtgttgacctaaatgaaagtgtcagcttgttctaaactataaaacatcacagagaagaacaaaatttaagtttgtctagcaagttgtagacattttgagggaagtgaactttatttaccttggtttataatatccaagtctgaaaataatgaattatgttaaaattttgaaaaagtttgcacagccttaatggacttattcttgttaatttgtaaagaagcttgagaacactttactgccagctagaaattaacacaaacaagtattcatgcaaactagaaagtcagtttctgtctgttgaaatgacaactgatcttaaaatatttagtctgaacaatgggtaataaatgattattcttcacttctgtgtaacctgtccaaatagtattccatacagcagattaattttctgtgctttgtgttgctttacaatgtctttgatta

SEQ ID NO: 471546 - DNA, 845 bp, Homo sapiens
cgcggctctcgcgcgaatcctatccatttcctccagaagatgtccaacagtcaccagtctggcagcagggtggggcttccactgcagccatgtcactcctcttgctggtggtctcagcccttcacatcctcattcttatactgcttttcgtggccactttggacaagtcctggtggactctccctgggaaagagtccctgaatctctggtacgactgcacgtggaacaacgacaccaaaacatgggcctgcagtaatgtcagcgagaatggctggctgaaggcggtgcaggtcctcatggtgctctccctcattctctgctgtctctccttcatcctgttcatgttccagctctacaccatgcgacgaggaggtctcttctatgccaccggcctctgccagctttgcaccagcgtggcggtgtttactggcgccttgatctatgccattcacgccgaggagatcctggagaagcacccgcgagggggcagcttcggatactgcttcgccctggcctgggtggccttccccctcgccctggtcagcggcatcatctacatccacctacggaagcgggagctgcgcacgcttgacctctcctgaacctaacatggtccccaccgccagctgctcagccctcagaatgcccatctcccagcccccaaccccttcctcccgaggacacaggagccgggaccccaggcaccttttccctcccacagacccaagagcctgggccttccccgctcaaggcccaagagacctcttccccaaattccattatatcactctgtgtatcttcgcaccctcatagcttacttagcttccacttataaagtgagaata

SEQ ID NO: 471547 - DNA, 870 bp, Homo sapiens
ccactcagcttctccgagctcacaccccggagatcacctgaggacccgagccattgatggactcggacgagaccgggttcgagcactcagggctgtgggtttctgtgctggctggtcttctgctgggagcctgccaggcacaccccatccctgactccagtcctctcctgcaattcgggggccaagtccggcagcggtacctctacacagatgatgcccagcagacagaagcccacctggagatcagggaggatgggacggtggggggcgctgctgaccagagccccgaaagtctcctgcagctgaaagccttgaagccgggagttattcaaatcttgggagtcaagacatccaggttcctgtgccagcggccagatggggccctgtatggatcgctccactttgaccctgaggcctgcagcttccgggagctgcttcttgaggacggatacaatgtttaccagtccgaagcccacggcctcccgctgcacctgccagggaacaagtccccacaccgggaccctgcaccccgaggaccagctcgcttcctgccactaccaggcctgccccccgcacccccggagccacccggaatcctggccccccagccccccgatgtgggctcctcggaccctctgagcatggtgggaccttcccagggccgaagccccagctacgcttcctgaagccagaggctgtttactatgacatctcctctttatttattaggttatttatcttatttatttttttatttttcttacttgagataataaagagttccagaggaggataagaatgagcatgtgtgagtgtctgagggaagacatggcagctgttttgtcttccttggcccggacaaccccctct

SEQ ID NO: 471548 - DNA, 1110 bp, Homo sapiens
acactgtgtttatcagcttctcctgcatttagaatgggggcatggcctctggacattgccatcccccttcacctctgcacctgcctaattgtcattaaactatcgggacccagcctggttgttgtcccttgtcccttcctagaaattcaggggatacgtgtgcaggtttgtgacatagatatattgcatgatgctgagatttgggcttcaatggatgccgtcacccaaatagtgaacatagcaccccacaggaagaagattattactgctggatgcatcgatcatgttttgtctgtatctgatagccagcagatgcaagcaaacctaacccaaagaacagaagcagaaatcagaaagcagacacagattgccccaacatttcctgctcattctctgccaggtattgctcttactatccctgaatactgcactattatctatagtttccagtttcctctaactacccaatttgagcgtgcacccgtaatagatgatgcttaataaccattaagatgatgtcagatagaaaagcacaatttaccaacaagtaaatttacaaatgtcatgtttggttaagagaacatccacgtattataatgtaattagcagatatctctcatattaaagcattataactcgacatattctgtgttcataactagttcatcaaatttgtggattacacttgaaagagcaatgacttaattttttattttttgaaaagatttttgcaaaagcaatgattttaattctgaatttgttgtgtatatttcatttattactgacgattttgctatttgctcgtgtttattcattccacaagtttgtttttcagctaaattgtcctggctgccattgtggcttgaaattaaaacgtttttccttaggcacatcttatttaagaaatagtcataatggaccagcacaatggttcacaagctttgttgcatattagaatcaccagctgagtttttaaaaacccagatcccttccacttctgggtatatatacaaaataattgaaagcagagactcaaacaaatatttgtaaacccatgttcatggtagcattattcataatagccaaaaggtggaaagaacccacatgtcc

SEQ ID NO: 471549 - DNA, 627 bp, Homo sapiens
aaggtttatgattatggcttaaaaatgagttgtgggggcgggaagtaccagcgacttccgtgtgcatgttcatgttggtggtggccgtggcatgggccaggggtcaaggacactggcatctttgcatgcatttgcactggcagctgtgtcagcacaggggcggggcactggtgggaatgtgtttagacaagggaagccaccatcaatcaagcttcctgtggatcacgacagcttggtggatgcccggactcagcaagaatgcctggaactcatgcacatcatagctcagtgcattgccggtttgtggctgaagcctgtattaccagggtctttagtaccagactctggtacctccatccctgctccacatccatacctcaccttccaccctgtgtcccgtgtttctgctgatgctctatactgccactgtccttactcagtgaacttacaccaggagcaagacatgttggatgaattcttctgctctctcatcttgctcacaagccatggttcagagatgcagtaattttttttcaggctctctgaagacatccatttaggttggaaattttaatgtttcatgaaacttggtcatacattttcatgtattctctttcttccttgatt

SEQ ID NO: 471550 - DNA, 808 bp, Homo sapiens
gtagtcccagtgagatgaaccgggtacctcagttggaagtgcagaaatcacctgccttctgcattggtcttgctgggaactgcagactggagctgctcctattcggccatcttgcctgccttcataggaaaatagctatgaaagagcagaaacagacaaatagtgttcaagcctttatttgttcttggaagaaaatgaatgttttaatttttatacaatgcacacacctttactgtgtccttgaatgtaaaatgcaatgtaatatcacacagggtaacttttatttttctgggtactgcctgcaaagcaaggcaaaattgtttgggaagaaaaagaaaatctttgaagaacatttttataaagtaaaaagaacttcattcttaataattccgatcgaatgcatctccaaagagaaaacgatcagtgcagttgaatgtcctgtcatattccgacagaaacttatttctcctgggtggatttcagctcttcctgtggagctcttgggcagtggcagtttttaggcaccattccttgtcttaatactttgctgctaaaataggaaggggaacaccacactctagggactgttgtggggtagggggaggggggagggatagaattaggagatatacctaatgctaaatgacgagttaatgggtgccgcacaccagcatggcacatgtatacatatgtaactaacctgcacattgtgcacatgtaccctaaaacttaaagtataataataataataaaaaaacttgattgttcttaaagtattggtcatatacagtatacaacatattccaga

SEQ ID NO: 471551 - DNA, 1412 bp, Homo sapiens
gactcaacttggactggaatctacaccattggttgtcctgtttctgaagccttcgggctctcaacccctcgcagggtggggagcatgcaggtgagcgggttcaggggctgagatgaatgctctgggcactggcagaagcataactccatgcaatcctgcggcagcgtctaggggggtgcccgtgaccctccagagcccgagaggacatgtgctaacagtgcactattttagcttcgctgtccatggatggcttatgtgtttaacagctcagtgtgacagccctctgtatcctgagcccttgctcagaatccaggaagaatcaggtcacacgaatgaattgaagatggtaaatgtgggggattttattgccaatgaaagtggttttcagcacgacggagagctgaaaaggaaatggaatgggaaggtggcaggagtttggctgccccaaccagactctctccgaggtcccaccatcaagctttttgtcgtggaacaaatagcctttgtgtcttttttctttttggcccagaattaggtaatttcattttttatgtgtgctcaagtattcatccccctcaagcaattacttcacaagtgctatgtcagcacaaagtaattacatacttttacagattacttgataattatttctgacatcactaagtactttcaaatataaatgtgcaatgttgctagaattcaggatgacaaaccatttaaataggtatctgaaagagaataaacccacattggaaagcatttgtattctattttcttaatttgcacgtgaaaagggaataagtgcatgtgtagctaataggatttattgaacataaaatgattgttcacaaaaaaaatagtgctaaattctgatgatacattggggaacaaaagaaaacttggtttctgttcttttttatttttttgtcagcccgttggcataaagattggtcaaatactcacacaaatagattattaaagttgcaactttgttaagaaatacaaatgagtgatacatagtgccaaaatattacattgaaatttaacctagtctatgttgagggaaaaggcagaatattaactacttattcaatacttgaaggatgaagaagatataaatttgcaagtaaattccaggcaaagacttcaattttggagaaaatgcaagaaatatatatggcaggctcacagaaaggaaggcagtgtctgacacaagatgtgagagacacgttcccattgtggaccatatcaaatattacactggtgcaaagaagatttggggggcatatttttatggttttaagcatgctagaaatatgatcaccagttggaggtgcaatggctcatgcctgtaatctcaacactctgggagtctgagctatgctagaagaacagaagccacggtaagaaac

SEQ ID NO: 471552 - DNA, 883 bp, Homo sapiens
agtgttcagctcgattaggacgaacctgggcacttagccatgcaggaacaatggcaagccgctagcccgatcaggagtggcaatgggcgcctcactggatcaggagcacagcggacaccctgccggttctggagggatggaagtcagcggcagatacctaattatattactagtagatgctatgatgaagccatgtctacttttgtaggaaattaccaaccacctgcagcgtggctgtaccagtttgcattctcactaacaaagaattataatggagcttttattgtccctgaagaccttccagtgacacaaaacgtggaggtggaagacagtgatattgatgatcttgaccccggaaaaactgtcaagaccagtgaacacctagtgttacttgcaccaagaatagtaaccacggctcttgcagaacttgaagaaatcttcctgattgatgaaaaaccagtgttgtatttgggtaagctggtgacaatgactccaaagatcatccagaaccttcacaccaaggagggattggctaaccatggactgaaagaaggggacaactggatgaggagctggtaaagccagaaaatctcagaatcaagcacatagatctcaagcctttcaatgatacttactaagtaagactttatggctttcaatgaagagatatccagttgtcccagaaccatttgttgaaaagatgttgttcattattaaatgattgagcatccttgtccaaaatcagttgaccaatataggggtttatttggggactcttaattccattccattaatctttatgttttttcttatgccaatatcacacagtcttgatttttgtaactttgttattcatcacaacgaagattttcacttaatagca

SEQ ID NO: 471553 - DNA, 1333 bp, Homo sapiens
atgtacagactttctttgccatgttagacaacccagacctttgcaagcattgcacaactgaaccagcccttttagcaatcatatcaggcaggcccaaagataataataccccaaaattagagaagcaacttccaggagaaccatctgaggatccctcttatctggggccccttcgtgatcccttgtcaatacagcaccttagacaaataaagggagacttaggccaattttctaatgaccctgataggaatatagctttccaaaatttaactcacgtatttgacctctcatggagggatgttgtgctgctcctaagccaaaccctaacagcagctgagaagcaggcagctctgcaggcagcggatcaagcttttggcttctctctacctatgcacactggcaaaatggataataccgctacccatacgattgaatggtcgaaatccaaaacactggcaataccaaatgctgacaaggatgtggagcaacaggaactgcaggtaggaatgtgaaatggtaccgctactttggaagtcattttggcagtttcttataaagctaaacatactcttaccacatgatccagcaacaacactccttgatatttacccaaatgcactgaaaacatatgtccatgcaaaaacctgcacacgagtgtttatagcagcttttttcagaactgccaaaacttgcgaatactgatacactcatatcttgtgtaacatcttgctgtaagaacttgaaaactttccccctctgggttaaggattcttctttcattatttctgcatgggttgttccatggacaatgttttatagatgctcatcacctcaagttcattgttgttaagccctaagtatttcttgcagtttcattttttctgaatattaagtctttgtttgcaatatgtaatgaatttcgttggttattcagggccttttgtggttccatatgaattttagaacctgaaaccacagaactcctagaagataatgtaggaaaaaaaaattctttgacatttgccttggaaataactttttggatatcataccaaaatcgcaggctacaaaaccaaaaataagtaaatggtattgaatcaagttgtaaataacattttatagaagttggtcaaagcacaagaccttttaaaatttttattgtaattgacgaattattgctctgtatatttattgggtacaaaatggtgttttaattttttatacaatgtggaatgattaaatcaagatagttaacatatccatcacctcaaatgtttaccttttcgtgatgatgacattggaaacactgtctttagcactgttgaaatgtgac

SEQ ID NO: 471554 - DNA, 1842 bp, Homo sapiens
agatttccatctccgtttcttgccatcaagctgactgtcatctcactgttctcagattgagtccatgatgaaacataaaagcatgaaatcactacctgtaggtaactctggttgtgcgagaaggagaagaggggttggtgtggttagaagagatgaaagactagcagaaataaaaagtcagggggctgccctcctgggcgcagctgcagctgcccaaaccgtggctgcagactcaggcatccctgctaggggagagcccaggaagaccccgtccccttgcaggctcggctgctggaggcagacaggctcctgggctaaggagataggtcccgataagtcccgaccttcagctcagggagggcctgaaggctccgggccaggctgccagtcccctggaccagagtggggacttgtggtgccttttctagcccacccatggctgcccatggaccagtcgccagacacttcctcctctctgggtccataaaatagtcctggactcatctagaacaggaaagcagatggacaggtgataggacaaccagctgcagagaggagctacccaccctggtacatcttctctgctgagcgtttcagatgtggaaatgacctgcctgcagggaggagctacccactccatggcctccttgctgctaagagctgaatattcaatgggacagcctgcttacagacagaagctacccaccgggggtcttttctgagctgttctaacactcagtaaagcccctctgtgtcttgctcacccttcacttgtctgcatacctcattcttcctggacacaggacaagaactcgggcaaagcaaagatcccttctgttctgagctgtagcctgaagtcagagtctaactcttggagcaagtacttagttttgttatgtttcaatcagctcaaaggtgtgtggccttgtgcttgccaatgagggtgtagagtggaaagaaaaagcacttgcccttgccttaatgactactagcaggtaaagctaaatcaataagtacttagcatctgtggaaacagaaggtatttatctgctaatcagtgtggtattgaggtgtttcatattttagtaaactgtgtgataacaaaggttactgttactttgggttgatttatgttatgtcaaagaaatgctaatcctagaatgtttctctgatgtcctgaaggccattgcctataaagtataaaaagtttaaataacattctgtatttcccttttcctttgtcggttagagttcattttaggtttgctctgtgatagctctaggtcacgtactgaccagtactggtggtagctcttctcactgtgtcggtgttttctgttaacatcccatgatagcaaaacggtcaagagttcaactaggtagaacatcaatcaaacaagaaactgacatgatgtcaaagtttgaactgctaaccgttggataaagtaaattttaatgtttcattttattattaagaactgatattctgaaacagatgttaaaatggcaggtgaccaaaatactgtcttacaaaatagctcgtaatctcagtttacatttgtatgccaacttgacctccactgttctttaggatctgagaagagtaaattttcttgtattctgaaagctattccagtgaaaactgaagaagaaactctgaagacactgctgtgatcaaagctttggctgtttgtggtttgttagtacattcagaatatgtgaatatgaatgaataaagacacataataaatataatgtattatttagagttgtttttcatatattgttgaatgtaacaaatatttaatacatttgtaacaagtgcgttcctggccttattac

SEQ ID NO: 471555 - DNA, 729 bp, Homo sapiens
tccccgaccccttgcgcttcccagaatgctagcaactagaaatatgcattatatctggccttaccaattgagtagtgaatattcttgtagaaagaatttaagaaatattcttctccctctgcctaaattttccagaatttgtaaattatttatgaatattcttaattcatggcaatgtggttgtttgcataagttcaaaaagaatctgtcttcatttattaggggacacagttggacaaagtggtcattttcccagggctgtggcctaaatggccttgtgagaggttccagccaagctaatttaggacagcctaatgtggacaacgattcttgctgtactttgtgtgggagtgagctcatcgcctatttgcataagaacacaatcatgaagaccttgaagttggaaaatgggagaattgtaatctgtgtcatgcaatgacatcaatttaacctaaataattatctatagatacttgaaatgaagggctggtcaaagtcaagggtttggaaaatcaagctgttgttatattcaactcttgtggaaataaggataattacaagaaaaaaggggcatgctgcccacttctgaagattaaatattttagaaatactttgaagctatggattttattatttttctccagagacttttcaaaatgctgattttggaaggcaattaaattggcgccagtttacctaattcaaacagagattgcactattttggtgt

SEQ ID NO: 471556 - DNA, 513 bp, Homo sapiens
cttgtaaaggtggggcaggagaacagcgtctggagcccaaacaagtgagagtccagacacccatgacataatgcatgtggtatcagcttatgggatacaatacaagctcctacgccccaactcctcttcctgccaaatttctcccacctgctgcggctgtctgctgcttggaataactttatctgggagctttgccatggtaacacttgtgcagcattccttttcgaacagtgcccattctcttgatgtctacagtatcacctttcttgtagattggcacttatgcggccaaaggaacaacaccatgttttctaaaaggctggagaaaatagcacaggtgcctctcctctttcccttcatcttcatcattttgacaaattactcaaagatggagggtgcagttgaaagccagccatcattttttaaaacttctcaggacattgtaacatgcacttgggttgagaactgctactcgagcttctccaggaggcccttggagggttgacaaactat

SEQ ID NO: 471557 - DNA, 696 bp, Homo sapiens
cggacttgcattagtactccaagttgatgaaggaaatcataccagttgcatatgcatttttcatacacttacataaagatgcggctacaatcacatatagtttcacacatactccaaaacctgatgaggcagatattagtactccgcattttgtacatgagcaaataggggcaacagaggcaaataacctaagaagcggtggagccacagctgaaacaggttttgcattccaaaatatgtttcacttttgctgtgctgctttcaagagcagtggttcccaaaaagtggttctcagaccaattgtgtcagtatcagctgtgaacttattagaaatgcaaatccttgggtcccacccatacctcctgatcagaaactccggggtgggcccagcaatctatttaacaagtcctcgtggtgcttctgatgaatgctcaagtttgaaaatcactgctctgaaaagtagttatggaaatgctttggtagtgatgacagcttgaccaggagtgtaaaaggtacgataacaggatcacttctaaaaatttcaacaagatatctctaatatttcctgaagtaccagcatccatctggaaaatgaaatgtctttccacttaaaggcaaataatataatttttccagttttcttttttgtaagaggaaaatgataaaggaatgtgctttctgactgtatcatatttg

SEQ ID NO: 471558 - DNA, 682 bp, Homo sapiens
cacagcttcatctcatgccgcgatgtagcctatcagaccgccggtgggcgccccagccaaggaggacaaggatagggcggaactacggaggatgcggggtgcgtagatcctgctgggataatccgtggggcggcaagcgctatacagccgccgtctccccagtgatactgcaaggtgccggtgccgccgccgccgccactgcagtaaatcagctgacaccagccccaactgccgtgactttcgctgcaactgtcgcaaaaatgagggggcgggaaagactcaccatttccctacttgcaaggcctaagccggcgccgagagagccagccgcgttacgatggagaccgaaagtggagaaaaggccagctgtgggcaaggagtgcacggccgccatcttggttgtgggaaatgtgcaggctgaaatatttatggatgaaattgtcagatgcctagcatttgctccatgataatctgagagaaaaggccatgtgaagacacagtgagaaggccgccatttaaaagtgaagaagagaggccttaggagaaaccaataccagcagcacttggatcctggactccaagtctccagaactgtgagaaatacatttcttctgtttaagtcactcagtctttggtattgttatagccaaagactgagttgttatagcaaccctagctgact

SEQ ID NO: 471559 - DNA, 1432 bp, Homo sapiens
ttccctccattcaattcagaaataatggattcctacagaaaagtcacttccagggacaatttggtggtacctgctgattggcatctctttggaggatttatttatgggcacacagttcttgaaacctactggaaggtgggcccagcaccaaggacccactggggcagggcgtttctggaagtagtgcagctggttcccacgggaatgcagatgcagaggaggccaacccagcttctcccagctctaagtgaggaaagaggtgccactcactcccaggactcaccccatccgctccccagagtgagccttctcaaagcctcagaaggaggaacattccagaagggaattgttcctgtgcttgagatggaaagaaaccagatgcagatttcaatcaattcaatcaatgggcaatgtttgccggccataaaaatagcccagaggttgctggtcagcggctctaagatggatgaccagtggccctggaggtcccaaaggtcaaagatgactatcaccttaaaatgtaatctgtgccggcccccagccctgcggctggcgggtggggcggcatctgcagccatgccccaggccaggccactctcagccacagcctggcagagggccttcctggagccacagcctggcagagggccttcctggatcctgggccgtggggtctgcctgtccatcctccagagccctggcctgaggctgctgtcctgcccggcagggatgctgcattttctccatccgtcactgctcgccatgatgtcccataggaggctgcaaaagagcagggctgccgtttggctttcaccaggcaaaccctcgcctcctgccgctctgtgtggctgcggcagtttcttaggtatcatcgtctttcatttgtcgtggtgagaagggataatggcagccatccctctgtccctggtaagcgatgattgagaggccttgccgtcctcggcttcctcccctccttgactacagctccctcatttcatttggctttttcctccctcctcagtcgggaatcacctgctgcttcttcatccagacattctttcccgggccttcctgcatcagcataggcagggagccatgtgaagtgaatctcagagccttgcagctcatcttgaaacctctttctcctctccctgttcactgtctgaggaatgccacctttcttctccccatctttggttcagtggtctcgttacttttcccatctgctgtgttgcattcggacagtgcttaaggatgaggaaggcctgataagcactttgttgagttgcattgtctcctgaaaagggctgcttccctttctgtccactgttgctgactggttgctggggttgtgcactcgagagcagggtctgcctactggttatcaacgtccttccacaaatcatcgctgttcggctatttaatggttgac

SEQ ID NO: 471560 - DNA, 1076 bp, Homo sapiens
tctttagggcactgagacacaaacgtgaagctgtaaagtgaagtggttcattatgctaattttctctcccagtctctcattccttcattatacaccatgaacaagagagcaagaaaatgaaaaagacccagaactttgagttcaagtcactatcccgctttccccagtgctgcatgttgttgagtgggcagtattgcttggaagtggaatccattgcactggaagaaggaaaatatcatggcgaattagtaaaactaaactgcctcctcactaaacgtttccctggtgaaggtagaagcctccagggaatgaacttctcgggagataatgacatcagtctagaaatattcacacttcccggactgggcatcaaaaagacctcaggaaagagttcaattaaagagacttctctctccttttcctggaacctcacctccaatttcctattcctgaactgcctctctttctggcatttagaacctagtgaacagtcagcagaagggaggatcgtgaacttctgctatgagtatttgctatagggatctcctctgttaactttcatttaattccacacacttgtattgagtgcctaaagataaatatgatagcaccatggttaagagcaagaacttcaaaatccagttgcctgtttgaaatcctagctctgcccctatgcaaatgccacagccaagttatttaaacttttggtgactcagttttctcaactttgaaatgggtatactataataataccatggactgtcatgaggataggataaatatatgcaaggtaagcactatgtcagtgttttctagagttgtttctacagagcagaacttctgtccctccttgctgtcaaggattgcacaggtcagccaggtgggagaaaggtacacaagtaacaattccaccagacaggctgtggtggatgctgaaatagaaccacagacagctgtgggacaaggcaagggagctagaaaaatggaatattgaccacattgtaaaactgcaaactcatgtgtattaggctgctggggttttgcctaaacctccagtctttgaaatctacttccaa

SEQ ID NO: 471561 - DNA, 641 bp, Homo sapiens
acccctgggaatcctttgaaaaatgccttctttttttctttcttctctcggttctctcttcactaataggaagtgctctagcagggcctctggcctagcaagagtccctgtttcccccttttcttccttttcgcccaataaaaccctgctttactcactgttcaaaccacctgcgagcctaaattttcatggccgtgcgaccaacaaggaccccacatctttagctgaagtaaggaaatgtcctgcaacagcactgtgtctaaatcttcagaattttcttttgttctttaggctcaacccctcttattggagatttcttgcctttatcccgaccaccaaggaaatactttgttgcccccctgatgtttcttaccttggtctgcacagagagttacctggtcgccgcgccttacattccatctctgatgaactcagagaattcaaagatgaaagacctaacttggctctgaacattcacacctaaacactgtaagatattgaaccaacttactaatattttctcatttgtaaagtggtgataatatcagctctacttagtaatgatattcttttataatattttattaacgataaagcttatatattttgtctttcaattacttagtaaaatggttgttatt

SEQ ID NO: 471562 - DNA, 633 bp, Homo sapiens
gcctgtcaggtcgttctgaggaaggtttggcaatgattatattccctcaccaggaaaaatgcagcggtcaagtatgggggttgtggaatcctacagacacagatccaaatcttgctttattctgttatttgccaattgtgctttattgggcaagttacttaactcctctacgcttccattttgtcatcagtaaagctaagagaataatagcacctaccccttgtgagaatgaactaaaactggaagataacaaatttgtgttgtttggagccaagtttggggcaatttgttatagcagcaatgggaaactaatccaaggggacaatgttgtcagttctgtagactgctccattttgaccttcaaagaatacgtagcaaaggtgaatttttatttaaaagtgagtgtgattcactcagcagaaataattatgtttcggaggaaggaagtgtctgggtttcattttaaagatggtggaggaagggagttggaggagggccagtattaaatcttgttttttatatcattttcaatgaatgaacagtgatgttcaaaagagggagttaccagaatacagtcaacccctatctgtcacggagcctttgcatacacagtaggtcagaatgggttgaaaa

SEQ ID NO: 471563 - DNA, 555 bp, Homo sapiens
gctccgaggactggtctttgaatttctgagggtgaaggattggctttggtcagcagaggcggagctcaggcaataatgcccgcttgcccactgctctcctcatgctgtgcagcccggttcctaataggccatggactggtactggtccatggcccgggagctcctggcccagctcagactaacatacttggccatctctgatcctttctcgtttccaactaacaagctctgctgtgtgactgcaattctctgcctgtgcatgaatgtatgcctttggattcgctctggaagagtaacccttgtgggttacgaccacaaaaaggaacgcataatgattgctaagccccttgtccaaagtgaaggttgggaggaggctcacttctcacttggggaagtcatagtctgtgaccttcagaatgaaataagccttaagacacaagcaaaatgccttgtggtcatcaagccacatccactcatatttgggaaccccttgcctgtggaatctccaagaccattgacagtactcacagatgacattctttttttctagaagtt

SEQ ID NO: 471564 - DNA, 1668 bp, Homo sapiens
atatatgagggagctcccagtgaacatgctagcagagatgcttctgtgggttgagggtgaacggtgctttcagttaccacctggagtcagccaagcacaggtcaccagcattgaccttggccgtgtgcatagtgtggccacctgggaacgctgtcatcctcaggacccgctagtcaccagcattgaccgtggccatgtgcatagtgtgaccacctgggaatgctgtcatcctcaggacccgctagtcaccagcattgaccgtggccatgtgcatagtgtgaccacctgggaatgctgtcatcctcaggactcgctagtcaccagcattgactgtggccgtgtgcatagctcaccagcattgaccgtggccatgtgcatagtgtggcacctgggaatgttgtcgtactcaggacctgctaccctcccgtcattgaccacagccgtgtgcatagtgtggccacctgggaatgatgtcaccctcgggactcgctgcactcccgatattgaccacggccatgtgtacagtgtggcacccgggaacactgtcatcctcaggacctgctgccttctcggcattgacagtggccaggtgcatagcccagtgaccacggtccatctgtatcttggattaaatctctgtattcctacattgcctcgagagtttgctgtggccttgctccagctgcctgacaaaccaaaacacagcccaccttaggcattaccaacataacttgtacctttgattaaagaaagagctcctcataagaactatggaaaaacgtacttgatatttgctgaaaacgttctcaactgaatttttatactaattacaatttttaaataaaactattagaccagacttttaatgagcccttgcatcatattcacagaactttaacatccacttcattagtatgggtccttaaacattgtattagtccattttcacactgctgatagagacatacctgagactcggcaatttacaaaagaaagaggtttaatggactcagagatccacatggctagggaggccccacaatcatggtggaaggcaaggaggaccaactcacgtcttacacggatggcagcaggcaaagaaggagaacttatgcaggggaactcctctttgtaaaaccatcagatctcatgagtcttattcactatcatgagaacagcacgagaaagacttgtccccatgattcacttatctcccaccaggtccctcccacaacgcacgggaattcaagatgggatttgggtggggacacagccaaaccatatcaaacatcaagggatggctcttagagttgcacttgttcctcctgtttaaggctgcaggtgtagtcccagaacttaagaaccaagcacgtttcacagaaatatgtttatatggcaagacagtttaggtatattaaaaacttttgtaagcatcgaaataaattagtttatacctctggggtctttatttcattatattatttagactttggaataatgttagtgaagttgatacatagaagtaaatgtaaaacaattctttcatctttagatcaatgcatttatgcagtacacagtaatgtggattcttggcttctctataataatgtgacctaatcaaatatgtaacaaatgtagcatgaataaataatattatgttaaggattt

SEQ ID NO: 471565 - DNA, 2294 bp, Homo sapiens
cagtgtatagccccaagggtgaagatgttccacggttttgaggaggctgccatggggaaaattggtatcctcaggcggtttggcacacagaatgcccggaacgcccagaatgcctggaatgcccagaatacccagaatgcccgaaattcccggaacacccggaatacccagaaagcccagaatttctggaacatccagaattcccagaacatccagcatgcctggaacgtgtggaatacccagaatgcccagaattcccagaacacccagaattcccggtccacccagcatgcctggaatacccagaacgcctggaatgcgtggaatacccagaatgcctggaacacccagaacgcctggaacacccagaacgcctggaatgcgtggaatacccagaatgcccaaaattcccagaacacccagcatgcctggcacacccagaatgcccagaactcccagaatgcctggaacacctggaatacccagaatgcccagaattcccagaacacccagaactcccggtacacccagcatgcctggcacacccagaatgtccagaatccccagaacacctggaaagcccacccagaatacccagaattcccgaacacccagcacgcctggcacacccagaatgcccagcacctggaccatggctgaaccgccaaggacaactggcattccagacaaaattgaaaattcctagtctaagtgtgtcacccatggcaaagatcctagataataataatatttaaagtacagattagctgttctcttccggggcattcagtctgattttcttattaattcaagaacacatttttctggaggaagaaggaaacgtgtgcatagagaggggcatggggaggctcccttggaagcgggagctccacgccacctgcgccgccacccccttgtccatctgacgcccccacgcctggggcagctgcaggcgttgccctgctcgggcctcaccccaagggggccactgcactggggaaggcccagaacccacatcctgcacagcaagggggactgtggctgaggagggcacggggtggcagccctaagcccaaggttccggagacgccactctgtaagcacctcacatgtgccagagtcactgtcatgtacatcagggtcaccctcatgtcaacatcatcctcacacgtgtcaccagtagcatcacatgtgtcgccatcacccacatgtgcatcttcctcccccacacgtgtgtcaccatccccctcagtcagtcacatccccctcagtgtgtcaccatccccctcggtgtgtcacatccccctcagtgtgtgaccatccccttcattgtgtcaccatccccctcagtgagtcacatccccctcagtgtgccaccatccccctcggtgtgtcacatccccctcagtgtgtgaccatccccttcattgtgccaccatccccctcagtgagtcaccatccccttcattgtgtcaccatccccctcagtgtgtcaccatccccctcagtgagtcaccatccccctcagtgtgtcaccatcgccctcagtgagtcaccatccccctcagtgtgtcaccttccccctcagtgagtcaccatccccctcagtgtgtcaccatccccctcagtgagtcaccatccccctcagtgtgtcaccatcgccctcagtgagtcaccatccccctcagtgtgtcaccttccccctcagtgagtcaccatccccctcagtgtgtcaccatccccttcattgtgtcaccacccccctcagtgagtcacatccccctcagtgtgtcaccatccccctcggtgtgtcacatccccctcagtgtgtcaccatccccttcattgtgtcaccatccccctcagtgagtcacatccccctcagtgtgtcaccatccccctcggtgtgtcacatccccctcagtgtgtcaccatccccttcattgtgccaccatccccctcagtgagtcaccatcccccattgtgtcaccatccccctcagtgtgtcaccatccccctcagtgagtcactatccccctcagtgagccactatccccctcagtgagccaccatccccttcagtgtgtcaccatccccctcggtgtgtcacatccccctcagtgtgtcaccatccccctcattgtgtcaccatccccctcagtgagtcaccatcactctcagtgtgtcaccgtccccctcagtgtgtcactgtccccctcagtgtgtcaccatccccctcagtgagttgccatccccctcagtgtgtcgccatccccctcagtgagtcgccctac

SEQ ID NO: 471566 - DNA, 1974 bp, Homo sapiens
tcctttccagggcccagtgccaggaccctggacggcgtcaccctaggacgtcaccccaggacagcaaattcagcctcggtgctttcatgggaaggcgtgggcagtgccatccccagtgactcgcagccacgcagtgaaatggtgaggacggagggggacaaaaagggcgcagagccgacagtgcccagcccctctcggaacagaggttgctgcacccagctcctcttgggacgtgggatagccatgcccagctctgcagcccatgctcttgtggacaggacaggtgccagtgtggtactgcgtgtggcctcacagagcgagtctgtgaatgaacgagtgacaaaacctggaatctcaaaacgcgaagcaagtacggagctcgctgccgctccacaaggatgagaacattccaaggactgaaaaagcctttttgccgcagttttgtctggctacatccccggagcagcaggggcgaagtcctggggtccagcctgtgctcctctaatgcagaaaagcaaccacaaaggcaaaacatgcagtctccaaatgttacctctgctgccaggtttcagcttgtgtccgccaggaagcaggtgtgacaccatggatgtgactgtggcgtgcacaccacgggctctcaatagtaaaggtgtcaacgtgggcacgcgttttgaccagagagaggccacattcactgctcatccaaagcttgaatttcccattgacttaaaacttccattaaagccccagatgagggtaaacgaggctccatgtgctctgcctaatgggaacgttctggctggcaccgactgcgataagtgtcctgcagcaaacatcaatgtgactcgtgcacacggcattggggctgcctgcccgacagagcacgatgtcggccaggaggaggatggacctgaggatgccagcccgacagagcacggtgtcgaccagcaggaggatggacctgaggatgccagcccgacagagcacggtgtcaaccaggaggatggacctgaggatgccagcccgacagagcacggtgtcgaccagcaggaggatggacctgaggatgccaggccgacagagcacggtatcgaccaggaggaggatggacctgaggatgccagcctgacagagcacggtgtcgaccagcaggaggatggacctgaggatgccagcccgacagagcacggtatcgaccaggaggaggatggacctgaggatgccagcccgacagagcacggtgtcgaccaggaggaggatggacctgaggatgccagcccgacagagcacggtgtcgaccaggaggaggatggacctgaggatgccagcccgacagagcacggtgtcgaccaggaggatggacctgaggatgccagcccgacagagcacggtgtcgaccagcaggaggatggacctgaggatgccagcccgacagagcacggtgtcgaccaggaggaggatggacctgaggatgccagcccgacagagcacggtgtcgaccaggaggaggatggacctgaggatgccagcccgacagagcacggtgtcgaccaggaggatggacctgaggatgccaggccgacagagcacggtgtcgaccaggaggatggacctgaggatgccaggccaacagagcacggtgtcgaccaggaggatggacctgaggatgccagccgcacagagcacggtgttggccacagagcaggacgggcctgcgctgctttcctgtcatcacgcagggataatctttacctctcatttaaaaaggccaatagtgcccatgtcacagggattatcagcagccgctctgacagtgctgaatggagaacactgctccatctcgctgttattaagacgcacggaggcctcaccgccaacagtccatgcgtgtttcttggcagccctggccgggtagtggtgacggtgctctgaatagggggcacccactgcccctcgctgctgcccccatgaccc

SEQ ID NO: 471567 - DNA, 1139 bp, Homo sapiens
ctgtcacctgggccatggggcggcgcccacatgtggacggtgctcttgtgtggatggtgctcttgtgtggacagtgctcatgtgcaggtggtgctcatgtgtggacggtgctcatgtgtggacggtgctctcgtgtgggcggtgctcatgtgtgggtggtgctcatgtgtgaacggtgctcatgtgtgggtggtgctcatgtgtgggtggtgctcatgtgtggacggtgctctcgtgtgggcggtgctcatgtgtgaacagtgctcatgtgtgggtggtgctcatgtgtgggtggtgctcatgtgtggacggtgctcatgtgtggacggtgctcatgtgcaggtggtgctcatgtgtggatggtgctcatgtgtggacggtgctctcaagtgggcagtgctcatgtgtggatggtgctcatgtgtggacggtgctctcgtgtggacagtgctcatgtgcaggtggtgctcatgtgtggacggtgctctcatgtggacggtgctcatgtgtggatgtgctcacgtgtggatggtgctcatgtgtgggtggtgctcatgtgtgggtggtgctcatgtgtgggtggtggtcatgtgtgaatggtgctcacgtgtgaatggtgctcatgtgtgggcggtgctcatgtgtggacggtgctctcgtgtgggcgggcgcagaccactggcccccaggtcttacggcaggtcctgggccggagactggtctgcagccaacgccaccagcgcccaggctctccttggccggccgggtacactgttgccatccaaagcacacaatattggtggtgtcaagagagtggacttcaagacaaaactacttgtttcgtgaaaatagtcacacactgacacggactcctttaggactgatcctctagcttgtcatgcgactcttccaccgtataatggaggctgaaggaaacagcacgaggtagatattctctggtgaggatgcacatagttaccccgagtggtgtaaagttagaggagatgtgtgtctcagtctcactgtggtgaccatgaccctttctttctgctatgaagttgctggttatttttaaatgtgagtgacacgggattgtaaagtttgtacgtggctacagcatggcacagggttggctttgc

SEQ ID NO: 471568 - DNA, 666 bp, Homo sapiens
tgccgccaaatgatttcaatttacagagatctaaattataaatatggagaaggtgttttatcatcactaaaactgaaagtgcacgtgaagtttaagaacccccggaagattgggaattacctctgcaaacaccaagctcccgcagcagctgatctgggctctgcctcggacgtcagaggagacttgagaatttttcttacctctcctcaggagacagttgcacaagtacccacatttaaagatatgtgtgcaaaacctcaccattgccaaacttacacaggaacagaaaaccaaataatgcgtgttctcacttataagtgggagctaagtgatgaaattcagaggattcaggcaaatatcttaggcagaatcatggccgtcctccgagccctaacggcatttgagatgtgtccagtgggagtaatgttcccccagctcggcctccacgcaaggagccggttcctcaggaaccgtaagcgggagaaacactcagcttcagacctgctctgactcggagactgtctggtgaaccagagaactgggttattggcatttcctacctatacttaaccgtttgtaaaccctatacatattttctgataagctactttgtccacgagcaaagataaatgtcttagatatttccattatgtttacttggcctca

SEQ ID NO: 471569 - DNA, 1047 bp, Homo sapiens
acaaagacagcagtcatgactccttctcctgcccctcactgtcaatggtggcactggggggtgtgaggagggcgtcagggtgcgaatgggagaaagtaaaaaccaaggcaggctgcaatgggtgggacaagtattgagggcagcagatgggcatcctctcctgggggaagtgcctgagggaggcaatgcaggggccacgaagctctttggtctcctggctgcagaaggcaccgtgttacttcctagtgtgtctgcacccatgaagattctgaatgtctcatgtctcctgtatcatcagcctcatgggcgagtgagcatgcaccacaggcctcgtctcaacaaccctcaggggccatcaccacaggccgtcatcacacttcgatatcctgaagaaactgttttagttaaaccaacaacaacaaccaaaaacagaaatcaacctaaaaccttgcccaagcaagtgcaatattatttgaaggacaactctaacctctaataattaataaatctttattttatcattttcattataaatcgctagagaatcatttgaaaatattattactattggtaatcctattactgaatttttttattgctttcaggaattcttcataaataaatgtatataggacaccactgatggtccacatgtaggaacattgtgtttgatttaaagctaatttttttttctaagtttgcatttgtttgttttttcatttgccaaagtatcagacttttcatatttcatattgtgcttaaaataaagctgagacaattattggaaataatataaattcagacattctgattgcttgggggcatggactgcaacacagagagagttaggtgatagatggatggttggatacctagatagatggatggatagatagatagataaagatggatatttgacttggctaatcaaagatggtttatttgccaaaacaacttgcgttcataaatataatttttgatttcatgtgcattgactttttactttgtgtatttaacattttaacattttattttctgattgcatca

SEQ ID NO: 471570 - DNA, 952 bp, Homo sapiens
agtccaggaaaagacaaataccttttttttttttgagacagggtctttctcttttgcccagaccagaatggagtggggtctgctctgcctgtgtggtccctatggttcctggagattttctaactttatttctttgataattttcactggttcattgtctccttttccccttgattttaacaatggcaacctctgcactgtcacagaatgcagagctgtggccttgagatgggaagctgtttgccaccataggatgggccatgggtggtcgtgtagggagttgtgtgccatctctgctgctgcaaactctccacgctcatgcttcctggttcaattccccaccccgcagatgctctgcctggttccatgtgggtccctccagcaccttctgcactcctggccttctccccaggttcccagccctgactgctcaggaatcctcccccaaggcagcttgctgcgcatgctcaggcttgaaacaggacctgaagagagagaggtgccaagcctgcagcaggccaggtccaggggagaaaatcacagaggaaatcactatttttctaattcctataaaaaaaaatcaacctagagcaatgtaattcactaaaagctcaagaagatagaacgctaatatattctttgttcttttattttttttaaatgccttttcatttatattttcccaacttcttcaacttcaaagcaactatgggacgatattcatcgtaaataaaaacagctgagcacaacagcagtttacaagtcttaaatgaagcaaacgtattaatcatcttgttttgattcaattactctgctcttttgctttcaataataaatgaattttcatttcccttcctttttattgctcaatgaaatctgcgtttggagaggtggaggacgagctgaaggagatggcgggagacgtgggctcctccagctgcacgtggcctgc

SEQ ID NO: 471571 - DNA, 678 bp, Homo sapiens
agaacgtgcttttcccttgaaaccttctacttgtttaaaatcaagtcaggactgatacttctgctgctctgattaaagccagcatgttaactttaggagataatgtttcagacaggaggtgtccagaagaaggcattgttgtcacaggaggtgacagctccatgcgtgttactgctcctgaagatcttccagtgggacaaaatgtggaggtgaaagacagtgatattgataatcctgaccctgcgaggtgtctagaagaaggcattgttgtcacaggaggtgacagctccatgcatggtactgcccctgaagaccttccagtggaacaagatgtggaggtggaagacagtgatattgataatcctgaccctgctcccatgagacgatatcgaaaggtgctgtttccaaaaaacactcaagccgtgtttgccgtttgctctcatgctgacacaacgacagtcaacacagaagacttctgtcatcccaaaatatgcggagatttctccccatcaggaatcaagcaaccaattcttcagcagaccccaactgcatgtcggatcccacacattgagctcccagtcccggaagactgccccacactttccaccagtcacaagtccaggcctccaattgaattcaagttggggctcctataacccctgctttgggtttgaaaaa

SEQ ID NO: 471572 - DNA, 529 bp, Homo sapiens
atctcacaggtagcctagagatgtttgacacaaaaccaaaagatgaggaagggccaccccaaagaactcaggtacgaaggagctacactaggaaccttgctggtaggttctgacgtggatggaagtcagcaaccagttcacgcctctcaagccaaaactggagacagaacaaagaactgcttcctctcattgcacaaggccctgattcagacccgggggttagaaggggcagacccatggacatggcaagaggcttcagatccaccagagccaaggggctgtgggacagatgtggacatcccagtgaggatgttccgtgggaaaaaaagagcattaatgaatcaccgcgagtcagacaagtgtgcgtcagtgagggaggtgctcttccccaactcggatttatttatttttgtaaagttaaatcactccttcagtcacccctttggcagagtgatgccgtcagcaacttcatgacagcttcgagtctttatgtgaatgacacatattatcaaatggtcctaatgaaacc

SEQ ID NO: 471573 - DNA, 666 bp, Homo sapiens
tgccgccaaatgatttcaatttacagagatctaaattataaatatggagaaggtgttttatcatcactaaaactgaaagtgcacgtgaagtttaagaacccccggaagattgggaattacctctgcaaacaccaagctcccgcagcagctgatctgggctctgcctcggacgtcagaggagacttgagaatttttcttacctctcctcaggagacagttgcacaagtacccacatttaaagatatgtgtgcaaaacctcaccattgccaaacttacacaggaacagaaaaccaaataatgcgtgttctcacttataagtgggagctaagtgatgaaattcagaggattcaggcaaatatcttaggcagaatcatggccgtcctccgagccctaacggcatttgagatgtgtccagtgggagtaatgttcctccagctcggcctccacgcaaggagccggttcctcaggaaccgtaagcgggagaaacactcagcttcagacctgctctgactcggagactgtctggtgaaccagagaactgggttattggcatttcctacctatacttaaccgtttgtaaaccctatacatattttctgataagctactttgtccacgagcaaagataaatgtcttagatatttccattatgtttacttggcctca

SEQ ID NO: 471574 - DNA, 565 bp, Homo sapiens
gttctcaccctcctaaccaccatggccccccaacctcagtgatcacagacacatggcaggaatggtgttatgtatggcaccaacgctcagctacagcctttcagaactggactcacatcattcacggggagctcctgcaaccacctgttctgagaaagccccacatctgtgtggtggtgctggactccccacacctgtgctactgcaggactatgctagcagtcctgggccccttgtgtccactcagggcaccattagtgtgtgcccactgtgtgccaggccacctagccctgaggtccccaaggctggccctgctccagcccacccaccagcttcaggagagcaccacgggcagccaatggctgtggatgggcaccaggaggactctgacagtgctggacagggtgctggggttaagcgaagacccaactggtgggtggagggttggggctctggggctgtcactactggagcgggagggtacacaagctgcggcaaagtaatccctgcagtcctggatcaaggttggtgatgccagtgtgaacagctgcatggtgaccatgga

SEQ ID NO: 471575 - DNA, 880 bp, Homo sapiens
cctgcctctctgcgtcatgggtcccacgagcatccctgaccccagtgctgtccttgggactgggaatgtcatgggtcccacgagcatccctgaccccagtgctgtccttgggactgggaatgtcatgggtcccacgagcatccctgaccccagtgctgtccttgggactgggaatatgccaggtcgcgggtggtgcaggaatgctgggaagggccctgaccccggccctgaatcccgctcccgaggcctgctgtgcgaccctgggagctgcaccctggagactgaatccggttcccgaggcctgctgtgcggccctgggagctgcaccctggagaaagagggctctttggtgactcctccaagtcctgcaggcttttctccatgtttgaggtttgctggatggtttgatgggatgcctctcaacatccaggggactgtcacgaagggctactgtggtcagcgtggactgcttccgttacgacaatttcataatcattgagtaaatggatgttctcctttgaaaggttctgtaacatgtatgttggatcaatgaaggcaagccaatagtgcattgctcaatcatatttattttgaattgataaagtttaagctaaatcatgaatgtgagcatggaatgaaagttagggaagacgctgtctaactggagacctgtacactccattgccattttccttgttgccttgggggacaggggagtggattttagacgacttgggctctgaatgaatacaatccccaagctaggctgtgtagcatgggttcttattgggacaattcctgcaccctcccccctacccatcccagagaacactggcagttgctggaacattcttggttatcttaaccggagcgggagtgc

SEQ ID NO: 471576 - DNA, 1774 bp, Homo sapiens
atgcctgttctccctgtttcttgcccctctactggtccctctgacactttagctccctttgtctccccacttaacccctgctctctcatcctgtctcctctcctaatttctagcctcttctgtttaccaatcccattgcttttcttcccaccaaaaaaagagcactggctgggtgtttttccattgtgtgttctctagatttaatcaattggccttgcaaaagtaggcatgaggagggcaaggttagtccggacagagtccgttccgtgtgacatcaacaaccctctacggaagccacctcgctattcagacctgcacatcagtcagacgctccccaaaaccaacaaaatcaacaagtcaaattctgaatactcagggcatggaagtagcttgatgatgaagaagacagagaaagaggagaaggaagaggcaggaggaataggaagaaggaaggaggaggaaaggaaggaggaagaggaagagaaggagaaagaaggaggaagaagaggaagacagagtggggtggatgaggagaatggaggagggggaaggaggagaagcagcaacagtagcatctgccaattccttatgggaccaagctacaacccttgtacttccacatcaagccatcaaaaataccatctgcagtagtggcagaggctgaatctctgcctgctgtattcaagctgtttgaagtggctgcatgctggtttgcttttgttgttcctactccttatgacctttggcttctttgttttctggcctgttgtggctcccctgttctctttgaacctcatcttatctcagcctttgctcctaatgctctctgctcttcttcctaatggcctatctcatcattccatcccatattataggtcactggtcagctgccattatgctctggcctatgatcctgtgttgggagtgggctatggaggtcataagacaagtgtgtctgtttaggacagtccattgaacaaaggctgttgggttggaggttcattcattcattcatataacattgattagttacctcctatgtttttgtttctgtgcttagttttgcagattccaagatgaggaaaattctatagcttgggaatgttaattgtccatggggccagtatccatttgtttgtctacacaatcatagttgagtttccctttctcagagactctctggagagggtctagtttctccctccagagataaacacctaacttgcaggtttgctgccaagattaaatgaactaacaatattagttactctgcttccaggaagatggagtaattgtacttttccatattcctcccactaagttcagttgacccttgaaaaatgtgggggtgagaaatgccaaccccacccccacagttgaaaatccacatataactgttgatgcccccaaaacttaactactaatagcccactgttgatcagaagccttaccaataacacagagtttattaacatgtattttgtatgttctatgtcttatatgccatattcttacaataaagtaagctaaagaaaagaaaatgttattaagaaaattataaggaagaaaatatatatttactattcattatgtggacacaaatcatcataaaggtcttcatccttgtcgttttcatgttgagtaggctgaggaaaaggaggaagaggaggggttggtcttactgcctcagaagtggcagaggtggaagaaaattcacatataagtggaccattgcaatgcaaacctgtgttattcaagggtcaactgtacagct

SEQ ID NO: 471577 - DNA, 1314 bp, Homo sapiens
cctttcctagccaagggaagccgtgacagacagcacctggaaaatcaggtcactcccaccctaatactgcccttttccaacaatcttagcaaacggcacatcaggagattatatcccacgcctggctcggagggtcccacacccacggagccttgctcactgctagcacagcagtctgagatcaaactacaaggtggcagcgaggctgggggaggggcacctgccattgctgaggcttgagtacctaaacaaagcagccgggaagcccaaaccgcagctcaaggagaactgcctgcctctgtagactccaccaatgggggcagggcacagctgaacaaaaggcagcagaaagttctgcagacttaaatgtccatgtctgacagctttgaagagagtagtggttctcccagcacggagttagagatctgagaatggacagactgcctcctcaagtgggtccctgacccctgagtagcctaactgggaggcacctcccagtaggggccgactgacacctcatacggccaggtgcccctctgagacgaagcttccagaggaacaatcaggcagcaacatttgctgttctgcaatatttacggttctgcagcctccactggtgatacccaggcaaacagcgtctggagtggacctccagcaaactccaacagacctgcagctgagggtcctgactgttagaaggaaaactaacaaacagaaaggacatccacaccaaaccccatctgtacgtcactatcatcaaagaccaaagatagataaaaccacaaagatgggaagaaaccagagcagaaaagctgaaaattctaaaaatcagagtgcctcttctcctccaaaggaacgcagctcctcgccagcaacagaacaaagctggacggagaatgactttgacgagtggagagaagaaggcttcagaagatcggtaataacaaacttctccgagctaaaggaggatgttcgaaaccatcgcgaagaagctaaaaaccttgaagaaagattagatgaatggctaactagaataaaccgcatagagaagcccttaaatgaccttatggagctgaaaaccatggcacaagaactacgggacacatgcacaagcttcagtagccgattcaatcaactgaaagaaagggtatcagtgattgaagatcaaatgaatgaaatgaagcaagaagagaagtttagagaagaaagaataaaaagaaatgaacaaagcctccaagaaatatggggctatgtgaaaagaccaaatctatgtctgattggtgtacctgaaagagaactttccccaacctagta

SEQ ID NO: 471578 - DNA, 516 bp, Homo sapiens
atttgtaaatgatgaagttgatctggctgctacaatgtgttaaaaagaagaagaaaaaaaaggaactccccggcaaatccaaggtccggcagctgggagtggcagccctgggatccaaggcagccttcttaactttgccacccttcttccaaatgtacgtagcaccaggagaattttcaagagccttgacatctacttttagagacatgctatctgataatgacaagtgttcacaaagagctttgtctttctctggatctacaatcccatcacagtcttctgatcatgaacagcggcaaagatcttcagcttttcgtaggattttcgtgacctggttcagctggccttgtccaatcagcgcatgtgcagtgttgtagcacagctcatgtgcaccttcttggaggcccaagttctctggaaccactttttcccaattgctttgaggagtaacaactgctgaaagaaaataaataaataaataaataaataaaatatataaataaataaattgaaaga

SEQ ID NO: 471579 - DNA, 1069 bp, Homo sapiens
gatgtgggctgcagctctggaggcctgggaaccatggcaggtgatgggttagccccagccctggctgctggaacagaattgatgctcattagcattccccttctgcccaagacccttctccacgactggtttttaaatcccctttggcaccttccatcaccccttggtcttgaatcctcagaaatggaagtttttggcgagatcaagaaatcaagtgaaggaaggaggcggagtttccaagacttgggtgtcatcatttctggggacatccttgattggagattgaagtttttgaaccgaaatttagagctgattcagaagagacaaatacagaacgtccaagttagcagtcatttcccaaatttaggagacaatgatgcaggcccaggaatccctaacactggaggatgtggctgtggacttcacctgggaggagtggcagttcctgagccctgctcagaaggacctgtaccgggacgtgatgttggagaactacagcaacctggtggcagtggggtatcaagccagcaaaccagatgcactctccaaattggaacgaggagaagaaacttgcacaacagaagatgaaatctactctcgaatctgttctgattcaggaggtgcatcaggaggtgcatatgcaggtttgtctcatggatatattgcctgatgccgaggattcactagaagctcaatcctgtcacccaagtagtgaacatagtaccaaataggtggttcttcaacccttgccttcctcccttcttcctcttggagtccccagtgtctattgttcctgtcttgatgtccctgtgttcccaatgtttagctcttgcctacaagtgagaatacacagtatttggttttctgtttctgagttatttcacttagggtaatggcttccagctgcatccatgttgctgcaaatgacatgctttagttcttttttatggctttgtagtattccatggtgtatatataccacagttatcctgttcaccattgatgggaacctaggttgattccatgtctttgctgttgtgaatcgtgctgcaggctgtcctgtttaaat

SEQ ID NO: 471580 - DNA, 1421 bp, Homo sapiens
gccgccagcaaactttctgtcagcaggcacagtcaagaatctgtaccaagacgtgatgttggaaaattatagcaacctggtatcactggggtatcaagttaccaaagcagacacattattctggttggagcaaggaaaaccatggatactagaggaagaaatccagagtcaggtttgtccagaagatgcctggcaagtcaatgatcacacagaatggcaccgagaaaaccaaagcagccttgaaactatggacagacaccacaaatatcatatatttggcaacataacatctcatctgagctcaaaccttcataccccttttgtacttgggaaacacctgaatcctaatctagagtactttattcaaaacagaagctatgcaagaaatgaaggtgaatgtaatggatatgacaaagtttttctttatcctaagcatgagaaaattcatgctgaagagaaatacaatgaatataatgaacgtgtaaaggctttcagtcataagtcacagctcataaaacactggaaaactcaaaaacgagagaaacagtatgactgcagtgactgtgggaaagccttttcccagaagttggacctctttaagcatcaaagaacacaaagaggagagaagccctatggatgcagtagatgtcagacagccttcagatggaagtcctgtctcattttacacgagagaacccatacagaagagaaaccttatgagtgcaataaatgtgggaaagcttttactgataagtcatgccttaataaacatcaacgaactcacacaggagagaaatgctttgagtgtcatacatgtcaaaaaggttttagtgataagtcaaaactcactttccatcaaagaactcatactggagagaaaccctatggatgcagcaaatgtcagaaaagcttcagcaataagtcacagctcatgatccatcagagagctcacacagaagagaaaccctatggttgtgatgagtgtgggaaaacattcccccttaagtttaacctcattttacatcaaaaaatccataccggggaaaaatcgcatgggtgtaatgaatgtgggaaagccttcatccagagatctgagctcagtagacatcagagaactcacacaggagagaaaccgtatcactgcagtgaatgtggaaaaggctttagtgtaaagtcattcctcaatactcactggagaactcatatgggagagaaaccctatggatgcaacgaatgtgggaaaatgttctccatcaagtttagtctcatcctacaccaaagaactcatacaggggaaaaaccctatgaatgcagtcagtgtcagaagactttcagccaaaagtcacacctgaatattcatcagcggtctcacactggagagaaaccttaggaatgtggagaatgtcacaaagccttcagcc

SEQ ID NO: 471581 - DNA, 1154 bp, Homo sapiens
gcctcaatggtacagaggcaaagatgaggctggggaagggatgggagagtaacgggagaccaggagcgattggtcaacaggcacgcttacagttagaaagcgcaagttctagtgttctcttacaaattaggcaaattaacactggaacagaaaaccaaacactgcatgttctcacacagaagtgtgagttgaacaataagaacacaaacggacacagggaggggaacattcacacactgaggcccgtgggtctcaggctcaactgggaggcaccttataaacacagatcgttcatctaccccactaactggagagaaggaaaacgctgggtaaatagaatgcagaggcctggctgtgatcgatcagcctcaagaaaggagacagggtaaaagggagaaagaaaaggaagacccaaagtaacccaggaaatcagcacatagaagagacgaacagcccagcacgaagcgctgactcaccgctccacgccttcctggtccttaatgattggcggctggaagcgggaagaaaagatccgtggtgccatttgattggccaacgaattgctcccttgccattggctcagagggcttttgatgaacagatccagaaaatatgtgaagcgaaacgcccaccgccccttgaggggctgttctagacctttgctcctggtgtcgtatagagcgggggatatttcaagctggagatccgttttcttgtcccagtgaacaggtgcactatgttgaaataagagtggtgacggaggccttgtttatcttgtatcttattgtaaaaggtcatcaagaacccaccttggccaatcaagagaggagtcagctggctaatcaccgggcaggcaccgcctttttcttcccgcttcctagcttgtttgctttcgaccagccaaggagacctggtggcagggttggtgtttctgattttatactattgtataggatgatttaaagagtattccataagctttatgcctagtgactctgcttcataggttcctcaaaaaaaaaaaaaatgcaatattgtgtcagcgtgtgtatgtatattaaaagctcttattacttacttttctcaaaaggcaaaacactgttttacaccaacatttcataccctcatctgaccacagtgcaatgcttcttaaa

SEQ ID NO: 471582 - DNA, 3332 bp, Homo sapiens
atgatgatgtgtcttcagacaacagcagagagaaaatcaaaggattttccaggccattcctacaaattcgatttgttcagttgaattttataatccacttccgcacctccaggtcacaagtgtcctgtggatataggagtcctttgctgaagtgagaaactgcatgtgttgggcaagatgaacttttctgtaatcacctgccccaacggtggtaccaaccaagggcttctgccttacctgatggccctggatcagtatcagctggaggaattcaagctttgcttggaaccccagcagctgatggacttctggtcggccccccaggggcacttcccgcgtatcccctgggcaaacttgagagctgccgaccctttgaatctgtcctttcttttggatgaacacttcccaaaaggtcaggcatggaaagtggtcctcggcatcttccagacaatgaatctgacctcactgtgtgagaaagttagagccgagatgaaagagaatgtgcagacccaagagctgcaagatccaacccaggaagatctagagatgctagaagcagcagcagaaaaagttggttctactgggggcttccattattgctggcccattttcactctggggtattttcatatctcatcgtcaatgtttatttcagggaatatgcagacccagggatgccaagatccaaaccaagaagaactagacgagctagaagaagaaacagaccacagaagaaaatacagagagaacatgaaggctgaactactggagacatgggacaacatcagttggcctaaagaccacgtatatatccgtaatacatcaaaggacgaacatgaggaactgcagcgcctactggatcctaataggactagagcccaggcccagacgatagtcttggtggggagggcaggggttgggaagaccaccttggcaatgcgggctatgctgcactgggcaaatggagttctctttcagcaaaggttctcctatgttttctatctcagctgccataaaataaggtacatgaaggaaactacctttgctgaattgatttctttggattggcccgattttgatgcccccattgaagagttcatgtctcaaccagagaagctcctgtttattattgatggctttgaggaaataatcatatctgagtcacgctctgagagcttggatgatggctcgccatgtacagactggtaccaggagctcccagtgaccaaaatcctacacagcttgttgaagaaagaattggttcccctggctaccttactgatcacgatcaagacctggtttgtgagagatcttaaggcctcattagtgaatccatgctttgtacaaattacagggttcacaggggacgacctacgggtatatttcatgagacactttgatgactcaagtgaagttgagaaaatcctgcagcagctaagaaaaaacgaaactctctttcattcctgcagtgcccccatggtgtgttggactgtatgttcctgtctgaagcagccgaaggtgaggtattacgatctccagtcaatcactcagactaccaccagtctgtatgcctattttttctccaacttgttctccacagcagaggtagatttggcagatgacagctggccaggacaatggagggccctctgcagcctggccatagaagggctgtggtctatgaacttcacatttaacaaagaagacactgagattgagggcctggaagtgcctttcattgattctctctacgagttcaatattcttcaaaagatcaatgactgtgggggttgcactactttcacccacctaagtttccaggagttttttgcagccatgtcctttgtgctagaggaacctagagaattccctccccattccacaaagccacaagagatgaagatgttactgcaacacgtcttgcttgacaaagaagcctactggactccagaggaagacttcacaaagaagatgttgggtcgtatctttgaagttgaccttaatattttggaggacgaagaactccaagctttaaagcactgtaaaaggttaaataagctaaggctttctgttagcagtcacatccttgaaagggacttggaaattctggagacaagcaagtttgattccaggatgcacgcatggaacagcatttgctctacgttggtcacaaatgagaatctgcatgagctagacctgagtaacagcaaacttcatgcttcctctgtgaagggtctctgtcttgcactgaaaaatccaagatgcaaagtccagaaactgacccaagaaaacgagatagaaggcaccatgaggagaatgtacttagtatattcaaatgatatcaacaaagccatcaggccttctattaccaattctggacatgtatttctgtccagtgacatgttggagccagctgctacaacctggtgcaaatcggtaactcctgagtgggttctgcaggacctcattattgcccttcagggtaacagcaagctgacccatctgaacttcagctctaacaagctgggaatgactgtccccctgattcttaaagctttgagacactcagcttgcaacctcaagtatctgtggttggagtcctgtggccttacctaccagatttgtcagctctttctcaaactcactgagaacacaagtctcaacttcctcagcctgggagacaatgatctctctgatgtgagaagcctgagggagtcctccacgctaccaacgtgtcccctgaaggagctgtccctggagaaatgcaacttgtcggcagccagctgtcaggacctagccttgtttctcaccagcatccaacacgtaactcgattgtgcctgggatttaatcggctccaagatgatggcataaagctattgtgtgcggccctgactcaccccaagtgtgccttagagagactggagctctggttttgccagctggcagcacccgcttgcaagcacttgtcagatgctctcctgcagaacaggagcctgacacacctgaatctgagcaagaacagcctgagagacgagggagtcaagttcctgtgtgaggccttgggtcgcccagatggtaacctgcagagcctgaacttccatgaaacaggaacaggctttttggctcataagtagaataacaccccaaacccttctcagttcctgaagacagctgcctttttgctatacttcaccctgcttagagtttatctatttagctgacggtactccaaacagcccctcaaatttgtctaaacatcttccatgctctgcctgcccctctcactttgtcctatgcacttaaaaccacaagcctttttccaatgttctac

SEQ ID NO: 471583 - DNA, 4563 bp, Homo sapiens
gctgatattctatcctgagttgatgcaaacttggtaaagttggttatcttgtggggtttctccccttcaactatagttctcatattccgccctggacattctcttgctaccccggctccccatgtgaaaatggggtcatgctgtacatgagaaacgtgagccatgaggagctacaacggttcaagcagctcttactgactgagctcagtactggcaccatgcccatcacctgggaccaggtcgagacagccagctgggcagaggtggttcatctcttgatagagcgtttccctggacgacgcgcttgggatgtgacttcgaacatctttgccattatgaactgtgataaaatgtgtgttgtagtccgcagagagataaatgccattctgcctaccttggaaccagaggacttgaatgtgggagaaacacaggtgaatctggaggaaggagaatctggtaaaatacggcggtataaatcgaatgtgatggaaaagtttttccccatatgggacattacgacttggcctggaaaccagagggacttcttctaccaaggtgtacacaggcacgaggagtacttaccatgtctgcttctgcccaaaagaccccagggtagacagcccaagaccgtggccatacagggagctcctgggatcggaaaaacaatcctggccaaaaaggtgatgtttgagtgggccagaaacaagttctacgcccacaagcgctggtgtgctttctacttccattgccaagaggtgaaccagacgacagaccagagcttctccgagctgattgagcaaaagtggcctggatctcaggacctcgtgtcaaagattatgtccaaacccgaccaacttctgctgctcttggatggctttgaggagctcacatctaccctcattgacagactggaggacctgagtgaagactggaggcagaaattgcctgggtctgtcctactgagcagtttgctgagcaaaacgatgcttccagaggccacgctactgatcatgataagatttacctcttggcagacatgcaagcccttgctgaaatgtccctctctcgtaacccttccggggtttaatacgatggaaaaaatcaagtatttccagatgtattttggacacacagaggagggagaccaagtcttgagtttcgccatggaaaacaccattctcttctccatgtgccgggtccctgtggtttgctggatggtctgctctggtctgaaacagcaaatggagagaggaaacaatctcacacagtcatgtccaaatgccacctctgtgttcgtccggtatatttctagcttgtttcccaccagagctgagaacttttccagaaagatccaccaagcacaactggaaggtctgtgtcacttggccgcagacagcatgtggcacaggaaatgggtgttaggtaaagaagatcttgaggaagccaagctggatcagacgggagtcaccgccttccttggcatgagtattcttcggagaattgcaggtgaggaagaccactatgtctttaccctcgtgacttttcaggaattttttgcggccttgttttatgttctctgtttcccacaaagactcaaaaattttcatgtgttgagccacgtgaatatccagcgcctgatagcgagtcccagaggaagcaaaagctatctctctcacatgggacttttcttattcggttttctgaacgaggcctgcgcttcggccgtggaacagtcattccaatgcaaggtgtctttcggtaataagaggaaactgctgaaagtcatacctctgttgcataaatgtgacccaccttctccgggcagtggggtcccgcagttattctactgtctgcatgaaatccgggaggaagcctttgtaagccaagccctaaatgattatcataaagttgtcttgagaattggcaacaacaaagaagttcaagtgtctgctttttgcctgaagcggtgtcaatatttgcatgaggtggaactgaccgtcaccctgaacttcatgaaccccaataaccagatgcagatgaactgggaaacaagagagtctatttctgtaactgggtacacagggagaaggccaagaaatatcaccagaccaattaaaaattacaaagttttccagagcttatatgccttctaagctatatgtctacgtgtaagtgttcattcctctgaagacaccccaataaaacttgtttgtggaggtctggggagtttcttcagacccctaataaaaacttgtttaatcctgaatgggtcctgttgagaattccttcattatcctgtcatacttcaaggcccaggaaaggcctgggcaaaactcttggtggtcttttgttacattccagcctttgtgtgagggcactggctctgtcagcttttaatatttaacttacccactcagtcggtgctgaaactgttgtgatggaggcctgcctgttcagctgctagcgagacctggcctgccacaggtagaatgaattctgttcactcagatattgaatggctacatcagaccatgtttttttcatgtctactcccaacttatgtgggcaattccaacacattccacaaaatcacattcaaggggccctccagtccctgaggaccttttattagggaggggaataaacaccagagcttgttgttcaacttggggataactgttggtcacccgactaagacctcaagaatctaagcacagtgaatcacaatgtctttctatgatgctgcgtaaagacctgacatccgtagaaatcttaagacacgacatatttctttcatgttggttagtccattgatcacttttgtatgggttcctgcagggagttgatatcattcctacttatttgcatttctatgtatttgacggatgtgaaaatggatgaatctatttcatgggatttaaattttatgcaaaaattacgctagtgtaaatattctaaaaattgctttttcatctcatgtgtcttggcaatgtctatacatgccattttcaatgaagtattctttgaaaaatagagtgagactctgtctcaaaaaaaaaaaaagatacatatatacatatatatgtatataaagatacataagatacatatatacgtatatacgtatataaagatacataagatacatatatacatatatacgtatataaagatacataagatacatatatatatatatgtatataaagatacataagatatctgcatatgtgtacacatatatgtacagacacatatatacttattttataaatatttatatgtagatacttattttatatattatacatataagcaatatattatttatatataagtatatataaatatataaaataaatacgaatatattatatgtaaatatatgtaaatatacaatatattatacattatatacttacatattatgttgtatattatatatttatatatacataatttatattatataaatatatgtattatatatttatatataatattaaaatatatattaattatattaatatatttatatatgaaaatatataatgtatatatttccctgttttttgtggtctctttgctaacatgtataccagccagtgatataaaagcattcgttctgtttttaattctttggttaccttaagtatttggaaaagacttgtaaacatctcctctcatgatcaaaaaatgaatctaattttacctctttcaatccaaattttttgctctccattagcatagtcttggtatttaatctagctcatttaaattattgtcttgtagaacatctttcatttccaggattagtttggataatggtgttcatttttgttgatgatttgcttctcaaatgaaattcagtatgaattcactgccagtcatgattctttgatgcctcaaatctagtttgggttttaaatgttgatttatctcttagattgagtgaaatatattttcaggtagaaaagaactttctacacttgaaagtgtttatgcagtattttctaagcctttgcttgtatgagattattattatttttttcagatcacaaaattaattttatgtttccagtatacctgtggggctaacaagacagttatctgctttgggtccttttcatccacctgtcccctttgggtttgctgtttaatttaattttttttaaatttttttattatactttaagttttagaggggggagggatagcatttggagatatacgtaatgttaaatggcgagttactgagattattttttaatctagttttggtcatgagcagtaacttggctcagtgtaaaattcatggaccctatctgtcttagtctgttttctgctgcttataacagaatacctgaaattgcatgacgtataaagaaaaggactgtggaggctgagaagtccaaggtggaggggctgcatctggtgagagccttagtgctggggggattctctgcagggtcactagtgagtcactgagcatgctgtatactggctcagatctctttccctcttcttatacagccactcatcccactcccatgataacccgtt

SEQ ID NO: 471584 - DNA, 535 bp, Homo sapiens
tgaggtgattgagcaggttcatacattcagagctgagaataaataaaggtagaagaagcaagaagacgatgaagactttgtctatatcctgtcttagccttgagattctgggctcaagtgatcttcccacttcagccccccaaatagctgggaccacaggcatgcgccatcatgcccaggtgatttgtaaaacattttttaatgtagatggggactccctatgttgcccaggctggtcactaactcttgggctcaagcaactctccaccttaacctcccacagtgctgagattacaggtgcaagccactggcctggcccccattgttctctgagcattgtcttacttctggcacaagatgttccaagcccattctgtacattcccagcaccaactgtggagtcagctctttctctgaagattcttggttcctttaatgaggaacggtacttagaaaacaatacctgagcaccagtgtgctgtttctatgataccattgtttctacacttaagtttctttttcatggctgaatagt

SEQ ID NO: 471585 - DNA, 794 bp, Homo sapiens
ccagctctgcatgaattattctctattgcgattccctgtcttgacgaatcagctctgtctaggcagtgggcaagctacatttttttttctgtcccccgggctggagtgcaatggtgcgatctcggctcattgcaacctccgccttccgggtttaagcgattctcctgcctcagcctccagagtagctgggattacaggcatgcaccaccaagcctggctacttttggtatttttagtagagacagggtttcaccatgttggccaggctggtctcaaactcctgacctcatgtgatccacctgcctctgcctcccaaagtgctgggattacagaattcagtgatgggcggaggcgagtggtcacagagtgtggctacatgaaatacacacgttggagaaagatggttaattgtgagtgcgagtttacatttcatgggcccctggggtgtcgatagttcctcaatggatgtagatccgttactcaatttcttctctaaagatggggctagattacaatggttctcaacctaagaaaactttgcatttcaggaaatattttctactgcccagagacatttttgatcactgttaactgtgaggatgtgagctggtatctagggggtagaggctagggatggtgccgaacaccctggaaatgtacaggacgtttcccaacgagtagtgatccgatcccaaatgtcaatagtgtggagaaggagaaacctttagtttcttcacgcaatgtcctttttaaactttgtgcctctctttttaccaaccttcccccttcttccc

SEQ ID NO: 471586 - DNA, 899 bp, Homo sapiens
cgacacgataccgtccacaccacattatatcgccgcacgcgccgcttactgcatccgcgccgtcgaatatgactacggctctgcgtcgcatgttctcgccgcccgttaactgccgccgcgcgctctaggtgcgcgccctgacgaacaccgcaccgacgtgctctattgagcgagagtcgaacacattcgtcacgccaacattgatctcccgcgtgaatattgttcgccgccgtctacttccctcaccgagttcttcgccaccgaggagatgtacgccggcgcgattcgtcccccgacgctcataccacccccggcaactcgcaccccgactgacaccccacccgcgatttctcccccccgcgctactcccccctcgagagtggtccccgagctatacttccccatagcatcaccgccggagattcacgacccgcagatagttccccctgactacgccgcgccgcaattcccgccccgattgacccacacgtttcacgccggcaacctcgccccgcagaggccccacgcactcggccccgcctttgtccacctcggtcgccccaccgttgtttccggcacagtcgccacgataccgccgcccaatttacgactcgcctgcccactcccaactcgccagcggaatcccgccgggaccccacctctacctccccagatctctccaagtgaccgccgacggtccgccccgtactcgccagtttacccccctggtcccgccgcatcccacaccttcccgcattgctccccgcatcgatccgaattctgccctggggagccctgaggccttttcctgatacttggcaaggatgatctaatctcatctcatgacctggcggtggtgacttccccatctcacctctggggaaaccgaggcaggcttc

SEQ ID NO: 471587 - DNA, 1226 bp, Homo sapiens
ttagcccttcgcgttcggcttagtctgcggtcctcttgcattgcgactccgagtttaacttccaacacacactttcaacctccaagagacgcccccacctgtgtcgccccaatagcgacttttctcaccgtggtcgccgcggaacttcaagggtccttcctacccgcgttgctgagagtctgggtttacgcgtcacctcgggcgggacccgatcctccgctcctgaggcccccacaatgaagcagtcggacgcgtctccccaagaaagccggcacagtcttcactaccgtagaagaccttggctccaagatactcctcacctgctccttgaatgacagcgccacagaggtcacagggcaccgctggctgaaggggggcgtggtgctgaaggaggacgcgctgcccggccagaaaacggagttcaaggtggactccgacgaccagtggggagagtactcctgcgtcttcctccccgagcccatgggcacggccaacatccagctccacgggcctcccagagtgaaggctgtgaagtcgtcagaacacatcaacgagggggagacggccatgctggtctgcaagtcagagtccgtgccacctgtcactgactgggcctggtacaagatcactgactctgaggacaaggccctcatgaacggctccgagagcaggttcttcgtgagttcctcgcagggccggtcagagctacacattgagaacctgaacatggaggccgaccccggccagtaccggtgcaacggcaccagctccaagggctccgaccaggccatcatcacgctccgcgtgcgcagccacctggccgccctctggcccttcctgggcatcgtggctgaggtgctggtgctggtcaccatcatcttcatctacgagaagcgccggaagcccgaggacgtcctggatgatgacgacgccggctctgcacccctgaagagcagcgggcagcaccagaatgacaaaggcaagaacgtccgccagaggaactcttcctgaggcagggcccacatccggagctgcccactggtcctcgtgctgcacagccttggaggatctgaggctggctcagggtccctggcagcaactgccctgctaggtgggggctgctgggttccacagctgggccctccctgccggctgccaccaggcggcgctgcacgcccacgctgagtggggcaggccctggagcccctctgcccgggcagcctgac

SEQ ID NO: 471588 - DNA, 787 bp, Homo sapiens
gggaggccgaggccctcctgctgcaaggctgtgggtgtcatgtttgcaggtctagttccctggggccggccctggccccagctgcccagctctgccggctcccgggagacgcactctgctgacaccggactctttcctggaccatccagccgcctggccgacactcgatcccggccccacttccaggccagtgtccggccgaccagcctgccttgggccagggccccacgactccctgctgcgggacaagaggccgtctgtgcggctgtggtcgtgggagggtgtggtgaggccgtgaaggtggggacggtgcctgggcctgtggccgccagagctgctgcggctcagaaggtagcaccaggccccgtgggtgctgtgggggccatcgcctgcccaccatggggaccctcagctgcgactccaccccacggctggccacagccccccttggccggcgagtgacggagggccagattccggagaccggcctgaggaagtcctgtgggacggccaccctggagaacggtgcgtgccagccgtgggggatgggtgggaccttttcctgctccactccccatacttctggggcttctggaatgttctgggagcccagcaggaggcaggagtttcaggcaagtccttgcccttccccagacctcagttttccttccggcaggatgggtgtggacacggggttgccgtgagccccgagtatgtgtctgtccaacggaagctgcgtgctttgccagccgggtccccttccaggggctgtgggtacagcagtggg

SEQ ID NO: 471589 - DNA, 525 bp, Homo sapiens
caaggacacagctaattcttaatccatgtcccgaagccttgtcgactcctggacccttcttgggtgcgctgtgcctactgtgcgggcttctgctttggggtccttcccttccagctccccctcctctgccccactgccgactccaccactgcttgttttctgctctccttggccgacctttccagcgttctccttaggaggcggcccgggcctgattccaatgcatttggaggacagggctgggcaggcactcaccccctacgctgccattggtccctgcgggcagcagggtggctggaatgagggatcacgaggaagatccggaggacaggcccagagccagccactggcctgctgctttctgggcctggaagagggagttagagaagactctgctccaccacctcttgtggaaggcctgacattagtcaggcccgcccgcagccatccagaggcctaaacgtgcccctgtgatgctgtgcttcagcggtcacgctcccgtttacaacatcagtcattggattt

SEQ ID NO: 471590 - DNA, 2445 bp, Homo sapiens
ggctcgtgccctcgatcagccaaggtcacagagcttagaatgacactggaggtcggctcctgtggtttcaacagccgcatcctgccccacgtgtaccccatccggctggtgaaggtcaatgaggacacaatggagctgctgcgggatgcccagggcctctgcatcccctgccaggccggggagcctggcctccttgtgggtcagatcaaccaacaggacccgctgcgccgcttcgatggctatgtcagcgagagcgccaccagcaagaagatcgcccacagcgtcttcagcaagggcgacagcgcctacctctcaggtgacgtgctagtgatggatgagctgggctacatgtacttccgggaccgtagcggggacaccttccgctggcgaggggagaacgtctccaccaccgaggtggagggcgtgctgagccgcctgctgggccagacagacgtggccgtctatggggtggctgttccaggcaagctggggttgcagggggtggtcctgaggcatggagtggagggtaaggcagggatggcggccgtcgcagacccccacagcctgctggaccccaacgcgatataccaggagctgcagaaggtgctggcaccctatgcccggcccatcttcctgcgcctcctgccccaggtggacaccacaggcaccttcaagatccagaagacgaggctgcagcgagagggctttgacccacgccagacctcagaccggctcttcttcctggacctgaagcagggccactacctgcccttaaatgaggcagtctacactcgcatctgctcgggcgccttcgccctctgaagctgttcctctactggccacaaactctgggcctggtgggagaggccagcttgagccagacagcgctgcccaggggtggccgcctagtacacacccacctggccgagctgtacctggcacggcccatcctggactgagaaactggaacctcagaggaacccgtgcctctctgctgccttggtgcccctgtgtctgcctcctctccctgcttttcagcctctgtctccttccatccctgtccctgtctggccttaactcttccctctttttcttttctttctttctttcttttttttttaagatagagtctcactctgctgcccgggctagagtgcagtggtgggatctcggctcactgcaacctctgcctcctggggttcaagtgatcctcccacctcagcctcctgagtagctgggattacaggcacccgccaccacgtccagctaatttttatatttttagtagagacggggtttcaccatgttggtcaggttggtcttgaactcctgacctcaggtgatccgctggcctcggcctcccagagtgctgggattataggcgtgagcctctggcccggcctttcctttttcctctcctctcctgccgagagtggaacacgcgtgtcctgggagctgcatcttgtgtagggtccagctgcttttggggactgcaggaatcatctcccctgggccctggactcggactggggcctccccacctccctctcggctgtgccttacggagccccgatccaggcctcctgtggctgttgggttccagatgctgcagctccatgtgacttccaagcaggccctccgccctccctgctgaatggaggagccgggggtcccccaggccaactggaaaatctcccaggctaggccaattgccttttgcacttccccgttcctgtcacatttccccagccccaccttcccctcctgatgccctgaaagcttccggaattgactgtgaccacttggatgtcaccactgtcagcccctgccttgatgtccccatttagccatctccatggagctcctgctggagggccctgaaccctgcactgcgtggctgcccagccagctgcctcctgtcctgggaggaggcctcctgggtgtcctcatctggtgtgtctactggagggtcccacaggagaggcagcagaggggtcaggggaggtctcctgccgggggttggcctctcaagcctcaggggttctagcctgttgaatataccccacctggtggtggcccctccgatgtccccactgatggctctgacaccgtgttggtggcgatgtcccagacaatcccaccaggacggcccagacatccctactggcttcgctggtggctcatctcgaacatccacgccagcctttctggggccggccacccaggccgcctgtccgtctgtcctccctccagcagcaccccctggcccctggagtggtggggccatggcaagagacaccgtggcgtctcatgtgaactttcctgggcactgtggttttatttcctaattgatttaagaaataaacctgaagaccgtctggtgcctgctgggagcccattcattgagtgtccctatgtggcacagaacccttgctgagtttcaga

SEQ ID NO: 471591 - DNA, 1455 bp, Homo sapiens
tgtcattagtgcccaggagtggggtcagcaggaggaactctacagctatgggagaacctgcgttcacctcttttccaagcctgcctgttctggggaagctcaaaaggaacatgatgccctgggctttacagaagaaacgagaaatccacatggccaaggcccatcggagacgagctgcgaggtctgctctccccatgagactcaccagctgcatcttccggaggccggtgacaaggatcaggtctcatcctgacaaccaggtcagacgcagaaaaggggacgagcacctggagaagccgcagcaactctgcgcctaccggagactgcaggccctgcagccctgcagcagccaaggagaaggttcaagtccactgcatttggagagcgtcttaagtatccttgcaccggggacggccagtgaatctctggacagagctggtgctgagcgtgtgcgcagcccgcttgagcccacccctgggcggtttccagctgtggcaggggggccaaccccaggaatgggttgtcagctcccaccgcccctctctggccaattggtgactcctgcagatatccggagacaggccaggagggtgaagaaagccagggagagactggccaaggccttgcaggcagacaggctggccaggcaggcagaaatgctgacatgtagatgaagcgcagtcctgggctttcggtccctttcttttaatgcccatcctcattcctactctgaattgtcacacttttcccttccccaccagttctttaataaaagtatttgaaaggcaacaggtcagagttagagtggcaggaagtgcctatcagcagatgctactgcacaccagcccgggcgacagagcaagactctgtgtctaaaaataaatatataatttatatataattataaatacattatatataatttctatataattataaatacattatatataatttctatataattataaatacattatacataatgtatacataattataaatacattatgtataatacaattatatactatataattatattatatactataatatatttcttatataattatattataatataatttatatgttatataattatattttatattataatataatttatatgctatataattatattatatattataatataatttatatgttatataattatattatatatataatataatttatatgttatataattatattatatatataatataatttatatgttatataattatattatatattacaatataatttatatattatatacttacatatattatatattaaaatataatttatatattatgtaattatatattatatattataattatatttatatatcatatttatataattatataatataatgatataatatatactatatagatatatgtgggatcctctagagcgaccgcagca

SEQ ID NO: 471592 - DNA, 1172 bp, Homo sapiens
gatcacccggcgtctggaaagctctcgtggtgtccccgggagatgaggccaaccacgtcccatccttgtaggaacaaaaatgagtcaccaattggccagagaggggcggtgggagctgacaacccattcctggggttggcccccctgccacagctggaaaccgcccaggggtgggctcaagcgggctgcgcacacgctcagcaccagctctgtccagagattcaccggctgtccccggtgcaaggatacttaagacgctctccaaatgcagtggacttgaaccttctccttggctgctgcagggctgcagggcctgcagtctccggtaggcgcagagttgctgcggcttctccaggtgctcgtccccttttctgcgtctgacctggttgtcaggatgagacctgatccttgtcaccggcctccggaagatgcagctggagctccaggcattgacactgggtcctgggacctcatcgggctgatgcgaaagaaacgagaaatccacatggccaaggcccatcggagacgagctgcgaggtctgctctccccatgagactcaccagctgcatcttccggaggccggtgacaaggatcaggtctcatcctgacaaccaggtcagacgcagaaaaggggacgagcacctggagaagccgcagcaactctgcgcctaccggagactgcaggccctgcagccctgcagcagccaaggagaaggttcaagtccactgcatttggagagcgtcttaagtatccttgcaccggggacggccggtgaatctctggacagagctggtgctgagcgtgtgcgcagcccgcttgagcccacccctgggcggtttccagctgtggcaggggggccaaccccaggaatgggttgtcagctcccaccgcccctctctggccaattggtgactcctgcagatatccggagacaggccaggagggtgaagaaagccagggagagactggccaaggccttgcaggcagacaggctggccaggcaggcagaaatgctgacatgtagatgaagcgcagtcctgggctttcggtccctttcttttaatgcccatcctcattcctactctgaattgtcacacttttcccttccccaccagttctttaataaaagtatttgaaaggcaacaggtgtaaggagtggatggttttgtg

SEQ ID NO: 471593 - DNA, 520 bp, Homo sapiens
gctgggggcttttatgaggcaggggctccatcagattgagagtgcagggccccgaggttccattgggttccctgaaccccgtggaaatgtggcccttccgagaaacctgggctgggctgcccagggccgtgggaatagcctctatgggtccctggttctccttgggcagacttttgagtcagaggaaagccagcttggggaggaaagcaatttcctcatctcaggccccccaaagccaaggtggtactttctagatgctggccccagagctccgggatgtgccgtggacctctacacagatgttcatcaattcctgggctctggtcaacatccgttgaagttggaatggttgttgggaccccctctgatgtccccccaagacagggccaggaatgtggcaggggaattctgtggctagtgggggaccccaagtgagggcttgtctggggtcttgtctggggctcagtcctgctgctgacttactgtgtgatgtgagcagatgaaagaccttctctagaca

SEQ ID NO: 471594 - DNA, 1632 bp, Homo sapiens
agcaaagggaccactctagacccacattttggcatccctgaggaaaacgggaaagggacaggtaaaaccacaactttaaaacttttcaaagggactctcctcccacccaaagaaggactgatttaggaatcactgtgagatgttccagcccagattagagtaagtcatggctactttttccagctctgcctgtctgactgtggggcagcagatgcatcaaagacagtgggaccacctgggcaccctgaaaggaaaggggttgatgaaagacagatgctcgaccaccttcaattatccaccgacagacttctcttcattactgagaatggggctgaatcagggtgttgaccttggccacatccatgtcatagagctacttcacatgctgtttgatctggtgcttgttggcttcaatgtccacaatgaacaaaagtgtgtcattgtcttctatcttcttgatggtggactcagtggtcagcggcaacgtgatgattgcagagtggccaagcttgtttctcctgggggtgctctttcgaggatatttgggctgcctccggagtcacagtgtcttgggctgctggaagacttcattctggtgggcctcttcagtcactcaggatcacgccagctcctcttctccctggtggctgtcatgtttgtcataggccttctgggcaacaccgttcttctcttcttgatccgtgtggactcccggctccacacacccatgtacttcctgctcagccagctctccctgtttgacattggctgtcccatggtcaccatccccaagatggcatcagactttctgcggggagaaggtgccacctcctatggaggtggtgcagctcaaatattcttcctcacactgatgggtgtggctgagggcgtcctgttggtcctcatgtcttatgaccgttatgttgctgtgtgccagcccctgcagtatcctgtacttatgagacgccaggtatgtctgctgatgatgggctcctcctgggtggtaggtgtgctcaacgcctccatccagacctccatcaccctgcattttccctactgtgcctcccgtattgtggatcacttcttctgtgaggtgccagccctactgaagctctcctgtgcagatacctgtgcctacgagatggcgctgtccacctcaggggtgctgatcctaatgctccctctttccctcatcgccacctcctacggccacgtgttgcaggctgttctaagcatgcgctcagaggaggccagacacaaggctgtcaccacctgctcctcgcacatcacggtagtggggctcttttatggtgccgccgtgttcatgtacatggtgccttgcgcctaccacagtccacagcaggataacgtggtttccctcttctatagccttgtcacccctacactcaacccccttatctacagtctgaggaatccggaggcttatgagaaggtactcaacatcactgatcatcagagaaatgcaagtcaaaactgtgaggagatatcatcttaccccagttagcttacatccaaaagacagacaataatacatgctgacatttatacagttctcatctcattctgggcacacggaagatcatgttggcctcatctccttgattttaaaaa

SEQ ID NO: 471595 - DNA, 1586 bp, Homo sapiens
tgaggcagacaaatccagtctgtagagaagagatgacagcctttgggcaggcagggctgggcagggacccatcctcttggctgcattgtgatgtcttaagaagactgaaggggcaccgtgacgtcatagattgcgggcccacccctccccctgtctgcctgccctccccactggccgggcctcaacctcttctccccacaaccccaaccccagaggaaaagccccctcacctggcgtcccgcaaccatggatgcaagtcgccccaagtcctcggaatcccagtcctccctggaggcccccaggcccggcccaaaccccagtcccaacgtggtgaacaagcccctgcagcgggacttccccggcatggtggccgacaggctgccaccaaagaccggcgtggtggttattgacatgggcacaggcacctgtaaggtaggttttgctgggcaggccagccccacctacaccgtggccaccatcctgggctgccagcccaagaaacccgccacctcggggcagtccgggctgcagacgttcatcggcgaggcagcccgcgtgctcccagagctgacgctggtgcaacccctgcgcagcggcatcgtcgtggactgggatgccgccgagctcatctggcgccacctgctggagcacgacctccgagtggccacccacgaccacccgctgctgttctccgacccacccttcagcccggccaccaaccgcgagaagctagtggaggtggccttcgagtcgctgcgctccccagccatgtacgtggcatcgcagtcggtgctgtctgtctacgcccacggtcgtgtcagcgggctggtggtggacacgggacacggggtcacctacacagtgcccgtcttccagggctacaacctgctccacgccacggagcgtctggacctggcgggcaaccacctgaccgccttcctggcggagatgctgctccaggccggcctgcccctgggacagcaggacctggacctagtggagaacattaagcaccactattgctacgtggcctccgacttccagaaggagcaggcccggccggagcaggagtacaagcggactctgaagctgcccgatgggcgcacggtcaccctgggcaaggagctgttccagtgtccggagctgctgttcaaccccccagaggtcccggggctgtcacccgtcggcctctccaccatggccaagcagagtctccgcaagttgtcactggagatgcgcgcggacttggcccaaaacgtgcttctctgcggtgggtcctcgctcttcaccggcttcgagggtcgcttccgggcagagctgctgcgcgctctgccagccgagacccacgtggtggtggctgcccagcccaccaggaatttctccgtatggatcgggggctccatcctggcctccctgcgcgccttccagtcctgctgggtcctgcgggagcagtacgaggaacagggtccctatatcgtgtaccgcaaatgctactgaccagggcagagctggggagggcgtgggggcagtaaagcctctgctacagccggctctgtcctgtccttcctccagggcctgccccatcc

SEQ ID NO: 471596 - DNA, 997 bp, Homo sapiens
attattattattattattattattattattattacatcagggatcttgttagattctagataaaaatactcaaactccaatcatggggagagctcatgggatggggggctcatctggactggtactgaccctgagaaccagatgcccctggccaactggatcacttggactcaggagcatcgcctgcccccaccagatctgggggctgggctagttcttggctactccaagtttatcagagccacaaatgtgtgcagggttttatgatctggaggatgaggatggggattcttctgttgcattcacccaaaaagcttttgtatttgggacagagcctgtcatgcaagtgtgtgagaaatattgttgaattgaatctgaggtttgataaggaaacaggagccatgttatggggcagagggagacaaagaaggagggtgtcacaaacaatgaaatctattccttttggaatagatttcaaagggtggcccttacagaacctgccctttgataagaagatggacaaccttcagaatggggataattgtagttcctaccccccgagggctgtgggagaagtcgaggaggtgacacccacggggagtgttttgcggccagaaagcgccgcgtcacggatgatggataactgcattgacgtcatttcgcgtaaaagttgattgtatcagaaggagaggttcctggaagtgccatagctgggccaggtgtttgcggctggaatatgtcctgtatagggttgtaccaatttccctccccactttcaaggcaaaacagtactagtttccccagagtctcaccaacggatctttctctgtcacacaagctggagtgcagtggcatcaacgttctgaattccatgcccttgagcttggaggtgctgccccctggtgtggaggagaagaaatgtctcctcaacaccccatgacctcctggtaggggattctgtgcattctataggttgagtctaccttggggagagccc

SEQ ID NO: 471597 - DNA, 663 bp, Homo sapiens
cagccagatggaagacatgcacagggcaaggtatgggagaagaggtgcagagcttccaagccctctttagaggtgccaccccggggacccacacatgttcagcaatctagaatctcctagacagcttaacaaatcttttggatttgtatggagggaaaataacaacaccatcggacaccataatggattccccctttggtgttttgcaggaggaccctgtgctgaccgtgatcacccaggtggggctgaccatctctctgctgtgcctcttcctggccatcctcaccttcctcctgtgccggcccatccagaacaccagcacctccctccatctagagctctccctctgcctcttcctggcccacctcctgttcctgacgggcatcaacagaactgagcctgaggtgctgtgctccatcattgcagggctgctgcacttcctctacctggcttgcttcacctggatgctcctggaagggctgcacctcttcctcaccgtcaggaacctcaaggtggccaactacaccagcacgggcagattcaagaagaggttcatgtaccctgtaggctacgggatcccagctgtgattattgctgtgtcagcaatagttggaccccagaattatggaacatttactcagtaagcataatgtgtgtctttat

SEQ ID NO: 471598 - DNA, 1156 bp, Homo sapiens
gagtgggatatgtcttggacccagcaaggtcctggctacctccctctctgtcccttgcctcctcccttcaatcaccaggtttacatcactcaactccctcgatgtgcctgtggtgtgcccacctcccctgctcgcctgtgtgccccccactcatccccccctgcctgcaagctaagagagggcgtccagtttgctgggtctaaccccagtcctgagcacgtgcccccggagctgtgggagcccttctataccgaccagtacgcgcaggagcatgtgaagcccccggtgacacggctgctgctctcagccgagctctactgcagagcctggcgccaggcactgccacagcttgaaacaccccccaacccctctgcactgctggccctgctggcgcggaggggcacagtgcctgctttgcccgagcgcccggtgcgcgaggccgacctgaggcaccagcccattctcatgggagcccacctagctgtcattgatgccctcatggctgcctttgccttcgagtggacaaagaccctgccaggtcccttggccctgaccagcttggagcacaagctgcttttctgggtggacacgaccgtccggcggctgcaggagaagaccgagcaggaagcggcccagcgagcctctccagcagcccctgcagacggggcggccccggcgcagccctcgtgccctacgcgctggtactggaagctggttcctcacgcaattgccttctgtttgaaggagtcggggagcaaaccccccatgatccgataccgcaaggaccgtgtggtggcgcgacgtgccccctgcttcccgacggtgaccagcctccaggacctggccagtggggccgcgctggccgccaccatccactgctattgtccccagctgcttcgacttgagggtccgcgagaccagcaacgatgcagtggtcatgagggcagcttccggaactggcaggcctgagtttgtgtctctctcttccccaatgagctttgtgacctcacacaagtatataaacctctctgtgcttccaggagttcattcctgcagcagatgaaacgtatggagtgtggactgtgtgccagaccttgttttaggcactggggatccagccagaatagagacacactccccacttcacagacggctc

SEQ ID NO: 471599 - DNA, 746 bp, Homo sapiens
tgcatatcagaccccagctgcctgcagctctcctgaactctggtgcctccaggtccctgatgagactcttggcttctgatgggcccccactgccctgcatggtcacgagtcttgtagggagcaatccacaccccaggagccccgtctgccaggcctggactcctcaaccggaggaggagaaggaggaggaggaggaggaagaggaggaggaagaggaggaggaggaggaggaggagaaggaggaggagaaggaggaggagaaggaggatggggaggagaaggaggagggggaagaggaggagggggagaaggaggagggggaggagaaggaggagggggaggagaaggggggggaggagaaggaggagtgggaagagaaggaggaggagggggaggaggaggatggggaggaggaggagaaggaggaggaaggaagaagggtttttccaggatgtcttgcaagcccttggcctgatggggacctgcagctgaatggtgacctgaaggacaacctcgtgttagtcagagaccagcagggcaggacgctagagggaactgccaagtgcagagtatctggggcaggaggtgcgggggtggatagcggaagatgaggccatcaaacctcatggaagggatgtacttcagtcatccctttgcctgtgatgttccccttccccaccaatagaggctgagcaagcacctcagacttgagagtggaccaagcctccttgctgcaggcccccaag

SEQ ID NO: 471600 - DNA, 660 bp, Homo sapiens
gcggtgggcggcaagcgtccgtcagaaagaggaaagagcgtggatagtacctttacgtggcaatgaccggcgccagccagaatgcactggcgcagaaggcccacgccaacaacttggcgaacgtttccaccaatggttttcaacgcgacctggaacaggcgcgctcgatgccggtgttcggtgacagctttccggcgcgggcctttgccttgaccgagcgcccaggcacggatttttcccctggcgcgatgattgaaaccggccgtgacctcgatgtggccgtcagcggcgacggctggatggccgtgcaaaacccggatggcggcgagtcctacgtgcgcagcgccagcatgaacgtcgatgcgctgggcgtactgcgggccggcaacgggatgccgatcatgggcaacggcggcccgattgccgtgccgccccagcagcagatcgaagtcggccaggacggcaccatcagcatccgcgccatgggcgaaggcccgcgggtgatggctgaagtggaccggatcaagctggtgcagcccgacctcaagaacatgaccaagggcctcgacggcacatccacaccaaggatggccagccggcccaggccgatgccaccgtcaagctgacgtcgggcttcctgcaggcgagcaacgtgacgcc

SEQ ID NO: 471601 - DNA, 4299 bp, Homo sapiens
gttctccatcccaggcaaacacctctggtggccaagcccagccgagaaccataacagaaagtggactctgtgaaacatcactctggttctgccaagttgagcacagcactgagccaccacaggcagcattccaagccacaccagtgggtaaaatctctactgtgtctttgcctagagatcattaaattgccaaatgatgatattcccagatgagtgatgtggatgttcctacaagggggccatttaaaagtggaagagttggactggaatggaattagcttagtcggccgtgggctccctgaggacagggcgtgtgtcacttctcgcaaggtttcccaggcgcccttgcgcagggccctgcacgaagcgcatgcgcactacccgcgacctcgttgaccggaaatacttctgcctgggtctcaccacaaccgtcctctgtgactggagctcgactgaagagagctgcgactctgaggacgtagtcaatggaggccatgacttcccgtctcttggggagataccgccgatgtcctccagacggcagtgctggggattccagtcggcgccgggctgcaggcctcgcgctgagacccagcccgtcgtggttgggcgttacccaggtgacctgataatcacaggactcatccgccagacgtggtctcttctctgccttgccccaccgacggcttccagttttgcagctagagtcttcgaaaaaggcgagcaacttcccagaacggctgctgaagtctggggcccatccccttacccctagtgcgcccattctacgctagcgtttctcagaacttgctatttccgattattagcattgatttgactgggggaaaagcctgtgagacgcctagcgcggaggataggaaatggctttcgacaagaagcagttgctggggtactcagcctcttttacacagttctgtggagatgcagattacgtcaaaatgtacccagtgtacaactgaatattttttggtaaatgtatgagttgtacagccatcaccgcaacccacttttagaatgtttacgtcaaccaatcccaccatccccagttccctcgagcccatttgaggatcagccccaggcaagcactaatccactttatggctcttgagatttcccttttctggacgttccatgaaaactgaattgtacagtttatgatgttttcttcttacctttagcagaacacttttgaagttcatccatattgtaacgtttatgtggagtttggtctcttttagaggaagctagttttggttcagaactgctttgctgaggaaccattcacctattttctgtctatagatttgcctattctggacatttcatataaatggaatcatacaaggtgtgagcttttgtgactgcctttttttacttagcctactgttttcaaagttcatctatgctgtagcatgtattagaacgttgttcttttctattgccaaataatattctgttgtttggctatacattatttatctgttcatcagctaatggccatttgggttttttcccctttttggctatgttatgaataatgctgttaagaacattgatgtgcaagtttttgtgtgaacatgtgttttaattttacctaccagtagaattactgggtcatgtggtaactctatgtttaacgttttgaagaactgccagattgttttccaagtggcacccagatcttttataaagcacttactccagtgcctggcacagggtaagtatcccatacaagatagctattcttgtaacacattttcattgtaggaaatatgttcttgaaagccactcttctaatttagttcaatgaattggcaagccctcgtctttttcttcttaatgtcctgggaactatctgtgcagactaagaataatttgttccttaggcattggaagaacacttacagtcaaacagatttcaagtaattttgtttccctagaaaattatgcatttctttaaggttttccagtttattaatacagaattaatgtaggatagtggttgcagagtctgacctctggagttacttactggatatgcttcagtttccttatatgtaaaatagaggtgatgagaacacctatctcaggaattgtgaggatgagctgcaaatacatgtaatgcttgatgcagtatatagcacacgggaaatattcaataaatattagttttatctcatggagcctgtgggggctagattattaaaatgtaccagaaagttttaacatacaggattctttgtaagaaggcttttcttaccttttttcccccccatttggcagtcagtttgctaatttttattttccttgaaaatgttccttttcattaaaattttcatatgtactcatctaaaatcatattgaatattaacttttttaaacttttaataggtaatatatttgtgtggtttgaaattcaaaaaggagaaaattcctcctcccatctttccctctctatagataaccagtgtctcagaagatgtgtttgagtcagaaaaagaaaaaaaaaaagataaccaatgtcaatagttttgtgaatatccttccagtgttattccatgcatatagaagcaaatatgtatacagtgtgtttctctttttatttaataaatgaagtatactgtgtttactgttcaacaccttggcttttcatttaacaatgtatcttggcgattgttccataagagtttttgcatgcttttttatcattgtagatttttctattaaatgtatgtgccataatttattcatccagtctcctctttgtgaacattttacttattgttagactttgttaaatctgtatctcttagctccagatgtttttctgctttctgattcatgttttacttttatatcaattattgcctttttctccattcttcttaggtttatctcatgatgggcctttaaaatgaaccagataaaaatgattttctctacctgcacgatgatctgcattgtggaagccagagtagctctccttatcattctggtcatgttcttaggcattgacatgtgagtatgtgtggaaatcatgctgtttttcaggggacctgcttgagatgtgagtgccgatctcacctgggagaaattcttgtagtgtgctacagttgcgggttgtatgggatctccagtcgttaaatggcctacaggtcttgcagggtctgactcttctgtgcttctgtagcctttatcttatgccattctgtattctagctacacaggtttctgtactcctccagcctcataagccttgtgcacaccgttaactaggcatggaatgtctttctttattacctagtctgggtcaggctctctgatatatgtgttatagcacaatatttctttcatcacatttattgcttgttacttatgttatttatatgcttatttgattgtttggcttcatcagtgagctataagccccatgaaggcagagactgtgtctccattgtttatcactgtgtctctagtgtctgaatgtagttgatacgcattacctgtttattagatggttggataaatgaacatctaccattttgccagttcagggttagagctttctggctggtaagccaacttgagcaaaaagtggatgagtaaccctgcattttctacatgtactactttggttaccatgttatagcttgacttctgaatgttttagcttctcatgagaaatggtgtccagtgcccttttggacagggacatataagctgaactttagttctgaaccttaacactgtctgccagacttgacatattttccttttataatatctgattcatgatggaggtggtcttttgcctgtctttaatcctgtatgtaattaattgcttttgggaactgttcttttaatatttggacttagtggtactttttgtgaaagggttggttactttaatatgaatgtttggctttatactgtcctgaaactcctacttgagaaagttaaaaaataaaagttttccttaaggaaaatttgttagatttgcactactgaggaacggtgtacaaatttgtatctgaagatatttatccagcagcaccgaatatatacacatgaattcgaaatacttaagaactggtttatttatttatcttgtaaagtagtgtttattttaatctgaccatgcaacaaatcagctatgtgtggaggacttcagagccctggcagagacctctccagaatccctgctcagtgtctccacttgctttagtgtaagcattttaaatattacatgtcccacatagcttttgatgttatgctctt

SEQ ID NO: 471602 - DNA, 881 bp, Homo sapiens
gtgtagatcatgagatagggcaatcttggtgaggtcctactcatagcgtcatccgcaaggatggtgccccctggatggtgccccctggatggtatcccctggaaggtaccccctggatggtatcccctggatggtgccctctggatggtgccccctggatggtatcccttggatggtatcccctggatggtgccccctggatggtatcccctggagggtattccctggatggtgccccctggatggtgtcccggatggtgtcccctggatggtacctcctggatggtatcccctggatggtgccccctggatggtatcccctggatggtgcccccagatgaagaagaagaagaagaagaagaagaagaagaagaagaagaagaagaagaagaagaagaagaagaagaagaagaagaagaagaagaagaggaggaggaggaggaggaggaggaggaggaggaggaggaggaggaggaggaggaagaagaagaagaagaagaggagagaggaaagagagagggaagagagagagcgagagagcaagagagagatgcaaggagcagacagcctttctaaaggactcacaggagaaatagacccggaactccagactgccaaagaggtccatctgtaacgcagcctctgctgagcacctagcagcctcccctcctatctctctccccaccactcattatgtgccgctgtgttgtctgggcacctcaggcttcttcctgactttgcacctgcccacaacttcttccccagatcttcccattactgggtacttccgaccctttgggagtgagtgctaccgtgcattcgcctcctccaggaagtcttcctgacctccttttgaaagtaatatttgcgcagtatggcca

SEQ ID NO: 471603 - DNA, 593 bp, Homo sapiens
tccttgccttctgccaggaacggttcaagtgagtgactgctattagcaatgactctgattgatttttgttctggtcggcttctcatctgctggaatagaagccccatgagggcaggaatacgtgtctttacccacgtattcccagtgcctagcaagatctgcatccctgaaggtgagtctttgggagatgtatgggttgggggagtggattggcctgaggcttgcggaaaggtgattgacagtggcgaaaatgaagtgactgggagattaatcaacctatgtgacctgctccctctcctgaccgtttatctgcccttagcaacagagggaggctcagactatcaccatggaaactgcagctggagggcggaaagcctgcaggccctcgcccctacttcatttatgttcaaatacaaaggagcgttgcggaatgggagcgaggtcggggaagcggccccacttgtcctgtggacgtctccgggacccactactctactgcaggctccggtggtctagacattacttgttccctcattcactcatcgagtcagtcaacagacaccagttgtgcatcagatgctgttctaagcatg

SEQ ID NO: 471604 - DNA, 584 bp, Homo sapiens
cagcgagggggaatggcaccgagagccctcttcgcgggagtcacacaggaggcaccgattcctccagcaaggagttgcaacaacacctgtgaaatgtcatctgctgcggaactcattagagactcgatcatcataatcaaccattatctgctttcatcatttgtttcttcatttgtctatgcattaaccattgattttaccccaacagtagtagcagacacgcttctagaaaatggagatcttgcagaggtttctaaccagggaccattttgcttacaaagaggcattcggaaatactttcagtcggcacagctggaaggggtccttactgccacgcacgcgtgcagtctcatgaaaaaggggaatactgtgaccgcccctgtttccaaacggatattgggcctcttttcaagcgtacgttttcagtttacactttcagagtttgttgatttcatcatttacaagagccaaaaggtgggagcagcccaaatgtccatccatggatgaagagaaacaaaatgtggtttgtacacagcagaatgtacaagctgagcatccctcatcggaaaatctaaaatccgtaa

SEQ ID NO: 471605 - DNA, 1776 bp, Homo sapiens
cccagcaaaattgttccacataatgattcagaaaagcctaatgattcagaaacttttgttgacccagcttcgaggaaaattccacagagctcacttcctgcatagctggcactctcttgggtcatcatcactggtaggcttctgggctgtctccatggaaactgtagccagcgtttccatggagaaagagcccgcagagtctggaattttccaggctctaaaggtgactgcaaaaacatctcagcacatctccagaactgggctgcccaacatggcggccactggccacagcttcaaaaatattctcttcggttttcttgccatgactgcagaatggaggccacgagcccacttccttgccccaagccctgttccctactcacacggcgcgagcgctgccccccctactcagacggcgcgagcgctgcccccccctactcacacggcgcgagcgctgcccccctactcagatggcactctagaactggaatgtcccacagagcagccgcaaaccacagatggctgttaagcacttaatatgtggctgctgtgaattgagccttgccacacgatgagtttcaaagacttagtattaaaaaagaatgtaaaaaatattattacaatttttatattgattacatgttgaaatgataacactcaggtcctgcaagaagaccttggttactgcaggaagaatttgggctcaaataaatagaagttcagatggtagaaatctttctaactggagactcttggtctttgagaagtagtttgaatgtcaacatctcacccagttgccagataaaacctcggttcaacaacccaccatggaatttttccctgattaatgagctaaattctgtactggaatccaagcaatatatatgttgccatccaactcaggaagagactggctttctcggaaagagcacaacccacccagtgttctggagacctctatttccaaaccataaaaatattaaatactagccatctgttttgcagatcgcgtccctgatttccatcattcatcagtttcttttttcctccctctcgtttcctggggtgaacatcctgccccctcattttctgggttcccctcatgaggatctgttaagggacctggcatgaagctgctggttgtatgtgatgcataatgccagcctacttccactgaacaaaattctgttatacattcagagcaaaactaaacaaatgagaattcactaaaatttaataacagctttgttgagatagtcacatactatacaattcatcgtttaaagtacttataagtcaatggtttttagtatactcatagagttgtgaaatcatcagcacaatcaattttagaacatttagaattttagaacatttagatcatcccctaccaaaaaatcccatgccccttagtcgtaactcagcatttcctcccagtgttccccagccccaggcagcacatgaatctacttcatgtatctgtagatttttgcattttgaatcatatgatatatgacttttgggtaagattttttcacttagcttaatgtttttgagctcatctgtgctgtaacatgtatcagtacttaattcttgtttatggcagaataatatttcattgtatgggtgtgccacattttacatatgtattcataagttgatagacctttgggctgttttcacttttggctattatgactaatgctgctatgaacatttgtatagaagtttttgtttgtgtagatgtatgtttccatttctttggggtatatatct

SEQ ID NO: 471606 - DNA, 488 bp, Homo sapiens
agccaacatgacgcagttacctggccatttctccacattcctggtgagcgccccacacccagccgcagaaaagcccctcctgcattccgtcctcacacacaggcctgtccatctgcttgctactgtcacactcttgccagcagaagaggcccctctaatggccgatatcaccgcccaggctatcctcaccccacagctgtgcagcgggaccctcctgctggcccacgtggctgccagagcccatgctgacaccaacctccagcatgtcggcatccctgcgggcgacactaccggtgacatggccagcatgaccctcctccctggcagtgacactgttgatgtgagccccaatatttactcacctttttctctttcactatgtctgccgtggtctcgacgagagtgcgccacataagattcccccattaaaagtcatgaattgagtggcttttagtatacttgtggttgtgcacgttcaattttaattc

SEQ ID NO: 471607 - DNA, 1107 bp, Homo sapiens
gcacacactcctggaaaaacttgtgggccccacaagggcaggagatgagggaaatctccctgaacctgactgtgtatctccacgtgtttccagaaacactgaccatgcctcaagtcgtgccttcaagcctgaaccttgtggagaatgctaggtctgtggacctgacctgccaaaccgtcaatcagagtgtgaatgtccagtggttcctaagtggccagcccctcctgcccagtgagcacctgcagctgtcagctgacaacaggaccctaatcatccatggcctccagcggaatgacacggggccctatgcctgtgaggtctggaactggggcagccgggcccggagtgagccccttgagctgaccatcaactatggtcctgaccaagtgcacatcaccagggagtcggcatctgagatgatcagcaccatagaggcagagctcaactccagcctgaccctgcagtgttgggccgagtccaagccaggtgctgagtatcgctggactcttgaacactccaccggggagcacctgggtgagcagctgattatcagggctctgacctgggaacacgacgggatctacaactgcacagcctccaactctctcactggcctggcccgctccacttcagtcctggtcaaggtggtagcagcttctatcatcatcatcatcatcatcatcatcatcatcatcatttgtcaagcatctggggccatcgctggtattgtcatcgggatcctggctgtcattgctgtggcctcagaactgggctattttctctacatcagaaatgccagacggaaaacaacagaaggaccccagtcatgagacctcacaacccatcccgaaggaggagcaccccacagagcccagttccgggtgggggctggcatgatcttttgagaaaacccagtgccaggttaagtctctctgcatctcctcctctgacttctctgaggatctcaagaccctcccgggttttttcatctcttctcctcgtcttcttattctttgacatgacaattcctagctttgagccctctgggaatcagaagtgctataattgcctctgaggccaaagctatttctgagcatctcttggggt

SEQ ID NO: 471608 - DNA, 869 bp, Homo sapiens
ccagcgagttctcgcagccatggcctctggcccccgaggaagctgcggtttggggcgagccgattgcaccagcagggccgggctgctgctcccggggctgacgcgggccacgccctcctggacgcggacacacccccatttccccgggcccacagagccacgcctggccctgcagccaaacagcgggaaggcagattggtggcagcagcggcggtggcggtcccgactggcagagcctaacgagaacagggcctatccccaggggccccgggctggacgcagaccagatctcgcgggggtgggctgggaggcgcccgccagaggccggaggctgacagtgcctttcctatcctatgggtctattgtgggcccgcggagcccccatgggtgggtccatccccgggcccaccccagcctggctagccacgtggggggctcctgtgccaaggagtgcccagctgccggcttctagaggctgccttcattctgtagcttgtggtcccttccttcatccccaaaaccagaagtgtagcatctttagatcccctcacccttgtttttctggactctagtgattccattgcccaccctccaccctgcagataatctccctattttaaggtctactaattcaccttaattccattggcaatcttaaacccctttgccacataacctaagatactcacagatcccaggtttaggatgtggacatatttggtggcattattctgcctgccacatctaggtagcaactttatctactcaaacaattgttattgaacacatgccctctttcaggcactaggatatagtagtgaatgaatacagaaaagccccaatcttgtggagcttacactccagtgaag

SEQ ID NO: 471609 - DNA, 1007 bp, Homo sapiens
ttaatgccccagagcccagcctcaaagctggaaagggggctctggaccatgagtacttccatgcgacaagtctacacaggctttatttccctgggatgcatctatacaggctttgccgtgaccaacttccttcttgttttgagaggccatgggggaaatccccaaagggggcctgaggcccctggcaccaactcgcagagaagaagaagaagaagaagaagaagaagaagaagaagaagagaagaggaagaagaggaagaagaggaggaagaggaggaagaggaggaagaagaggaagaagaggaagaagaagaagaagaagaaaagaagaggaagaagaggaaaaagaaggaggaggagaagaagaggaagaagaagaagaagaagaagaagaagaagaagaagaagaagaagaagaagaagaagaagaagaagaagaagacgaggaagaagaagaagaagaagaagacttgttccacagaggagtttgggagccatctatactggcagctgctctctggggcctgtgtgggctccgggccatgccttccctccccaggcctcgacctccccattcgaaagatgagggatgggggcccaggatctgaaggcctgctgtgcaattccatgattcctaaaagttcctcaccagggaacgtggcccagactcatttccagccaaggcaggatgcccctcagagggacatccgagagcagcagacctggaatgccagccccatgtccagcacccgacctgggcccctgaagcaagtgacagccagccagccaggctcccaggggacaccccctttccagctttgctaagccgtcctccagtgcagagaaggtgtcaaggtcagcagatggcatggcctgcagaaggtttatggagacatctccggctttcccagattcctggctgcagaagtgtgttctgaatggacacccttggacatctggaaaaatgatactctctcaccaaaaatagaaggtggttggggcagaaa

SEQ ID NO: 471610 - DNA, 1498 bp, Homo sapiens
attggtggtatggagaacgttcgagtggtctggatagaagatcaaaccagtcacaacattcttttaagccaaagcctaatccagagcaaggccataactctctttaatcctgtgaaggctgagagaggtgaagaagctgcagaagaaaagttggaagctagcagaggttggttcatggggcttaaggaaagaagctgtctccataatataaaagtgcaaggtgaagcagcacatgctgatggagaagctgcgtcaagctatccagaagatctatctaagatcattgatgaaggtggctacactcaacaacagattttcagtgtagacaaaatagccacctattggaagaagatgccatctaggactttcagagcttgagaggagaagtcaatgcctgacttcaaagcttcaaaggacagactaactctcttgttaggggctaaggcagctagtgaccttaagttgaagctaatactcatttaccgttctgaaaatcctagggcccgtaagaactaagctaaatctaccctgcctatgctctgtaaatggaacaacaaagcctggatgacatgtgtttatagcatggtttactgaatatatatatatacacatatatatatttttttatagtctggaggtcttttttttttttttttttaacaagtattatgccatgagttcatacggaataggttccagcagctcaggctccttctcattggttctcacaaagtgtgcttctctgggtggagcaggctggcacttcagttgaacccaggtacctttctctttggcttctttctttttctgatcattttccttcatgtatttcaggaagctatcccagctctcagagtgcttaatgtgctcaatacgcacattaattctcttggcaagaatcttgctcttaacttgtttgtttacaacaatgccaacagcatgctgggtaacattgtagactcttccagttttaccatggtgacacttgtgaggcattcctttttgaacagtgcccattcccttgatgtctacaataacacctttcttatagattcgcatatacgtggccaaaggaacaactccatgttttctaaaaggcctagagaacgtatatcgggtgcctctcctctttccctttgtcttcgtcattttggcaaattactggaagatggcagttccggctgaaagggtggtttactgaatattttaaacccactgttgagacctactgctcagaaaagaagattcctttcaaaatattactgctcattgacaatgaacctggtcacccaagaactctgatgcagatgtacaatggattaatattgttttcatgcctgtgtaggggagtcagagatcaccttcaacactcccttgagcacttatgtgggctgttcggctggatctagaaaccaatgcacacccagaagccccagtgtgtgttgttcccctccctgtgtccatgtgttctcatagttcagctcccacttgtaagtgc

SEQ ID NO: 471611 - DNA, 877 bp, Homo sapiens
ggacacacccaggacgacacctggggatccaaggaagactgggtgagcatggaggagaagactcattggtgcagcaagatgaacttgtgcatgcagattatgagtgatgatagggtttggggtgataattgagtgtatccagcaccctacctcctcccttgtgattcaagctgaagcagccgtcattgtccctctgggacacttgtatgcactgctgctgcaccaagagagggttatggaacgagatgggcatttggcagcaactttccactgcagccagccctatgggaatctctccagttgggccacttatatgcaggcagcactggagccccagaaacacaggactcgatttaccgtgtcactctgcaaccagaagctgggacaggacagcagtggtgatgggctgggtgggggtgaggtaggggtgtctgggaacaggttccacagactccaggacccatggtggttaccagaaagcggtctggatccagaccccaagaaagggttcttggatctcccacaagaaagaattcagggctatctcttccttacatgcaaatccatgcgcacaagcagagccctgtggctgaagccccggactggaccagaggccctggtgttcaaggggtcatctgaccccttggaactgccctgtcagggaggtaaagcccatcccatcttcatctccaaacggggaaagcgaggaccagagacgtcaagctgccaggagtcaagcccaggcttctggctttgaagtccatgcacttctttctccatcacacagtttctattcgagcattttgtgctcagggatatttatttggcaatgacatggaggcagagctaggtaagagctccagagccaagacactgg

SEQ ID NO: 471612 - DNA, 1372 bp, Homo sapiens
aagtgtctggtccccacctgtcaaaatgcctatcctgaagaatctgggagtgtcagaccctaaggtgccccgggcggggaccctgcccctgaggtcctctcggaacccctttgaagaagtttcagggctggaggaagaagaggccggggagctggggtccctccccaatggaacatcttgtcgccgccgcgccaccctggagaagcttgcgggcctggcccccttccggctgggctgggccccgggccggcgggcaggcagccctggggatgggcagccccgctctttcttgggccgtgtgctggtaccagggatacgcaggagctcagcagattttggcctcctggcccggctgcatgggacccgagcccacggcgacgaggaggcagcgggggaggccgcccggagactggccttcctgagactggggcgtggatccaagccccagcgtgcgtccctggctgagagagtggtgcctgcaggcgaggcagctccagagcccccacccaaggtcccagagcccccaaagatgaaggagccattgtcagtgctggagatcctgagcctgatccagcagcgcgaactagcgcgtgcggacgagcacatcctggagctagaggccgaggagctggcgccgtcgaggggcggcgcgcctgggcctcccaaggccgagggcgctggcgggggccgccgggcgcgggacgtggcgctgctgtacgaggccctgcagcgcgagctgtgggcgctggtgcgcgagacgctggcgggccccgggccgggagcgtgcgccggggctggcgcggtggcgcagctgggccaggtgctggtacaggaggaggcggccgacgggcgtcggggtcccggggcggcccgcaaactacgcgcacgctgggccgaagccgtggcgcgcgcggcccgggagcgcctagaggcagcggctcccggggcgcccgggggcctggccgggcagctggaggcgctgcgggcgcggctgctggaggatatggccgtggtgcggggccgcctggcgcccgcctaccccgccggcctgggcgccttcggcgtctacctgcgcggctaccacggggccctggccgagtggctgggggcctccgcccgtcgcaggctgccgctggccgaccgctacgcgctgctgcactggcacaatcaggtctaccccagagaggtcctagggctggtggacatggccgccctggagaatggggagctggggccccttctctcccctggcaccctgcggggtttggaggatgaatgcgtcacagatgttaagccacagaaatcagtcaatgctacttaagagcctagaaccatagaaaagagatctggatccttaaactcatcaaattga

SEQ ID NO: 471613 - DNA, 684 bp, Homo sapiens
gtcctccttcccttaagggctgtgcataccacacttcaacaagctgatgcgccggaagtggctgagcagcccggaggccctggatggcatcgtgggcacgctgggtgcccaggccctggccctgcgcagaatgcaggacgagccttaccaggcgctggtagccgagctacaccggcgggcgctggtcgagtacgtgcggcccctgctccgtgggcgcctgcgctgcagctcggcgcggacccgcagccgcgtggccggcaggctccgggaggacgcggcgcaactgcagaggctgttccggcggctgctggaagacacgcccagcatccaggtggaggtgggagtgttggtgcgcgactacccagacatcaggcagaagcacgtggcagccctcctcgacatccgtggcctgcgcaacacagccgcccgccaggagatcctggccgtggcccgggacctggaactctctgaggagggagccctgtcaccccctcgggaccgtgccttctttgcagacatccctcgcgacctcgggcccagcgctgagggtcacccaaccgccggccttagtgaccccatctatgctgctgacaagccaacctcccgctgaggcaagaatgtcctgagggtgcaccttcctcactttgccctctgaaaatgacattttctttttttttttttttt

SEQ ID NO: 471614 - DNA, 675 bp, Homo sapiens
tggggtctcgctatgttgcccaggctggtgctgaagacgcggttgaccttgcgtcggacgggccagtacaaggggctgctggactgcgccaggcagatcttgcagcgagagggcacccgcgccctttaccgcggctacctgcccaatatgctcggcatcatcccctatgcctgcaccgacctggctgtctatgagatgctccagtgcttctgggtgaagtcaggcagggatatgggggaccccagtggcctggtcagtctgtcgtctgtgacgctatccacgacctgtggccagatggccagctacccactgactctggtgcgcaccaggatgcaggcccaagataccgtggagggctcaaatcccaccatgcgcggagtcctccagcggatcctggcccagcagggctggctagggctgtaccgaggcatgacccccacgctactgaaggtcttaccagcaggtggcatcagctatgtggtgtacgaagccatgaagaaaaccctgggcatataggctgtgagctggacgacacagcctaggcagaaatgggacaggaggacctgatgacccctggccccaaagagccctcgaggcctcaaggttcaggccctggggcagtttttggtggcaaaagcaggctgggggtgggggtggggctctgggtcagaagat

SEQ ID NO: 471615 - DNA, 2095 bp, Homo sapiens
ccccttagccccccggccttaggacatgcctggaggcagggccaaaattggaggcgatgctgccacgacagtgaataacagcactcctgattttggttttgggggccaaaagagacagttggaagatggagatcaaccggagagcaagaagctggcttcccagggagacttcattggcagaggaggtgaacaaattaacaaaatccaacaggattcaggctgcaaagtacagatttctccagacagcggtggcctacccgagcgcagtgtgtccttgacaggagccccagaatctgtccagaaagccaagatgatgctggatgacattgtgtctcggggtcgtgggggccccccaggacagttccacgacaacgccaacgggggccagaacggcaccgtgcaggagatcatgatccccgcgggcaaggccggcctggtcattggcaagggcggggagaccattaagcagctgcaggacggatctcagaatacgaatgtggacaaacctctccgcatcattggggatccttacaaagtgcagcaagcctgtgagatggtgatggacatcctccgggaacgtgaccaaggcggctttggggaccggaatgagtacggatctcggattggcggaggcatcgatgtgccagtgcccaggcattctgttggcgtggtcattggccggagtggagagatgatcaagaagatccagaatgatgctggcgtgcggatacagttcaagcaagatgacgggacagggcccgagaagattgctcatataatggggcccccagacaggtgcgagcacgcagcccggatcatcaacgacctcctccagagcctcaggagtggtcccccaggtcctccagggggtccaggcatgcccccggggggccgaggccgaggaagaggccaaggcaattggggtccccctggcggggagatgaccttctccatccccactcacaagtgtgggctggtcatcggccgaggtggcgagaatgtgaaagccataaaccagcagacgggagccttcgtagagatctcccggcagctgccacccaacggggaccccaacttcaagttgttcatcatccggggttcaccccagcagattgaccacgccaagcagcttatcgaggaaaagatcgagggtcctctctgcccagttggaccaggcccaggtggcccaggccctgctggcccaatggggcccttcaatcctgggcccttcaaccaggggccacccggggctcccccacatgccggggggccccctcctcaccagtacccaccccagggctggggcaatacctacccccagtggcagccgcctgctcctcatgacccaagcaaagcagctgcagcggccgcggaccccaacgccgcgtgggccgcctactactcacactactaccagcagcccccgggccccgtccccggccccgcaccggcccctgcggccccaccggctcagggtgagccccctcagcccccacccaccggccagtcggactacactaaggcctgggaagagtattacaaaaagatcggccagcagccccagcagcccggagcgcccccacagcaggactacacgaaggcttgggaggagtactacaagaagcaaggctcccagccagactacagtgccgcctgggcggaatattacagacagcaggccgcttactacggacagaccccaggtcctggcggcccccagccgccgcccacgcagcagggacagcagcaggcaagtgggaattgccaccctcctcctcctcctttctccttccaacccccggccaccgtccatcctgccttagggtgttgtggggacaccatgatctctggattgttcatgtcgtcgtgctgcgccgggagccaccgccctccggagacagggcagctcccctatgaccctagcgcctccgccctccgcggcccctctcctctcttcctgctctgtccctccttctccatcagggagcagcgtgacttcagcgagcagcctagttacctgctcctgtgtctccttcgaaagctatgaggcatgcacactgcaagcaaatatggttctaatacttttttcctcctc

SEQ ID NO: 471616 - DNA, 2336 bp, Homo sapiens
ctgagctgagagaagccccccacagctgatcttctcctgggaagctcaaaagaaacatgatgccctgggctttacagaagaaacgagaaatccacatggccaaggcccatcggagacgagctgcgaggtctgctctccccatgagactcaccagctgcatcttccggaggccggtgacaaggatcaggtctcatcctgacaaccaggtcagacgcagaaaaggggacgagcacctggagaagccgcagcaactctgcgcctaccggagactgcaggccctgcagccctgcagcagccaaggagaaggttcaagtccactgcatttggagagcgtcttaagtatccttgcaccggggacggccggtgaatctctggacagggctggtgctgagcgtgtgcacagcccgcttgagcccacccctgggcggtttccagctgtggcaggggggccaaccccaggaatgggttgtcagctcccaccgcccctctctggccaattggtgactcctgcagatatccggagacaggccaggagggtgaagaaagccagggagagactggccaaggccttgcaggcagacaggctggccaggcaggcagaaatgctgacatgtagatgaagcgcagtcctgggctttcggtccctttcttttaatgcccatcctcattcctactctgaattgtcacacttttcccttccccaccagttctttaataaaagtatttgaaaggcaacaggtcagagttagggtggcaggaagtgcccatcagcagatgctactgcacaccagcccgggcgacagagcaagactctgtgtctaaaaataaatatataatttatatataattataaatacattatatataatttatacataattataaatacattatgtataataaaattatatactatataattatattatatactgtaatatatttcttatataattatattataatataatttatatgttatataattatattttatattataatataatttatatgttatataattatattatatattataatacaatttatatgttatataattatattatatattataatataatttatatgttatataattatattatatattataatataatttatatgttatataattatattataaattataatataatttatatagtatataattatacatattatatattaaattataatttgtatattatataattatatatattatgtattataattatatttatatattatatttatataattatatgtaatatatttattaattatataatataattatataatatataggtatataattattatatataattatatatattaattatataatataatatatattatattatataatatataattatacataactatattatatataatatataattataatataatatagatataattttatataattatattatattatatatattatatattatatattacatattatatatattatatattacatattacatattatatattatatatattatatatactatataatataaattatatattatacataatatataatataattatatataattatattatagtatattatatatattatatataattatatattattatatttaatacagttatgtataattatatattatataatataatatatattatattatataattataatatatataattatatataattatataatatacctatatagtatatattatacaattatattatataattatataaatatgatatataaatataattataatatataatatataattacataatatataaattatattttaatatataatatatgtaagtatataatatataaattatattataatatataatataattatataacatataaattatattatatatataatataattatataacatataaattatattatatataatataattatataacatataaattatattatatataatataattatataacatataaattatattataatatataatataattatatagcatataaattatattataatataaaatataattatataacatataaattatattataatataattatataagaaatatattatagtatataatataattatatagtatataattgtattatacataatgtatttataattatgtatacattatgtgtaatgtatttataattatatagaaattatatataatgtatttataattatatataaattatatataatgtatttataattatatataaattatatatttattttt

SEQ ID NO: 471617 - DNA, 699 bp, Homo sapiens
tctgggaggtgtgcccaacagctcattgagaacgggccaggatgacaatggcggttttgtggaatagaaaggggggaagcgtgggggaaaagattgagaaatcggatggttgccgtgtctgtgtagaaagagatttgattgttaagcacctgattgtagccaacttcttagctctccgctgtaaaggagtcccccagacaatggcagcttttggggttagatattttctcaatgctcttgggtgcaaacttgttttctatctccatagagtgggcaggggagtgtccattggcaccacctgcctcttgagtgtcttccaggtgatcacggtcagctccaggaaatccaggtgggcaaaacttaaagagaaagcccccaagcatgttggcttttctgttctcctgtgctggatcgtgtgcatgttggtaaacatcatctttcccatgtatgtgactggcaaatggaactacacaaacatcacagtgatgaacaagacagggtgaacttccaccccaatgataaacaataactagtaagaacaattgtaaatgaaatatgatgcaattattatgtaaatattcatattatcaaagttttattaaggcctgcagtagagtcattaaaggtctacgcaattaaaaaaattaggtcctgaatcaatctggcaatgatggggatctctttgagtgtgcaaccttc

SEQ ID NO: 471618 - DNA, 1738 bp, Homo sapiens
gagaagcgccgttaaagacagagctcatcctgttagctgtccctctcatccccgcccctgcaacctgagtttcccagattccttacgtcccgcaatggtctcacaaggaccgaatcccggggtcagctgcctgggcttttctctccaagctcgggggagaatctgcttccacgatcatttaggcggctgacaaatctccttttcttctcatgatttctacctgcctatcctcttcagagccagcagcagcctgtgaaatccccctcttccctctaagccgtgacttcctcttctgcggtgtctctaacttctttgtctgctttaagagctcacttgattaccatctagtatcccccatatgcttagctccttgcacgcttttcccctgtgcactcttaaaacctgcagcgtactctactgtctgaaaattaacctccttgtgcctttaagcctctgtgctctgtctcctgttcagtatcagttccctgcatttacaggcactctgtctcaacggcatcctttccatgagcccgcagatttaccctatgtcacaaacccgtgcaatgtcacactctctgtcacacactcatgcaatgtcagaccctctgtcacacacccaggcaatgtcgaccccaattctccagcttttctacttaatgccttgggccaaattagcaacgtgcacatcattttatacgttgcacatggtgacgtcatcatcatgagtggtgcaaagtggaaagaagtatacaggctgaatcacaatagagccatgaccgccgctattctccagataggaacctggtgtcaagatacaaatacgtgtgctgacgctgcgagtgtggtgtttaaagatttgattgttaagcacctgattgtagccaacttcttagctctccgctgtaaaggagtcccccagacaatggcagcttttggggttagatattttcttaatgctcttgggtgcaaacttgttttctatctccatagagtgggcaggggagtgtccattggcaccacctgcctcttgagtgtcttccaggtgatcacggtcagctccaggaaatccagcatttcttgtccgctggatctgatggtgatgaatgctgtcaacttttgtttgtccgggaaagacagtttcctcttcctatttgaagggtagctttgctgtataatatttttggatggcagcttttttttttctttcagcactttgaaaatgttgccccacttcctcttggtctgtacagtttttgttgaaaagtctgttgtgagataatttggagcgcccttgagtgttatttgcctcttttctcttgcaggatacttcttacataaataagaatagtgactggtctgcagaaatcttagatttaaaaacctcttgaatctaggaaaccaaatcaaggcagatttcagactttgtctgcagtacccaaaaacaatttaaatataatatcacggtcaaaaccttggtaatacaatcaatgttttaaattctatcctgttacaaagaaagcagattcttattgaacttatgcaaacaactctattgccataaaataaaaatacacatgaagagcttcaaattttaggcagatcaaatagggatcacatttccacctctgttcataaaagtatatattaccaaattgctgtaaactttaggtagcttaatagagaacgttttctgaaatctggaaaacaaatcttttaggttaaataaccaaaactgtat

SEQ ID NO: 471619 - DNA, 732 bp, Homo sapiens
ggggaagcggagccaacatgccagtggcccggagctgggtttgtcgcaaaacttatgtgaccccgcggagacccttcgagaaatctcgtctcgaccaagagctgaagctgatcggcgagtatgggctccggaacaaacgtgaggtctggagggtcaaatttaccctggccaagatccgcaaggccgcccgggaactgctgacgcttgatgagaaggacccacggcgtctgttcgaaggcaacgccctgctgcggcggctggtccgcattggggtgctggatgagggcaagatgaagctggattacatcctgggcctgaagatagaggatttcttagagagacgcctgcagacccaggtcttcaagctgggcttggccaagtccatccaccacgctcgcgtgctgatccgccagcgccatatcagggtccgcaagcaggtggtgaacatcccgtccttcattgtccgcctggattcccagaagcacatcgacttctctctgcgctctccctacgggggtggccgcccgggccgcgtgaagaggaagaatgccaagaagggccagggtggggctggggctggagacgacgaggaggaggattaagtccacctgtccctcctgggctgctggattgtctcgttttcctgccaaataaacaggatcagcgctttacaattggggacttgtgcaccgtgaagatttattggatgctatgtttaagaaaatggaaaat

SEQ ID NO: 471620 - DNA, 1165 bp, Homo sapiens
gtgcgctgcagcggtctgcggcgcgcagctgtttcggtaactgctttgcctcccggctcccgcaggaggatgctggtggtggaggtggcgaacggccgctccctggtgtggggagccgaggcggtgcaggccctccgggagcgcctgggtgtggggggccgcacggtaggcgccctgccccgcgggccccgccagaactcgcgcctgggcctcccgctgctgctgatgcccgaagaggcgcggctcttggccgagatcggcgccgtgactctggtcagcgccccgcgtccagactctcggcaccacagcctggccctgacatccttcaagcgccagcaagaggagagcttccaggagcagagcgccttggcagctgaggcccgggagacccgtcgtcaggagctcctggagaagattacggagggccaggctgctaagaagcagaaactagaacaggcttcaggggccagctcaagccaggaggccggctcgagccaggctgccaaagaggatgagaccagtgatggccaggcttcgggagagcaggaggaagctggcccctcgtcttcccaagcaggaccctcaaatggggtagcccccttgcccagatctgctctccttgtccagctggccactgccaggcctcgaccggtcaaggccaggcccctggactggcgtgtccagtctaaagactggccccacgccggccgccctgcccacgagctgcgctacagtatctacagagacctgtgggagcgaggcttcttcctcagtgcggctggcaagttcggaggtgacttcctggtctatcctggtgaccccctccgcttccacgcccattatatcgctcagtgctgggcccccgaggacaccatcccactccaagacctggttgctgctgggcgccttggaaccagcgtcagaaagaccctgctcctctgttctccgcagcctgatggtaaggtggtctacacctccctgcaatgggccagcctgcagtgaactccagagacctaggggatgtggctgtgtcggcagcaagagcctttctggatgttccccagctcttctctgggagtctagaacatcctcctacctttctccgcggttagtttttgattccaggttttcgaacactacatcttttttatgttcttccttgttt

SEQ ID NO: 471621 - DNA, 595 bp, Homo sapiens
gagaacgtcacgggcgttccagctgggtgggagagcctggacagaaacaagaggaaaaacatgatgaacctcagtcaagaatttggacagagtacagcaagggtggttttatctgcagcctcagctgcaaagactggaatggagggtgccggaattatctggaagatctgggagcgtcttcactcatacgtccggtgtctgggctggatgactccacggttgcttagtgacgtgctggttgtgaaagtgtggtccctgaaccagcagcgtcagcatcacctgggagctcgtcagaaaggcaaattcttgagccccaccccagacctactgaatcagtcagaaactctgaaggagcgccacctggaggtaggaggtgaagtctgcagagagaagctggaaatgtactgacggatccccaaggattcagtaatgtgaccaagtggaggagctgcatttacaggcatcaagggaactgcaggaatccacccccatgattgaattatctcccactgggtccatcccacaacacatgggaattatgggagctacaactgaagatgagatttgggtggggacacagacacaagccatatat

SEQ ID NO: 471622 - DNA, 535 bp, Homo sapiens
tgcaggaccgtaaatgatactggtcaggatcaataaacgctttctcctgggacaagaggttggaactggctgcgtagagggtggagaccctagaatatgtatccactcattccctgactcattcattttctcattcattcgttcattcattcattcatttgttcatcatccctggacccgagggctcctgtccatcagggctgagctgggatctaggggacacggaagtaaatcagacccgtgcctgtccttgaacagctccggcaccagtgcggagaagaccgacccacataatgggaaaatctataccgacagaaagtacattagtgattgcctagggctggagtgggtgcttagattgggggtgatggctaaggagtacacagtatctccttggactaatgaaaatattctaaaagtgatctgaagttgatgattgcacagctctgtacaattaaaagccgttgaattgtacactttaagtgggtgaattgcatgatatgtgaattcgatctcaataaagctgtgaaaaaaa

SEQ ID NO: 471623 - DNA, 1825 bp, Homo sapiens
cttcggtacccgcagagcctcacccgcaccaggaccggtcagtgccctgcgccctgcggggcagccgcgtcccctccacccaaggcacaccgggggcctgtgggcggggctcggcacgtctgcagggcccaccgatgggctgagctacgcctgctcggactgcggcgagcacttcccggatctctttcacgtcatgagtcacaaggaggtccacatggcagagaagccatacggctgcgacgcctgcggcaagaccttcggcttcatcgagaacctcatgtggcacaagctggtccaccaggccgcccccgagcgcctgctcccgcccgcacccggcggcctgcagcccccggacggctccagcggcacggatgcggccagcgtgctggacaacgggctggcgggggaggtgggggcggccgtggcggcactggcaggggtgtctgggggtgaggacgcaggcggggcggcggttgcaggtgctggcgggggtgccagttccggccccgagcgcttcagctgtgccacgtgcggccagagtttcaagcacttcctgggcctcgtgactcacaagtacgtgcacctgagcttcgcgggcgcctacgacttgctcctacaccgccgcagccatcggcagaagcggggtttccgctgcccggtgtgcgggaagcgcttctgggaggcggccctgctgatgcgccaccagcgctgccacacggaacagcggccgtaccgatgtggcgtgtgcggccgaggcttcctgcgctcctggtacctgcggcacaccgcgtggtgcacactggcgagcgggccttcaagtgcggcgtgtgcgcaagcgcttcgcgcagtcgtccagcctggcagagcaccggcggctgcacgctgtggcccggccccagcgctgcagcgctgtggcaagaccttccgctaccgctccaacctgctggagcaccagcggctgcacctgggcgagcgcgcctaccgctgtgagcactgcggcaagggcttcttctacctgagctccgtgctgcgccaccagcgcgcccatgagccgccgcggcccgagctccgctgccccgcctgcctcaaggccttcaaggatcccggctacttccgtaagcacctggctgcccaccagggcggccggcccttccgctgctcctcctgcggcgagggcttcgccaacacctacggcctcaagaaacaccgcctggcgcacaaggccgagaacctcggggggcctggagcaggggcgggcaccttggccgggaaggatgcctgaccgaggggtttccccatcccactcccatcaaaagcccccttctggactcccacctcccaggactgatcagactcttcccccctcctcgctgttgccccatccttcagaacttcacacggactggcgaccttcaggcgacacgcccgacaggctcaagactgaatcactcccatcctcgacctctctgccctcccctcatcccatcagacactgaaccctatcctccgtccaaccctcgtttgtgacccgcatcagcccccgccccagcagcactctgcccccaggacttactgaggatttgctgtattcccagcgttagtctgagctgggcaaatggagatggacaagacagactgatggtcatgatacagctccctcttagcacttgtcctccagggtaatgattgggagattcaaaagcccgttcacagctctcatgttggctctgggaacagcaagatgtatgcctggcaatgtgtgtttagttatctcatttgttagaagaagggcctggggtcctgaagaacaaaggtgctccaggga

SEQ ID NO: 471624 - DNA, 726 bp, Homo sapiens
ctttataattgtaaccattttaaatcacacagctcaatggcactaagcaagcgtgcaggacgctggctggctccaaggtctgcacgcaggaatcagctcgccaaacacaggcgtcgtatctataaaatggggccgctatgtgacgcgttgggtgcagtgtccagtccagcaccgggcgcttgtgagacacggaggaaatgggatgggtccttctcgttaccgccccagaagagaaaggactgtggtgcaggtgaggtgggtgggaacctcagcctcgcgaggtccctattcattactccctggccggcggccatctccatggcaacgctggcgcctttccagtgcgcagctccggggctcagcctgtctctaagccggtctcggagtgggcgggtcttgtccctgggggcggtgcctgcttcgaagtgggcgggccttgtttctcgaaagaagatactttttttctcaaaccagaaagcatgtctggtttttgagtggcggttgcagagtggagaggaatatctctaagatttagctgattttattcccaaaggttgagctttttcaaacaggcaacagtggatctccattcaaaaagtctcccttgagtgctaaactcttacttgttttctcctcccagaatatgtcttcctcctttaaattttcctttctttttctttcttttttaatttatattttaaattttaattaattaatttatttttt

SEQ ID NO: 471625 - DNA, 904 bp, Homo sapiens
tctatctctgtacgaagcttcgtctctgtctccaactctgccctctactcagggcccgccctatggattagggttaagaatgaaatttgagttctcactggagaagatctggatgggcctcccagaactgctggtgaagcgggtggtggcccagttggcaggagctctggacttcctccacagccgggggctggtccacgcagatgtcaaacctgacaacgtgctggtcttcgacccggtctgcagccgtgtggccctgggagacctggccgtggactcctggggcctgggggtgcttctcttctgtgctgccactgcctgtttcccttgggacgtggcactggcccccaaccctgagttcgaggccttcgctggctgggtgaccaccaagcctcagccacctcagccaccaccaccctgggaccagtttgcgcccccagccctggccttgctccaggggcttctggacctggatcccgagactaggagccccccactggctgtcctggacttcctgggggacgactggggacccgtcaatcctaagagccaggcctggtacccatgggtctccttcctcaccaaggccagcccgcgccccgcagtcccatggcacctgccagacaggacacggagcctggcttgtggaggttcacgcctgcaggacggggatgaactagatccaaatccaagaccccagcacccagcggagggtccagaactggaaactgtgtttcctaagcaggaaggtatgcttccaggctgggaagtgagctcactacatacgacacggcatcctgggctcgatccatcgtggaagcgctgctgaaataacagtctggtgttggcccaactgtgagcctcgtagttttgacaaatgtctcacggtttgcatcgcgatgcc

SEQ ID NO: 471626 - DNA, 2088 bp, Homo sapiens
ccccacccagctgccccatcaatgccccattgacagagggagactgagtcacaatgagaagcgcgatgagcccccagcccctcctccctcagacccaggagtccagacccccagtcccctcctcccttgggcctgggacctgagcctgggcacccctctctgttctcgcagagatgcccggcaaacagtctgaggaagggccggcggaggcaggggcttcggaggacagcgaggaggagggtctgggcggcctgacattagaggagctccagcagggccaggaggctgcccgcgcgctggaggacatgatgacgctgagtgctcagaccctggtccgagccgaggtggacgagctctacgaggaagtgcgtcccctgggccagggttgctatggccgcgtccttctggtcacccatcgtcagaaaggcacacccctggcactgaagcagctcccgaaaccccgcacgtccctccgtggcttcctgtacgagttctgtgtggggctctcgctgggcgcgcactcagccatcgtgacggcctacggcattggcatcgagtcggcacactcctacagcttcctgacggagcccgtcctgcacggggacctcatggccttcatccagcccaaggtgggcctcccgcagcccgcggtgcaccgctgcgccgcccagctggcctccgccctggagtacatccacgcccgcggcctggtgtaccgggacctgaagccggagaacgtcctggtgtgcgacccggcctgccggcgcttcaagctgaccgacttcggccacacgaggcctcgcgggacgctgctgcgcctggccgggccgcccatcccctacacggcccccgagctctgcgcgcccccgccgctccccgagggcctgcccattcagcccgccctggacgcctgggcgctgggcgtcctgctcttctgcctcctcacgggctacttcccctgggaccggcccctggccgaggccgaccccttctacgaggacttcctcatctggcaggcgtcgggccagccccgggaccgccctcagccctggttcggcctggccgccgcggccgacgcgcttctgcgggggctgctggaccctcacccccgaaggaggagcgctgtgatcgccatcagggagcacctggggcgcccctggaggcagcgggagggcgaggcggaggcagtgggagcggtggaagaggaggctgggcagtgaggaggccccgggggatgcagaaagggaagccgccccacccgaggcccccaaggccaacggcttttggtgtctcctcggtgtgttttcatccatggggcttgggattcccctcggcgtcctcctcctctctcctctctgcaggctgcattcctcccttgtatgtgtgtgcatgtgtgtgcaagtgtgaacgagtgtgcacatgtgtgcacatgtaaattcgtgggtgagcatgagtgtgtacgccagtgactgtgcgtgtgtgtccatgacttgcgtgtgtgtgcacatgtgtgcaagtatgaatgtgtgtgcgtgcgtgtgagtacaagtgtgcacatatgtgcaagtgtgactgtcctgtgcatgagtgtgtgtgagtgtgtgcgtgtgtgtgcgattgagtatgcatatgcataatatgtgtgtgtgcatgtgtgcaagtgtgaatgtgtgtgcatgtatgagtgtgcacatgtgtgcacatgtaaattcgtgggtgagcatgagtgtgtacgccagtgagtgtacatgtgtaagcataagtgtgtgtgcacgtgtgtgcaagtgtgaatgtcatgtgtgagcatgagtatgtgtacgccagtctgccctgtttgcaaacactgtctcttcctctccgcgccctccttggcctcaggcccagagcaaggctacaactcggagctggatcgtgtgtcacgcactccctggcccctgcataccccgcagggcgcctgctgtggccaccgagatggaaagtacttctggtgaagatactgtgaatgttgttgaaacgacaataaatgatttagaatgttaataaacttagttaataaagtagcagccgggttggagaagattaactcaa

SEQ ID NO: 471627 - DNA, 1052 bp, Homo sapiens
cctctctcccaccccctgacaccaatctataaacaggagccatgcctgctggctttgatggtgggagtctaggtggcccgggcccttcccgccagcccagcccctgggaggggacccgagccgggcggagcctcctccggagccgcacgccgggctcggctcaccctccccggatgccgctcctcctccatccccagaagtttcagccactgagattccccttgtcccggaggctggaggggaagacccaggcggctgcgctttggaggctggaccatcgtggggcttgtctgtgcccacttttcccccattcaagagttaccactgccaggcgcagttgctcaggcctgcaaacccagcactttgggatggcaagacaggaggatcgcttgagcccaggagcttgagaacagcctggacaacatgagccagccaggcccctgggcctggagcatccacaggaggaaagtacaagaaccctggcaccctgccaagcagcagggattcttcagacacccaagggctggtttgctgggaaggactcatgtgaccagaaggggaaactgaggcactgctgagcaccaacagtcctggagagctttaagaatggttgccatctgaggccaggcatggtggtttatgcctgtaatcccagcactttgggaggccaaggcaggcaaatcacttgaggtcaggagttcgaggctgtcaggcctctgagcccaagctaagccatcatatcccctgtgacctgcatatacatccagatggcctgaagcaactgaagatccacaaaagaagtgaaaatagccagttcctccttaactgatgacatcccaccatcgtgatttgttcctgcccaaccctaactgttcaactgactttgtgacaatataccctccccgcccttgcaataatgtactttgtgatattcccccgcccttatgaatgtactttgtaggatacaccctccccacccttgagaaggtagattgtaatattctccccacccaacttgagaatgtactttgtatgatccaccccctgcctgc

SEQ ID NO: 471628 - DNA, 724 bp, Homo sapiens
gactggccctgaaacatccctgctgcagatacggggtccatgctcatttgtgacatcaatgaaacatccccctccagccccccaattcaatttgcggcttgccactttgcttgccctgtggcctagggaagccttggagccaaagcagccggaccccagccccagcttcagaggagctgccttgggggtggggctgccccggggctggcccagccccagcaagcttgttaattacttctcagggaagcttgttaattacttctcaggagaagggatggtgggttccctccccaacccacaagcatctcgggactcccaacacctacccacctgtgggcgaggacaccgctcgtttttgcccctcccaatccccgatcttggaatccacttcttgtggctccagaatccaggatgcgtcctccgagggcgcacggctttaacccgagttgccagcgcttttcgggccccgggcgatgtcggttgttcagggggctctctgggtgcctggctggcctccgttcccacctttgaagtgagctctggttggatggtgggaggagcgggggcgaggcggggtgttctgctgggccgggtctgggaggaattcgcgggaaatgcgggggcttaatgggggaaacagaggcagtatcaaatagacggcctgctgacatttttaaaaatgtttttacaatttttgtttgtttattttttttgaaaccaggcc

SEQ ID NO: 471629 - DNA, 842 bp, Homo sapiens
ctgcctgcaaactgccaccaatgtatgaggtataagaaggactggggagtgggagggcgcagagaccgagagagggcgacagagacccacagagagggggagagagacgcagagagagggggtacagagacccagcgagagggggacaggacctggggcggcgaggtttcttcaactgcaaagtgaggaaaggtaggttccccttcctagggatcgcagcagtcccacgctccgccggactcctggcaaacagcagacgcccaattcctgcgcgccgagtcgtctgagccgcactgatactaggtgggactcagggaatgacaagagggggcggggcgtcacccacagcgccctccccactcccaaccagacccaacttgggcccgcccccggagcttctgctagcctgtctggcccggcctgcacccacctgctccggtcgggtccgcgagttccgtgcgtccaggcggattccgctggacagccaggccttcccttcctccgccgggtcccggaacgcgcctgagcagtccctgtctcggaactgtaagtcccggtaccttaaacgcggcatcgcagctggactacatttcccagaaaccattgaggctcttgctcctcccggcctaagggctctgactgcgagggaatgctgggaaatggagtctgggagcaggatacggggcaggaaaaacacctacttttcttgcaagaacaagttcttacagcctctcctgcagtaaacgttctccgatttccaccgagctgagccggagctggcaattcgctctgtggggttcccacaggaacatcccagtatcttatagggttatgtgctaacc

SEQ ID NO: 471630 - DNA, 771 bp, Homo sapiens
aaaagaaagcatagagccaaatgagggtgtcaggggtccagggggatgggtgctcaaggaagacctcaccaaggagctgaaactatctactgtctggccttttacatgaagaagtttgctgacccctggtctagaacaattcttggcacacattccttgctggctttccccacacctgtgctgctccttactcagattctgcataacgaggactgtactaagagctttgtaggcactaattcacttaatccactcaatacaagcactcattaccatttactcaacaaacacttattaaacacctactgtgtgccaggcactgaggattcggcactgaacaaaataaagatctttgtcctctgctatgagaaaaagcaaagcggggttaaacgagagagagtgatgagaggaactgtcttatataggatggccaggaaaggcctcttggaagaggtgatattggagcagaacggatgatgtgggagagaggttgtcatgcaaaacctggggaagagcattcctggtggacccaacagagaatgcaaaggccttggggcagcaccaggcctcctggtttgagaaattgagccagtgtagctggagcagtatgaaggggagggcctgggggtgagatcagagagagcaaaagggccagccacatcccgcaggacctcattggccatggtgagttcttagacttttactgagtgaaatgggagccatggaaggctctgaacagaggaaaggccccatctgaatagagtagactgt

SEQ ID NO: 471631 - DNA, 2215 bp, Homo sapiens
ctcctcacctctttctggtcatcgctggaagtcccagggggctgggctgcccctgatggcagatgccttctgcagacattgatgagtgtggggagatccccgccatctgtgccaatggcatctgcataaaccagatcgggagtttccgctgcgagtgccccgcaggcttcaactacaacagcatcctgctggcttgtgaagatgtcgatgagtgtggcagcagggagagtccctgccagcagaatgctgactgcatcaacatccccggtagctaccgctgcaagtgcacccgagggtacaaactgtcgccaggcggggcttgtgtgggacggaatgagtgtcgggagatcccgaatgtctgtagccatggtgactgcatggacacagaaggcagctacatgtgtctgtgtcaccgtggattccaggcctctgcagaccagaccctgtgcatggacattgacgagtgtgaccggcagccttgtggaaatgggacctgcaagaacatcattggctcctacaactgcctctgcttccctggctttgtggtgacacacaatggggattgtgtggattttgatgagtgtactaccctggtggggcaggtgtgccgatttggccattgcctcaacacagctggttccttccactgcctctgccaggatggctttgagctcacagctgatgggaagaactgtgtggacaccaatgagtgcctcagccttgcaggaacctgcctacccggcacttgccagaacctcgagggctccttccgctgcatctgtccccctggcttccaggtgcagagtgaccactgcattgatatcgacgagtgctcagaggagcccaacctctgcctctttggcacctgtaccaacagccctgggagcttccagtgcctctgcccacctggctttgtcctctctgacaatgggcaccgttgctttgacacacggcagagtttctgcttcacccgttttgaggctgggaagtgctcggtgcccaaagctttcaacaccaccaagacccgctgctgctgcagtaagaggcctggggagggctggggagacccctgcgaactgtgtccccaggagggcagcgctgcctttcaggagctctgcccctttggccacggggcagtcccaggcccggatgactcccgagaagacgtgaatgagtgtgcagagaaccctggcgtctgcactaacggcgtctgtgtcaacaccgatggatccttccgctgtgagtgtccctttggctacagcctggacttcactggcatcaactgtgtggacacagacgagtgctctgtcggccacccctgtgggcaagggacatgcaccaatgtcatcggaggcttcgaatgtgcctgtgctgacggctttgagcctggcctcatgatgacctgcgaggacatcgacgaatgctccctgaacccgctgctctgtgccttccgctgccacaataccgagggctcctacctgtgcacctgtccagccggctacaccctgcgggaggatggggccatgtgtcgagatgtggacgagtgtgcagatggtcagcaggactgccacgcccggggcatggagtgcaagaacctcatcggtaccttcgcgtgcgtctgtcccccaggcatgcggcccctgcctggctctggggagggctgcacagatgacaatgaatgccacgctcagcctgacctctgtgtcaacggccgctgtgtcaacaccgcgggcagcttccggtgcgactgtgatgagggattccagcccagccccacccttaccgagtgccacgacatccggcaggggccctgctttgccgaggtgctgcagaccatgtgccggtctctgtccagcagcagtgaggctgtcaccagggccgagtgctgctgtgggggtggccggggctgggggccccgctgcgagctctgtcccctgcccggcacctctgcctacaggaagctgtgcccccatggctcaggctacactgctgagggccgaggtgggtgcccatgccctcaggacccccagggaggcaagaaacgggggagtttgctcagggtcatgtgtctgtactgcagcaggtgctggaatgtgtgagccacactgtgtgtgtgtgtgtgtgtgtgtgtgtgtgtgtgtgtctttgtgctagcagatatgagaaccagtacgtgtgcaccatatgcatggaagaactcggggggttgagggag

SEQ ID NO: 471632 - DNA, 1069 bp, Homo sapiens
gaggcacagagagggtagacaatgatgagtgctcagcccagcctggcccatgtggtgcccacgggcactgccacaacaccccgggcagcttccgctgtgaatgccaccaaggcttcaccctggtcagctcaggccatggctgtgaaggtacagcccagctttggctgggatgtgaatgaatgtgatgggccccaccgctgccagcatggctgtcagaaccagctagggggctaccgctgcagctgcccccagggtttcacccagcactcccagtgggcccagtgtgtggatgagaatgagtgtgccctgtcgccccccacctgcgggagcgcctcctgtcgcaacactcttggtggcttccgctgcgtctgcccctctggctttgactttgatcaggccctcgggggctgccaggaggtggatgagtgcgccggacggcgtggcccctgtagctacagctgtgccaacacgcctggtggcttcctgtgcggctgtcctcaaggctacttccgggctgggcaagggcactgtgtctccggcctgggcttcagccccggaccccaggacaccccggacaaagaggagctgctctcgtctgaagcctgctacgaatgcaagatcaatggcctctcccctcgggaccggccacgacgcagtgcccacagggaccaccaggtgaacctggccacccttgactccgaggccctgctgaccttgggcctgaacctctcacacctgggccgggccgagcgcatcctggagctccggccggccctggagggtctagagggccggatccgctacgtcatcgtccgcggaaacgagcaaggtttctttcgcatgcatcacctccgtggcgtcagctccctgcagctggggcggaggcggccggggcctggaacctaccggctggaggtggtgagccacatggcaggaccctggggtgtccagccagaggggcagccagggccatggggccaggccttgaggctgaaggtgcagctgcagttgctttagttgggaggagcctcagtgggccccagctgtccagagaagggggattctggaa

SEQ ID NO: 471633 - DNA, 2499 bp, Homo sapiens
tctctgtgtctttttcttttccaagtctcttgttccacctaacgagaaacacccacagatgttcacctcatccaaaaacatcctcacagacctgcccagaatgatgtttgaccaaacttctggggatcctgcggcccagtcgagttcacacaaaaaattcaccaacacactcggcattccggggaagctggggacgcggccagcggcacctccaggcctggccccccggcccccgccccggcccccgccctggctggctcccagcccacgctgctccactgcaggcccggccagcagcatctgttgccatggtacctgctggggtagcaaggcccccccacccacagtgggacatcaccacagcagccggggcaacggccgtgcaaggacagaggcagagactggactgaggcatctacaggccgagggccaccggccaccaccaccagctggagaaggacacagacgcagtctccctctgagcctctggaagaagccagccctgccgacacctggatggcaaagctctggcctccagaaccgggaggacacatctctgctgtgggaacacccaggccatgtgcctttgctacggcagccccaggtggcagctgctcaaggccctggggacccagctgtgaacaaaatcggcaaaatccctgccctcctggaggtggcgtcttagtggggaagacaggcaagaaacacgattgggacaaacaatggaacagatgataaggaaggatggtgggggtgtgtgatgatggggaaggatgacggtgaaggatgataggaaaggatggtgggaaaggatgatggagaaggatggtggggataggtggtgatggggaaggatgatggagaaggatgatgggaaggatgatggagaaggatggtgggaaggatgatgatggggaaggatgatgggaaggttgatgggaaggatgatgggaaggatgatgggaaggatgatgggaaggatgatggagaaggatgatgggaaggatggtggggataggtggtgatggggaaggatgatggagaaggatgatgggaaggatgatgggaaggatgatggggaaggatgatggaggatgatggagaagggtgatggggaaggatgatgggaaggatgatggagaaggatgatggagaaggatgatggggataggtggtgatggggaaggatgatggggaaggatgatggagaaggatgatgggaaggatgatggagaaggatgatgggaaggttcatgggaaggatgatgggaaggatgatgggaaggatgacgggaaggatgatggggaaggatgatggggaaggatgatggggaaggatgatgggaaggttcatgggaaggatgatgggaaggatgatgggaaggatgacgggaaggatgatggggaaggatgatggggaaggatgatgggaaggatgatgggaaggatgatgggaagggtgatggagaagggtgatgggaaggatgatggggaaggttgatgggaaggatgatgggaaggatgatggggaaggatgatgggaaggtgatggagaaggatgatgggaaaggtgatggtgaaagatgacaggatgggtgatgggaaggatgataatgagaaggataatgagaaggacaatggggaaagatgatggggaaggatgactggaaagacaatgggagagatggggaaggaggatgggaagaatgacagggaaggatgatgggaggatgactggagaggatttaacagaagagaggatggagaaggaagatgggaaggatgatggggaaggatgatggagaaggatgatggggaaggatgatgggaaggatgatggagaaggatgaagggaaggatgatggagaaggatgatggggaaagatgatgggaaggatgatgaggaaagatgatgggaaggatgatggggaaagatgatgggaaggatgatggggaaagatgatgggaaggatgatggagaaggatgggaaggatgatggagaaggatgatggggaaagatgatgggaaggatgatggggaaagatgatgggaaggatgatggagaagggtgatggggaaggatgatgggaagaattatggagaaggacgatgggaaggatgatgggaaggatgatggggaaggatgatgggaaggatgatggggaaggttgatgggaaggttgatgggaaggatgatgggaaggatgatgggaaggataatggaggatgatggagaagggtgatggagaaggacgatgggaaggatgaatggagaaggacgatgggaaggatgaatagagaaggacgatgggaaggatgaatggagaaggatgatgggaaggatgaatggagaaggatgatgtgaaggatgaatggagaaggacgacaggaaggatgaatggagaaggacgatgggaaggatgatgggaaggacaatgggaaggatgatgggaaggatgaatggagaagtatgatgggaaggatgaatggagaaggac

SEQ ID NO: 471634 - DNA, 977 bp, Homo sapiens
ggtcagctcagctcaaggtgagacgggctggaaagcggcccagaaaggatggaccaggttctgggcagccaatataggctcagggttcagaaaggggttttggaccagcaccgtgcactcctgcagggggccccggatgcgatggagctgcgcgagctgacgccctgggctgggcggcccccaggtccgcgccgtcgggcggggccccgggcggcggcgcgcgcgtgcgcgctggaggtgcgcgtgagcgagctgggcctgggctacgcgtccgacgagacggtgctgttccgctactgcgcaggcgcctgcgaggctgccgcgcgcgtctacgacctcgggctgcgacgactgcgccagcggcggcgcctgcggcgggagcgggtgcgcgcgcagccctgctgccgcccgacggcctacgaggacgaggtgtccttcctggacgcgcacagccgctaccacacggtgcacgagctgtcggcgcgcgagtgcacctgcgtgtgaccctacctcactcggccggcgcggggccactccccccgcctcgacggcaccactggccggccccgcgaaagactgcgcgtgcgtagagcacgccggcgcggccccgggactctcgcgataactgtactgagataaagtgtggcaactcgagctggctggtgattcatcctcggcgaggggctcgcgtgtgggccgcgtcgccgtctccaccgggaaagcggggaccagtggggggggccagctgcagggtagtgggaggatgctgtttgctttgggggaagggtagatgcaaagtgggtccagtttatggcggacaaaaaggaaaatggggtgaatggggctatgttggcagggaccgtccttcctgcctccctacggatccctctgcccgtcccgagcgtgttccggtccgcacctcttcgctgtgtgggcttctggggaggggaaagggaactagctcggatgaagagacg

SEQ ID NO: 471635 - DNA, 1453 bp, Homo sapiens
tcacaaagcatggttcgggttccctcctcctcctccggtcgccctcttagcctctttgaaggtttttcttctcaggcttcccagacccagtgcctacactctgagggccctgggctccctccagttccgtgctgggtgtctccagaacaagcggggttccatgtcttccctgaaagcctgctcctccctggggccccagatccccccactccctgcctgctactctgacccatggatcccctgggcccagccaagccacagtggctgtggcgccgctgtctggccgggctgctgtttcagctgctggtggctgtgtgtttcttctcctacctgcgtgtgtcccgagacgatgccactggatcccctaggccagggcttatggcagtggaacctgtcaccggggctcccaatgggtcccgctgccaggacagcatggcgacccctgcccaccccaccctactgatcctgctgtggacgtggccttttaacacacccgtggctctgccccgctgctcagagatggtgcccggcgcggccgactgcaacatcactgccgactccagtgtgtacccacaggcagacgcggtcatcgtgcaccactgggatatcatgtacaaccccagtgccaacctcccgccccccaccaggccgcaggggcagcgctggatctggttcagcatggagtcccccagcaactgccggcacctggaagccctggacggatacttcaatctcaccatgtcctaccgcagcgactccgacatcttcacgccctacggctggctggagccgtggtccggccagcctgcccacccaccgctcaacctctcggccaagaccgagctggtggcctgggcggtgtccaactggaagccggactcggccagggtgcgctactaccagagcctgcaggctcatctcaaggtggacgtgtacggacgctcccacaagcccctgcccaaggggaccatgatggagacgctgtcccggtacaagttctatctggccttcgagaactccttgcaccccgactacatcaccgagaagctgtggaggaacgccctggaggcctgggccgtgcccgtggtgctgggccccagcagaagcaactacgagaggttcctgccacccgacgccttcatccacgtggacgacttccagagccccaaggacctggcccggtacctgcaggagctggacaaggaccacgcccgctacctgagctactttcactggcgggagacgctgcggcctcgctccttcagctgggcactggctttctgcaaggcctgctggaagctgcagcaggaatctaggtaccagacggtgcgcagcatagcggcttgggcggatcttggggacagggcaggggctccacgggtgacagtgccagtgcggtaatgaccacatttgagtggggtggggtgacctcaccaggaatctgtcttctgcc

SEQ ID NO: 471636 - DNA, 4084 bp, Homo sapiens
gacaagagatcctgagtacgtctacagtcagccttacggtaagcttgtgcgctcggaagaagctagggtgataatggggcaaactaaaagtaaaattaaaagtaaatatgcctcttatctcagctttattaaaattcttttaaaaagaggggaagttaaagtatctacaaaaaatctaatcaagctatttcaaataatagaacaattttgcccatggtttccagaacaaggaactttagatctaaaagattggaaaagaattggtaaggaactaaaacaagcaggtaggaagggtaatatcattccacttacagtatggaatgattgggccattattaaagcagctttagaaccatttcaaacagaagaagatggtatttcagtttctgatgcccctggaagctgtttaatagattgtaatgaaaacacaaggaaaaaatcccagaaagaaaccgaaagtttacattgcgaatatgtagcagagccggtaatggctcagtcaacgcaaaatgttgactataatcaattacaggaggtgatatatcctgaaacgttaaaattagaaggaaaaggtccagaattaatggggccatcagagtctaaaccacgaggcacaagtcctcttccagcaggtcaggtgcctgtaacattacaacctcaaaagcaggttaaagaaaataagacccaaccgccagtagcctatcaatactggcctccggctgaacttcagtatcggccacccccagaaagtcagtatggatatccaggaatgcccccagcaccacagggcagggcgccataccctcagccgcccactaggagacttaatcctacggcaccacctagtagacagggtagtgaattacatgaaattattgataaatcaagaaaggaaggagatactgaggcatggcaattcccagtaacgttagaaccgatgccacctggagaaggagcccaagagggagagcctctcacagttgaggccagatacaagtctttttcgataaaaatgctaaaagatatgaaagagggagtaaaacagtatggacccaactccccttatatgaggacattattagattccattgctcatggacatagactcattccttatgattgggagattctggcaaaatcgtctctctcaccctctcaatttttacaatttaagacttggtggattgatggggtacaagaacaggtccgaagaaatagggctgccaatcctccagttaacatagatgcagatcaactattaggaataggtcaaaattggagtactattagtcaacaagcattaatgcaaaatgaggccattgagcaagttagagctatctgccttagagcctgggaaaaaatccaagacccaggaagtacctgcccctcatttaatacagtaagacaaggttcaaaagagccctatcctgattttgtggcaaggctccaagatgttgctcaaaagtcaattgccgatgaaaaagcccgtaaggtcatagtggagttgatggcatatgaaaacaccaatcctgagtggaataagccagttaccacaatacaacaattgtctcccgccacaagcggcagtgcagcagtagatttatgtactatacaagcagtctctctgcttccaggggtgcccccacaaaaaacccccacaggggtatatggccccctgcctaaggggactgtaggactaatcttgggacgatcaagtctaaatctaaaaggagttcaaattcatactagtgtggttgattcagactataaaggcgaaattcaattggttattagctcttcaattccttggagtgccagtccaagagacaggattgctcaattattactcctgccatatattaagggtggaaatagtgaaataaaaagaataggagggcttggaagcactgatccaacaggaaaggctgcatattgggcaagtcaggtctcagagaacagacctgtgtgtaaggccattattcaaggaaaacagtttgaagggttggtagacactggagcagatgtctctatcattgccttaaatcagtggccaaaaaattggcctaaacaaaaggctgttacaggacttgtcggcataggcacagcctcagaagtgtatcaaagggcggccactatagagcctcctaaacccataccattaacttggaaaacagaaaaaccggtgtgggtaaatcagtggccgctaccaaaacaaaaactggaggctttacatttattagcaaatgaacagttagaaaagggtcatattgagccttcgttctcaccttggaattctcctgtgtttgtaattcagaagaaatcaggcaaatggcgtatgttaactgacttaagggccgtaaacgccgtaattcaacccatggggcctctccaacccgggttgccctctccagccatgatcccaaaagattggcctttaattataattgatctaaaggattgcttttttaccatccctctggcagagcaggattgtgaaaaatttgcctttactataccagccataaataataaagaaccagccaccaggtttcagtggaaagtgttacctcagggaatgcttaatagtccaactatttgtcagacttttgtaggtcgagctcttcaaccagttagagacaagttttcagactgttatattattcattatattgatgatattttatgtgctgcaaaaacgagagataaattaattgactgttatacatttctgcaagcagaggttgccaatgcaggactggcaatagcatctgataagatccaaacctctactccttttcattatttagggatgcagatagaaaatagaaaaattaagccacaaaaaatagaaataagaaaagacacattaaaaacactaaatgattttcaaaaattgctgggagatattaattggattcggccaactctaggcattcctacttatgccatgtcaaatttgttctctatcttaagaggagactcagacttaaatagtaaaagaatgttaaccccagaggcaacaaaagaaattaaattagtggaagaaaaaattcagtcagcgcaaataaatagaatagatcccttagccccactccaacttttgatttttgccactgcacattctccaacaggcatcattattcaaaatactgatcttgtgaagtggtcattccttcctcacagtacagttaagacttttacattgtacttggatcaaatagctacattaatcggtcagacaagattacgaataataaaattatgtggaaatgacccagacaaaatagttgtccctttaaccaaggaacaagttagacaagcctttatcaattctggtgcatggcagattggtcttgctaattttgtgggaattattgataatcattacccaaaaacaaagatcttccagttcttaaaattgactacttggattctacctaaaattaccagacgtgaacctttagaaaatgctctaacagtatttactgatggttccagcaatggaaaagcagcttacacagggccgaaagaacgagtaatcaaaactccatatcaatcggctcaaagagcagagttggttgcagtcattacagtgttacaagattttgaccagcctatcaatattatatcagattctgcctatgtagtacaggctacaagggatgttgagacagctctaattaaatatcgcatggatgatcagttaaaccagctattcaatttattacaacaaactgtaagaaaaagaaatttcccattctatattactcatattcgagcacacactaatttaccagggcctttgactaaagcaaatgaacaagctgacttactggtatcatctgcactcataaaagcacaagaacttcatgctttgactcatgtaaatgcagcaggattaaaaaacaaatttgatgtcacatggaaactggcaaaagatattgtacaacattgcacccaggagagcaccaggatgtttaatgcctgcagtccaaaattggttggtggaagtacctactgtcagtcccatcagtagattcacttatcacatgtcagtaaactttgttaatgattggcaaaaaaa

SEQ ID NO: 471637 - DNA, 1636 bp, Homo sapiens
aagagtttcatgtgctctttatctctatgatcacaattgaagaaggcaggaggttgagatgctgcatcgccaagatcgtggtgattccattatcattaccctttgcccttctgaaagtgacggaagagagctcgccagcaccttccatgtggggagacagggaggatatgacagtctccaacctggaagagggtcctcaccagaccccgatcatgctggcactctcatcgtggacttccggcctccagaactctgatcaacaaatcatgcgcagcatctctctcctccgagatgccgagacatgtgtgcagggagacaccatgaaaaagcagggacatcaagagttgctcagggaccaccaggagctgcacattgaggaggctgagtcgcagggctccctgtgggtccagccccaggaactcctgccccaggcgcaggtgcaggaccattcctggttccaagaccgcgatgatcatcttcctctggggaagctgtgggccctgggggagaaaagccgtgggcagacctgtctcacccacgcccacctaggtggtgtgaccttacctggggcagctccaggggcagctgtgcagggtggtggggagctggctgtaccggagctggttctgcacctgtggagagagcagagtgtgcaggtgaaagcccttgtcatgcaggatgcccttgagggttcaaggtgccaccgtgagaaagaccaaatacagaagaagccaggtacaggacacccagccacggagctgcaggaggaagctcccgacactctggacagcacagctgctcgcctcatgactgcccttctgaaagtgacggaagagagctcgccagcaccttccatgtggggagacagggaggatatgacagtctccaacctggaagagggtcctcaccagaccccgatcatgctggcactctcatcgtggacttccggcctccagaactctgatcaacaaatcatgcgcagcatctctctcctccgagatgccgagacatgtgtgcagggagacaccatgaaaaagcagggacatcaagagttgctcagggaccaccaggagctgcacattgaggaggctgagtcgcagggctccctgtgggtccagccccaggaactcctgccccaggcgcaggtgcaggaccattcctggttccaagaccgcgatgatcatcttcctctggggaagctgtgggccctgggggagaaaagccgtgggcagacctgtctcacccacgcccacctaggtggtgtgaccttacctggggcagctccaggggcagctgtgcagggtggtggggagctggctgtaccggagctggttctgcacctgtggagagagcagagtgtgcaggtgaaagcccttgtcatgcaggatgcccttgagggttcaaggtgcctccgtgagaaagaccaaatacagaagaagccaggtacaggacacccagccacggagctgcaggaggaagctcccgacactctggacagcacagctgctcgcctcatgacgtgacgggacactggcttggtagcaggggactcaggatgaaaaagagaagatgcctcacctggatgaggacccagctcctccactttctggcgttttggggcatttgatggcgtgcc

SEQ ID NO: 471638 - DNA, 1060 bp, Homo sapiens
acacaacccaagccttcgggagcagctttggggctgacaccactctctcaaaggaactaaaggattcgggagccaagaagaaatctttgcaggagacagacaaacactggcagtggctgacttggagaaccctggaaattttcaccatgaaaggttcccggcgcccaagaagccccagtgattcctgcaccgaatccaagagcgaccacgcaggagagagcggctccagctgcacgccatcaaatgccccaaaacgccagaaagtggaggagctgggtcctcatccaggtgcagaaccagctccggtacagccagctccacaccaccctgcacagctgcccctggagctgccccagcttccccagaggaagatgatcatcgcgatcttggaaccaggaatggtcctgcacctgcgcctggggcaggagttcctggggctggacccacagggagccctgcgactcagcctcctcaatgtgcagctcctggtggtccctgagcaactcttgatgtccttgaaggatctcttgtaccctgcccatgcccgctggctcctgctcactagtacagagactgtctgggagattgacattgaaaatggatctgtgagagcccagagagcagagaatgtgtgtgtggcgccttcagtaaaagagggtgaggctccccaaggcttcctgcccctgatgggacccccagcaaaccttgtgcatggagtcagcccttcttcctggcgtgtcctctacctcaaacctgactacagagcggccgtcccccagggctcatcccaaatgcccaagcctagtccctggagacaggctctgcctgaagaattccacttggatctccatggcctggagcccctgcccacctctgccctcagacctctacctccatcacccagtccggagcccagaatttgccacaagtttctatggaggccaacgtgcaaggcccgaagacgtctcttctaaggctcatgggccatgcaccctcaggcaccagacgggaatcagagacgctctattcagaatgaagcacacctgctttttcatggtgt

SEQ ID NO: 471639 - DNA, 700 bp, Homo sapiens
taagaagagaaggagtgagggaggagagaggaaaaaagaataggaggaggaagaagaggaggggaggagaagggggaggagggaaggggaagagaagaagagaagaaaaaggagatggaggagaggagaaaaaagaaaaaggcagcgagaagaaggagaagaggagaagaaggggaggaggatgaaggaagaaagaaagggaggaagaggagagaagaaaaagaggaggagaaaaggagaaggagaggaggagaaaaaggaaaggaggaagagaagagaaggttaggaggagagaaagaaaaggtgaaggagaggaggagaaaaaggataagagaaggaggaagaggaggggaggagaaggaggaggaagagggggaacaggaggagagagaaagaaggaggtggaggagaggagaaaaagggaaaggaggtggagaggaggagcggaggaagaggaggaagaaaggagaaggagaaaaggaggaagaggaggaagaaaggagaaggagaaaaggaggaaaaggaggaagaggagagcagaaggaggaagagaggaggaggagtggaggggtaggaggagaagaggaggaggaagagagaagtaggaggaggaagaggaggagagaaggaggataagagaagatggatgagaaaaggaggagaggaagagaaaaagaggaggaagaggataggaggaggc

SEQ ID NO: 471640 - DNA, 537 bp, Homo sapiens
ctcctcacatcccagacgatgggcggccagggtcatcagaaaggaaaggaaagggaaatagaagggaaccgccaagtgggtattgaagcaaaaagagctacaaggcaggaccctccattagaaatgcttatagaaggaccacctagatggctagccaccaaagaaggaaaaatactttcacctgcagctaaccaatggaaattacttaaaacccttcaccaaacctttcacttaggcattgatagcacccatcagatggccaaattattatttactggaccaggcctttccaaaactaccaagcagatagtcagggcctgtgaagtatctaccacggactcctggactggcctgctggcccatgctctgatgttaatgacatcgaaggcacccctcctgaagaaatctcaaccgcacaacccctactatgccccagttcagcaggaagcagttagagcggtcattggcccacctccccaacagcacttgggttttcctgttgagaagggggactgaaagacaggactagctggattt

SEQ ID NO: 471641 - DNA, 624 bp, Homo sapiens
ccacatcacctagtttctaggttcagcaatacatcacgataccttctgagaggaagaccaaagcaggagtgccacatcacctaggctgggcccaggcagaagagtcacattgcctaagtgttagaatgagcgatgtgtcacaatgccccttctgtgcagcaccaaggtgctgagtccatcaatatgtcacagtactcattgagtgaagggcccaagaatgaggattgcatcatttcggtgaggggcccagagctatgtacccatactccctgtagtgagcagggcccaggcatgagaggagggtcacataacatagatgatgtgccaagtgatatgccacaactcatactgtggacaggtctctgcaataaaggagagtcacataatctggctgacggtcacagagatacatcacaatgtatttatctcttgtccttacggacaggaatcaggcagaagaatcacatctcctctgggctgtgtcctgggataatttactctcccttctgtgatctgagcccagggagaaaaggagactcacattacctaggtgttggggccagaggtatgtcacaatgtcacctgttggcaaatatgaagtaagagaggggagtaacatcaaat

SEQ ID NO: 471642 - DNA, 716 bp, Homo sapiens
agcacctggccacatgctggctggatgttaactggtcctggaatagtgccaagtgcagagtcggactggtgcggtacacctgtcaaacaaattcaccaagcgttggatggttcacccaatagcagggaacctgagcttggtttagaacgtcatgagacaggtcgaccagacagttctcctcttgccatgtctgtggtccacaagaaggctctagcctggccatgtctgaaattgcccagacagttctcgctttgccatgtctacagtctaccacagggcatttgcttcggtcgaccagatggctatcgccttgctatgtctgaagtcgaacggatggttctcgccttcccacgtctaaggccgtccagatggctctggctggcggcagtatcattcagccttggtgtgacaaaccaagagagagagaaacaaggagggagagagagagaaagagagacagagtgaggagatcttaattttgacattaattacctttcaccattgttcactttcacttttttatgtattggtctttaatattgtttttattcttcgttattgttatatatttactgttggtttttaaatttattttaagatggatatcggccagaagcgttgggcttatctgctagtttgccatgtctaaggtctaccagatggctctcaccttctcatgtctaaaatcaacaaaatagctctcaccttcctatgtc

SEQ ID NO: 471643 - DNA, 771 bp, Homo sapiens
ttaggagatccaggccagcagttcacactccgttacaaaactctacagagcttccgagctagcagcagcacacattcggggaacattgaagggattgtcttcttcttttgtgggtggttatgttagtggttgtggagagagagagaagggtgaataaaaaatataaagatttggttccaagtaagaatgctgaaaatagtgagacatttctgtctgaaggaaacaaaattatttctgcaaggcaatattgccagtccatccccaaatatttgagggttttctccttttttagatatgtagtggtctctgcacctgtgcataatgattctgaagtatatttaagagaagtggaagaaaaccgtcccaccacatatgtgaaaaacctgtcttctgcaaaaccagaccctagtgccaaaaaggttggggacaactgccctacattatacagtgcctgcgtactccagtgcacagacattagaaatgctgctccgcatattacaatgcacagaacagccacagatgtcagcagagctgaagtcaaggaagcctgcttggaagttaaatgaatatgtatgtggttaaaatattctacttaaaagttttaaaccaagagtaacttaaaggatgcttaacttgtgtttctctgaatttgatgtgtatttaaattatgaaaataagttttctaagaaccattttgtgttcaaaagcttcttaaagtttcacaacttaattttcctaagtacaattctgattcagatttagccttctttt

SEQ ID NO: 471644 - DNA, 2346 bp, Homo sapiens
caggaacatatcacagtggtggaatgttccaagggtggattctgcttcttttgggaagccccctcatccacgctgagcctctgtacatcctggtgaccccccgagttctgagggttggcagtccggagagcattcacattcaggcccactcagactccagacagcccctcacaaggaccctcaaggtgaacctcacagtgtgggacttccccatgaggaagacagtgttggcaaggagccagctcattctctcaccaggaaacaactttatggaccaggcacctgtgacggttcccgagagcctgatgtacctcccaaaaccagggcagcaatatgtcatcatccgggcaacttgggcacccacctcgggctcctcattcatggagaagatggtgctggtggctcttcatgctggctacatctttatccagacggagaagaccatctacacccctgagtacttggttcactaccgggtgttcactgtgaaccacaagatggaccctgtgaccaggacattcactctggacatcaaggtggtctttcccgatgagggtttggggacctggaccatcgaagccagctaccaaagtacacccaagcagaagttcgaggctgcctttgatgtgaaggaatatgggcctgagctggatgctaagtgttgggtgctggtgttgcagcccttcgggcttgacagagccaccaaggaaggagcaggactgggaggggacgagggagcagaacagatctctgaaggcctgggccacgtctccctccagaaggacacgctcatggccgcattccaaggcccaggagaggacttcattggaggctcaatctttgtcaatgtcaccatgttctcctcagggggtgagatggtgcaagctgagacctcaggggtgaagatcatccagagcccatacaacatcaagttcaccaggacaccccagtatttcaagccaggaatgcccttccactttcggattccacctcaggtcttcatctcaaatcctgatgggtccccagcttccagagtccttgtccactcccaagaccaaaaagtgtacacctcagctgaggggttggccactctgaccatcaacacagatgcaaatctggacaagctccccatcgagccagaggagcaggcttcagccaagatgacagcttggccttacttgactcaggatgggtcaggaaacttcctacacatcgaagtaaagacattgggcacagaggttggcagcagcatccagctgagcctcaacacaaggcatcaggaccctaaaaccaaggacaagattactcacttcaccatcctgctgaaagttggcttgaagaatgatagattcttccagtctttggagcccaacagccaagtcgaactgaaggtgacaggtgatgcagaagccacagtggggctggtggctgtggacaaggctgtctatgtcttgaacagcaaacacaagctcactcagaagaaggtctggaatgtggtggaggaacatgacattggctgcacaggaggaagtgggaaagacagatttgctgtgttcaaggatgctggattggacctgaaaatcagcacaggaatggatagcctggcaagctcaggcacaggctttggggcggatgaagaagaggacttcgatgacctcttcttggatgacatgcctgtgcggaccttgttccccgagagttggctctggaggaagttcactctgccaaagagtaaatcgggcatctcccattaccccatctctgtgaaggtgccagattccatcaccacgtggcagtttgtggtggtcagcctcaaggctggacaaggtctctgtgtctcggacccctttgagctgacagttatgaaatcgttctttgtggaccttaagttgccctcctccgtgatcaggaatgagcaggtccagatccaagccatgttgtacaatttcagggatcgccaggccaaggtccgagtggagttcccccacaaggagacactgtgcagtgcgtcaaagccaggagcaccatcccaccaggtagtggtcgtgccccccacctcctccaagatagtacactttgtgcttctccctctggagacaggcaaagtggacgtggaggtcaaggctgtgggctacggggtccaggaccatgtgaagaagacactcttggtccgggtaatgggcactcccaactcactagctgctggtgcagacagcggggcttccaccaggtccaggctgggcaggtgggcccaggatcgataagcaaggctcctagatgggagtgaggtgagaaagaacagatttgaaagttcagtcagttggctgggcatggtggctcaagccc

SEQ ID NO: 471645 - DNA, 660 bp, Homo sapiens
gatggctaaatgcttttttctcactgtttttagaatttgctcttaatctttgactttaagcaatctgaatacaatgtgccatggagaagaacattttgcattgtaactacctaggggtctctgaacttctctcacgagatctgatggttttacaaagggcagttttccctgcacacactctgtctcttgcctgcctccatgtaagatgtgtctttgctcctcctttgccttctgtcatgattgttaggcttccccagccatgtggaactggaggaggaacagcaagaggaaagggcaggaggcttggaactgtgttgtgtttggctagaggtaacaagagaaaaagtttagcccagagggtccatcgggggaaattttgggacatggaccatgagaggtcctttggattcttagaaaaatctctgaatgtcccactgaggagttttgactttttcctagagcctttggagccatgggagatttaaagtaggttccctcttccataatatggaaatcatgacagtattatctgtctcatgatgttgctatgagaattcatggtgttatgttcctgatatataacaagccctcaagtcttagtttaatattagtcttaatattttaaggttgataggagtgtctttttgtgccaagccttgc

SEQ ID NO: 471646 - DNA, 1273 bp, Homo sapiens
cagagctatgctgggctatgctgggctgtcactgtgagagatggagcactcttccctgctgggctgtgagccctatgtggtgaccctggctgactctgtaatcatagtgcctcctcttagggatgcttgaggattagtaagatgaggaagagggggtgctcctgaacacgagaggagagctgcgttcttcaccgcttcctccttgccccgcaggaggtgtagctcagcgggccacaagacagagctcgtaggtcggggggatgttgccaaagcctgagagcttgggggtgatatcgatgtccacaggcggcaccagcgagtgtagagagaagttctgaagggtggaggtgaagtagagaaagagttccatgcggtccatggcctcgcccaggcagatgcgctttcctggaggcacaggggagggcagaaggaagggtcgcacctgcacaggtcatggggatgtcggggtgtctggactgaccaccccactgagcctcagctgcctcatcggcacctcagggctcatgactaaggtagcctcgaaactgagtgtcccggatgaggttgtgggggacacccatgggcacgatgtctaccagtctctgtatttcgtggatgacggcatctgtgtagggcatcttgacccggtcatccacccttgggagccggtgacaggggcttcatcagggctcgacgcagaacatgcaggtgaggggcagggcactgtgaacctggcagaagagctgattattaaatgttcggtaatgatgtgagcttattatgaaatagtcattattaattaaattacgcaaacaaaaacggaatatattatacttttaaaagaagaatctgctgctttttttcaccccccagtgatttcagggaattgggttgttaaaaatgttttcttcagagttaatagtttttattcacgggatgcttgctccaaaagaagctactcaaccattaccagaagaaactcttcatcagtgcacttggcagctgacatcttcccaacattcccatagccccaccctaatccttgtcatcactctgaaatgtgaaacacagacatttcactctctgaccacaaccactaataccccaactcccccactgcttcattgacaatggcctgaggggtatactggccaactaggtcgttggttaaggttccgaagagtgcaaacactatagaaggtcaagtctccctcctattaaaagactttttttctaacattttgaaaacttttgttacatgtttacaaggaag

SEQ ID NO: 471647 - DNA, 1696 bp, Homo sapiens
cagtgccttgccaggatcccatcacaggagagaacttggccagttgcctgcaggcacaggccgaggatgtggctgcagccgtggaggcagccaggatggcatttaagggctggagtgcgcaccccggcgtcgtccgggcccagcacctgaccaggctggccgaggtgatccagaagcaccagcggctgctgtggaccctggaatccctggtgactgggcgggctgttcgagaggttcgagacggggacgtccagctggcccagcagctgctccactaccatgcaatccaggcatccacccaggaggaggcactggcaggctgggagcccatgggctgcaccgtggtggccctcgtgcccccggcctccccggcgcccctcctcctggcccagctggcgggggagctgggccccttcccgggaatcctgaatgtcctcagtggccctgcgtccctggtgcccatcctggcctcccagcctggaatccggaaggtggccttctgcggagccccggaggaagggcgtgcccttcgacggagcctggcgggagagtgtgcggagctgggcctggcgctggggacggagtcgctgctgctgctgacggacacggcggacgtagactcggccgtggagggtgtcgtggacgccgcctggtccgaccgcggcccgggtggcctcaggctcctcatccaggagtctgtgtgggatgaagccatgagacggctgcaggagcggatggggcggcttcggagtggccgagggctggatggggccgtggacatgggggcccggggggctgccgcatgtgacctggtccagcgctttgtgcgtgaggcccagagccagggtgcacaggtgccgtggcctgtggtcgtggcctcccccttccgcacagccaaggaggcactgttggtggccaacgggacgccccgcgggggcagcgccagtgtgtggagcgagaggctggggcaggcgctggagctgggctatgggctccaggtgggcactgtctggatcaacgcccacggcctcagagacccttcggtgcccacaggcggctgcaaggagagtgggtgttcctggcacgggggcccagacgggctgtatgagtatctgcggccctcagggacccctgcccggctgtcctgcctctccaagaacctgaactatgacacctttggcctcgctgttccctcaaccctgccggctgggcctgaaatagggcccagcccagcacccccctatgggctcttcgttgggggccgtttccaggctcctggggcccgaagctccaggcccatccgggattcgtctggcaacctccatggctacgtggctgagggtggagccaaggacatccgaggtgctgtggaggccgctcaccaggctttccctggctgggcgggccagtccccaggagcccgggcagccctgctgtgggccctggcggctgcactggagcgccggaagtctaccctggcctcgaggctggagaggcagggagcggagctcaaggctgcggaggcggaggtggagctgagcgcaagacgacttcgggcgtggggggcccgggtgcaggcccaaggccacaccctgcaggtgaaggatgatggatagcgacccattcctggaccctaaaatcaatttagtgggctgttaggcggttctcacattgctgtaaagaaacacctgggggc

SEQ ID NO: 471648 - DNA, 778 bp, Homo sapiens
gggacagcccccaactcaactctcttctccttcccaccaggggacgtcatggggccaaccctgaaccacctcaacaacctcctgcggctgccgtttggctgtggagagcagaacatgatccactttgcacccaacgtctttgtcttgaagtatcttcagaaaacccagcagctcagccctgaggtggagagagagaccaccgactacctagtacaaggctaccagcgccagctgacctacaagcgccaggatggctcctacagcgcgtttggggagcgggacgcatcggggagcatgtggctcacagcctttgtcctgaagtccttcgcacaggctcgcagctttatcttcgtggacccccgggagctggctgccgccaagagctggatcatccagcagcagcaggccgatggctccttcctggccgtgggcagggtcctgaacaaggacatccagggtgggatccacggcactgtcccgctgacagcctacgtggtggttgctctcctggaaacaggcacagcctcagaggccctctacctccttcctatcccttgaggtcacttcacttctcccaagaatctttttctgccttctccatagccttccaacctatttctcttctgaacctgaaggcctgccctgcagggcagcagttgtttctccctggtcttctgagttctggtctcttagatcagcagtatccaacctttttggcacaagggaccagttttgtggaagacaattgttccatggactggggaagagggggtagttt

SEQ ID NO: 471649 - DNA, 791 bp, Homo sapiens
tgggcttggcatgggcactggcagtagcagtgagagagtccacatctccacccccaacaagtatgagttccagtatgtgcagcggccactgcgcctcacccgctttgatgtggctgtgcgagctcacaatgatgcccgtgtggccttgtcttctgggccccaggacacagcaggcatgatcgagatcgtcctgggggggcatcagaacaccaggtcatggatctccaccagcaagatgggagagcccgtggccagtgcacacacggccaagatcctctcctgggatgaattcagaacattctggatcagctggcgtggtggccttatccaggttggccatggtccagagccatccaatgagtctgtcattgtggcctggaccctcccgaggccaccagaggtccagttcattggcttttccaccggctggggctccatgggtgaattccgaatctggaggaagatggaggtggacgagagctacagcgaggccttcaccctgggggtcccacacggcgccatccctgggtctgagcgagccaccgcctccatcatcgcttccagtgccttctctatgcccatccatgtgctgggcattgaggaagcccaagagctgatcccaaccccacccttgagggactcctagtccaggtgagatggcagatctagagccccccaagtctaaaccttatgcagaggtcagggtagggtgacccctaagaacctgcagtgaaccctgtgagggcagtgggccaaggacaagatccaagaaaacacaaatacctgaataa

SEQ ID NO: 471650 - DNA, 1285 bp, Homo sapiens
ctgcttccatctccttgtgcatcacttgcgcagctcagatatttcatggctccctgtatacagaactctggctggagttcctaaattccgatgggcaggccctgttcggtgaggagggatggatttcggtctcacttaaagaagcagcccggccacgatcagtcacagcagctgtgctgtgttatgggggactcctcctggtccctggtgccagcaggctagagcggccaactcaaaccacagatagagtggctgccctaccccgggaacccggtccatctccggctgcctccagcctgctgccgctggccagctggaattccaagccaatgggacttgtgaggtgctgtgggagtggggcctcagaatgatgtcacttggctccctggattcagcccccttcctaggggaatgcacggatgtatcttccgctttgctggaattctcggggcagaggatgcaaaactcctgggctttcacgcatgccccagtgagccagcgagcattccgcccagactccacacagctccgtgcttcagacccaaggccatggctgagcttaccaggggacctcctgatctgcaggttgcaaagatccgtgggagaagcatggtttcccgggcagagtcgcacaatcactcaccgcctcccttggctgtgagtggggtcgcccctagctccgtgccacacctgggtgggccatcgccccacttgcttttcctcactccctgtgggtcgagctgtctggctagtcagtcccaatgcaagaacctggatacctcaactgaaggtgcagaattcactcgcagtttttactgctctccgtgagagccgcaggccacagctgcttctaataggccagcttggccccatctaaagtatgatttcttaatacatgagatgttttaaatatgtaacaatatttatcacaaataatattttgtctcaatgtgatataaaaattactaataaatcaattctgtgttggttaccacaaagctatctggaaatgtaacatctgccatttagaaaatttttgtagagttaatagaactttacctgaagggaggctggcaatatgcatcatgatttcaaatattgtattaattgttttgtaattttgtgttttttaaaactaaacttattaaattggttgtatattactttaggtagcattatttggtgatgagagaataatatgcaaaatataagagttccttattataaaaatatcctgttttatattactaccacttcctctgaaagtttaaaattttaattttct

SEQ ID NO: 471651 - DNA, 633 bp, Homo sapiens
ggtggcgggaggagggagcggcacacgcagaaagaagcggtgcagacaagaagcggcagggcctgagcaagcacatcgcagccgctgcccccggacctgcccgctcagctctacagctccgcaggcggcccacgacaaaatttcatgtgtttattgtatacagagacgccacacttcctagaatgggttttttgctcacataccgggactaaaacgctatctccctatattcagttcattactaaagtcatctattcaggctgcaaacgatgcaatcagctgctaggttatgatcctgatatcatcaggattcctttaagtaaaaagcaatttgaagcagtattgcgcttatcaatatatctgcaaatagctttctctgattacacaggacaaatagagcatgaacttcctgctaataaacttcttcatttcttatctcatatgccagtaatcttgcccacaaaaatagtttactcccccatacctaatgctttaacactatttactgatggttcctgtaaacatggaaaagtgacagtctggtggagaccacatcattcagtcactcaatctgggcttactagcactcagagagctgaaatggggccctgatactggtcttggaaacttttt

SEQ ID NO: 471652 - DNA, 644 bp, Homo sapiens
ttgtctcacatgattccagtgcagaaatgccaaaaggccccttcccatatccctcgagctctgtggcctggtctgtgcattgtggccatcacatccatctgtcccattgtgccatgtcttccctgtggtctgtatgtgacaccgtgtctacctctggtcccaccatggctggatgtcaactggcctgtgaatctgtgtccacttgttcatgtgcttactgtgagccctgggcctgtgtttcatgctctgtgtcatgggacactgtgctccgcctcccagggtgcccgtgtggcctgggatcttggccctgtagaccttgcctggttccagtccagtgccttccgccctgccctggcctaccacagctgcctctgggcctcatcctggtttcaccacattccaggggctgtagcccaaatccccaaccccactccacccccaggttctcccaccattggccctaactggccttctggacctccctttgcccagaagagggtggcacctgccactctcaggaccaccctgccaaggcagaataaaccagatcctgttgcaaaaattaattcattaaaagtatgaagcacagaagaaaatgaggtaccaggaaaagggcgcccttctaattacgtgaggcttctgct

SEQ ID NO: 471653 - DNA, 769 bp, Homo sapiens
catctacagaaatccatggtccctcctggaggaggccacacttcagagaaggtgttgtcatggttgggctatgatatggtttggctctgtgtcccccaccgaaatctcatctcgagttgcaaaagaggaatcaaaaaggatcaagttgccagctgccatctgccttttgcctttcccttccacttcccccagcctgtcaccctcctctcctggtgggctaaaagtggcacgtttaggaagatcacagctgagtgtttgggacaaggactgaggggtggggttggtgttcctgaagacaaacatcatgttctcaattattcgtgggagctaataattaaaacgattgaactcatgaaggcaaaacagaaggaagaagctcccttgtacagagacagagtgaggggggctccaagtggagagaggaaaccacaagtgcagcggaaaacagtaggttatattaggaggctggaggaggcggtgcctgattttcatatgacccaggggattggtttgaccagctgtgaggacatctaaggcccatctattttgtgctgttactgaggataaagggtctatagattgttgttgtgcctctatggcacttatagttaccttccatccttgttgcatcataatagagacactgagaagttgaaaagagcttcagtgccttcctgagaagcttcctcagttgggacacagagcagaatatcatcaacttatggcaagaccctaacttgaggatgagagaactcagagaggtcttttg

SEQ ID NO: 471654 - DNA, 1005 bp, Homo sapiens
tgacccccgcacctctgcctgtaaagggatggacagcattggatttgaggtccttaaaagtgactttgggtactgtgtcgagagtggatggactggcaggagtgagaggctcagggcaagtgaggaggcagctgaagaactcaagaggcagtcaaagggggactcgagggccacagctttgagctctgctcttggcccatttagtccagttttagaaagaaccctgctgaatccatttagcaaacatcctccactcttggtatctgatcactgtccatatctgaccaaatgccaaattgctgaccctcaacatgttgtcatcatggcctgccttcagcaagaatcctgtatatttgctgtggcaactgagggaaccaagcctcagtcatgttccccagagcttgcccatggcatttacatttgcaaaaagtaaatctcttgatttccttttggtttcagtagtgtgatttccttttcaaaaataatagcaagtgatactagtttacatataaatagaaactgtaaagttcctttgtttttactatttatcaatatatttaataattatatatatttatatagcctgaaataatgcaaacaactttaaagaattgacacatttgtttatattttacaggtaaaaagattaaaattttggcttatttgcctgaagtcacactgctagttaaatgacagagctaaaaaatgttaaataagttgctaaatgaatgtaattaatttggtttgtttgtttcctaaaatattgatttaaatgtctttatttaaattttaaaatgatagcatttgaaagagtataaataaaattcttaagccgcaatagtaaaggaatttagttacaatgcatgaagttagaagcaatagctttggatttgtaaatgtattcttgaagggtgtcataaagaaatattttattcctatttttcctttgttttgttggagtagttttcccccatctttaatgaggtataattgctttaccagttc

SEQ ID NO: 471655 - DNA, 537 bp, Homo sapiens
ttcctgtgtctccctaatgcctcttgaaggtggccctgattgtttttgcctgatttgcatagtcctcatagttaaaccattttttaaaaaaaatctatttccctcttacacaaagatgactcctacttttgctcaccaatctcctctggatgtttcttttcctttcccaccactgttcaccgattcctctctgcaaaccatccttgtccccaaatcagatccagtttcacctcctcctgttgcagcacacgcttggagggggagaaagaatgaggaggagtggggaggaagagagagaatgtgtgagtgtgtttctatcagggtgggcaaagtgcatttgacccgcaggcctgcctttgtgagtggcattgtgttagaagcagctacactcatggtttactgcattcaggaggtgcatgcgtaggtttgttacataaatacattgtgtgttactaaggtttgggcttctattgaacccatcacacaaatagcatatagtctgtggtacatatgtaccacgctgacctctgcaaagaa

SEQ ID NO: 471656 - DNA, 622 bp, Homo sapiens
cagcttcacaccacagaaggaggcacaggctttgggagagagcacaggctctgggactgcaaaatcaaatgacttttaaggaccgagtccaggcagttaagccagtcactgtgtgcagtgggcagagtggaaactggcagggctcatgccctcctccatcatgtagaggaacagctgttatttcaccccactgcacagctgctgtgtgtatttctcctaatgctattcctcccccagcccccgccccgaccctacaacaggccctggtgctacaggaatttgaagaagagaggtcagttcggaccagagactttcaggcttcctggaagaggtggggtagaactccatgtcaccccatgaaatgtgggacggctttcaggacaagttcctgccctggaaataaaaagaatgagtacgattatggggcagcctttcacacagtgactcatgatccagtttcccagactcccttgctgtgggctgtggttatgtgactgagttctatccaacggaatgagacagaagtgattgagtgcctcccacacggtgacccaaggaccacattttctgccatcctgtggctctgccatctgctagggtctcagagatttttatctggctc

SEQ ID NO: 471657 - DNA, 631 bp, Homo sapiens
agggggagacctgtccctgagctaaggcagagggaggagcagagtcctgcagcacagccatggccacttgggcctcccagtgtgtaccagggcttctgcatccctccaacatccattcaatactcattaatgcacctgtgctatgtaccaagcactgtgccagactctggggacacagcactcttttgtttcatcgtggagaagaaaatggcccccacttacttttaagatttggcgtatgcgtgaagattaaaccagataatgcatgtgaggtacttagctcaagacctggcccagagctgcttcctaatgttcccgagactgtggacttgggccttgccaaggctgacaccagaaatgactgcacatatttaggagtaaagaacacaggaacagaaaccaaataccgagcttacggggatcagcaggtgccaattcaagaagacaacacagagcagagagcatggaggtgaaccagggagtgcatgcctcgcctaaagtaccaattatccttaggagtcaccagatgtacacctggtcactcagatgcctaatgtgacacctgacacattaaagaaaaagaaaaaagagcaaggcaagcagcagtagaaaaagaaaaaaaaaggaaaat

SEQ ID NO: 471658 - DNA, 943 bp, Homo sapiens
ctaactagactttccacactcacacctgctgtccctcacactgtagccaaagtttccaggggatgggtagagcagcagtagcatggaccagtgatggcagacagcagccgagagacaggccccagacctgtccagagttctggataggacagttgatgtggtccatggttgggcttgctgatggagtccttgagcagtctgccctagtgcctgggtcagcatgtgagcagtgttggtctgtgttctcggtatttggcctagtgctagagtacactgggatgggcctggctaccgggtctgcaggattgagtctggatcctgaatctgtggcagtgggcttggtgcctgggactatagaagcaggccttaaagcctgggtctggtttggtttggtgctaggatgggcttggaggttggttctcctggggctggcctgtagcctagttccacggaagctgacctggtcccagggtccactgggcaggcctgatgtggaggcagctgacctggtcctcgggtctactgggcgggcctgatgtggaggtgaagtcagatgctcacttctttcccatttggatggcgtccatctctgtgttgtgctgttcaggctttggggagggttgacacaagtgatatgaacctatccttctcaccttcatgcatcttttcttatgtctttgcttcacccaggtgctataatctttacacttgaattccttcatttttgtgaagttattttctcattcgcatggttgtttaaatttacatttctcgagttcatgaaatcagtgaattaagcattgcagagcatatacagttatgagaacagtatgttggggaagggagctggtttgcaaaaagatttcacctgtgctttactgacacagtagccataatacaaaagcagtgctttaagtagtgttactgataggaaataaattta

SEQ ID NO: 471659 - DNA, 584 bp, Homo sapiens
caaggctcacagtggttgatggctttccagcagtccttctggagcaagccttcagacttagagatgccttcttctggaactattttcctcagctggctgtggcctgaagccatagtgcaaacacccttctcctggactcagagacttgagggggtctatcttagcttattcctgaatgaggtgaaatgggccagcaggtgggaactatactggaaaactgggccctgtgaagagtcagtgactttaagaatcagagatgaattgttgactctgctcagtgaagggttgattgtgtgttacacactgaataacagcagcagcaacagcagcaataataaacatttcctccatttttcctcaattatttctgaggtcctattaccatatgctgtggtgacactggtagagaagtggtgtagtgacacaggaaagagaaggtagtcaataaagggggtgctattaagccagatgccacagtgaactactgaagcttaaacccatgggaagctaaaaatatttaaaaatacatacttcagaatcattcctcccaaaggcatttatagcctgcaagacaatcgccttcc

SEQ ID NO: 471660 - DNA, 769 bp, Homo sapiens
aaatattaatgtggggggataccccttacattttgcacccaaggcgagtgttccaagacccgacgaagtgggtggcctacgtgggtgcgacctacctcagcggctcggaggccagcaccgtgcgggcccaggtggtccagatcgtcaagcaccccctgtacaacgcggacacggccgactttgacgtggctgtgctggagctgaccagccctctgcctttcggccggcacatccagcccgtgtgcctcccggctgccacacacatcttcccacccagcaagaagtgcctgatctcaggctggggctacctcaaggaggacttcctggtcaagccagaggtgctgcagaaagccactgtggagctgctggaccaggcactgtgtgccagcttgtacggccattcactcactgacaggatggtgtgcgctggctacctggacgggaaggtggactcctgccaggtgcgtgccacagagcctggggtccctgagtaatctccctggctatgatggggtccctgtgtaaatcccccccagctgccctccaaaccgggacttgtgtggggacacagacactgttcccagcactgggcctgatacaacgtggcacccaagaaacacctcttgtatgaatgatgccagcacataccctgggcatcagattctctccgtctgtatgggaagggttggtctatgggaaccccgtggacttttgcccctgggtggtcagctgggccatgagtgagctgcaggctcaactcaagaaggtt

SEQ ID NO: 471661 - DNA, 662 bp, Homo sapiens
agctcttcagggcccacaggacaaagtctgaggccctcctcatggccctgctgacccctggacctcctcttacctttccctcacactctcaccttaaccgttttctcaaagggcctttgcacagggtgttcccgctacctgaaacacactgtcattccttcaccacccatggctttgggttaacttctatatatcctccagggctagggctgacagacgggaccaggagctctcgaggtgtctggaggctcagcgccacgggcctgggacagagagctgatgacccaggagaccccctctactaccacctacaaggttcaggcttctcgtgtccccagctcaggactctgtgctgtgtatcagtcctggatgggcctggcgggtggctgcatgtgaatttcagctttgcctccttctggctgtgctatgaggccttgagcaagttcttttggcctctcaggaaatggggttttccgaggtgaagtagaaggtgaaggtcttagcacgggggccagcaaatactaatcactcagtacccatcaggtattattactacccagataaagggctggagccttcagacaaattcaagtcctggctcgaccatttgtgacctgggctagtgacatcccttcccccagcctcaggtgtctcctctgtaa

SEQ ID NO: 471662 - DNA, 947 bp, Homo sapiens
cctttgttgtaacaaccacagatgtcctcagacatcacccagtgtcctcgggggagtgtaaaatcaccctgggagcatctcgcactcgtgacaaccacagatgtcccagacattgcacatgtcactggccctcaaccctgtctctccaccctgtccaccaatcagcacctggaggtgggctgggagctgcctgtgaccgcttcagcatcttttgggagtggtgacagagccacagagggctgtgagcttgcccagccccaggtaacgctggcggtgggtgggcctccagcttggagcagagaccccccgaggcatctgcagacagaactggatggacccatgaatacggatttagctgctggaaagatggcttctgctgcctgctccatggaccccatcgacagctttgagctcctggatctcctgtttgaccggcaggacggcatcctgagacacgtggagctgggcgagggctggggtcacgtcaaggaccagcaggtcctgccaaaccccgactctgacgacttcctcagctccatcctgggctctggagactcactgcccagctccccactctggtcccccgaaggcagtgatagtggcatctccgaagacctcccctccgacccccaggacacccctccacgcagcggaccagccacctcccccgccggctgccatcctgcccagcctggcaaggggccctgcctctcctatcatcctggcaactcttgctccaccacaaccccagggccagtgatccaagtacctgaagcctctgtgaccatagacctggacgtggggaacagcagatcagtaatgatttactctattgattaagcattcccggcggccaggcagagccctggctggagatacttggcctctgggtggcctttgtcccttgacccttgctatgagctcttcttggtcccattggagagttg

SEQ ID NO: 471663 - DNA, 960 bp, Homo sapiens
gttacaggatcctcatgagtggagacaggaggaagggagcccaccctctcttcccattcctgcatgatgaaacagcttccaccagctcctcccaacacgctaaatttcaacggagcgcatcgtaagaggaagacgctggtggccccagagatcaacatttctctggatcagagtgaggggtccctgctgtccgatgacttcttggatacccctgatgacctggatattaacgtggatgacatcgagacccccgatgagaccgactcgctggagttcctggggaatggcaacgaactggagtgggaagacgacacccccgtggccaccgccaagaacatgcccggggacagcgcggatctatttggggacggcacgacggaggacggcagcgccgccaacgggcgcctgtggcggacagtgatcatcggggagcaagagcaccgtatagacctgcacatgatccggccttacatgaaagtggtcacccacggagggtactacggcgaaggcctcaacgccatcatcgtcttcgcagcctgcttccttccagacagcagcctccccgactaccactacatcatggagaacctcttcctgtacgtcatcagcagcttagagctcctggtggctgaggactacatgatcgtgtacctgaacggtgccacgccccggcggaggatgcctggaatcggctggctgaagaagtgctaccagatgatcgaccggaggttgcggaaaaacctgaagtccttgatcatcgtccacccctcgtggttcattcggactgtgctggccatctctcgccctttcatcaggtgagacggggaggctgcaacccaagtccagtggcctcagtgtgcgtgtgtgcgtgtgtgtatgcatgcatttgtgtgtgcatgtgtgcacgtgtgtgcgtgtgtgcatctgtgtgtgtgtgcatccatgtgtgtgtttgatgtg

SEQ ID NO: 471664 - DNA, 759 bp, Homo sapiens
tctttcttctgagatctcgcccgccgccgggcctggagggtgtgccccatggatctaattgttatcctgcctgcatcccctgcactaacccccagacctggcgttggggcttctggcactggccgggaccgacgcgttctcctctggaatgttcagagggaggtagtccaggcggtcaccgcgctcgccagacaagcaacgcagcgccccccgatggccaccgcgcgccggcgcagcccaagccggctgcgccccctagtggccgatgctcgtaaagtcttcagcgagccccgagcttttgctagccagcccttggttttgcaggctggggtcatcgtcgttgtcatcgttggcatcatcatcatcatcatcatcatcatcatcatcatcaatagctacctttgcaactggcttagggacaggtgtgtccctgaagctggactgatgagcattggctctggaactactgctgattgttgaagaaggggcttcctagacatactgtgctgaaagggcacaggcttggaacactggaacatttctttgcatcttacatcaaatttgtcagcaaattctgtcggctctagttagaaaaggtgtcccattctgtgttggaggaaaagcgatgctgtctatcaggacgttaccgggtcagttgacagaactggaatacgaacagtcgattagaaaaattcacatactaatattaaatttactgaagttgatcactatattgtggtcatgtaagagaatatccct

SEQ ID NO: 471665 - DNA, 2036 bp, Homo sapiens
ccagaccaaacaggactccaaggtccaggctggtgcagtgaccaagccctcctctctaaagtgtatggtgctctggacaccatgcccttctcgacatggctgttgcattcgttctgttttcacgatagggccccagtgacaaaggggctcttgaccaaccagccaagccatttgctactacccatgactctacatgtattcttatgtcagcccacttatttttccatacagagtaaattaccagattcaccacctgaagacactggacacaagaggtgtccttttggtgatgagcagacacaagaagatttaaccatcagctttaagtctcttcttagcgttgtgcaagccagagagttggatcgaatcccagtgtggccgtcaaaacagctggaaaagctgcaaccccagtcaaatgagaaattgggcaaatatcttgacacagaaaaactgcacgtgtaccctggtagaaattatacttttatagttatttttacatccaaacattactctttgagcgccgtcatattttatgaaaacttttattaacatttcaaaatgaccttaccctcatggtgggactgtcagtcccaggagccataacctatttaaaacatttttatctttacaaacacaataaagtaagctgtcttcaacagatttgtagatctcattagagatactttttaagaagagccaaaaggcagaagaagggtcactttacaaatgtggcctctgtcttgtgaaaaatattgctgatgaagtttcactctgctgggctgtgatggtgacgtaggggtgcacaggtggtcccagaggaggccagggcgctgggcaggcaggctctgggagtggcaagcagctgtctttctggttttctgattgtgagatgacagtcagagcacagggttttggaataccagagacgaagccaaagccattggtaactgactgctgtttcttttggtcagtgtcagaacgggggataaagcccaagagacaaacaaatctctaaaggactattaagttgcaaatatatcggagccaaaaatagaagatggagccttataaacattttgcatattttggtgtaatttgttgaaaatagtacaaaatatgctcacagttggcatctagaatgcaaatattaggaatccagtcccctgatacattatggtttttcagcagtatagtgtgggctcgtccaattgctattgtgtgactttgtagtttgttggagtgtgaataatatcagtgacttgtttgtacagtatattagggagatacatgtcgccaagtgttattagctcctctggagactccaagggacaaaaaagcacagagtggaactcagggagaaacagatacatatatttttaatgtcactgatgccagctgcttttctgagcggtttccttaaaataaaaaccaggccatggatcaaagtgtgcaaggggctttcatgttccagaacatgggggttaagtggggagagtttcaatgaggagaactgcagtgcgtgtttgagctgatggaatactctcccacctggggcttcaatgagcctgactggttttactgctgacagtaaatttgtctttcctttcccctgacaggtgagaagccatcctctcttgaatgggggctcccactgtacatctggcacccacttcacaggtggctgatgtgcatgattatatcaaggggtgctgggccacatgccctctggttgttttctgacaaaggggaaccatggcaagagcctggagggaggaagagagggactgaggtccagacaacagacacttatcactttgtagtctacccctttgtgcataaactctctctggattatcttccctgggatgcaccatctgtttggtgctgggatcctgactgagagcaggccactggggagtagaggttcctaagggacatctgaggaaggagaggacacaggacatggaatggggtgaaggagcgctttaagggccagttggcatttgagctgcccatggaaggttgataaggatttt

SEQ ID NO: 471666 - DNA, 1839 bp, Homo sapiens
attccagtcaaagcttttttcaaagaagacaaagatgacatgatgacaatgaagaagaagcagaagaggaagaagaagaaggaggaggaggaggagacaacaatgatgacgatgaagaagaagcagaagaaggagcagaagaggaagaagaagggggaggaggaggagaaggaggagaaggaggaggagaaggaggagaaggaggaggagaaggaggagaagaagacaacgatgatgacaatgaagaagcagcagaagaggaagaagaagaaggaggaggaggaggagacaacaatgatgacgatgaagaagaagcagaagaaggagcagaagaggaagaaggagggggaggaggaggagaaggaggagaaggaggaggagaaggaggagaagaagacaacgatgataacaatgaagaagcagcagaagaagaagcagaagcagcagcagaagaagaacaagagaaagaagaagaagaacaaccacaacaacaaggaagaggaggaggaggaggaaatgaaatgaaaacttatttacaaaaagacttatacaaaaatattcatagccacattattcctatagccaaaaactgaaaacagtcaaatgtcccccaactgaggagtggataaacaagttgttttatgttgacaatatgagatactatttagaagcaaaaatgaaaagaacaaaaccctaatatatgagggaataagagaatctcaaaaatgtcacattgagccagacacaaaaaagtgtgcactgtatgactcctttctacggagtgctgtaccaggcaaaggccagctgtgaggacagaaatcagatcggtggctgcctctgcaaggagtatagagatggacttaggagacggaaggaattctctagagggacagaaatggtttatatctagaagggagggtgtctacgtatgtcaaaactcatcaaattgcaccctctgttgcatatacatttattttaataaagtagattataaaaggaaagagaaaagacaacaaaatatgtgtctactttaattatgctcagttggagagagcatgtcctattgcaggctgggccctaagtgttaagagctcaatgaagcatctctttaagaccaatcatattggctcttctctcccctgagtataccccaggccaccaagtaatcaggtctacttcagttctgttacactagccccaagaaaatcagttaatgcaaacagagaacagagacaggaggaccctgcaaagacctcccaaggggcaaccacgtgggttgactgtaagaggatcccctcaatcttggtggtgatttctccatttcatttgacctgggtggagctggggtagtacctgttaccccatcacttaatctagggagctgggatatctcagtgcatccctaaaatgtatgttcataatgaaggaagggttttattctctaccccaggagatgccttagagaaacaagaagcgctacaccaccactctagcgtctggagccctgtctgggaggttaggcagacatggggcaaatcctggctccacctcctcataagctgtgtgactttgagtgtgttcctgaatctctctgtgcctcagttaactcctctccgtaatgggtatagtcaaagagtgtatccgtctcaaggttgtcattagaagtaaataaactagtagagagaaagagaaggaatcaaagaaaaagactaaggtgagaatgaaataaaggcatacgagaaaaaggtagaaacagaagaagaatgaacccaaattatacttctctgcctaaagcttgccgaagcgttctgcacagctccctgagcataatctgggctc

SEQ ID NO: 471667 - DNA, 911 bp, Homo sapiens
ctggggagtccttcggtggcaccgcattagctgaccacacccctgacaaccaggtctctgctgacatggtccccacagaacacgtccccattgaccaggtcccaaataaccaaatcccatggaccgggatctgctgactaggccacactgacatgcttccaatggatcttagtccgatgccagtctccccggaatactccacttttgccagcatgaaagccgacaccaggaccagggacaaggaagctacacagctcacctggactaagctcccacaagggttcaaaaactctcttacaatctttgaggaagcactggcctcaaacctcaaggcctataccctgccaaatgataactgtgccttgtttcagtacctggtggccacttacccccagggctttaagatctggatgaaccccattactcccatcatcaggttgtgccaccccaacatcatctggtctgtcatcaatgcctcagccaccattgcaccaaaagacgaggccttctacaagttcctgaagccctggctgggggatgggctcctggtaaatgccagtgacaagtggagctgccaccgtcagatgctgatgcccgccttccatttcaacatgctgaagccctatatgaagtttttcactgacagtgtgaatatcatgcacgtgaattctttgaacccagagttccagctgaagccttggggtggaggcaccacagacagatctggtctggaattttggctctgctgggtggcattcagcattgcttttcctctctgagctttggtttcctcagctgtaaaatgggtataataatccctacttaaaagatggtcaaggtgatgtaatggagtcatatccctggtgcatagtaggtgcccagaaagtgtctgtttctatatttcctcttgt

SEQ ID NO: 471668 - DNA, 1535 bp, Homo sapiens
tgtgggagagaacagctcttctcttgtttccatttttataatattagtatgatacagtatccatgcctagtcagaactatagcatcatatctgaatttaacctctttggcttctcagccttcccccagcacctcctgcccatcttgttcctgctgtacctcctgatgttcctgttcacattgctgggcaaccttctcatcatggccacaatctggattgaacacagactccacacacccatgtacctcttcttgtgcaccctctccgtctctgagattctgttcactgttgccatcacccctcgcatgctggctgatctgctttccacccatcattccatcacctttgtggcttgtgccaaccagatgttcttctccttcatgtttggcttcactcactccttccttctcctggtcatgggctatgatcgctatgtggccatctgccacccactgcgttacaatgtgctcatgagcccccgtgactgtgcccatcttgtggcctgtacctgggctggtggctcagtcatggggatgatggtgacaacgatagttttccacctcactttctgtgggtctaatgtgatccaccattttttctgtcatgtgctttccctcttgaagttggcctgtgaaaacaagacatcatctgtcatcatgggtgtgatgctggtgtgtgtcacagccctgataggctgtttattcctcatcatcctctcctatgtcttcattgtggctgccatcttgaggattccctctgccgaaggccggcacaagacattttctacgtgtgtatcccacctcactgtggtggtcacgcactatagttttgcctcctttatctacctcaagcccaagggcctccattctatgtacagtgacgccttgatggccaccacctatactgtcttcacccccttccttagcccaatcattttcagcctaaggaacaaggagctgaagaatgccataaataaaaacttttacagaaaattctgtcctccaagttcctgagcgccagtttggtggtgatgaaatataataatgtgtatctccatagggctgttgtaagtgttcagtgtaagaaaaagcaagaataacatgatagtcataaatgccacccagcactgagctttttctatgtattggcactgtgtccagtgttttataaatattatccttttaattagaagaaatgtacaaaggaaaataaactatttgcctcagataaactggtttcttatttaaagttcctcactgtctttgggagagatataccctaagtttgtgtgtggatattaatatgttgagttgaatgaaagatgttagaatgcaaacgttgagagagggcaagaaggagatatatatatatatacacatacatatatacacacacacatatatatatacatatatatgtatacatatatatatacatacatatgtatacatatatacatatatatatatacatacatatgtatacatatatacatatatatgtatacatatatatgtatacatatatacagagac

SEQ ID NO: 471669 - DNA, 2644 bp, Homo sapiens
ggttccctagaaagtgtggatttgaagacgtttctcagttctgttttgagtactagcaatgggattccttgctgaggcaacacctgagttgggggtgggagggcgtccgtcgtgtatggacgacacctggagatgtcctttgtgggaagttcaggaactggggccacttgctgctgtctcagggttgtcggatgtgatcagaggcttagcagccaacctgaattcagagcactcacagctgcatgcaacacttccttcaggaagaggggagcgcttcgtggtctttgaggatgtggctgtggacttcaccctggaggagtgggctttgctggattctgctcagagggacctctacagagatgtgatgctggagacctttcagaacctggcctcagtagtaaaacagtatgaatacaacacgtacggaaaagtcttcatgcatcgccgcacatccctcaagagtcccatcacagttcacactggacacaaaccatatcagtgccaggaatgtgggcaggcctacagttgattcacactgctgagaaaacctacgaatgtaagcaatgtgggaaagcctttattgacttctcaagtcttactagtcatctcagaagtcacaccggagagaagccatataagtgtaaggaatgtgggaaagctttcagttattcctcaacgtttcgaagacacacaataacacacactggcgagaagccatataaatgtaaggaatgtgcggaagcctttagttattcctcaacttttcgaagacatatgatttcacacactggagagaagccacataaatgtaaagaatgtggggaggccttcagttattcttcggcttttcgaagacacatgataacacacactggagagaaaccctacgaatgcaaacaatgtgggaaaaccttcatttatctccagtcctttcgaagacatgaaaggattcacactggagagaaaccctacgaatgcaaacagtgtgggaagaccttcatttatccccagtcctttcgaagacatgaaaggactcatggtggagagaaaccctatgaatgcaaccagtgcgggaaagcattcagtcacccctcctcctttcgaggacacatgagggtgcacactggagagaaaccctatgagtgcaagcaatgtgggaaaactttcaattggcccatatctttacgaaaacatatgagaacacatactagagagaaaccctatgaatgtaagcagtgtgggaaagccttcagcttgtctgcttgctttcgagaacatgtgagaatgcaccctgaagacaaatcctatgaatgcaagctatgtgggaaagctttctattgccacatatccttacaaaaacatatgagaagacataccgcagagaaactctataaatgcaagcagtgtgggaaagctttcagttggcctgaacttttgcaacaacatgtgagaacgcacactgtagagaagccctatgaatgtaaggaatgtgggaaggtcttcaaatggccatcatctttaccaatacatatgagactgcacactggagagaaaccttatcaatgtaagcattgtgggaaagcattcaattgttcctcatccttaaggcgacatgtgagaatacacactacagaaaaacagtataagtgtaatgtaggacatcctcctgcaaatgaattcatgtgcagtgcttcagaaaagtcacaccaggagagagatctgatcaaagttgtaaatatggtgttgcctttatgagttccttatcctgaaagtggacactcaaggagtgtgtctgtagttcatttgcaaataaacatttagttgaaaaataattctccaaatactctcagctatcctacatgaatttgaacagatttggccttgtgttctgtgattttggtgagcgttcaaggaagccaggctttggtctggattggatgttctcaggtcatgaatataattctctgggaactcccaaagttctcatctacaaagcagaagttaattggagctgaaaactaatcagtaaagccacagcagccagtcatatgggggagaagaggggaatgtttgatggtttttgtggtttagagggttcgggggatctcctccttccacaagggatggatgtgaagacaactcattctttgatgttcagatggttgtggccctctgatgagatgtgtgcacaccttgccaaatgcatatgtctgttgagcctggacattaagtatttcttgatgttcttctgtgtaacagaacaaggaactgaatctatactagactttattacagcacagtgtccattatctttactttctcccactataataccccagtcttgcccgtaaagatgagaagggaagtttgactttgatgagcaccaaagttaccaattttacaaaatctaatagccataattcttgtagttcctcaccaccctacagttcccactatttttaccctagttcctgtgtctgcagcctggtttgcatgaatggacctctgctcagctgtcttttccattcctttgcgtcctgattcacagttcctctttgcacttctgtttagaggaggacagtgggtatggcctgcacacctcaggaatattgctggtaccccatccatattttcccaagtcctt

SEQ ID NO: 471670 - DNA, 529 bp, Homo sapiens
ttttgtggttggagccctacgtcaaaaatatgatgtgtcttctccttcctggcgtgggagaagccagtcatggccaggcggaccctggaggggactgtgggcttcagatcttggactccactaagtcctggactctttttagtgggctgggcatggagcatttccaactccagtcccgagggaaaagggccatttattgacagagcagctgttgaagtccctgctggcagagttccaggtcagcacccagacatcctcgccaagaaagagccatatggaggaaggaatgacgcaggagcaggacagtcacacctacacccacgccaggtatttcacttaggaccggtgaacagcaccaaactccaacccaagtgtaaggagttcaaatccttgaaaagagaaattgggttcactgcattcatcaagatgatttggggtttatgttacgattccatcacccccaacccacagtgatgcagattttggagatgtattttgattatccattcctttgactttttagccattt

SEQ ID NO: 471671 - DNA, 724 bp, Homo sapiens
ggcactggcggttcacacttgctaactgagtaagcaacctccctcccttggggaagttgcttctttgtagccagaaaaagcccttggggtggtggaggatggaggaactgtgggctgggccctgaggacacagtccgaggcaggtcctgtgccatctgggggctgagacactggggtcaaatatgtcagagtggccggaacggaaccccatggagggcctctccatgctcttcatcagagagcagacatctccaccaccaccagacatagaaatcgtctccaacaaaagctgctcaattccctccatctcggaacagagtggcaaaggcatgagagttgctacacattcggagggacctgaggatgaaacagtgaaactggagactggcaggtgttcactgtcagtctggggaaagcagatccaagcagccatgagaaaaccccggaagcagtcagagaggaatcaaagtcctaccggtgtcatgtggccccaacagagccccggagagagccaactgagcagaggcctgtgtggctgggcaggcaggggacatgtcctggagggagcaagccttgaacttgtggtctgtagaacttgcccttctgacccaagggtggccgtagaggaatgttaaatcagcacccccagccctggaccacgcctgatggcctggaggagtctgcttaacctctccaagctgccccttggagaatataagatcac

SEQ ID NO: 471672 - DNA, 551 bp, Homo sapiens
aggcgtgcaccatcatgcctggtcaagcctacagcgcccagtattcccagacagtctcccatccaagtactaatcaggccccaaccctgcttagcttccaagatcagataagaccgggcacattcaggaaaagattcaccattctagatgccattaagaacatttgtaattcatgggaagtactcaaaatatcaacatcaacaagagtttggaagaggtttattccaggcttcatgaatgactttgaggggttcaagacttcagtggaggaagtgactgctgatgtggaaatagcaagagaactagagttggaagtggagcctgaagatgggactgaattgctgcagtcttatgaccaaacttggatggatgaggagttgcttcttatggatgagaaaagatacaatcaccactgtgatcagtcagcagccatcaacatcaaggcaggatcccccaccagcaaaaagagtatgacttgctgaaggctcaaaccatgattaacattttttaccaataaagtatttttaattaagatatgtacagtgtttttt

SEQ ID NO: 471673 - DNA, 932 bp, Homo sapiens
tttcaatgttttgaaatttattgagatttcaatttgacccaaaatatgatttttcttggtaaaccttcgaggtctaagagtgacctgcggagtcagcgcccccttcagtctctgggcttctcactgtccccctctgcactgtcccacacctggagcccgagggtggtaatgttacaggaaaacggtcctgatccagaacccaagaaagggttcttggatttcgcacaagaaagaattcaggaacggaatgatttctcgagctcggctctggctgtcttggtctccacggttatctggaggcctcagagtgagagaaagaaccgggaggccttggcggggggtggggtgctgcaggccgctgcctggacctcctctaggcctcaaatcaccatcagctgccagagggcgctgctcttcactctgccacctgctctcccctgggagctgagttttaaaactcccaagaattacctgaaagccagagagcaaagaggcattggcctccacactgcaaatgccaccctccagggcattgaacctccacactgcagatgccaccctccagggcattgagtcttcaccctgcagatgccaccctccagggcactgagcctccaccctgcaaatgccaccctccagggcattgggcccccacactgcagatgccaccctccaggacattgagtcttcaccctgcagatgccaccctccagggtactgggcctccaccctgcagatgccaccctccagggtactgaagttccagactgcaaatgccaccctccagggcattggacttccatcctgcagatgccaccctccagggcactgaacctccaccctgccaatgccccttttggggtactgaacctctactctgcagatgccaccctccagggcattgggcccccacactgcaaatgccaccctct

SEQ ID NO: 471674 - DNA, 722 bp, Homo sapiens
gaggaagtgtgtcctctgcaggccgtctggggccatgcgtccagctgccttgttgtggggcatgatgctcccccgactggaagcttgtgccccgctgtcccaggagaccacttatcctcagtttcttcacatctgggtcaatgaggagaccaagctggtgtacttccagggcaccaaggacacgccgctggagcaccacctctacgtggtcagctatgaggcggccggcgagatcgtacgcctcaccacgcccggcttctcccatagctgctccatgagccagggcacgagtcagctgcagtttgccagctgtggagccagcaagcttgcaggcctgtgcagtggcagagccctcggcagatccagcgtggaaagggcgcagcggcatcccgtggagctcatcaccccattccacccccagaacttcgacatgttcgtcagccactacagcagcgtgagcacgccgccctgcgtgcacgtctacaagctgagcggccccgacgacgaccccctgcacaagcagccccgcttctgggctagcatgatggaggcagccaacggtcctgggttcgagctgcagtaaagggccggactgcacagaacccggcagggatgcagctccgtgccaaccccctgccaaaatggtaaccagtgagacacagaccctgtcactgggagctcccagggtagtgggcaggtgacaagtaaacattttcatcagc

SEQ ID NO: 471675 - DNA, 616 bp, Homo sapiens
tgaatgaatgaataaacgaaccaactcggccacttggccgggcctcctttctcctctggccggacaaaagcaaccccgactccttagagcatggcatggctcagaggtgctggtaaaactgatgggggtttttgctgtccctcccctcagcgccgacaccatgtggatccaggttcggaccatggacgggaggcagacccacacggtggactcgctgtccaggctgaccaaggtggaggagctgaggcggaagatccaggagctgttccacgtggagccaggcctgcagaggctgttctacaggggcaaacaggagaagtccacagaaacctcaaatgcctgcgagaggaaggaacaaagggaggactcacagattgacacgctgggctggcggctggccctcgaatctatagggtctgggcttttaaacttcttttttcaaagctccgcctcaaaataatggctagagaaagaagttttggagcccctcgttgcatttaaaatgtccccctttgatttcatagctgccacgtttggggcgctccctccattggcacctgggggtggaggtgctactttgcacaccgtcagtaactagagctcagtatttgttttt

SEQ ID NO: 471676 - DNA, 518 bp, Homo sapiens
ccacactgtcatgcctgctgaatcatttttctctgctcagctgaaaactcaagacttcagtgcttctgggctacgatttcttttggactatcgagtacaagaacctgtggattttagaccagtcacctttcagatccctcagctgaaagtctgttggagtttgctggaggtccactctagaccctgtttgcctgggtatcaccagcgtaggtgcaaaacagcaaatattgcagaacagcaaatattgctgctgatccttcctctggaagctttgtctcagaggggcacctggctgtatgaggtgaaagggaaatccccaaaccccttgtacttcttgagtgaggcgatgccccgccctgctttggctggctctccaagggctgcacccactttccgagcagtcccaatgagatgaaccaaatacctctgttggaaatgcagaaatcatctgtcttctgcatcgatcatactgacagctgcagaccggagctgttcctgttatcatttatgaaaacatc

SEQ ID NO: 471677 - DNA, 1103 bp, Homo sapiens
accattttttccacatagcaacacttcagcaggataatggcgactcggattcgattcctgaggaagatcagcatgaggatgacaatcacttcaatgatgcagagtattatcactttgaacaggaaaaaaaaaatcagtctgaatattccagaagaaggcataattataataggagatgacagctccatgttttttattgtccctgaagaccttccagtgggacaagatgtggaggtggaagaaagtgatattgatgatcctgaccctgttattcctagacttgaaaattctattaagctctgtattttcctaaaggtacatctctttacttttccaatggcagattctgatctcctcaatggcgtttgtgtggaagggtcttatgagacagccggggaaataatagacaacagtaagcaggttgctgaagagatgtggaatcatttaaattcaggaaaaatgatgaggatgcaattccctgatcctgatgaggatggctgatttttgcagttaaaaaggaaaaggtataaatgaaacaattccataacatatttggaaaaaagatgtcagagaaggatattagtctgcatgagagctagaaatgagaagccaaacaaaaaacaacatcttctctaatttagaaaccattcatattatttaacattgtgatgatttagaattctcttacgtatctcaaacctagcctgcagaaccataagcaaacaaacctcttttctttataaattacccagcgtcaggtattccttttgtagcaacactaagcagagtaagacagttagaagacactaaccttactcagagctcacccgttttatattcacttgtttctgtgtgcctgtgtatgtgcgtagttctatgccattttatcagacatgtggttgtgtgatcactaccacaggacagagatggacttttaataaaacactttatgattttacagtataatttaagattaatattgcttgtgtagtcaatgcatattcagggttaaaatcttccttcctttcctaaatatgaataaaatgatgatttaaaattctctgaatattgaacacctatgacactaataattattagtgccc

SEQ ID NO: 471678 - DNA, 599 bp, Homo sapiens
cagtgggtggaggaaggaaaacttgggatagaaaatccaacaggactgctcctggatcatggctcagaggacctggagttgggtcacatactgcttcagagtccacagtcaggaccagtgtcagcaggcctgttacctgaagcagggacagatgtggttcctcgtgcgtcccttggtggatggtgctggtggcaagactaaggccaaatggggctgtagcagagtccatagggggatggagctgtttccagagaaaacaccaaaaatcgatagggaggtgacagacattgtggctaaagagggaggaaactgggaagcctgcatggagtcaccgagcaccaagaccagctcctggccctcaacaggtcctaaggaaggggtgagtaaaggaactccaaggcaccacaccccaaatacaaccctctgggatcctagagacaagagatcccattacccccacagacatttgaattggcaggaggaacttcttagagaccagacagaggcagagattgaacctgcatagaaccctgaaggtttcaaggtggcacgtggtgcagcagcaactaaacgtgacttcaggcatttatcccagaagg

SEQ ID NO: 471679 - DNA, 670 bp, Homo sapiens
aggcctgtgctattgctggcgaatggatgccactactgagcacaaccctgtctccagaaacatctactttgcttctatagcccacgcacttccattggccaggctttatatttggctgtgcagttcaacctgcaggccagtagatggcgctgacggaggtcccaggcctcctcactctctccctggcctgggagtcggggtctcagagaaacacctagccaaggccagtgtttctgcaggggtgggtcaactgtacagggggcctgcaacagctggcaccaggctgactgtgggattccaggtgggcttgagcggtgcctctgcaaagtttctgggtggctctgtgttcagctggaggcctaaggaggattatgggggctctcctgtggctaggattgtaaaagtctgtgatggagaggtgggtcccggagcctctcacctcattcaccccttccttggagtaagagcctctcttcactccacaccgtcccagctccgcaggctgcctggctccactgttccctgctttccttgggtcccattggttctctggtgaatccgagcatgctctcttaagatgatctatgtgaagtgcccattagccccccaagtccactgttcccttatttattttctgtctggattatctataaattgttgaaagtgggag

SEQ ID NO: 471680 - DNA, 924 bp, Homo sapiens
agtcttttgttctcaagggctgatgcagctccggggttgaattctttgtcactgtcctgcagccctccttgtctcatctgccctttctggtgggctatgaatgtagacagctggctttgctctccagaggaggaggcccccaaggccgacactggctccttctggtgtttgagggctgctggctctggcctgctgcattcaggggcccaggaccccacgatgacatggcagatgcaagcacagcagatgcgctgggctgctgaagctggtgccagctggcgcatcagcgatgctgaaggcccagacgtgcaatgtagacagttgaaggttcatcttttgggagtaggccctggagatagaaatggaaaaactgtaggctgtcctctcagagagctcagagctggggagaaggatatacacacaatacaagatcagagcttaaataaagatccatttgctgatagtaatgggctacatagagatttaagatttaacccaccaggacagagcctggtccctatctgagttctcggactagctagatgtctgtgctgatgctgagctcaacaagctcagaagcatccttcttggatcccacaatgcacccatttgggtaaccttgtctttaagaactgagtcatctcctccgtggttgcccttgttttctaaaatgggcagaagcttaatttggtgaggtttttcattttcaggttttatttattattttaaggctgaagagttcaaatctttcgttcatccttgaagacatgtcacaaacaggctagtgactccaaaccttcgggtgtgatggaacctctttaagatactgcctgactcacagaattgtgtgtatatttgcactttgcagggaacctgaaaaactctactggaagctatggagtaaatgtgggctggggagggaga

SEQ ID NO: 471681 - DNA, 619 bp, Homo sapiens
cctaccgtgcatgaacgaacaaacgtgccagcgctttcccgcctgctccagctccgtctccagctgccaggatggagccgggtcgggaccatccgggaaaggggacgccctcccggaccccggctcaccctcgggggcgccggctgcccgcacgcgcctctcccgccaccagcgccgccccggtatttatgagttcgcgggtgccgaggcctcttgccgcctacagccgtcccagccccggaagagccggtcgcctcggggtgacagcctccctagacagccagggccccgggtcccacaggtccggccggtcctgcctgggcgccccacacccacccgcccaccccaccagggcgtggcgcgggaagggggacccaggaaggttatgatacgtctccggcgcgccacctctgagccggccaccagaagcccggggcaacctcaaaacaaaaccagaatcccggaattgcagtgggctttctgagctgtgcgacctagggccttcttattgcctgttccctcgacctagaacattcttccccaggtgcccatgtagccccttctctccttccttcaggccttacccagatgacactttctcaggcagccctccccttga

SEQ ID NO: 471682 - DNA, 1238 bp, Homo sapiens
acatacccaagactgggaagaaaaagaggtgagccaggctccatgactgtaacttggaccacatgggtcccaacccgctctgaagtgcaattcgggttgcagccgtcggggcccctgcccctccgcgcccagggcaccttcgtcccctttgtggacgggggcattctccggcggaagctctacatacaccgagtcacgcttcgcaagctgctgccaggggttcagtatgtttatcgctgtggcagtgcgcagggctggagccgtcggttccgcttcagggccctcaagaatggggcccactggagtccccgtctggctgtgtttggagacctgggggctgacaacccgaaggccgtcccccggctgcgcagggacacccagcagggcatgtatgacgccgttctccatgtgggagactttgcctacaacctggatcaggacaacgcccgtgttggggataggttcatgcggctcattgaacccgtggctgccagcctgccgtacatgacatgccctgggaatcatgaagaacgctacaacttctctaactacaaggctcgcttcagcatgccgggggataatgagggcctgtggtacagctgggatctgggtcccgcccacatcatctccttctccaccgaggtctatttctttctccattatggccgccacttggtacagaggcagtttcgctggctggagagcgacctccagaaagccaataagaaccgggcagcccggccgtggatcatcactatggggcaccggcccatgtactgctccaacgcagatctggacgactgcacacgacatgaaagcaaggtccgcaaaggcctccaaggcaagctgtacgggttggaggatcttttctacaaatatggagtggatctgcagctgtgggctcatgagcactcgtatgaacgactgtggccaatttacaactaccaggtatttaacggcagccgagagatgccctacaccaacccgcgagggcctgtccacatcatcacaggatctgctggctgtgaggagcggctgacgccctttgctgtcttcccgaggccctggagtgccgtgcgtgtgaaggagtacgggtatacgcggctgcacatcctcaacgggacccacatccacatccagcaggtgtcggacgaccaggtcagtgaggggcaggccgaagtcacctgactgtacagccaggcccctccaagcaaatgagctgttaaaaacgtgggctc

SEQ ID NO: 471683 - DNA, 1141 bp, Homo sapiens
cggtgttgagctccaagccgagctgctgcgagatggtgacctgcatctccttggacggccgcttgttctccttgaagatggcgatcagcgtgcgtcgctgcaggtcggtgaacaccaggcgctgcttcttgggctgcagggcgcgctccttctgctgctcctgttccttgcgcttgcaggctgcgggcgagcggcgggcgggcgggcgagcgggacacagcgccaccgtgtggccggccggggagaggcaggaggcgcacgccgcccggaggatgaggaggaggggagaagggacacgttggggaaaggcgaatgcacataaggtcccagggagagcccagaagcaacaagaatgcagggagaggcggagggggagacagcggggaacacagggacgcacagagacagagacagggaaacagcaaggtcaacagggagacaacaggaaagtccaggatgcagccagagggcggtggagacagaatggaaggcgaggacaggcagggaaagcagatgcggtgggggtggggggaggacaaagaaggggacacagtgtgagtgcccctctgcaggcatggctaccaccccctccagcccccttctccatggagcccactcaggcaccccccaagcctcataccccccaaaccccgtcctaccctcaaacgctccctacctaaaggaccacagaaattgatattggtaactttctcctctcctttctgcagccccaacctgggggtgttggggaaatgacatggaaactgcacatgagagtttttggctcagtgtagacttgggtgaaataactggttaattactaggtcctgggaaaagcgtctaacatgaaaaagagagggagagagagagagggagggaggcaggaggggggagaacaatggagaaaaatggtttggtgggggaggaataaactcagaaggaaccgacaaggcaggcaaagctataattaatattcccagaggagtaagagaaaaatatcgtatccatgaaacaagtacaggatgctgttaagtaaaagggaccattagagagtgaggaaatgctcttaaaatgtgaatatataacagccagagtaaaataattccatgtaaggactggaagataaagttaagcagatatt

SEQ ID NO: 471684 - DNA, 1922 bp, Homo sapiens
gcctccacggagatggtaacaccagtcacatggatggataatcctatagaagtatatgttaatgatagtgaatgggtacctggccccacacatgatcgctgccctgccaaacctgaggaagaagggatgatgataaatatttccattgggtatcgttatcctcctatttgcctagggagagcaccaggatgtttaatggctgcagtccaaaattggttggtggaagtacctactgtcagtcccatcagtagattcacttatcacatggtaagcgggatgtcactcaggccacgggtaaattatttacaagactttccttatcaaagatcattaaaatttagacctaaagggaaaccttgccccaaggaaattcccaaagaatcaaaaaatacagaagttttagtttgggaagaatgtgtggccaatagtgcggtgatattacaaaacaatgaattcggaactattatagattgggcacctcgaggtcaattctaccacaattgctcaggacaaactcagtcgtgtccaagtgcacaagtgagtccagctgttgatagcgacttaacagaaagtttagacaaacataagcataaaaaattgcagactttctacccttgggaatggggagaaaaaggaatctctaccccaagaccaaaaatagtaagtcctgtttctggtcctgaacatccagaattatggaggcttactgtggcctcacaccacattagaatttggtctggaaatcaaactttagaaacaagagatcgtaagccattttatactgtcgacctaaattccagtctaacagttcctttacaaagttgcgtaaagcccccttatatgctagttgtaggaaatatagttattaaaccagactcccagactataacctgtgaaaattgtagattgcttacttgcattgattcaacttttaattggcaacaccgtattctgctggtgagagcaagagagggcgtgtggatccctgtgtccatggaccgaccgtgggaggcctcaccatccgtccatattttgactgaagtattaaaaggtgttttaaatagatccaaaagattcatttttactttaattgcagtgattatgggattaattgcagtcacagctacggctgctgtagcaggagttgcattgcattcttctgttcagtcagtaaactttgttaatgattggcaaaataattctacaagattgtggaattcacaatctagtattgatcaaaaattggcaaatcaaattaatgatcttagacaaactgtcatttggatgggagacagactcatgagcttagaacatcgtttccagttacaatgtgactggaatacgtcagatttttgtattacaccccaaatttataatgagtctgagcatcactgggacatggttagacgccatctacagggaagagaagataatctcactttagacatttccaaattaaaagaacaaattttcgaagcatcaaaagcccatttaaatttggtgccaggaactgaggcaattgcaggagttgctgatggcctcgcaaatcttaaccctgtcacttgggttaagaccattggaagtactacaattataaatctcatattaatccttgtgtgcctgttttgtctgttgttagtctgcaggtgtacccaacagctccgaagagacagcgaccatcgagaacgggccatgatgacgatggcggttttgtcgaaaagaaaagggggaaatgtggggaaaagcaagagagatcagattgttactgtgtctgtgtagaaagaagtagacataggagactccattttgttatgtactaagaaaaattcttctgccttgagattctgttaatctataaccttacccccaaccccgtgctctctgaaacgtgtgctgtgtcaactcagagttaaatggattaa

SEQ ID NO: 471685 - DNA, 586 bp, Homo sapiens
ccgagggtgagaggtgccccctgacacccccatgcccccaccccatggcggcccagcctccagatggagccacgagggagggacagcccgagagtccaagtggaaatgcgtttcccgctgtcccgaagcctgggcctggtcttctggtccatcctccctcccagccagcagtgtatccactcgaaggcctcagagagcccagtggagcccgcgcctcccctccagtacccacccaaaggcgtcctctctccccctttcctggactcagagcggagctggcctcctcattggggaacagagtcccaggcagccgccgcttcacgctgtcctgtgactctgcatcccacacagggatgtcacaccaagatccgttgcctcatccaccgcccgtccaaggccccacaagctgatgccggttttcccgcccagaactggaacagctttcctaacgcccgcacgcggccaacgtcaggcgcgcgcagaggcacccacgggcccgccttcaggggcgaggcggatgctgcatcctgaagccctccctgttacaagcccagcccctccaaaggcctctggatgaaggggagga

SEQ ID NO: 471686 - DNA, 604 bp, Homo sapiens
cgtaggaatggttcaacgacagccctacgagagtgtgcgcgagcgtgctgtctgcacctgcgaccaccccgaccccgtgcccagccccctgaccctctcctgctgttctcactgcggggaaacgggtccaaccccaccactgaccccagctcatctcaggcctcccgtccacagccacttcctcaggagccctcctggacccgccagcccgggtctgaccccggtgcgccgtgagaacatcaaacatcggccagggctgcacacgggaggccctcgggggtgcagcgtggaagccccctggacagatggagaagctgaggccctgtcaacaggtcccccgcgtcctccccggccctgtgttgatgggcggcagctgtgtccaggcacgctgtccccgttggacatggccggacgcatggatttccgaagccatctctccatctggcagctttattaacccaattccagggatcgagtgattgacgtgtttgcttatcggctcctcctgtctctccagggacgggtgcccaggtgcccccaccccacctccatcggcccagggggagaggggacaccagatcccccccacagccccgagaccaac

SEQ ID NO: 471687 - DNA, 1151 bp, Homo sapiens
ctgcaagctccattcatgggcacttctgtttgtggagtaaagcctgccacattgtcaaaatatgtaactggaggattacagtatgcttacctctgattttatttctacagtgctgctataagtaacaatgagtaaatctactaaattatgtggtaagacttcttgtccaagaagcaatatattctgcaatctccttgacaaaattgttaaaagaccctccctacagtttttgggtcagtggggatatcactgttacgaaccaaggatttacagatcactggcaaaaattctgaggtatgtggacttggatggttttgacgcactactcacagattacattgcatttgtggaaaaatcaggataccgttttgaagtaagttttaacctcgacttcactgaaatatgtgtgaatacaattctgtactgggtttttgccagaaaaggtaatcctgactttgtggaattgcttctcaagaagacaaaagactatgttcaagacagaagttgtaacctggcactgatatggagaactttcacaccagtatactgtccaagcccattaagtggcatcacacctctcttttatgtagctcagacaagacagtctaatatcttcaaaatactactgcaatatggaatcttagaaagagaaaaaaaccctatcaacattgtcttaacaatagtactctacccttcgagagtaagagtaatggttgatcgtgaattggctgacatccatgaagatgccaaaacatgtttggtactatgttccagagtgctttctgtcatttcagtcaaggaaataaagacacagctgagtttaggaagacatccaattatttcaaattggtttgattacattccttcaacaagatacaaagatccatgtgaactattacatctttgcagactaaccatcaggaatcaactattaaccaacaatatgctcccagatggaatattttcacttctaattcctgctcgtctacaaaactatctgaatttagaaatctaacatacgtcagtgtcctaagttccttaacaatgcttaccaatgtatggcttagaagttaataaaaattcacttcatgtaagtttttattgcattaaacattcatttagaaaatatattttcacacaacatcttaatt

SEQ ID NO: 471688 - DNA, 1660 bp, Homo sapiens
gatcccgcggccccgcgcatgcgcccccgcgcggcccggagggggctcggccggcgcccagctgtcatcgatcgccgcggccccaggcactgaataagctcaggaagggcttccgggaagggcccggtgctcccgccccgccccatctctccgtaatagtaatggcagcaatagcgtcggcagcatcgcctcccgcctgcgggaccgcgccgcggagcctcccccagcacccaggccagggcttcatcggggtccgctgtatcctggaggtggccgcaggggccccacagtcgggattccaatcccttgggggctgtgctgaaaggccagagggagctgtgggaggcaagatctaccagtggggcctcagatttccaggcagttggaggaaggttctggctttgtgtctcttgggctcctccaaccccagcccctgctaccaatacctccgtggtcaggcctgcagcccgggcctgcaggcgggatgggaacctcttgcccaggccctggggctgcagcctcgcgtgggtggggggcagatgcagggccgcgccccgctgcggcggcggcaccgatcagcagagagcgatcgatggcttattgagcacttttcaagcttcggtgatttttgtggattcagtgtaaaccgcagcctgggcccccgctcccatcgacctggggcagaggagccccctccccacgatcggcgctgacagctcccgccgcgggctctgcgccccggcaccccgcagcacggagccgcctcctctcctcccgggcccccgcggagagcaggggggcggggccccagacctgggggaggcagggaggaggggaagccgccatgttaccacgaaagaaggagacggaggctctgaaatcccccttcataattaataaatgaagaatatggttgttaatcgatggagctgtgaagagaatattgattccaacctcgcactattttttttttttgtgccgcttagatttttacacctcatttagaacaaggcttccccagggaactcttaaaaccaaaagatatttgcgagattctagtggggcggggggcgacgtcggggttgggctgcaaaaagagggggactagggagggagaagcagcgtgggggggacaaagcgaagaaatattatttatcatccaaattgccaaagcaccgtgcctttccttgaagcacccatttgaatatttgattaaggatcaattatcatgggtgttgggaaaggttgtcgggcaaattcgagagaggccacaggggaagtgaaggaggtagaaaaataaatctagttattattttttattacacaaacaatgcgtgtcttgggtggtaaaactgtagtaaaatggagaccatcaaccaccacaacaaaaaattatcaatctcactgttccagagagaaagctttggaagtgtcttgcctgtaaacatgcacatacgtgcaaaataattgtacataaatattaaagacgtttacagaaatggctttgcatattatctgtgacctgccgtacatggttggccgttctttctttctgactgaaaaactaattagaaaatattaaaaagtaaaatgaagaaaatgtcatcattgataattaatttcagttctttttttattttttatttatttattttttttt

SEQ ID NO: 471689 - DNA, 570 bp, Homo sapiens
gccgcccgggcttgaggccccagatggatgctctgtttccagaacaaagaggtgtcaagacccactgtgtgctgggggtcccacccccggccctggaacctggggcaggaaggatactccatgcacacctttcagggggtcagaggctgagacggtgcctggggcagacccgtgggttggggtgggggtgcccagatcttgacccccatccgtattcccaaggggcagagatgggacgtgactcctcctggcccccgccgccggcccgcaggtgttggggtctctgggctgggtctcccggcgttgtggctgctgccgagggagatgaggccaccctgatccccgcctgctccagccgcagcaaccaaggacgatcgatagccgaggcggccgctggggcttctctcctcttgctgtggggtgggggctgggtgcggggcagccagaactggggccagagtgtgctctccgcggtgtggccgagttgattactctaattaattttgcatcgacctacatggatctgctgggagagggctgatcggcatgggagacagatgctgccaaccc

SEQ ID NO: 471690 - DNA, 1332 bp, Homo sapiens
agattgagaccttcatttcagaaaacccaacagggtgagtccaatagtccccagtgtgtgatgttcccctccctgtgtccatgtgttctcattgttcgactcccacttataagtgagaacatgtggtgtttggttttctgttccattctcagcaaactaacacaaggacttctgttttatagcaccacttactcactgtctagacagcatctggaacattcacatcacaagatgaaatcatggaacaatacaataattttagaatttcttctcctgggaatttcagaggaaccagaattgcaggccttcctctttgggctgttcctgtccatgtacctggtcactgtgctcgggaacctgctcatcatcctggccacaatctcagactcccacctccacacccccatgtacttcttcctctccaacctgtccttcgtagacatctgttttgtctctaccactgtcccgaagatgctggtgaacatccagacacacaacaaagtcatcacctatgcaggctgcatcacccagatgtgctttttcttactctttgtaggattggataacttccttctgaccgtgatggcctatgaccggtttgtggccatctgtcaccctctgcactacatggtcattatgaaccctcaactctgtggactgctggttctggcatcctggatcatgagtgttctgaattccatgttacaaagcttaatggtgttgccactgcccttttgtacacacatggaaatccctcattttttctgtgaaattaatcaggtggtccaccttgcctgttctgacacctttcttaatgacatagtgatgtattttgcagtagcgctgctgggcggtggtcccctcactgggatcctgtactcttactctaagatagtttcctccatacgtgcaatctcatcagctcaggggaagtataaggcattttccacctgtgcatctcacctctcagttgtctccttattttatggtacatgcttaggggtgtaccttagttctgctgccacccacaattcacacacaggtgctgcagcctcagtgatgtacactgtggtcacccccatgctgaaccccttcatctacagtctgaggaataaacacataaagggtgctatgaaaacattcttcagaggaaagcaatagaaaggctatttttcaagaaaggcctgtgacttcagagctctaagccccagagccagaaatggtgatttgttaataagatggtggaaggaagacttgccccttccatttatttcctggagtttaaacttctttgttcctcaactactttatagagcttacactgttcttctt

SEQ ID NO: 471691 - DNA, 1124 bp, Homo sapiens
ggaaatttgaggttttggaaaatatattattgaggggatggaccatggggatccggagctgcagcccatcctcttcatgctgttcctgtccatgtacctggccacaatgctggggaacctgctcatcatcctggccgtcaactctgactcccacctccacacccccatgtacttcctcctctctatcctgtccttggtcgacatctgtttcacctccaccacgatgcccaagatgctggtgaacatccaggcacaggctcaatccatcaattacacaggctgcctcacccaaatctgctttgtcctggtttttgttggattggaaaatggaattctggtcatgatggcctatgatcgatttgtggccatctgtcacccactgaggtacaatgtcatcatgaaccccaaactctgtgggctgctgcttctgctgtccttcatcgttagtgtcctggatgctctgctgcacacgttgatggtgctacagctgaccttctgcatagacctggaaattccccactttttctgtgaactagctcatattctcaagctcgcctgttctgatgtcctcatcaataacatcctggtgtatttggtgaccagcctgttaggtgttgttcctctctctgggatcattttctcttacacacgaattgtctcctctgtcatgaaaattccatcagctggtggaaagtataaagctttttccatctgcgggtcacatttaatcgttgtttccttgttttatggaacagggtttggggtgtaccttagttctggggctacccactcctccaggaagggtgcaatagcatcagtgatgtataccattacttatattacctagcataatgttaatcctatgtaaatagttgtattacttaatattgtatttttgtaatattcttatttaatatttttaaaattttctttaatatttttaatatttttgatccacagttggttgagtccatgaatgtggtactggcagatatggaaggctgactgtacttggtatatatattgttaaaattgtcagaatcaaaatggagtcacttattaaaaaaaaaaaaggctgggtgtagcggctatcaaaaaagtctgcactttgataggctgaagtg

SEQ ID NO: 471692 - DNA, 1868 bp, Homo sapiens
gcattatctcacagagtcgttatcctggactctcagatgatcctgaactgcagcccgtcctctttgggctgttcctgtccatgtacctggtcatggtgctggggaacctactcatcatcctggccgtcagctctgactcccacctccacagccccatgtaattcttcctctccaacttgtcctttgtggacacctgtttcatctgcaccacagtccccaagatgctagtgaacatccaggcacggagcaaagacatctcctacatggggtgcctcactcaggtgtatttttaaatgatgtttgctggaatggatactttcctactggctgtgatagcctatgaccggtttgtggccatctgccacccactgcagtacatggtcatcataaacccccatctctgtggcctcctggttctggcatcttggttcatcattttctggttctccctggttcatattctactgatgaagaggctgaccttctccacaggcactgagattccgcatttcttctgtgaactggctcaggtcctcaaggtggcccgctctgatgctctcctcattaacattgtcttgtatgtggccatggcactgctgggtgtgtttcctgtagctgggatcctcttctcctactctcagattgtctcctccttaatgagaatgtcctccaccgagggcaagtacaaagccttttccacctgtggatctcacctctgtgtggtctccttgttctatggaacaggacttggggtctatctcagttctgctgtgacccattcttcccagagcagctccatggcctcagtgatgtacgccatggtcacccccatgctgaaccccttcatctacagcctgaggaacaaggatgtgaagggggccctggggagactccttagcagggcagcctcttgtctcttacggtacacaacctcagaactaagaggatgctatgggtcccttaagcaaatgtgaatgcgcatatcctagatcttgctctcccctaaaatatatgttgcagtttcctattttcaaagcacctacgactttgcttaaaatgtttttgtatggccgggcacgccccagtccctgtgcaggagcctggtttctggaaaaggccccacagcctggtggacacagacccaattccagtatcagacccatcagtgaccactgtgttgggattcaacagcctctccagactgtgattctcactggcaaaataaaaaatctgtctgtctttatttgatcaggagtactaaggctccaatgagacagtgtatttgaaaaaccttgggaatccactctccaaagcctagcaggttttgttactattatccaactcaatgtacaattctaaggtaaattgaaaaaatgtataaatccattaaaaagaaaagttgaaggtctcacatttcctggtttccaaataaactacaaagatccaggaattaaaacagtgtggtactataatacataaagacacatatacagaaaaatggaagagtaaagagagcccagaaagaaactctcacttatatggtcacatgattttccacatgggtgccaagaacattcattgggaaaaagacagccttttcaacaaacggtgtaggaaaaacttgatttcaaaatgcagaagaatgaaggtgggttcttaccttacaccatatgcaaaagttaacacaaaatggatcaaaggcctaaacctaaattccaaacctataaaattcttaaagaaaacattgatcaataccttcatgacattggatttggtaatgatttgatcaataccttcatgacactggatttcttagtgatttcttgaatatgtcaccaaaagcacagacaacaatatatagataactt

SEQ ID NO: 471693 - DNA, 535 bp, Homo sapiens
tgtacgcacatggggtacacccactgcgatattagaagcaatatctccaaaaatattatgaaaaatatcacaggatgtacaccctctgagtacattgcctatgacattaggagtacaccccctgtgacattctgtacaccccaagtgacattagaagtaacattaggagtacacatggtgtacatcccctgtgacattgcagaggctccagtacagccatttaggggaagaaaatttatggacagaaaaagaaaagtgacgtacaaaagaatggaagtgaagtacacaaacagctggatgggttacctctcggcgttcgacgaatttgaatacggtttgaaaggctggccagctttgatggctcaaaaacagcaaatttcaaaaattagtctctgaatgtgaagctacagtgatactgttaccatgttattcttttctatttccctttctatgtatgcacaagagtgaaagaggagaaaaaactgtatgtgtataaatatatgctgaataaatgtacaataaaaattatagtggt

SEQ ID NO: 471694 - DNA, 710 bp, Homo sapiens
ttgctctttgcactgtttctgtccatgtacctggtcaccgttctggggaacctgctcatcatcctggccatcagctctgactcccacctccacacccccaggtacttcttcctctccaatctgtccctggctgacatcggtttcacctccaccgcagtccccaagatgctggtgaacatccaggtgcagagcaatgccatcagctatgcagactgcatcgcccagatgcttacctgctcagacacacatgtcaattacatcctgctctacgtggtggccggccttctggactttgtgcccttctcagggatccttttctcctacacccaaattgtctcctacatcctgagaatctcatccacagatgggaaacacaaagccttttctacctgtggatctcatctgtttgtggtttctttattctatgggacaggccttgggtacttaccatgaatggagcttgcaggactggaagttgatctgggtgagtcgttgagtagggggtgaatgtgaaggcctaggacattactgtacatcattataagactttagaaacactgtacacttaggctacactaaatttgtaaaaaatatttttctgttttcaagaatcaattaaccttgcttactgtaacattttcactttttaaaaaaggcttttgactgttttgtaataacacttagcttaaaacacagattgtacagctgtt

SEQ ID NO: 471695 - DNA, 796 bp, Homo sapiens
gtgtgctttaccctcagcatggacccacagctgcaggtggatttccataccgagatgaaggaagactcagacatcgccttccatttccgagtgtactttggtcattgggtggtcatgaacagccgcgtgaatggggcttggcagtatgaggtgacatgccacaatatgccctttcaggatggtaaaccatttaacctgtgcatctccgtgctggccgatgagtaccagcaacaatcggcttcaccctccactcttcccttcttggagtttctaccaagatggcagaatgacagtccttttccctctataagagctgagatcacctgcttcatagcaaacctggagaaccacttagcagaaacaacatgttacctacaaactaatgaaggcagattgagtaaagtcctgtcaaatagcctctttttccacacggcccaagtcaggcatcattttgatcatcctcatcctctctccccatgttcattgccgcagtttgttcacctccaaccttactcatgggtatgctcctctcctacccgcattcaacctaacacccagatacctgaggtgccaacacacagccagtgctactcctcattcctttcttccacgtttcattcccatatggaatgaaattccctcctctctcactggacactcttgggttcagtttaggtccactctcctccttacacctttctgctctcagtgttgttcacttttctattttgataataggtcataggcctcatcacctgtatggaattcattttttgtggaattttagaaggtgaca

SEQ ID NO: 471696 - DNA, 1064 bp, Homo sapiens
ctccccgggctgagtcagctgccggtgttgaggtcggagctgatcagcctcctggaatgtgacatgctgtaccctgactaatattccggctgaatcagagctttgctcgtaatgagaggcaagtctcgagccagtcaccctctggcccatgtgagactgggaattcagaatcagccgggagtgacagaaagccaggtctggctggcacgcctggcttcctcctccccaaagactctgcccttcactggcttccctggcaaccatggaaacactgggaggggcatgggtgacccatggcccttctacaagttgaaggcactgctgggctcagcctcctgcaggtcaggagctgctaggaatagccgccagggctggcaacaggtcacagtcactgctccggagacgagaggcctgctgtgctgtggcaccaccggcaaccagacagagcccttggcaccccccatcctgcttcccttgtactgttcgctcatgttcacagcagccaaaagtggccgtgcccggggtgtcagagctctagtggtataaatgatacacggtgaaagtgaaaacaaagccctcctctctgccacgttgctctcgcattgagctccctttcccggaagccccctctctgccgcgttgctcgcattgggttccccatcccggaagcctccctctctgccgcgttgctcgcattgggttccccatcccggaagcctccctctctgccgcgttgctcgcattgggttccccttcccggaagccccctatctgccgcgttgctcgcgttgggttccccttcccggaagcccccctctctgccgcgttgctcgcgttgggttccccttcccggaagcccccctctctgccgcgttgctcgcgttgggttccccttcccggaagccccctctctgccgcgttgctcgcattgggttccccttcccggaagcagctggtgttgccagtttcgggggctttccctggagatgggctgaatccccagccctcattactgaccattgacttctgcagggcttatcccgcaccctttgcaagcttaaaaa

SEQ ID NO: 471697 - DNA, 601 bp, Homo sapiens
ctctttttgtaaaatctggtacatgtgcacaatgtgcagaatctgcaagtggatctttggagcgctttgtggcctactgtggaaaaggaaatatcttcacataaaaactacccagaagcattctgagaaacaaatttatgatgtgcgcattgaactcacagaactcgctagctcaggagtgaagctgcagaccttcacagtgagtgttacagctcttaaggcagtgcatctggagttttccattcctcccagtggactcgtggtctcggtcacttcaggagtgaagctgcagagcttcaccttgagtgttgcagctcataaaggcagtgtggacacaaagagagcctcaaagcactccaaatatccatttgaagattccacaaaaagactgttaccaaactgctcaaccagaagaaaggttcaattctgtgagatgaaagcacacatcacaaaggggtttggcagaaagcttctgtctactttttatgtgaagatacttctttttcacctgaggtggcaaagagctcagaaatatcccaatgcagattgtacaaaaagacggtttccaaacagctgaaccaaaaggaagtttcaactctgc

SEQ ID NO: 471698 - DNA, 888 bp, Homo sapiens
tcgtgtcaatatgactgaggcgggaagtcctggaaagtttctgatcagaagagtggcacagagtggcgaatgtttttattgtattgtgttgttattttactacccaattgcattttattatcagcgtaccttattttatgaaattagacctgcattttggagggagagtctgattttcatgaaggcatgtggtatgcttctgacgataacgccagcattccagctcgtcagtcctcagcccggattccactccacactgcaggtggcttccctgggagatgacgttcgggccagtcgtatggatgatgatgtccaaggagacagttctctcctttaccccagtcacaggaaggaagaactaagcctcatggtgccttcctgggagatacgtggcttcgcagtccaggttgggaccaagagcttgcagacgtcatcgagtgcagattttgagcgaagtactgagcattgtaaatccagatttctcttccagagctgagtctgggccacaggacctggacacaggagggtcagtctctccggtaatgtgcaagcatttgaatctctgggaggtggctaccctcaccaagggacttttttcctagtctcctttgcatccatgtgtgactgaccataatgactacttatagccaaaaatctggacagaaatgatgtgcgtcaatcaattttgcaagtttacaaatattttctgtgtctcctctttctgtttgaagtatgggacgccattgcccaaggggatgatgtgagcacaatggaagaagcggatgtccctgagtcatcctggggagaaaattcaaattctgcccagagaaaccctcattggtcatttacatgagtgagatgccaaacctcactgtgttaagccatcgg

SEQ ID NO: 471699 - DNA, 1126 bp, Homo sapiens
taagctgatgtcatggttaactttatgcgtcaacttgactggcctaagggatgcccagatagctggtaagacattatttctggatgtgtctgtgggggtgtttctggaagaggacatcaaacttcctggtcctcatgcctttagcctcagactgaatgacaccaccagctttcctgcttcttcagcttatggacagcacgtcgtgggactcctcagcctccagaattgtgtaagaaaagttctcataataaacctctgctgtttgcatactttgatgaaacaaagctatcctgttgcagaaaactttcatggcaaggaactgaggggtggcttctggccaagagtcagcaaagaactgaactgccagcaacaccatgaaatcaacagaaccttgagatggccacaaagctgctggccccttgattgcagcccgggagagaccctgaagctgaagacccagccgggctgtgctcagatccctgattcacggaaatcgcaagacaataaacgtgtgttgtctgaagctgctccctttgagcctctgacgggccctggcaacttagagatgaacccgagtgaactttctgcactgctgcgctcaagtctccatcccgggaggagctgtagtctcgttaccgtaacatgcgacccgtgtgctgaccccctggaccaccgctgcactttctcatttatccaaatcactctcaccttctagctgactgtgactgtataatgcctgtgggttactgcccctctccttctgcaagaatataagctcttccatggaaagggtgtttgttttctatattggtggacctctagagcctcaaacagtgtctggcacacaggacaggaccaacaaatacttactgaatgaaaaaaatgaatgccagatggaaaaaataaaaatgaactaagcagggagtttctccactgtggccacaagagggagcccaagctatgtgttaaacccttccagcactaaggtgggtggtctctctgctcctcagcctggaggaccagggacaggtgtgacctgaaccacgtcctttctcctctgtgagcctctatttccccatgtgtagcgtggagatggaaatgcctgaaaggagttcccgtaagaagc

SEQ ID NO: 471700 - DNA, 631 bp, Homo sapiens
tcttcccagacgctggcgtcaccgctagaccaaggagccctctggtggccctgtccgggcatgacagaggagaagcacgaacaccgtgatgcctgctctgggggctccagctgtgggagaggagaccacagggccctccaggacagacagacacacggatgtggtcactcagagcctgctgctgcccgtccaggtacccacagctgtggacccacaggaagggaaactgcttttccctgggcctggctctggttttccctgggtgggggagctcaggaggaccccagactctctggacacatgagcctctgctcccctcccctgccccaggtcaccgtctctgctgcaggtgggacaggacaggcccctgtggaatcgggtctgggagtttccctgggaggcctcctctcccaggaggtcacagctgggagtcagagctgaaaggaactttcccacccgcaggcctctctcctttacacttggagaaactgaggcccaggcagaggaggggcctgtccacatcaccacctccagaggagcctcaaaccgatgacagaactcagcccttcctcccctggaccccgcccacctcccactcaaagcccctcacttagcactgtgggggcctgac

SEQ ID NO: 471701 - DNA, 511 bp, Homo sapiens
accctgtttctcatgggatagggaacatgggaagaggagctttcttttaaacatgagagtggagaaaatatacacctacatctgtacctgcaactacatctgtgcctgcacctacacctctgcctatacttaccccgtgctgacacctgcacctaatcctacaatgcacctacacctttgcctacatctaaacctgtgctatacctacatctctgcctacacctacaactgtgctacacctaaacctgtgcctgcacctacactgtgctacccctacacctgtgctacaactacattgtgctacacctacacctgtgctacacctacacctgtgcctgcacctacactgtgctatgcctacacctgtgcctacacctactcctgtgcctacacctacacctgtgcctgcacctacactgtgctatgcctacacctgtgcctgcacctaaacctgcgcctacacgatttctgtaacatcctctattagagccaaggacaggtgatgcccacc

SEQ ID NO: 471702 - DNA, 655 bp, Homo sapiens
cacctccgccatggccgtgtgtgcgcgggaggcggtggccgcgccgggatccccggatgaggggccgcgcactcattggctgtggagcctggagggcggggcagggggcggagcctggagggggcggagagcgggccgggcgcgtagtaggtgcgcgggcgcgggcgcgggcgcgcagccgagcgtggccggcggcttctggcgagcttgcgggcgacgggccacccagagtgtcagtgatagagccagaattggtgtccgggctgcgtggttctggaattttctgcactttcgcacccgtgatgagcaaactagcgcgcggaggaaccaatcggggagcttgcgaacgcgcaccagtcggagaggttttagaaacggtggccccgcgccggagagcccaaggcgggaggcagggagtggagaaatgaagccacttgttgggtgggtgataaaactcagcatccctggtaaagggcaggtgcacaccatgtgcacctggatgtggtgtccaaagcaggacacggcatcactgaatccagccagcaatgcacaacccatatctacatatgaggaaatttcagacaaacccaaataaggaatattctgttaaacaaaagagggactgtattcttcagaaatgttaatgccacaatgg

SEQ ID NO: 471703 - DNA, 1279 bp, Homo sapiens
agtgccccccagccctcagaggcggagacaaagccccttccctggtcactggggactgggctctgaccagcgcttgctcttggctgccacactgtgatgtccagcagcaggttttgggccggccgagctaaccctgcctctcttccttcgcaggcctcctcgctggggaggcagagtcctcgcgtggtctcctgcctcgagcacagcctgtgcccaggggagccgggcttgcagacaacagcaggtaccttcctccctccttcccctgctcaggtccgccaaggcctttgtggctgtgagagacagaatgcctgctgggcctggctgagctgtggaccggcacactggcttccagagtccagggtgtcccagctcccacccgttcagatggagctgtggggcagagtggtcaggactcccgtcttcctgttctttagcaggggcagggagcccaggcgacccaagaccatcctcagagcccagcacccccagcagaggacccgggcacacgcctgcaccgagctgagggctgcctcatcttgccagggtgttgggaaggggtggcttgctgagggagccggggctgagaaggtggagggcggcgagacaggcagcaccccgggttccctgcacctccctgcgctgctgcttgcccagtgggcatcaaggtcccatgcccgcctgccagccacctgcgttgggcctgcggggaggagctgacgctgtagggcaagggtctctatgactgttcttcccctggctgggctccttctgccaggccctcaggcccccagccttggcctacactgctctctgtctggattgattgagccctagctatttcctttgtttgtttaaaaatttgaccaattggagagtaaacatgcagaggaatggtgacacatcccagttctttcggggaaaccctggatctgatgacagccgtcaactgttgggccatgtacatcgcatgtcttcttcatgtggccctgcagacggagcttaagggactggtgttgtcgagcccccattggtttgtccctgcatgctccttgatgctgtactgacctgtgcaggcttctctgtgttcaggaagacaagcagtctctcagaaagagacacacccaccccccaaaaaaatccttggaatttgtatgtgcagctcaccagccgtgctcctgtgtgcattagtcgtggggtgtcctgttgggttccctcatgaggctgatcctggcagcatgcagagggcctcatccttagggcttcaccaggcgtcagt

SEQ ID NO: 471704 - DNA, 5309 bp, Homo sapiens
tatggggagggccggcccccagctgggaggagctgtgagaaccagggccagccactcggcaacctgggtgtttggggatgggcatagaggagttttcattggagcgccgcagcctgctgacgttttcttcagatgtgcaaggtcttcttaccactggttttgagcagtctgatgaggatgtgctttggtgtattgaggtgtctgatgagggtgtgctttggtgtattgaggagtctgatgagaatgtgctttggtgtattgaggtgtctgatgaggatgtgctttggtgtattgagtctgatgaggatgtgctttggtgtattgagtctgatgaggatgtgctttggtgtattgaggtgtctgatgagaatgtgctttggtgtattgagtctgatgaggatgtgctttggtgtattgaggtgactgatgagaatgtgctttggtgtattgaggtgtctgatgagggtgtgctttggtgtattgaggtgtctgatgaggatgtgctttggtgtattgaggagtctgatgaggatgtgctttggtgtattgagtccgatgaggatgtgctttggtgtattgaggtgtctgatgagaatgtgctttggtgtattgagtctgatgagaatgtgctttggtgtattgagtctgatgaggatgtgctttggtgtattgaggtgtctgatgagaatgtgctttggtgtattgagtctgatgaggatgtgctttggtgtattgaggagtctgatgaggatgtgctttggtgtattgagtctgatgaggatgtgctttggtgtattgaggtgtctgatgagaatgtgctttggtgtattgagtctgatgagaatgtgctttggtgtattgagtctgatgaggatgtgctttggtgtattgaggtgtctgatgagaatgtgctttggtgtattgaggagtctgatgaggatgtgctttggtgtattgatgaggatgtgctttggtgtattgaggtgtctgatgaggatgtgctttggtgtattgagtctgatgagaatgtgctttggtgtattgagtctgatgagaatgtgctttggtgtattgagtctgatgaggatgtgctttggtgtattgaggtgtctgatgagaatgtgctttggtgtattgaggtgtctgatgagggtgtgctttggtgtattgaggagtctgatgaggatgtgctttggtgtattgagtctgatgaggatgtgctttggtgtattgaggtgtctgatgaggatgtgctttggtgtattgagtctgatgaggatgtgctttggtgtattgagtctgaagaggatgtgctgtggtgtattgaggtgtctgatgaggatgtactttggtgtattgaggtgtctgatgaggatgtgctttggtgtattgaggagtctgatgaggatgtgctttggtgtattgagtctgatgaggatgtgctttggtgtattgaggtgtctgatgagaatgtgctttggtgtattgaggagtctgatgaggatgtgctttggtgtattgaggagtctgatgaggatgtgctttggtgtattgaggagtctgatgaggatgtgctttggtgtattgagtctgatgaggatgtgctttggtgtattgaggagtctgatgaggatgtgctttggtgtattgagtctgatgaggatgtgctttggtgtattgaggtgtctgatgagaatgtgctttggtgtattgaggtgtctgatgagggtgtgctttggtgtattgagtctgatgaggatgtgctgtggtgtattgaggtgtctgatgaggatgtgctttggtgtactgaggtgtctgatgaggatgtactttggtgtattgaggtgtctgatgaggatgtgctttggtgtattgaggagtctgatgaggatgtgctttggtgtattgaggagtctgatgaggatgtgctttggtgtattgagtctgatgaggatgtgctttggtgtattgagtctgatgaggatgtgctttggtgtattgacgaggatgtgctttggtgtattgagcttccaagcttcggcagttacgcgtaaagacatcttagcagcttccaagctttggcagttacacataaagacatcttagcagcttccaagcttcagcagttactcataaagctgctgtaaacgcccatgtgcaggtttttgttttgacacaacttttcagcccatttggatgaataaagaaacctgattgccggaccgtgtgatgagaccgtgtttaatgagaagctgccatttcactcccaccagcaatgaagttccatttctgaaggagtatttctcaaatttttctgatgtcccactctgtcttttgggtctttggtacatgtgccctgtcctgggtgctgtcccacagtctctccagtcactggtgtcacggccctgggtgtcccacagtccctccagtcactggtgtcacggccctgggtgttgtcccacagtctctgcagtcactggtgtcacggccctgggtgtcccacagtctccagtcactggtgtcacggccatgggtgtcccacagtctctccagtcactggtgtcacggccatgggtgtcccacagtctctccagtcactggtgtcacggccatgggtgtcccacagtctctccagtcactggtgtcacggccctgggtgtcccacagtctccagtcactggtgtcacggccctgggtgacccacagtctctccagtcactggtgtcacggccatgggtgtcccacagtctccagtcactggtgtcacggccatgggtgtcccacagtctctgcagtcactggtgtcacggccctgggtgacccacagtctctccagtcactggtgtcacggccctgggtgacccacagtctctccagtcactggtgtcacggccatgggtgtcccacagtctctccagtcactggtgtcacggccatgggtgtcccacagtcactgtcactggtgtcacggccatgggtgacccacagtctctccagtcactggtgtcacggccatgggtgacccacagtctctccagtcactggtgtcacggccctgggtgtcccacagtccctccagtcactggtgtcacggccatgggtgacccacagtccctccagtcactggtgtcacggccatgggtgtcccacagtctctccagtcactggtgtcacggccctgggtgacccacagtccctccagtcactggtgtcacggccatgggtgtcccacagtccctccagtcactggtgtcacggccctgggtgtcccacagtctctccagtcactggtgtcacggccctgggtgacccacagtccctccagtcactggtgtcacggccatgggtgtcccacagtctctccagtcactggtgtcacggccatgggtgtcccacagtccctccagtcactggtgtcacggccatgggtgacccacagtccctccagtcactggtgtcacggccatgggtgtcccacagtccctccagtcactggtgtcacggccctgggtgttgtcccacagtctccagtcactggtgtcacggccctgggtgttgtcccacagtctctgcagtcactggtgtcacggccctgggtgtcccacagcctccagtcactggtgtcacggccatgggtgtcccacagtctctccagtcactggtgtcccggccatgggtgtcccacagtctctccagtcactggtgtcacggccatgggtgtcccacagtctctccagtcactggtgtcacggccatgggtgtcccacagtcactgtcactggtgtcacggccatgggtgacccacagtctctccagtcactgatgtcacggccatgggtgacccacagtctctccagtcactggtgtcacggccctgggtgtcccacagtcactgtcactggtgtcacggccatgggtgacccacagtctctccagtcactgatgtcacggccatgggtgacccacagtctctccagtcactggtgtcacggccatgggtgtcccacagtctctccagtcactggtgtcacggccctgggtgtcccacagtctccagtcactggtgtcacggccatgggtgtcccacagtcactgtcactggtgtcacggccatgggtgacccacagtctctccagtcactgtcactggtgtcacggccatgggtgacccacagtccctccagtcactggtgtcacggccatgggtgtcccacagtctctccagtcactggtgtcacggccctgggtgacccacagtccctccagtcactggtgtcacggccatgggtgtcccacagtctctccagtcactggtgtcacggccctgggtgacccacagtccctccagtcactggtgtcacggccatgggtgtcccacagtccctccagtcactggtgtcacggccatgggtgtcccacagtccctccagtcactggtgtcacggccctgggtgacccacagtccctccagtcactggtgtcacggccctgggtgtcccacagtccctccagtcactggtgtcacggccctgggtgacccacagtccctccagtcactggtgtcacggccatgggtgtcccacagtccctccagtcactggtgtcacggccatgggtgtcccacagtcactgtcactggtgtcacggccatgggtgacccacagtctctccagtcactggtgtcacggccctgggtgtcccacagtccctccagtcactggtgtcacggccctgggtgacccacagtcactgtcactggtgtcacggccatgggtgtcccacagtccctccagtcactggtgtcacggccatgggtgtcccacagtcactgtcactggtgtcacggccatgggtgacccacagtctctccagtcactggtgtcacggccatgggtgacccacagtccctccagtcactggtgtcactgccatgggtgtcccacagtccctccagtcactggtgtcacggccctgggtgacccacagtctctccagtcactggtgtcacggccctgggtgtcccacagtctcgccagtcactggtgtcacggccatgggtgtcccacagtccctccagtcactggtgtcacggccatgggtgtcccacagtccctccagtcactgtcactggtgtcacggccatgggtgtcccacagtctctccagtcactggtgtcatggccatgggtgacccacagtctctccagtcactaatgttacaaccctcggtgttgcctcacagctctctcttttatttttctctctctctgtgcttctgtttgaataatttctttttttttttttttttttt

SEQ ID NO: 471705 - DNA, 487 bp, Homo sapiens
gctggagccgaggcgctgaaggacgcatggctgaaagcctgttacaagggcttgtacacatctttcttctgaatctgtcttcccaagtgtataccatacctcaaatcaccatccctataggccccaggtgtggccaaggagtgactgtttgtgggacaacgaacttggctgcattgtacccctaccctaggaacctatggaactttgaacttgagagcaataatttaggctatctggcagaagaaatttctaagcagcaaagtattcaagattgggcctggatgcttctaacagcctatctcatatggcctggtcatgtggtagtaaagaaaagcccattttcaggagaagaattcaagcggactgcagaaatttgcataagtaaaaaggtaccaagtgctaatcaccaaggcaatggggaaaaggcctcaaaggcatttcatagtagcccctcccatcagaggctcagaggcctatgaggacagaa

SEQ ID NO: 471706 - DNA, 1755 bp, Homo sapiens
ctcggacctgagtgggcccagccctgagattcatcagttccaccaagatgaacaaagggttgtcccagcaaaactactgtcctagggccccagatgaacctggatgggaaattcagagacctttgctcactgccattgattctgccactctcccagcttgctgtgtgggtcgtggcagccttgctgagactgccagctcaggacgcaattactgccaattgcattgggatattttgtatttttctggcaaccccaaacctgagacaagatggtatgctaagagcagaccagcagacttgccaaccaaagaggaatgcaaggggtgccatcagaaattcctgtggatatcagtcaaattggaagcaggaattgaaaaccctaaaagaataagccagcatattgcctatttccaggtaatttccaccgtctatgtcgccgtggtccaagttggcattcacgttcctaggacaaagtaaaagggcaaaggaggggtgtcagctgtccagtttttactttttgttatggttgttttagttacatacaataaagttcacttatgtgtttatttgggttgattacaaataatgttgatatgaatattcatgtacaggtttttgttatgaacataaattattttcttaagggcataggagtaagattgccaggccataggcctgtgacttatgcatttctggaaacagtattactgacatcgtatcaatttttaaaacttgaagcatttctcattacttctgtctttccatcatctcagcacctatccagtgccaatgtgtctgggattctcaattcacaatgtgtttgttcctgtttgggaagccaaattacaaacaactcatgtttagcaacagattttaattctttaactgtcaataaagattgaattaatacacttttattcatacttcgtcattcttctttacttcctttcaccaccgtgatctccactgtaaaagtgtaatcaatttgaatatcccctatccaaaatgtttgggatcaaaaatgtttaaaagtttagatttttgaatatttgcattttacttactggtggagcactcctaatatgaatatctgaaatcaaaatgctccaatgagcatgttctttaagcatcatgtcaactttcaaaaagtttctgattttggagcgtttcagatttcagattttcatattagggatacttaacctgtattatttttacaggttatttgcgtgcttttaaacaggtaacttttcaaagtccccttttccccctaatgatttcggttttccttgcaaagtcaactacctaaggttatttctaactgggttcattctgttcggactatctacttgatttattacaactttgtatattttagttattttggtacttgatcaatcttgacataaggtaaatatggatttgctaataaacatcaagatggaaagtgaagtcatcagtattctatctcctttttactgagtatatagaattcacatatgttttctcagatttaagtgtcttattgagaaggtttttttacgtcttctaggtagagatggtgctacagcttgaatgtgtcccctaaattcatggtttggaagtttgatttacaatgtaacattattggaaggtggagactaacaagaggtgattgtgtcaggagggtggagtcctcatgagtggattaacattgttactgaagtagtgggctaagtattaaacgagtggggttgttataaaaagagatctgccc

SEQ ID NO: 471707 - DNA, 743 bp, Homo sapiens
cagctcctctttacttatgcaaatttctgaggggtgagagaggacatccttgtcttgtgctggtttgtacgcaaaatgcttccaccttttgccctttcaagaatatatggaaaagcctggctgtccaggcagaagcctgctgtaggagtggagcccacatggtggagaacctctactaggtcagtgtggataaaaaatgtggtgttgaatcccccatacagagttcccactggagcactgcctagtgcagctgtgagaagaggaccaccattctccagatctcagaacggtagatacaccaacagctttcaacctgcacctggaaaagcttcaggcactcaacaccagcccttgagagcagccttgggagttgagccctgcaaaaccacaggcatggagatgctcaaggtcttgggagtctacttattgcatcagtgtgccctgaatgtgggacatagggtcaaaggagattattttggagctttaaaatttaatggctgccctgctgggtttcagacttgcatggtcctgtagcccgtttttttggccagtttctttcctttgaaatgggagtatttacccaatgccagtattcccactgtatgttggaattaactaacttgtctttgattttacaggcttataggcagaagggacttgccttgtctcagatgagaatttggaatctggacttttaagttaatgctagaaaaagttaagacttttggggactgttgggaaga

SEQ ID NO: 471708 - DNA, 456 bp, Homo sapiens
tactcaaccccttcaccacgtgatggcctgcaccaccttaggactctgccgagctgtggactttcctggtactgaatttcatgatccaccaaaacatgatgtagcagctgtctctcatactttgcgaaaccgaagggttgtaaaagaaaagagaagaagaagggggaggaggaggaagaagaagaagaaagaagaaggagaaaaggaagaagaagaagaacaagaagaagaagaagagcgagaagaagaagaagaagagcaagaagaagaagaaggaggaggaggagaagaagaagaagaagaagaagaagaagaagaagaagaagaagaagaagaagaagaagaagaagaagaagaagaaaagaagaaggagaagaagaagaaaatactgagagcaaaattttgagactagtttatctcttaaagcaaatatgagttggtgcatttctgctactc

SEQ ID NO: 471709 - DNA, 627 bp, Homo sapiens
gtcaaaggacctggagtctgatgtttgaggggaggaggaacagacagaagcatccagcacaggagtaagatgagaaccagaagactcagcaagccagtttatcccaccttttgccgccttctttttctagccaccctggcagccgattggatggtgcccacccacattgaagtttccaaattgaaaaagtacaaatatacacaaagatcgaacgtatgttgtactttaggtcccaagcaatttcctcaagaattcgctcatgatggcagatggctgtttaaacattgtaactcatacgtttcttttaattcaacagatataagcaaacattcaaatactccatcaaagcagctgtctcaccccatatctggatctcaaagccctgaatatttatgggtctttgaggattccaattcccaggttcagaacccactcagcaaagagtggttgaaagtcatcactgtaacacatggtgtatttccaactactctatgccatgtcattttctagctatgtgatcttgtgcaggctacttggcttctctgtactttaattccttatctgtgaaatggaaacaataatggtatgcacataataatgttaggagaattaaatttgaaaatgctt

SEQ ID NO: 471710 - DNA, 538 bp, Homo sapiens
ctactgcctctctagattccacctctggggcagggcatatctgaacaaaaggcagcagacagcttctgcagacttaaatgtccctgcctgacagctctgaagagagcagtggttctccaagcacggcattcaagctccaaaaggctgaaaattccaaaaaccagaacgcctctcctcctccaaaggaacacaactccttgccagcaggggaacaaaactggatagagaaagagtttgaggagttgacagaagtaggcttcagaaggtcagtaataacaaacttctttgagctaaaggaccatgttctaacccattgcaaggaagctaaaaaccttgaaaaaaggttagatgaatggctaactagaaaaaatagtttagagaagagcttcaatgacctgatgaagctgaaaaccacagtacaagaacttcgtgaagcatacacaagcttcaataaccgattcgatcaagtggtagaaaggatatcagtgattgaagatcaaattaatgaaataaagtgagaagacaagatcagagaaac

SEQ ID NO: 471711 - DNA, 1384 bp, Homo sapiens
gcaaggacaagaaagagagtccgttatggttgctgctgccctgaggaggatgagggggcccgcacaagcaaaactgctgcccaagtcggccatccaagcctttgcggggctggtgcggccgctggtcttggcgctcctccttgtgtccgccactctatccattgttgtatcatggactgattcactgattcaaactgtactcaactcagatatttctaccccaaatgtgaatgctttaacacatgaaaaacaaaccaaatcttctatttcccaaatcagtaccaccctccctcccacaatgaatactgagaaaagtggaggagcatctgtggcccctcatccctcacctacacctctgtctcaagaggaagctgataacaatgaagatcctagcatagaggaggaggatcttctcacgctgaacagttctccatccacagccaaagacactctggacagtggcaattatggagaaccagactatggaacagactatggaaccagactactggaccacgggccacagggatgacgacgagtctgatgacaccttggaagaaaacaggggttacatggaaattgaacagtcagtgaaatcttttaagatgccatcctcaaatatagaagaggaagatagccatttcttttttcatcttattatttttgctttttgcattgctattgtctacattacatatcacaaaaaaaggaagatttttcttctggttcaaagcagaaaatggcgtgaaggcctttgttccaaaacagtagaataccattgcctagatcagaatgttaatgaggcaatgtcttctttgaagattaccaataattatattttttgccctgtgatttgagtttgcttattatgtaattttatttgcttgactttttatatgatattgtgcagatgtttgccataggcaattggtacttaaatgagaggtgggtctctcttttgccttggtgctttggaaattaaatgtcataaacaaggagtatataattttttgatctgtacttttagagttgagtttaatcaggtgtccaaaatgtgagttaagcattaccttatatttacactgttagtttttattgttttagatttattatgcttcttctggaagtattagtgatgctacttttaaaagatcccaaacctgtaactaaattctaacatatctgtcactgctgactcacattcattctctgccattcaaatactattttttaaccacacatttttttgtggtcccaaactgtaatgtacaaggatatgtgtgataatgctttacatttgaataatattttttttccttccaagaaaactgctttggatatttttagataatttaaacataatttaggataacgatattgctca

SEQ ID NO: 471712 - DNA, 1695 bp, Homo sapiens
tccaggccggatccaaggaatcggactcgcctgccatggggccgggcagatacatcactcgaggcatcccaggggtggacgccagcgtgcacagggctctttgtgatgaaaaggccctggagcaggacctgcccggcgtgtccaggggcagcagcgaggctgcggcgtcagggcccgggactcaccagctgctgggactgcaggcctggggcaggttcccatctctctgtgcctgggcttcctgcttgctgaaacagggtgatggttctcacccccacagggctgttctgcagtgcctgttggttgggaagtttcggggaaaggaaaagacaaagggggaggtggagcagcaccgggccgaggagcttctccaaattctcgccaggtccgaccacataaacgggggcagccaagcaggctcagagcaggaggagcggctcccagggcgtcggaagcagctcctgggctcttcgcaggggctcatctggccagtgcctgtgggccccgggcagggcactgtgcacagggcagagacgcagggggcccatcggcactgctgtgatggcaactgtcgcgcagacctgccacctctgtgccccgggctcttctacagccctggtactctgaggaccagacatgggcccgtcggggtcccagacatgatgtcagcccaggagctcgtggcctgcctctgccgggagggggagcagcatctggcgctgggggagctgcccctggccaccgccttctacctggctgcattcagctgccacgccccctcagccctgcagagtgtgcgcactgccctggcccaggctcggggggcggcggtggtggccaccctggagtcctggtgccgcggggacagccagatccccgccatccactgggacggcatggcagtggtctccctgacagggtcgctggcctctgccttcctcggcgccctctgcccggaccaccccgccgccatcctgcacctgctggcaggtctgctggcccgcgggcgtcacgaagaagtggtgcaacgctgcagcgccctgctggactctcatgcacagcaagtcctggagctgcggctgacccgcgccctcgcctgggtcctgtccggggtgcaggcagcggatggtgtggccgcctatctccaggccttcgcctccagcgccgaccggacggtagctttcattcgcacccaccagcggccccacctccccgcgctgctcagtgccctccaggactacctctcggggcacccggaggctgggcacagtgccggccagcaggagaccggtggccagcgactcctggcggctctggaccccaggggcacccggagtgacaccctgtcacctgaagctctgctccacagcggcaggtttgaggactgcctggcagcatgcagccgggccctcgaggcccatcccaccggcagcgaaccccaagggaacacctgccctaagaattgtgcatccattagacccaagtcacttcggtcaagggactccccacatcgccagcaccagcacaagcatggcttacgatgagaagagaagaaatgaattttcctataacagactttttacagatgcagtttcctgcaacaaatgaccttccatctggaggttactttccaaagtccttggaaacattgcacaaaccagtcgctccatttgtgctgctgtgacagaatgccac

SEQ ID NO: 471713 - DNA, 1262 bp, Homo sapiens
agtctgctgcgcccaagcgtgtgcctatggggctctggagtcagcgcatctgcgtccacgactgactccactacttccccgtccctttgctgccccgtgaccgattctccatgtttgaaagtggaggcatcaagatctccctcccaggaggacgagagccgaattaccgctcagcccgaattaccgctcaggccgaattaccgctcagcccgaattaccgctcaggccgaattgccgctcagccccaattactgctcagccccaattactgctcagccctcatgatccttgacctgcactggctccaggacctgccttcacttcaggggcctcggccttgcctgcagttccgcctgactctgcagagccctgcagccgcgtgtgctcagatgcagcacccagggaagggttcatgggtggatgggcctggggggaaccagtttctaggggatggcccagcaacgcgcaaaagggagacccctgaagccggccggcctgttccgggcacgctgcagccgagtcatggacaggatgatggcctgggatgtggccatcaggacagccgtgtgagtccatgtcctgggcctctgtgcactctggccagcgtcttcctggtccccctggagggctcccacctccaagagcccggggaaacggaggggttggctgtgggtgccggggccatcctcggagctgcctgtgtggagacgtcctatgtccatgggccacgaagggcccggtggctgcagataatgtttcccatctgtggagccttcaagggctgggcccatgaggattctgctcccagcttgctcttcctctccagcctgcacccaccaggccccagaatcctgaggatggagctgctcctgtcccctgagaacaactgcaaaatgctttttaggtttaagtggaagaattttgctgcgaaaggtagagaagtgattccactcagaattgcacagaatgggcattcacgctgcgtggctactgagaaggtcctagaacagaccacaaaggtaacagccgaggacagcgcagaggcgcccagcaccgagtctgcacggatacccaagtgacttagcaccattttttgaaaagaccatcctgcccccagcttcgttctacaccaggtcgccatttattgtgggtctgtttgtgcactgatactacactggcttaattattgtagcttcatcttagaccctggcctctagtggggtaggtcctcctgtgttgctcttctcctgtagactgtctgg

SEQ ID NO: 471714 - DNA, 1641 bp, Homo sapiens
ccctgagctctggttcccacagggtgatgggaagaaggttggatgataactgcacgcccagtgggttgcattacaggaaaactctcaggctgcagggggatctccacccacgcagccatctccacccacgcagccgcctccacccacgcaacaatctccacccacgcagccgccttcatccgcgcagccgcctccactcacacaaccatctctacccacacaaccatcacccacgcagctgcctccacccacacagccagccctcccctctctgcagagctgagctgctccagcagggatgaggacccaggtgaatctgtgctgtctacactgctgcccgtgagccacttagtagccaccttggtgatccgatcgacggccatggtacccatacgttttctccactgtatacacctccacatcgtgtccatggcggacacccacacatctcatccactgtatacacctccacatcgtgtccatggcggacacccacacatctcatccactgtatacacctccacattgtatccatggtggacacccacacatcttatccactgtatacacctccacatcgtgtccatggcggacacccacacaccttatccactgtatacacctccacatcgtatccatggcggacacccacacatcttatccactgtatacacctccacatcgtgtccaaggcggacacccacacatcttatccactggatacacctccacatcgtatccatggtggacacccacacatcttatccactgtatacacctccacatcgtgtccatggtggacacccacacatcttatccactgtatacacctccacatcatgtccatggctgacacccacacatcttatccactgtatacatctccacatcgtgtccatggcggacacccacacatcttatccactggatacacctccacatcgtatccatggtggacacccacacatcttatccactgtatacacctccacatcgtatccatggcggacacccacacatcttatccactgtatacacctccacatcgtgtccatggcggacacccacacatcttatccactgtatacacctccacatcgtgtccatggcggacacccacacatcttatccactggatacacctccacattgtgtccatggcggacacccacacatcttatccactggatacacctccacatcgtatccatggcggacacccacacatcttatccactggatacacctccacatcgtgtccatggcggacacccacacatcttatccactggatacacctccacatcgtgtccatggcggacacccacacatcttatccactggatacacctccacatcgtgtccgtggcggacacccacacatcttatccactgtagacacctccacattgtgtccgttgcgtgtatctattgtatggtgaaccacaggccatttatttattagccttttggtgtagttttgcgtgatttccagtgtggggctacaatgaataccatcgctttgaacattcacctacaggttgttgggtggacacatgctttcatttcttgggtaaatacccaggagtggaatggttgggtcctatggtataagtgtaggtttaacctcaagggaactgc

SEQ ID NO: 471715 - DNA, 795 bp, Homo sapiens
cctttttcttgcccatgttttatttttaagcatgcatgggcagccaagcagagccgtggtgacagcttctgaggccagccccggggcctacggggattctggaatggtcccctcagcacacacccggccctctcctatgccggccgcacccgccccaagtggcgccagcccagctctgcagcccagcagcccagcagcccagcaccgccacagagctgccagcaccacccctgccgtacccagcagcccagcaccgccacagagctgccagcaccacccctgccgtacccagcagcccagcaccgccacagagctgccagcaccacccctgccgtacccagcagcccggcaccgccacagagctgccagcaccacccctgccgtacccagcagcccggcaccgccacagagctgccagcaccacccctgccgtaccctgcagcccggcaccgccacagagctgccagcaccacccctgccgtacccagcagcccggcaccgccacagagctgccagcaccacccctgcctttacccagcagcccggcaccgccacagagctgccagcaccacccctgccgtaccctgcagcccggcaccgccacagagctgccagcaccacccctgccgtacccagcagcccggcaccgccacagagctgccagcaccacccctgccgtactctgcagcccggcaccgccacagagctgccagcaccacccctgccgtacaaagacagccttgttgctgctttcaaacatgtagcgtgcagctgtcacaccaggctgacctgagc

SEQ ID NO: 471716 - DNA, 1407 bp, Homo sapiens
cccagtgaccgtctgtaatggttagaatgcagcgtgggaggggctccggctgcagagacagccgttataatagacgcctctctgtgcactgggatggcggactggcctgccggcgcaccaccggccacccagcgcaggacaccaggccctgtgagcagcagctgctgtggccgtggcctctgccagacatgggctatacctggggtgcagggtccaagctccaggatccccgagattctcagtgggaagagggacccaagctggccgagaagggcacaggctctgtcgcgtgggaccgggccccgcagagcccctgtggggaggaggaactcctcagagctgagctgtcccagcctcagcgcgtctttcccgggtggacctggcggtgtccggcgagccccactcagcccttcgcaggcagacttggcaggcaccctgggcctggtcccactctcaccaaatagcattttgatgagttaagtgtgagagaattaaaaacaacccgattaaatttcctttataaatacacgtaggtttggaaatcaaggggaaaagcggctttgggctcataaaacgctgcgtacgctttccctgcaagtgtgagggaaggtgcctggcaggtcctcggcacgggactccctgctgaaccgagctgagccagcccaggccatgacccatgcaggctctcaccctgctcccagccccagttcctagcttggacagcgtagacgcaggtccatgcaggtgacttgggctttgcctgcaaaatgggccaacaggaggtctggtaacaggaggtctggtaacagggggtctggtaacaggaggtctggtaacagggggtctggtgaccatggacctgctgcctgttgctgccttacctagaatctcacaggaggggaatcacaggcctgcactcttttgtcttctttctctcggggtcgtctttcggaggctggtcctatcgcagcatctgtctgtagttcaggccctcggataggacattcctcgtagtggccagggccagggccggggctggggaaagttcacccttttgccaaccacaactggcagctctggtgagagtgcggagcaggcttttttggagctgaatttacttgatatttccccgctccgctgggccggttccagggctgcagtccacgaggctgcaagtgaagaggcgtctttgtttctttaattttgcccgttggaaaactccggtattaatatttatgagaaatgacctaatatccacgccgcctgccgcgtgtttgcttaacatatttaatgtgatttgggggctgcgtgtacttttttaactgcctcggtgaccaggcaggaccactggccagtcactttctgggtccagccatcaagttaatcactcatgttgttcctgcaacc

SEQ ID NO: 471717 - DNA, 606 bp, Homo sapiens
tgggtaaaaagattgcggtgtctctcaggcatggagctgcagactggaggtgcccagtgccaaaagggaatcaggacccgtgggccccaaatcagcccccaggacctgagatgtagggcccggctccgggacctgctcctcttcaaatatcagaagaaagaggtggctgtgaagagcttcttgcagggggtggccgggtctcctgagcaggacctgttcctgggcaagagctcctgtggggacaggtgctgggcagccaggggctttagagccggcgttctctctttttccatcacgacaagtgccaacaccactatgacctacacccgagtggggcttcggcctgtacatatcatccctcatgagctgggggctcctcgccatggcccatccctccagaaccagtaccacctagttctgcaggttaatcgccacaagaggcttttggtccgcaagtcatggcagtcttgaaaacgggtggttacgtcttgagcgccatcacgatttgtgtgcacatgccgaaaatagttcacattttcttaaaggacatagaggagcaggaaacagttagcagcgctgctgtatttccgagaactgcagtatttt

SEQ ID NO: 471718 - DNA, 1191 bp, Homo sapiens
gcccacagcacacaggaaaactggccgagggggaggcggggactgtcggtccatctttctgggcctccactgcctcgtctgtaaaatggacgacaccagaggtccccggacagcgggtctgaggactcagtgcctggcgtgcctcgccgagaccccggagcatcgcgcggggctggccagctgggaagtgcaggctgggcaggttccacttcagctacgctgcagccccaggcccccaaccctatcagcggggcagcatcacccctgtaacgaaggcccaaagctggtggtcccatggcgaggctgcccgagaccccctttcttcccaggggtggctcctaggctgctggaggagcgttctgcccccagccccgccccagcctggtgtcctgtggctcccggacaaagcgagccaaacaatctcctcacacctggactctacttccaactgctggaaaaacaaagggagacgcccaggctctccccagccgggcgcccaggccgccaagaggcccctgccccgctctgcagccccaggctctgacgcccggagctcattgtttaactcagataagaaatgtgggctcttgtgttttcttttcttgagaaaatgtcgggcccgtgccccagctgaaccacttcagagagccattaacctctgcaaaacggagtggacaacttccacgtggctttctgtagaaatcagatgggactgcaagcaatggcacggcccctgccaaggtggatcttggagcctccagaagagacatgggcagagacctccctggtcttcctgcagctcctgccctggaacctgagtctcccaggcatctgaccagctgcactccaccaccagaagccggttaccaccgtccttcgggctttgtcctggagggtgcggggctggtgtggaccactcagtctggcagtgaccaccacccagtcagaggcacggcagaacgcacctgctgcacggacgctgtttgaacttcttcaaaacgtggtgcagtgtttcctgaagacatttaccatccttggcagttaaatacagcacagtgtcaattacaggtccatcttctgtaagtctgggacagattcacagtatctgtgtttgcacgaggctggggttccgggtgagtggaccggctggatggccctgcccagccaccctgacgagggctttttatctaa

SEQ ID NO: 471719 - DNA, 2851 bp, Homo sapiens
aacctctgcagcacgtgccccacccagtgtgtacagctcagggagcgccggggactcgggcatcaatgggcaccgagggtcgtcaggggcccagaaggccggctgccacccctgcccgggagacgctgcctccactctgccctgagcccagctgccatcactcgatgtcagaggctccagaggatgggatcctaccaggctcctttggggccaacatttctgatgggatggcacagcccgacacaccctggctcacccaccctggctcccacagccacctgaggatgcgccgggtggaggaaggcggcctggaccagcctgggacatgcggcactcggcgtaggaagccgatgcagagggtcacacctgtggcaccacccctccccaaggaggagggcggccctggcacgcgcagcctggaccagcccccgacatgcaccactcggcataggaagctgatgcagagggtcacacctgcttggcggcgtttagacgactcatccagcacaggcccccagagacagaagcagatgggagatctcggggactggggtgggggtgatagcgagaggcccaggtctcctttcggggtgatgaggacccgtgaaagtgactggaccccggtcctgctggccctcgctcccggcccccgccccgcaccctgtcgttggctgcggaaacagaagcctctaaggagaccagaacttttaagtacaggaaaaatgacttcagattcctcacactggttgcaaacagatcagcacaagaagtagcaaaatgctttctttcaaaagaaaccaaagtcttggggggaaaagtcgtaaggaaaacacttatttaattgatcagcattcagagaagtaattattatgttttaagtggccaacgggtcctttctaattgacgcggcggatcctttcagagacgcagccacagaactgccgctgctgttcctcccccctaaagacctgaagttgtttaggtttgaaagaacacccccataacccccgccccgctgaccgtgtgcagcagaaaggtacattggggggggtggtaattaacatggcatcttgttatttggaactggtaactgcacggagctcgcaaacaaagtcgggttggaggccgaagccccctcgacgcgctccttaactcctctcgggcgtgggcgcctctgcccgaaggacaagtaggaattagaaccccagggccacgcgagcagtgccctcaaagggggattaccaacacgacgaccccttccccgcagcccgagcgccgagcggctctgtgtcagggatgggcagatttcagcctagattcttggccagagggagtacaagggggtttttcggagtcggtatctgcctggctgtgcttcctccttcatcatgtggttttaaggagaagccatgaggcctgcagcccactgggcaggaaagaggcaccgtgtggcagctggcagggaagggcggcccccagagtgcgtgtgaatgtgagcatcccatgagtatccgtgtgtaagcatgtgtagacagtgtgtgtagcatgtgactgcatgtgtaagcatgtgaccgcatgtgtaaggcatgtgtaagactgtgtgtgtaagcatgtgtaagaccatgtgtaagactgcgtgtgtaagaccgtgtgtaagactgcgtgtgcaagaccgtgtgtaagactgcgtgtgtaagactgaatgtgtaagaccgcatgtgtaagaccgtgtgtaagaccgcatgtgtaagactgcatgtgtaagactgtgtgtaagaccgtgtgtaagactccgtgtgtaagaccgtgtgtaagactgcgtgtgtaagaccgtgtgtaagactgtgtgtaagactgcttgtgtaagaccgtgtgtaagaccgtgtgtaagactgcatgtgtaagaccgtgtgtaagactgcatgtgtaagaccatatgtaagaccgtgtgtaagactgcatgtgtaagactgtgtaagaccgtgtgtgtaagaccgtgtgtaagactgtgtgtaagaccgtgtgtaagactgcttgtgtaagactgcgtgtgtaagaccgtgtgtaagactgcgtgtgtaagaccatgcgtaaggccgtgtgtaagactgcgtgtgtaagactgcgtgtaagactgcttgtgtaagaccgcgtgtgtaagaccgtgtgtaagactgcttgtgtaagactgcgtgtgtaagaccgtgtgtaagactgcgtgtgtaagaccatgcgtaaggccgtgtgtaagactgcgtgtgtaagactgtgtgtaagaccgtgtgtaagactgcgtgtgtaagaccgtaagactgcgtgtgtaagaccgtgtgtaagactgcttgtgtaagactgcgtgtgtaagaccgtgtgtaagactgcgtgtgtaagaccatgcgtaaggccgtgtgtaagactgcgtgtgtaagactgtgtgtaagaccgtgtgtaagactgcgtgtgtaagaccgtgtgtaagaccataagactgcgtgtgtaagaccgtaagaccgcgtgtaagaccgcgtgtgtaagaccgcgtgtaagactgcgtgtgtaaggccgcgtgtaagactgcgtgtgtaaggccgtgtgtaagaccgggtgtgtaagaccgcgtgtaagactgcgcgtgtaagaccgcgtgtaagaccgcatttgtaagaccgcgtgtaagatcgtgtgtaagactgcgtgtgtaaggctgcgtgtgtaaggctgcgtgtgtaaggctgcgtgtgtaaggctgcgtgtaagactgcgtgtgtaaggccgtgtgtaagactgcgtgtgtaaggccgtgtgtaagactgcgtgtgtaagcagagggccctgttgggaacctgaaaag

SEQ ID NO: 471720 - DNA, 928 bp, Homo sapiens
tgaaacgttcctcctgggagctgtgtcagtgctcaccaacaatgcctgctgtgcccaaggaactcctgttgctgagctcctgtgtccatatgcagctgcatttcagggtcgtgggcgtggccatcgacctgccggtctgggtgccgaagcccagcgtggacctgaagatctgcatgtatgaccggctctaccaggactctgtgctcgtgcacacgcggtcgaaagctgccctgcgcctgaagttcgaggtgtgcaaggagctgagggcccacctggagctcctgcccgagacaggctacatccaggcacagtcgtcctactccgtgcagctcaagttcctgccgcggggccacgtgctcgtgggttctgtgcgagagcaggagggcggcgtgatgcgtctcccagcgctgatgttccagagacgccgtagctctcacgggatacactccctcccggaggacgcagggaggtattttgacaaggagacccgagtcctggaggccccgatgaccatatgggttgccgaccagaacaagccagtgggattcaccgtgcatgccattgtcaccacctcggacctggagctcagtccctcggaggtggattttggctactgcaccatctatgaggccatcaggacggaaatcagcctccacaaccactcgctcctgccccaggagttcgggttcgtcaggcttcccaagtttgtggacgtccaacccaacgatgggtttgggacgatcctgcccctggaaacgctgcagttctgtgtgatcttccagcccaccaaggccgaggaacacagattccaactgacctgcaagtctgagatcaaccggccgcaggactttgagtgctgaaacttggagagccccatgcagaccgggacctcatgccggtggcctcagacccctgctgctggtctgga

SEQ ID NO: 471721 - DNA, 494 bp, Homo sapiens
tgagggtattaggagttaagtgctgctggggctcctgagcaatttctgatggtgtcaaatgtagaaaaaataagatgcttgcttctctgggatggctgctgttactgggtgaccttctggggaggaaaggcaggagatgctgggcctgagtctcctcatgctcctggttggagaccagggagacatggggcttcactgctgctgctgttggctgctgattgcagattggcctgtccactgaagtctggttatggagtagagtctaggctatcctggagctttgctgttgccactgaggacagatcagactacccttcaggaccctggttggaaatgcgaattacagctacaatgagctatcacctccttcctataagaatggacataactaaaaagtcaaaaaacaatagacgttggtgtggatgtggtgaaagggaacacttttacactgctggtgggaatgtgaattagtacaacttgtatggaaagcgata

SEQ ID NO: 471722 - DNA, 671 bp, Homo sapiens
gagggtcccttttgtgtgcctgagtctacaaggaatacatgcatgatttcagagacttggtgattggtggacgctcagttgctgtggctccacatcatgtttacaccccggtccaggcctgcagtggctcttgcctacagactggcaccacctgttcactctgcatgcaaaggtggaggaacttggaagacagcagaacaaaggaaggtgggcctttcccccagggagaggccggccgaccctgccctctcaagagacaccattgagcagagtggccttgccagaaaagaggtttatttggctttggaattacactttggaattattggtgtctggaaagttcaagactgggcatctgtatctgatgagggactcaggctgcttccatttctggcagaaggcagaggggagccaagatcctgtggggagaggggaagcaaaggagagaggaggtgctgggctctttttaacaaccagttctttaaggacctattagaggtagaattctctcacccttgagaaagggcattaatcaattcatgaggaatttgctcccatgacctgaacacctcccattagccccacctccaacactgtgaatcaaatttcaacatgaggtttggaggaaacagacaaccaaaccatagcactctggtttgtttaatgttttt

SEQ ID NO: 471723 - DNA, 677 bp, Homo sapiens
cgttcctcatctgaaagcagcctctctgtgaagcctctgggcagagatgggagcagatgaggataacgatgagagggtcgggtcacagagggcttcttggggccacacagtgttcagattttatattgaatgtgttgggaagccctttgagcagggaatgacaggtgagccccacctcagactctgtttggaggaaatggaggattccaccataggaaaactcacctgccttcaagcattgtgcccgatacataagtgctcagcccagctttgcttaattaatgcttcctgttatgtctcctatgctgggccagtggtccttaagcctgaatgcatactagaaaacttgcccagccaacatatttgtgttttaaaatgcccctgtttcctgtatgaccaattctatcgtagagcagccattggcaaaatattgaaaaattcgtttctgccttgaactttgctatgaactgatgagccatgctgaaagtggaggagggaatgtagggtttctatgggtaaagaaatacttttgaaaataaaaagagtattctaatgggcattattcgtgtctgaagtacttgctgttctaaccttcagtgttctgtgcagattcttgcacaaggcaaatctccctgttggaggactaggtgggtgtttttataggatgcacatggctc

SEQ ID NO: 471724 - DNA, 1029 bp, Homo sapiens
tctgagaccgcagcatctgtagtagatttaggggatctggctctggtgtaagctgtaagatggtgttcaccctccttatctggcccacagaattaaaaatacctggtgaaggcgaaactgtagacgaacaccagaaacaaaggagaggcagagctagtcgaggacgtcaacaagaggggacttggcaagatgtaggggaagaggtgcagagattctatgccttccctggtcatgccaccttccagaaacctccaggtgttccactaactggaagccccctgatccctgtccttttgggtttctctggaggcttcaatacacaggcattgattaaaccactgaccattggccattgtgaccaactcaaaccttcgacacctctcccctctctggataatgtgggtgggactgaaagtcctaaccctcctctaatcctgtctttggtttttccagtgaccagcccccatcctgaagcttcctagggacccccagccaccaggcctttgccttcacaagtaaattttagaatcactttgtcaatttacattaatttaaaaagcttgctagaattttaattgatattgttttaaacctgtaacttaactcggggagaactaacaagttaaaaataataagtctatgaagatagtatatattttttgtcaggtcttttttttgcaatgttttgtaatttctgtttactagtcccacacatattttgttaaatttatctttatgtatatttgatattgttagtacaataaattatattataaagctttaatttccaattatttgttgctacaatatgtaaatacagttgttattttgtttattgatatattctgtgacattgttaaactcacttattacttctagtagcttctttgtatattccttagattttctatgtagacaattatgttacctgcaaataaagataattttatttcttaatttctattatatatgttaaataaaccacacttttaccaaaattttgcagaaggtgatttattaactgcagaa

SEQ ID NO: 471725 - DNA, 695 bp, Homo sapiens
attatgttttcccagaacgtgcaatgctcccaaataaatgtgtctccagcattatcacaccacaatattcatacggctcattactggttttaattttgcccgttgcttatttactgtctccttccccactttattgccggggtggaagagttattcatccaagcccagcacagaagggccccaaagcggaatttctccagaagccgctggcccagcgctcaggcctcgcaggctccagctcaaacccacacagcatcagaggttcccctaggcggcccttcctgcagctccctgccacgttgactgactgcttttcctgcctggggaatgagccctttctcctttctatgaccaaaagctgcatggctcaggtcccagaagccacactcgtcacaggtggaaggatggcagtgttctctgagctgcatggggaactgagtgtggcattccatccctggagacacctccagaaagaatctcttttttattaaatccctcttccaaaattatgaagtcggcctgtgttttctacaaccagtgttgaaaaacagtgttattagcatgtactatccccttccattatcgtatttttgtccgtaagcgatatattagcataacgaatgttggagagggaaggaaggaaggaaggaaggaaggaaggaaggaaggaaggaaggaaggaaggaaggaaggaa

SEQ ID NO: 471726 - DNA, 645 bp, Homo sapiens
tctggccctgactggtgttcccagcaaatgccagcgggcacctctgaacgccagcatagactagaacatgaataaacctctcacgcctccgcagctggtttcacctgctcttatacttaagggcaaccgcttctcatgtgctctctctgtgaatgttgcctttgctctaccttctgtctgggagactcatccgtgttctcatgtgggctctgctggtgtctgtagtgtctttccattacatctgaccagagtgcaaagaggtggagctgaccttcgacctcgggggacggcagatcctggtggttaccagtggactcctggcctcaaaaccagggttgagaattccagttactcatacattttcaaggaaggtcaaatgtgtgagctgccatccctgggcactagcagcatgagttgtcatcatttcttgaccaccaccaacttggggacacgggtcaggaatttttcttctttgcttcatgggtgaggaaatagaaatgtggagaaggatttttgcatgatattgcttacagatttccccagtgagtcttttctaaggtgcacctgctgatattatgatgggaagcgtggaagatgacatctttatgacaatgttgcagagaagcttagtgcctcatcctgttc

SEQ ID NO: 471727 - DNA, 563 bp, Homo sapiens
aataagataaagcaaataagtatctgagaggcatgaacattttgacaaagtgcctcctgggaattgtattttgcagccaagtctcagaaccaggtctagaagccataccacgtggctaccacctggttcctttgaaaggcagacagcacattcaggcaagacctggcgcccactctggaacgccgactcctggttcaatacccacgtttagacaagagaagctggctcattatggcacctctttcttccacttcaaattagcagtcaagattcttataaagcacggcatgctgtttatcttccgggtatcaccatccgtcataccagctgtttgtcgaaaactgattcaagctcatctaaggcaaaccggcactgagctgccttggaaccaccaatgtctgagacatggcttgagagcaggcctggttgcagggatcggagggtctgagcatgcagcaacccacagtggaattcagagatcttggggttctctaaattgggccggggtttcttttaattagccggacacctgtctgaaatgcatgctctcggccacgggtcac

SEQ ID NO: 471728 - DNA, 524 bp, Homo sapiens
gggccccttcacgtaggcaagccgctgtcatgtgccctctgcaacctgggactcctgcctgctctgctgtgatacagggctagtgcccttcctccctaggcatggctcaggtcccagaagccacactcgtcacaggtggaaggatggcagtgttctctgagctgcatggggaactgagtgtggcattccatccctggagacacctccagaaagataaaaccaagtctgcatctattgagaataaaggcaccacaggttatgggttcagggatgaacacgttgatcccggcagggccagtgggactcaagccaagaacttccgttgcaaacgaatgaaaaagataagctgcttttccgtggatttgccaagcttatggaagacaagcttggagctgctgaaggtcaacttgcagaggctactcatgaagaaagccaagaatcagagagagacaggctcctggatccagtcatgcctgaagacacagccctggatgtatcagttatgtaacaaaatataataactc

SEQ ID NO: 471729 - DNA, 657 bp, Homo sapiens
tacatgcctcatgggccaccgcccagacaccatccctccccaggatggccttcaccatcatccctgcccaggggagtgtgcttgcttcccagaccaagggaggagaagagaaaggagtgggaagggagacatgggaggaaaaccaatgcagggagaggatgaggggaggaaaaagctatatctgctgccacttccttcccgggcagaagacctcacaaatgaacctgcaacattctgagccagccagggccacggccttatctccacactcacaagcagtccatgctcccctgggcagagcccatgccgagggccaccctgggtggagaaagtgtctgggtggtggcccaggggcatgtaccaggctggacctgccggaatcccatgagaactggtcagagaagtgtcatgcccctagggatttctgcttcatcctagagattaagttagatggtgcctgtaaagtgtttaatacaagatctggcacatgggaggtgttcaaaataagtaagcgctgcgagtactgctgctggtggttccattttattctcaatgtggtaaaatacacataacgtaaagtttaccatcttaaccatttttcagcttgcagctcagtagtggtaagtgaattcatgttgtgcagccaacctccagaac

SEQ ID NO: 471730 - DNA, 678 bp, Homo sapiens
ggttttattggcaccatgataaacatgcccgaggcctcgcagggagtggggtctaggatattctcaataccctgcagcctctttgccaccaagaaaggaagagagatattaagaactaagaacggggcgctgttctcccacttccaccacctctatccatcaccatctgacaaaggctccagcacacgcttcgagaaaaatattgagaagaaaaagaacctagaaacagggcaatttggagaggccttcggggagccaggggtgcccaagcggcccactcgccagctgcaattaacaagaggacttgtcagggaagagggggaagctgggcgtgggatttccaggacacaactcacaggccatcagccggagagagcatcctgggggctgctggctggtcctctgccctctcccggctccagccctcctcagaccagtgggttatgcacacagacagctgcttgccaatgaaggaaacacactttatttccagcttaagaattcacaccatcacttgggcagttgctaaataaagcaccatttcccttatccatttcatgtggaccttttagcacttactttataatgattcagaaccatttttaattatgaagacttagctgaacacattcgtttacaaagaagagatattcacagacagttgtgctttctgctttg

SEQ ID NO: 471731 - DNA, 626 bp, Homo sapiens
cagtgactgggctactttagacagagtggaatgcagctttttgggagtgcaagtgcaatgttgcaaagtacaatgacccctgggctgctgctggccaaccccatgcctatgagcacccaatgctgccccactctgcagcagcctgggaaagacacttgcctggcttgggtggccctcaccataaaaacaccagatgtccccaccttcatggaaaagcctgggatggcccaatgtcccagcgaggccgccaaaattctcctttgctgccacacaattctgtccttctgcaatgtgacttcctggctcacctcaagttctgctaagaggtgcaggggtgccctgcctggaccacccaccctaggcaatgcctttgtcctcccatacatctttcttgacatccttacactactgccaggacagaaagtcattcccaaggctcctccacagcctctctcctggcccaccctgagcacctgaggacactactgagcagttaataagaactcagaaagcctcattgatttgaactgggttttgtgaaagtgcaaaaatttcacaaggcctctcctccccttctgatcaatgaagaagggcttccgggttggatgtctgagtttatagaatgc

SEQ ID NO: 471732 - DNA, 805 bp, Homo sapiens
caaggtagtaggtacacttaacatctcctggagttgccatgatgcttttttctttatggcactgggaagggaaatggagaatgggagaaacctgccagggcctctcatccagatgccaaagttattaattgctctggctgtgccacaggctacctggacagaccctggggtggggggctatgtgatcggccatggatatggtgggggtcctactccacccccttgggatcatatggaataccaggactacgtctcccacgcatacatgatgccctctgttcacccgaggacagggagcatgttctcctcaaacatcctccagggtgcctctccaatggcagcctttggaggcctcttgcctttgtggtcttcctgggagctggttgatgcgggtgagcacgccagagccagatgcaccctggagacatctaaatccaaccttcttgtctgtagtaatgaaattaaggcaatcaaagaatcctaatggatttcacccacctacaaggaaaaacccatgagcattgggaaataaggcttctttacatctgaggaagaagcccttcctgggaatccactgaggaagggctcctgtgctcctgtgaccacagcaccaatccatgaggctactggtttgagtactaaccaataaatttacaaagagccttttaaaaagccctaagaaagaattgagggcacagatgggaagggaactgcctttcttgtccattacttcactgcctcagcagagatgactgctcctaggtgtgtcattgtcaataaatcagaataagcaaatgctaaaagc

SEQ ID NO: 471733 - DNA, 591 bp, Homo sapiens
atctgctttaagtgtactgaccttttgttaagttttggaaaatgttggcagattatgcagaaatttctaggaaaagggtggcaacttccaggtcactgggtcattgccatggaaaggggcagggtgttgccatggagtgtggccatggcaatggcaaactgacatggcacaatggtaggcatgtctcaaggaaagctgcttccactccacccctgtttcagctatttctcaatttggtccagtgttcaagcccaacctttggagtcgagtcccacctcctacctcagaaccaccaccataatcaggatttagaatgcatcaccccaaaatgtttcttcatgtccctggccccttgctttcaatctcctacagctcctagtgagtattgatagttcagtcactatagtttttctttttctagaaattcgcctaagtggaattatataatatgtaccagcttctttcttatatctggcttcttttacttggcatgctgtttttgagagttaggcattttgttgtgtgtttgattagtttgatttttgtagtgtgtttgatttgctgtgtgtttttctttatattgcagagtag

SEQ ID NO: 471734 - DNA, 764 bp, Homo sapiens
tccagtggggcagtcaaatcttaaagctccaaaatgatctcctctgactccatgtctcacaccaaggtcatgctgatgcaagagatctggggcgtccacagtagatcaccctctgcaggtccaggacacccaccgcagatcaccttctacagattgggggcacccacccgcagatcaccctctgcaggtctggggcgctcactgcagatcactctctgcatgtccagggcacccaccaaagatcaccttctacagatctggggcattcaccctagatcaccctctgcgggtccggggcattcaacgcagatcacccaccgcagatcaccctctggcagatcaccctctgcaggtcgagggcgttcacagcagaccaccctctgcagagtccggccgggaggactgcgggcagctgggacagaagtgtttggaggtgatgacacagacactccacagacatctgccggctgcccagtctccaaatgccctgcagagatgtgactggaagagtttggggcaattccaagggagtccgttgagagaatcatcccagttggttggaggagggcaaagagtgacgcctccactcaggcccactccgagacatagattctgtccaccccagtggaccgggggcagaatctgtgctacttcattgtcattgtaagcttttgtttgttatttttagacttactttctttcatgtgagttatgtggatggttgaatcctcatgatttcttcttgcacaggatatagcatcccc

SEQ ID NO: 471735 - DNA, 2174 bp, Homo sapiens
tctgttagatggatttctctggaaaaagttggatatgggtcctacatccctccccacaacctcacctcaagacagaaaggaagtgcttcaaaagggttgcttggggaagttggtgtgtgccctgcagccaggaggacacgggtgcttgtggctgcctccacttgggagacccggaggtggctgatttgtcagcagaacaagagagagacagttttagcagccttgggacagcctgctccccagagttcacaggaatgcctcccactggctgtgcaggaatcaatgccttcttgcagggcacagccactcccacagagagactccctggggatgggccaccgggaactcagggactgaggccatggtgaagggcattacctacttcccggacaaatttttcaaagtgcaacccacaaaagcagccctcaagagcctgtgtcactttaaacaatctgccagtcaagtgagaatctcactaaactctccagtctccctctcccgtgctccaactgcccaggaccaagaaacattcgcttggaagtgggaaaagaggggagcatgaaggcaggcttccctggcttccccggcagcccatctgccagggagaggtcccagctgtgcaggtggtgctggtgaatgggagaagtcaaatttgtagagaaagttggaaactgactactacgtaagactggcttttaaaaccactcagttggcacttccatgagttcagactattgtaagaattttctattctcgagtgacttggaaagtcatggaggctcgtctaagtttgcactcaggagataaagaagaaataacccagcaagcaggcttacaggacagaaggaaggaagtattgcataccatgcctctgtttgtttcacacactggggacagcacttaggctttgaatgagtgggtctcaaaggccaggggttgcgggggtcactgtgaatgcaattaattcattcctttttatggctgagtagtattccattgtgtgtgtgtgtgtgtttgtatatatatatatatgttcttatatatatattcttatatatatacatatacaaattcatagatatatatatggatatatacatatatgtatatgtacaatatatatgaatatatactatatattgtatatatattcaatacaatagatatacaatacaatagatatacaatacaatagatatacaatacaatatacaacatacaatgaatatatatacaataaaaatatatatgtgtatatacatacactatatatatacgtgtatatattccatcatatatatacatgtatatatatattccatcatatatatacatgtatatatatattccatcatatatatatacatgtatatatatattccatcatatatatatacatgtatatatatattccatcatatatatatacatgtatatatatattccatcatatatatatacatgtatatatatattccatcatatatatatacatgtatatatatattccatcatatatatatacatgtatatatatattccatcatatatatatacatgtatatatatattccatcatatatatatacatgtatatatatattccatcatatatatatacatgtatatatatattccatcatatatatatacatgtttgtatatatatattccatcatatatatatacatgtttgtatatatatattccatcatatatatatacatgtatatatattccatcatatatatatacatgtatatatattccatcatatatatatacaggtatatatattccatcatatatatatacatgtttgtatatatatatattccatcatatatatatacatgtttgtatatatatatattccatcatatatatatatacatgtttgtatatatatattccatcatatatatatacatgtttgtatatatatattccatcatatatatatacatgtttgtatatatatattccatcatatatatatacatgtttgtatatatatattccatcatatatatatacacgtgtatatatatattccatcatatatatatacatgtgtgtatatatatattccatcatatatatatacatgtgtatatatatattccatcatatatatatacatgtgtatatacatatatataccatcatgtata

SEQ ID NO: 471736 - DNA, 527 bp, Homo sapiens
ttatgccaaatggctgactcctgggaacagggcaaggaagagaggtggggtgtgagcattctggatgtaaacttatttattccttttgtggtttccccacatctgcagcctctcaattccaaagataataaaactcctatttcctgcagagataggaatggatatttccatggccacacatggaagacaaggagattggaaaagacatgggggtggcacctaactgctcagtacagatgtactgcgcccagggctgaaaagggagctgtctgcgttcttccctgctttttcaggagctcacggaagaggccatgctacccaccaggggcaaacaccaaagaagagaaaggggtctttgaagatgacaggaaggtagtccattccaaccctaaatgatgaactctgtgaggctcagtttcctcttctgtaaactgcagacaatcctcatagcatccctgtgaaaatggaaaagctaagatgtccagtgtgcttggcacagttgctaacatgtcataaacaccccaaac

SEQ ID NO: 471737 - DNA, 1089 bp, Homo sapiens
agcagatcagagacactgcttttctgcaacctttgtataatgtcaggaagtggccccatgcaggaagtccctcccccaataagtcccccacttgccacagggcacgtcttgccctgaccagcaggacgggggcactccagctggggagaaggcagctttccttcatgccttcgcagctcctcgtgctcgctgctggggggcagccgtgggcagcgggtggcgaggttatgaatgccaagaggagaggggctgctgtcacatctccatgcagctttgcaaagcttcataggattctcatccagtgcccacactccccaccccctgccatttctttgtccttcctccatgaaaatgacctgtcctaaaattagtgccagaatccacatggattctaatataatcaaggtgggttcaacggccttgagaatttggaggagagtttcctgtccctgtcctccgggacctccaagtcctggctcagaggctgcaattctgagccagccatcttcagaccccggcagggcagagacccacaccacccttcacgatgctgtctgccctggtcatttctgctcacccaagatctccacttgtaacgtatatgtggctgcagtcaacgatgaatttctacattttggcaacggtcagagtgaaagtagtcgcactatctatagaaactttgagatggagaacacttggaacgcatgcttcgactggaccctacctggacagtctgaggatttgcgagcttcaggccatgtcgtgggctgaagactgttatggggctgcaggtgcagcattgacagatcactggagccctggaactttattcaataaaaagcttctgcaacccaacgggacactgacttgacccctaggcagaggctcctcacccactctgtgcttactcttagcgtctcaggttctaggggcttggctcaatgctagctgctctccactcaaaactactcaaaacctgctccatcaccccagcatcctttgatttaggattaatagtcctgttttagaaatgaaggttttgaaaggtcttactgtcctcctttctcttggccgacatttgaacctgaa

SEQ ID NO: 471738 - DNA, 787 bp, Homo sapiens
gcctatggatgaagtccacattggtcagcttcctggagtacagagcagggtggaggaagatagaaagtagatttggaggggggcaaacagagaatctatccccgtgatgaagacaatgatgatggtgctggtaacagtgataattgtggtggtggtgatggtgctggtaagaatgatgatggtggtagtggtgacagtggtgtttgtgatggtggcaatgatgatggtggtggtaagagtgataattgtggtggtggtgatggtggtggtaacaatgatgatggtaggtggtggtggtggtggtgatggtggtggtgatggtgggggtgatgataatggtggtgatggtggtggtaacaatgatgatggtggtggtgatgatggaggtggtggtggtggtggtggtagtaaagatggtggtgatgatgactaccatttattgagctcatatagtgccactcagcgttctaagggctctcaaccttcacacgagcccagtaagatagggaggtagagattctcagagatttgggagatctacatacagcctaactgtcagagctggcctctgctcccttggacctccctgaaaacacaggaattggtaaagcccctggtcctggcaatttgtattataattacatttgagtttgtttgtgttccttacccctctgtgagctcctctagaggacaaaaagaaattagcctttgccagtgtaggtgctgtcataatgacactgattcaacacatgccttttccctgcaaagcctgaaggcagggtgcctc

SEQ ID NO: 471739 - DNA, 674 bp, Homo sapiens
gagcgaattctaaagaggagaaactggagaacaaagaactgtgggcatcggaatcgggaagacctactgcctttaggaaaagacaaggacaaatattccttgtccaagtaacatagtcccagggagagcatgggatcacgtctagatgaggccagattcaatgttcaggcggctgtgaggatggggctgatggagacagtgcaggtgattggaatgaaggacagatgtcctggcttggacatgggtataatatctatcttggtcatttgggccaattcagtgtcttgggtacagggtcatccatctgggggactggatgacatgaagttgagtcagagaaagattatgtgtggacttgctattgttgcactgcaagcaaatacaccatgtcagtggtacacaacaataaacatttctgtcattcctgtggctgtgggctggctggggctcaaggcacctacgggtggggctctgctgggtagctctgctgtcagtgtttggtgctctctttctgggccctgcagatgcctctccattgggttctgtaaggtccctggagctgctgttaacagtggaggtgtttcacagcaaggaagcacagaggaagttaggatcaggaatggactgggcactggacatggttaaattctgcatttttccatgacaggataatc

SEQ ID NO: 471740 - DNA, 538 bp, Homo sapiens
gcctaagggagtccagaactgtgagtttatggtcatccttctgatggtggaaaaacctgcaggatgtactctcagaataaaggactcctgcacaaagaaggacagttggctaccgtcacatgggagaccaaaggaggcttctccagctccggaggctcaggcatgccagaaagaggcactctctggctccccttggacgacccactgtgtacaaagcacgccggccctggactcaaaagagcatctgcagtcggccttttggaccacacaggaccagagagccttggtgaagatgactcagagatccagtctggaagccctgctgtgggggcacaagagaccattcgccccaacattcccggcctctctacggggctggtggctgagaactgggggatttccccaggtctcaaggccttaaagggacccacaagtcccctggctgtctgcatttcctgcccgttgcagggggcaagccccaaggggagaacagggtggaagatctgggggagctaaattctgggagcgcaggcaatgc

SEQ ID NO: 471741 - DNA, 861 bp, Homo sapiens
ccacagactgacagcttcaagtccatccgaagactgagggtttgcagcagcctgtctggtccaggacataatacaatgataatgaatgactgtgttactggttttcagatttaccatacaataattgtcatcgttattttaggatgtactccttctacttataaaaaaaagttaactgtaaaacaacctcaggcaggtccttccggaaggattccagaagaagacattgctaccacaggagaaattcgaagcaagaggaaaatgaatgggaagggctcccaccaaaggaccctcatgggaaagtggccttcagagaaccctaaagaaagctgggccaagatccagggtgggaatggtgccaaagaacttgacatttcacattcactcacacattggcagctgtcaccatgggtaacaaaatgcaggcactacctacggctcaatagtcatgtcttctttgaagataagggtcttctcttgaaaggcagttggaggctttaggcagatagatgttcaatacctgagagaaagtccttcatgagtttgacacctggagctctcctaactttggaattccttggcctatcactgggaatctggcagtttacaccacctttgtccagcgtgtgacatccagtcttccttgtcgacatgaacatgttgagtccatcgtgaatcatggtagcatctttctaaaggcattgtaattgacaagcacaggtctgagtttaacttaacatgctctcttctgtgctgccttaaagttaatgactgtcagcagggatgagattctgacaagcagttatgctcctgtccaaggttaagttagcctgggcatggaggatggcaacactatcacac

SEQ ID NO: 471742 - DNA, 672 bp, Homo sapiens
ctgaagaaaaggagagtctagcatggataagtccactctgctgacttcaaaaattgatgcaggtctcttgatgtcagccccccaaatactttcccatccttcgacacactggctctgccttcatgcagtggccacgatattgtccctgcccctttctggttctgactcttccgacattgtcagccttgctgtcaagatccttctcatgtccattgattcctgtgactctcattgcatcctctcctcagtccctcagttgataacttttaaacctaatatccatatttcccatggtcatcccatggacacaggctgggaccgctccccaaagccatctagaaagacccccttttctcccttctccatcttgacagcaaaccatcaacccaatgttaaggaaaggcacaaccatcagaacattttagcaaataacataggtcactggaagtcccatgtccctggaaaaccgttggctctagacaaacctggagggttggtctgcctgcccagcaataccacagccagagtctactccaaaaaaatagacatagatgtgtatcaagacttaaccaaggcgcttttgccagagcattattttaaacatgaaaacactgcaaatgggctaaatgtccaacaacaaagcagcagctaataactattatgtctttgcca

SEQ ID NO: 471743 - DNA, 563 bp, Homo sapiens
tgcgctttcttgctctgcaaaggtttgcaatccagtgggaaagatggccatggcagattgcccgaaattgggaagatttctgaaatcccctgatcttgagcttcattatctattaatcaccaatgccagtacttgccagtaccccacatccaacagcattgtccctgggccacgagagtttcaggcctccccagagagctgccaggaagaaaccacacctcacagagaggttctctctgcccttcagccccactggcaacatgaccttgggcaaggcatggaccttaaggtccctcatttgatgagagagaaatttatcctagaagtaatgttcgcgcaatcactgagctctggtgcagaggacgtgggccaaggatgcacatcctccactaggggcccccgagacttattccttccagagcctgtggtgtccatagacacatcctgagcagaatattggctggactgagagtttttactttactgtgttaactcagaacccgaagtttcccaagaagcagcctcctgatacatcaggactgtcctttcacatggatgaccca

SEQ ID NO: 471744 - DNA, 930 bp, Homo sapiens
gctttttatagtcgagcgaaagagtcggtggctgattatttatgtccttctggtatgtcttagagtcaggcaacctgcaaagggtctgtccagccgggctccccaggtgtcatgggacccaaggggaggccaaggacagccctgcagccacttcgaagtctgggcacaaacaatggctattgtctgcgaatggctccatcacccttcccaccatctacctgcattttcaaaataaacagccctccaaagccaacagccctgtacaacttgcctgcctgccggacagaggcagctgtgggacctgcgttcctccaggcaaggcaggcagctcagctgaccacagatggctgagtggctgccagggatcagtaactcagggaaagagagatgagcgagaatggggtctcagtcctcagggggctcctagtcttctgggaggaacatgtttgaatgccctgagtcagaaccagtatctaaagagaagtccacacaacgttcattggaagatttaacacatggagagttcaatgcagcagggatccagttggaaaaaaaaaatcaaggaaggctttctggaggaggcaacatataagatttttctttctaaatatatgtgaattgattcacttctctccatcatcacctctaccaccagggtcttagatgtcatatgtttcatctcttctgcagagtatttccattggctccttatccccctccccattttcttctcacccagtccactcctcacactgcaggcagagtgatcattttaaaccatttcatttttttgctagaaaatgttcccttttgtctaagttttccaatttaaagccataaagtttccaagtattctctattgtttacatctctgcaaaatctgcagttatgtctcttttttcagtcctaaaattatttgtgcctgatctg

SEQ ID NO: 471745 - DNA, 569 bp, Homo sapiens
ggagctgggaaggtggttccagggatgagggtggctctggaagctcctcaatatccttctcatttgtgcttcatccagctggtgggtttctgtttcgtcttggcactcacacactctcccatcttctgcatttcattggctaaagagattcacaaaactagttcacattcaaggggtaggaaaatagactccatctcttcgtgggagaacctacaaaaatcacttttcaaaaagagcagatatagtgagaaaaaatatcctgatgcattgtgtggctgttgtggcctcattaagaccttcagtctccaggaccatataaagctggactgcatttggaatggtcctgcaaacattgctaaaagctgtaatctccagttagaaaacaaccttgaagggagtttctcagtggcctcattagacaaacaagaggtggtaggaccaagcctcctttggaatggacctgcccagaaggaaaggggacaaaaggagtactgggaaaggttttaatggaaccaagctcaagcactgtgcacagaagctggggtgaggagagggggacaattgggggg

SEQ ID NO: 471746 - DNA, 581 bp, Homo sapiens
ctacccgagaatgtcagggctggtgaggcgcaagcatgtgattagaggctggttggtgcagcctgccaacttcctgccagtgtgtctccctgtgccaggaactggcttcttttgtcctgacagtggcaaatccacatgcatgactccatttttttggagtccaggttcagtttgcaaagaggccagagaagaaaactgttcttgggctaaggccagttgctgcttcttgacgccctctcttatgacggttgacagtggaggaacaaaaccttctgagattcggtgctggattgatcccaaataccaatttacttcccctgaacgaacctcgagctctgcttgcccaacaatgcccacagggtacgagtgccaaggagagcacggaaaataacaacgagaaaggctagcagcagtatcaaaatgtcaagtttgtacttacagttgtatgggcccagacagggtcaagagccccaattatttgtgtatgtacacagtggtatgacacgaaaggttatgtcacctgcagctattttcctgcagatttaaataggactgatattcagctgtacagtgagctgctg

SEQ ID NO: 471747 - DNA, 1489 bp, Homo sapiens
gagacttgtcacttgtcaggtttgagctgacagtcccaacgctgatgaaagaattggaaggagattggctgtgcgtgaggagagttggggtcagccgcccaaagttttctccgcatggtgaggaggggagtcctaacccttttggatggtgcaaagaagtctcggctgaaggaggtggaaggggttccagccatctcccaactgcatggggaccaggacacaggctaagcaccatttcttcccctaccacgcccccagcggtgatggcagacaatgcagcaggattgcaggagccgagccgcggctcctccacccgctcctcacatcggaggagctagtatgatgctctctgagttcccccagaggaaccccacaactccaggatcagagcacacagacccccgaccatgccggtggggttcaccccctggcctgtggaggggaaggtggccagtgcagggctctatggcctgaagagtggcctgggaaggccccacagctgtggcagattcaagtgtcacaaagccatggtgctacccaggcatcctcagtccctcagtcacctcacctcctcaatccacctgcccatcagtcctaacgagtgccgggttcccaagttaccaccaccaacaaccgcttcttttgctgcacctggattcattgctgctacttttcaaacatctctgctgccctgggaggagctcgttgagcagctggctttcctgggagagatccactggctcctgctccaccacagtgaccatgcctcttcttccctgcccagccctcctctaaccttacttgaggatggtgaggaagcagacagaggacgtaaaagcaagaccagaaaggggctggcacctccgttctctagaattgagatcctccagataacacacaatgattgtggaaagaactggcaaattaaagatagttggtattgattccaaaaatacttttgctttcagcaaaatacatctttaattacttttctactagctgtcatttttcataaagcagtctagacgactcgtgccaaatcctgcaaagactgttttcaatgaaatgctttttcttaatatcaaagatcagagaggggttgaaaaatctcttcatatgtgaagtttaacaaatgcctagaaaacttgtcacacattcaggatggacagactcctatgctcccattgtcatcaacaactggtgaaaacactacctgcaattttctttttccatcttctcatctcttgtgagctcttccatgtgatggtctgggtaaaatatgtacatttctatgcaaatagtatgcatgttatttttgctttttcgcttttgttggtaatgtattatccatagtttgaaactcccttttcccccaagcagtttaatacaaagaccaagataacacctctacatgtacacatacagctgtagaaaatatgtaatactggaccagttctttttttaatctttatttatcagaagtaagctg

SEQ ID NO: 471748 - DNA, 608 bp, Homo sapiens
aataaaatcctgtggtttgaataggacagaacctagggatttgactcttcagagcatgataaccaacactgcagggtttctcaacagcggcactgttgacgctaggggcctgatgacattttgtcctggaggttgccctgcgagcattgtaggaagttcagctgcccctcggctgacacccatagatgctagtggcactcccacccctccaagctatcatttttggcgtggaagagagtttgatggattctgcaataatgagattgacgagacagatggtcgctgccaggaattcagcagaggccagggtgatggagaagcaacggctctgtgtcagaagcaggggcgggagcgggaggacactaagatcaacaggaataaaattcctgagaacaaggccctgctgatatggaggaaacagaaagaaggtgagagtcagcacggtcgcttcaaaatggtgacaactgaaatcttctactcaacaggaatggaaaaccagctcagttcctggtaaccatgacagctgttacaagtgcatccctgaaggtctgtgacgcgtccagactcctcttctgcctgctgtcccatggcaggctcttcctttctcc

SEQ ID NO: 471749 - DNA, 910 bp, Homo sapiens
cgatgaagaaccaggcagagcttcccctgagtcagcttagatcaacagcaggatgacagcagcagccgtgccaatcaccagcagccgacatcttggagaacggctcatcaacagcttcccggaagcaggggagatgccattgcttcagaataacttccccagccagatgttttaccagttcctcgagatggtagagtctgtgcatggctgtgacgcatcagggcctttccagtgccgctactgtccctacagtgcctctcagaaggggaacctgaagacccatgtcctctgcgtccatcgcatgccttttgacaacagccagtatcccgaccgcaggttcaagcgctccagggtcgactcagaggcttctgggaatttcgaggagcctacagctgtcaaggcggggagctctgcagacctcacggaagagggcggcaagggccaggaggagaccaactgagcagaccaacctgtatattgcaatagtattttacacagttttaacattatgcatctggtaaaagtttgctaactgcattccaaggggaaaaaatcatgtacaaccccccaatagtgtatagaacatttaaaaaattttaaaagatatctatatatatattaaaaaaaaaaaattccccagcccttgaaaatggctgctaaactgttacccggcaacaagtacttccaaaacaatgcaggtgggagaaaagtgatttcaaaaattcttggtgccctctgagctggagagagctgggggcccttccaactcgaaagtcgtctttgtccaaaaataatgctcttaactgaaaaacgataccatctaaacgatttagtgttgcgttgaagatggaggggctgtgttttcgttgttgaaaacacctctataatctgacaccagctgctgtaattc

SEQ ID NO: 471750 - DNA, 1220 bp, Homo sapiens
ggacaggagggaacgtgtcggacccggccagcttctgatgtgagaaggaacccagcagcagggcctgagccacctcatcaaagatgagaagcagctcaagcatcctgagtgatgggagactgggaggcagtgcacctgctgctgggagggctgggcctaagctcagaacctcctgggagaccaggtgagccgtgatcagcaagcgagcatgcacacgcatgtctgtggcatgtctgcagataggcaccttctgtctagatcaaccctaaagcaacaaacttggtgtagtcccatcttcatgggagcactttgtccagcaaaagggaaacctggcttgttccctcgagcctggaatggacatggaaagggtgtctttttggcagaagcaaggatctccagatggtttcgaaacagaatttacccagcaccagaccctcctgggccagtcacatggcctttgagtgaccaggatcttcaggagccactttcaggaaatgcagcaaaggtacatgtatcatatgatctccttcacagctgtgaaaaaatgctattagtgctttcaaagcagttttatcacagattaaagaagcctagaaaaaaaattggcagccagagacagccatatgcctacttgacctaggacggtaaacctgttgttcattccagagaggggattatggcattacttttagtaagttgcttttcatatggaaatttcctttcatagtaaagatctgtctttaatagcatcatcctaaaaacatgcctattttttaattccacgatcatggacatatagatttttatagtgtctgcaagcatacattaatgttaatttcaccattctcctttgtattttgttaatgtcacagtctgctgtaaaaccttgccaagtttcttaactgtcatgttaattccaagacctattctgcactctttgacatttcaggacagaacaaggcagtaaaaatagattagaaacagcttataagtattataaaatctagaactttacagatggtggaattaggtctgctgaatggaaatttagcaactcctgaatgcaataatattagaaaatcgtattcatttctaaggtaaatatttggaaggcgtcgtataatggcggctggagaagttggggaaacttataaaatgcaacagagttatataattttaagaaacatactgtatgcatataccatatcctgcagagtttc

SEQ ID NO: 471751 - DNA, 722 bp, Homo sapiens
agtggatgttacaatgccttacaacacattttctcattttttaatgataaaaatgtttctagtttccttagatctaaaacatggacctaaatgataaatgccttttgtgtggtgttgggacaggataggcccctcggaagcaaccaggagccggccctcccctccctggccatctgcttgaagcatctggtgatcaggtgcaagccccacaccggagcattcaagctgaaatgtgcagtcaccttgccacccacactcgcttttgttacgcagccaggctgcccctctttgtgtcggggagaacagtttggggatggaaatccgactgctggcactgggaattcaccatggctgagccgagatcctgcaggccgagaggctggcccagtctccagacccggctgtcccctcccaccagggtccatggacatgtctccagcaaacgggttggctttccagagcagggagaagattgctcacgaatgtcttctttacccctctgggtccagcaggtctcagatatttggatcctgccgtaaaggagaaatgcttgtcagttttatgcctccaccattacttaggaaggaaagggcctgtcctcacagctgccagagcccataggcgttacatttagcgttcttctcctggtgggggttcaagccatggtcattactctagaatgttgttacatgaagaaacaccaagaaatgtgtctgtaaaaa

SEQ ID NO: 471752 - DNA, 514 bp, Homo sapiens
acacaccatgggcgattttctccctcatttccaaggggggcttgatcaaataccagcttcaccacttcctaaacctaatcctctgcaggtcctggattcccttgctgttcaggaacgtaatgtctatatgaatatcgttgccagaattgtctcaggccatagatatatcttcactttccgtgttgagtcctttggaggccatcggggagctgctgttccccttcagcgtggctgcctgctcagggaggtcttggcttccgcagggtggaccagcttgcactgctctatgggtgcgcagtccctggaacgccctttctgtgtggatgttattgaatcctctgatgtccatgcgccacctgttcattcggggattttgagtgatagaagcaactcagtccattcacatccaccaagaccactgcggtctccctgaaatgttgtaccagaggtttctgctgactgatgtctcttttatagatgttcataagactgaaaagcaggcttcagatgtata

SEQ ID NO: 471753 - DNA, 908 bp, Homo sapiens
gggtttgttttgaatattgtgataaagttaccaaagaggtgcaaaaagagtgcagagaattccttcatacccttcacctagttccccaatatgttaacattttacataaccacagaccgctactgcactccagcctgcgcaacagatctagatcttgtctttaaaaaaaagaggaagaagaagaaggaggaggaggagaaggagaaggaaaagaagaagaagaagaagacggaggaggaggaggaagaagaggaggaagaggaagaagagaggaggaagaaggagaagaagaaggagaggaagaaggaggaggaggaggagaaggaagaaagaactgaacccaagaacttgggacaagggcctgtgggcagaaggttgatttttggaagtgactttagagaatttgggatagagaactgggaagacaggaagacagaaggaaggaaagtgaacctgggggcatatctatccactggctccatccccatcggtccagggctgtcacggaagaatttccacttttattttatacttggcagctgcgtgtgcaggtgctttacctccatctccttccacacacctgtgggcttgtgcaggaccagaggctggctctacccgctgaagctctttgactcctctgtcctctccaaagcctcagttctcacctgacaaaggggctggaatgttccatacaccctgtaggactgttggggtcacatggatccatgcttgtgaaaggcctgagtgtgcagagttgggagctacacttcggagaagcccctcttgctgtccatttctctctgataaccaggtgaggaccctgcatggcttgatccattctctttacttccttttaagccatactgaggaggtttactttaaacaatttgttgttggtggttgttgtt

SEQ ID NO: 471754 - DNA, 677 bp, Homo sapiens
ctagttttgaattcatgagttattgatcttcacttgcaaagagggacactgagagaggaagcaatgccaaatgacacgcagctagagtcaagcctgggacccgctgtcctggcacccacgacacgcttccaacaaggctttcaaaggcgacgcatcaatccagtaattgttacgcccataatgaaaaatccacagaggagacagagtgacacaaagaccacaaagcctagagaagattgccaaggggtagttgacccaggtggctgctgtgttgatgagtatgaaacctcccaggttattcacactctgtcaaagaccctctggagccaagacggcttagctcagaggagtgaggcggatgctgaggtttcagaccaagctatcttgggccatgtgggcttcagggagcccaaatctgcctcagaggcatagcaatggtcctgaggcttctgagtcctggattaattaggcggaaaggtttaggtagggtggggtcacacagctcttagattttatccttttcactcctgaaaccactggagaggctgtttttaaacacagaacatctagaatgccagggacctccctggaggcaggttgggaatcatggcccaagctccctccccagacacctgcacatgtgcacatggtcctgcgcaggatgcacatttcacaac

SEQ ID NO: 471755 - DNA, 4210 bp, Homo sapiens
gtcaaatgggctgtgatttatgagaaaatagaggatccaaagaaactgaactcaagccaagtgtgcgggcagcttcccctccattccttccctctccttgtccttttcctgttacatgtgaggcagtgcacattttgtttttggtgtctgagaatctgcattttaccttatttttatttgagattcaagggatgcatgtgcaggtttgttacttgggtacattgtgtgacactgaggtgcaggtttgttacttgggtacattgggtgacgctgaggtgcaggtttgttacatggatatactgtatgatgatgaggtacaggtttgttacttgggtatactgtgatgctgaggtgcaggtttgttacttgggtatactgtgtgatgctgagtgcaggtttgttacttgggtatactgtgtgatgctgagtgcaggtttgttacttgggtatattgcatggtgctgagtgcaggtttgttacttgggtatttgctggtgatgacgtgcatgtttgttacttgagtgtattgtgtgatgcagaggtgcaggttttttacttggctatattgtgtgatgatgagatgcaggttttttacttgggtatattgtgtgatgctgagtgcgggtttgttacttgggtatattgtgtgatgctgaggtgcgggtttgttacttgggtatattctgtggcgctgaggtgcaggctccggtgtgtgatgttccccaccctgtgtccaagtgttctcattgttcaattcccacctatgagtgagaacatgcagtgtttggttttctgtccttgtgatagtttgctgagaataatggttttcagcttcatccatgaccctacaaaaggacatgaactcatcattttttatggctgcatagtattcctggtgtatatgtgcgacattttcttaatgcagtctatcattgatggacatttgggttggttccaagtctttgctattgtgaatagtaccacaataaacatacacgtgcatgtgtctttatagcagcatgatttataatcccttgggtatatacccagtaatgggatggctgggtcaaatggtatttctagttctagatccttgaggaattgccacactgtcttccacaatggtcgaactagtttacactcccaccaacagtgtaaaagtgttcccatttctccacatcctctccagcacctgttgtttcctgactttttaatgatcaccattgttaactggtgtgagatggtatctcactgtggttttgatttgcatttctctgatgtccagtgatgatgagcattttttcatgtgtcttttggctgcataaatatattcttttgataagtgtctgttcatatcctttgcccactttttgatggggttgtttgattttctcttgtaaatttgtttaagttctttgtagattctggatattagccctttgtcagatgggtagattgcaaaaattttctcccattctgtaggttgtctgttcactctgatggtagtttcttttgctgtgtggaagctctttagtttaattagatcccatttgtcaattttggttttgttgctattgcttttggtgttttagtcatgaagtccttgcccatgcctatgtcctgaatggtattgcctaggttttcttctaggatttttatggttttaggtctaacatttaagtgtttaatccaccttgaattaatttttgtataaggtgtaaggaagggatccagtttcagctttctacatatggctagccagttttcccagcaccatttattaaatagggaatcctttccccatttcttgtttttgtcaggtttgtcaaaattcagatggttgtagatgtgtggtattgtttctgagggctctgttctgttccattggtctatatgtctgttttggtaccagtaccatgctgttttggttactgtagccttgtagtatagtttgaagtcgggtagtgtgatgcctccagctttgttcttttggcttaggattgtcttggcaatacggtctcttttttggttccatatgaactttaaattagttttttccaattctgtgaagaaaggcattggtagcttgatagggatggcattgaatctataaattaccttgggcagtatggccgttttcacaatatttattcttcctatccacgagcatggattgttcttccatttgtttgtgtcctttttttatttcattgagcagtggtttgtagttcgccttgaagaagtccttcacatccctttcttcctgtggccatcccccaacgcatgtcttcacatcatcttcccatggacgtcctccccctgtgtgtctttacatcatcttcccatggatgtcatcccctgtgtgttctcacgtcatcttcccgtggatgtcctcccactgtgtgtcctcatgtggtcttcccatggccatccccactgctgcgtgtcctcacatatcttcccatggccatctccccatatgtgtcttcaaatcgtcttcacgtggctgtcctccccctgcacgtcctcacatggtcttctcatggccgtcttcccgctgtgggtcttcatgtcctcttcctgtggccatcgtccctgtgtgtgttctaacatcatcttccctggctgtcctcccactgcatgtcatcacattgtcttcccatggacgtgttccccgtttttcctcacgtggtcttctcatggacatcttccccctgcagggcctcacatcatatcttcctttggcaatcctccccctgcatatcttgacatcatcttcccatggatgtcctccccctgcatgtcctcatgtcatcttcccacggacgtccttcctctgtgtgtcctcatgtcatcttcccatggacgtcctctgcctgcgtgtcctcatgtcatcttcccatggacgtcctccgccacgtgccctcatgtcatcttcccatggatgtcctccccctgtgtgtccttatgtcatcttcccgcagacatcctccccttgtgtgtcctcatgtggtcttcccatggccatgcccccacccccgtgtgtcctcacatcatcttcctgtggccatctcccctgcatgtcttcaaatcgtcttcacatggctgtctcctcctgcatgtcttcacgtggtcttcccgtggccatcctccccctccatgtctttatatcctcttcctgtggccatcgtccctgtgtgtgttctcatgtcctcttcctgtggctgtcctcccccatgtatcctcacatcatcttcccgtggccatcttccccgtgtgtcctcatatcatattcctttggccatcttcccccacatgtcctcatgtcctcttcacatggttgttctccccgtgtgtcctcacgtcatcttcccatggccatcatcccctgcatgtcctcgtgccttcttcctgtgcctgcgctccccctgcatgtcctcatgtcctcttcccatggccatctgccccctgcgtgtcctcatgtcatcttcccatggccatcctcccactgtgagtcctcacatcatctccctgtggctgtcctccccctgcatgtccttgtgttgtcttcccatggccttcctcccttgcgtgtccttgtgttctcttccctctgtatgtgtctatctgtgggtccacgtttctcctttttatatggatattggactagggcccaccctaatgacttcattttaacttatctctgtaaagactctgttccaaatcagatcacatcaggaggcactggggtgaggacttccacatgtctttagtgggggatgcagctcaaccctccgctttccccttgctcttccgcagctggaaggtgcttctgcatttcctcatcctgggcacagctctgtccctgggttccacactgtcacagccacccttccagacctctgagcacatagcaaatgctcctccgcaggcccgccctgcctgcctggtgttgtggtgggagtgctaagcccacagtggcactatggaaatacttggtgcatgaggctgtaaaacctcaataaaccaaaatgctcagggaatgaattattttagattaattttggaatcaacttgggcttccaaataattatttttattttaacactttcagcattatttctggaaaagacaagtctacctttctgcctcaggaaatctagtttgttaaataaaacggaactgtccttggattttgaagaccagcagc

SEQ ID NO: 471756 - DNA, 533 bp, Homo sapiens
tattattaaaaagtcaaaacatcacagatgctagcgaggctgtggaacaaagggagtgcttatacactgttgggagctctcccaggctgcagcgggaccacgaacctgaattccactttcagccagcagggggtgtctggtgcttacttccccaaccaaagggtgtttctcaaacctgattctatagctcacaaggacctggagttgacacttaaggtgacagctgccccttccttcaccctggaggggtttggggtgatgctgtggttgctattcttatcactgcccgcagccccaggcccagcccttagcttcacagcgagctcagcgtattcagttctgtgggtagcaggtgctcagttaaccttaacacagatgtttcttctgaacttcccaattaactgaggaggggatgaaggaaggatagaacgtggcctgcccttatgagctgacccaaggatggaagcacaaggggttggtggatttccctttcctagccaagggaagctgtgacagactaccttgaaaaacac

SEQ ID NO: 471757 - DNA, 1387 bp, Homo sapiens
gtgtgggctgcggcatgccaccgtaccctccctttgcctgatacctacaggagtctgtgttactcaggaggactcaggaatctggagattgtgctcttagatggaaaattggaactaggaggagaaagaaagcttaaaagtgtgagttctagaattagtcggcctggctttgaaccacagctctgtggtttactagctccatgacctcgagctaagcccttggcttctcactaagctttggtttctgcagcgtgaactagtaatgaaacaactgcctcagaggctgttgtgagagtgaacacagataatgaagagatgtcagtacagcagtgcagtgcaggaaaggcagagctagagctgcgcacaggggtccaagaaggcttcctagaggaggaagagtccacgtggcctaacggcttcctccaagagaaatgtggtggtcaactgcttgcccccacctctcctctgggttctgagccttgcctcatgaggctggcctccaaggactccatccccagggcccttgtgctggctggcctcgacttcttcagaggtctaaaggctgaaggccccagtggtggccaaaggcaggaaggctatgtgccctgcttggctggagggaccccacccacactatctccagctgctctgactcagaactgccagctgggagcaggccgcatgctggtctgggcaggccagctctttgcatctggagctcacaactctgtttaccacagacacgcactgtgcacctactgaatgtacgtgctgtacacttattgagggcccctgcatgcaagggccctgaggacaatttctcacgaggcttgcagctcctgcccttgaaaagcccaactctggtaggagacaggaggctaaaactaacatgcggagcatcccacaccctactctggcttagcccctcccaggaatgtccgtcatctgctgtttacaacttcaactcctcagggggcccttttaaggcccctcagcatctggcctgatctctacctcgcctgtccctgcccctccttacccctaagcttgcaagttccacccttcatgtgggcactcagcagagcatcccgcctccccagcctctccctgggtgttcttccctctcctcctgcctggaggacaccctctccccttccaaggtgcacttcaagcattcacttctctaggcagcttttcaccgtccccacctccccaccaggtgagggtaacagctcctcccacctcagtgcctctgctggaccgacacaggtctctaacacagacccagccaatgcctccctggcagaagtctgtctctcccgccaggccacgagcaactgaaggcaagaggggtctgttcatgtttctttcccaaagccagggcctg

SEQ ID NO: 471758 - DNA, 699 bp, Homo sapiens
gaggaccccatgagctggacgcaaagccaacctccccagtggtatcagttccataaatattgcttcattaagctgtctgtgtcggttcaaagagatggatttggaaatgtggccaagcttgttgcgatgaggcggaagactccgcgctgccagtgtcacttcgcctgcccacactgcgctagctgccacagtgcggggccatcagttaacagccggagctggcccgacatctgcccaaaggacgtgaagcagctcagggtgaaagccaggcccttccaggccctgggctttgaaagagtggtgtacgcagggatggaggggctccttggtgaggagcacccacctgagcgatttgagcagcttttctacattccaaacaccaaagccattgtttcttatttaccggtctccgcacacaccaacctgctgtgcttttaaccctgacaaggtgaaatgtggtgtgcatgtgtggattaacttatttctattttactatttacgtgtttatttttcaattgatgtttagagatatgtatccattatggaatgactaaatcaagctaattaacatgttcattacttcccatacttatttttttgtgtaacttggagagtaatatcaagttgtttatttaaaatctttcttctttttttgatataggcattttttgctgtttctttcataactgcttttgctgt

SEQ ID NO: 471759 - DNA, 733 bp, Homo sapiens
ccacaggacacatctgttccctcttctcccaccccccgctctcatcccagtagctcctatccgccccataccatgcatccctgaaagctgcccctgcatccgggttgataaaagacagacagccctggaggtggagtaatgcagacctcctcctcaggcggtcagcaccacaccaatggggatcccgtagatatgggaagcagctgcagttgtaacaggacccagttcggctgtgtactgcttaaacatcaaacacaagggtcatctagtggtctgggggagacaggaacctgggtccccagtgccatggcccatgggctcagcccatcctgctgttccagcccagtgccttccctgagctcccaggccccagggagggtaggaatgggagctcactgggtgcagatccaggagaggccggctggctcctcactgtccctgaagcaggaagctccagagcaaaggcctcagcgcctgccctcggggcctgctgcagctctggggctggcacaggtctcgctggcccctagagggagctcgaagcccctccagctctgatctgtcccttccaaggagaagagcaggcaaatgattacagatagagctagagtcttttttttatacacccctcacccccctgcaggaccactccttgaaataggatgtatccttccttatcaggctttggatacttttgcctcatgtatatgtatccatgaacagtatacataat

SEQ ID NO: 471760 - DNA, 588 bp, Homo sapiens
acagcaaagatggctgcctgctccttcctctgggatctccatcctggaagggcaccaacctgatgccagcatgaacactcctgtatgtctagacctaccccaggaggctctctggctatatgacatggagctcgtgacttatggcaaacagccccaaccagactactccatcagccccatcactgagatggtttggatgttcatcccctccaaccttatgttgaaatgtgatccccagtgttggaggtgggtcccggtgggaggtaactgggtcatgggagtggatcccccacgaatggcctggtgccctcctcatggtaatgaggtaatgggaatcggtgtcgtgctgatgataacagatgacggaactcgtacagagagagtgggaagtgatggactcaagattccaatcaaatggttggatggccagagccctgtaaaggcccagaaagggggcaaatttgttggcattgaaatcctggcttacctgtgagccagcatgctgaacagtgaggaacatttgaaatgtcaggagagaatgcgatggttggaagtggtgaaatggcaaccagcaacaaagtgttcacg

SEQ ID NO: 471761 - DNA, 607 bp, Homo sapiens
tccctagtgtctgtcattctcatcatgtcgttatgtatgtacccactgtttagctctctaatcacttctccactgtgcctatcacatcagcccctcccctgtgcccatcacacctgccccctcccctgtgcccatcacacttgccccctccactgtgcctatcaaacctgcccctcccctgtacccatcacacctgtcccctcccctgtacccatcacacctgccccctcccctgtgcccatcacacctgccccctcccctgtgcccatcacacctgccccctcccctgtgcccatcaaacctgcccctcccctgtacccatcacacctgcccctcccctgtgcccatcacacctgccccctcccctgtgcccatcacacctgccccctccactgtgcccatcacacttgcccctcccctgtgcatatcacgctaaaggctacacgatcccacacaattctgtcccttgtgcatcccggcatcccctccatgcccctgcctaaactgcacagcttcacactcccacgcaccctgtctggggcatcctgatgttgctgtgtatctcctggctctgattaatttaattaattaatcgagatggagttgc

SEQ ID NO: 471762 - DNA, 949 bp, Homo sapiens
ttcatgtggatgagtgctctgggacctgcagagtcgcacagaaaagtgacccacagacacagaaggcaggagggacccgagggtctcgccctgccggcctcatgttccacatccataagacaagcgtcagaacagtgcccacctctaagggtcccctgcgcttcaggtgactcgcagtcctcccggcaggcccccctccccgtgtgcttccttcctgctgtctgtgagcccttgggggcaggacctcggccctcctggtgaccctctttctcctggtgacccttgtccctccctgtgaccccgtgtctcctggtgactcgtttctcccagtgaccccattgtctcacagtgaccccgtgtctcccggtgaccccgtgtctcccggtgaccctcgtttctcccagtgacccttatgtcttctggtgaccccatgtctgctggtcctcgcagagaccttgggcctctgtttcctcatctgcataatggggacagcagtcagacctacccagagggctatcatggaccccaatctactcacagttcgtcagccagagatgaacgcgaacgtccacagaaataaatggatggacgcggcgttgaagctggagtatacacaatgcccgctgtggaagcagctcacagttgtcctccagcgatgggtgggtgcatggaccactgtggccgccgtacagtggagtggggttcagcccgagagaggagcgacacgctggcacgccgcagcaccatgctgtgtggaagagtcagacacgcaggaacagatgctgtccctctcctgtgcagagcacacggcagcaagtccagagggacggaaaggagttcagaggctgcagggcgcggcgggggaatgcgcggtgactgccgtgggcgcggaagggggaatgcgcggtgactgccgtgggcgcggagggcggaatgcgcggtgactgcc

SEQ ID NO: 471763 - DNA, 774 bp, Homo sapiens
tccggcgttcgcgtaactcccgtgtggggtcccgcctacatgcgtcccccctatgtgacagtgacagacatcgtaggaagctccggcagtgtcctgctgtgccacttctctctggtgccgccttatcacctaggctccatcaccctgcggccgtatcacccgggtggccatatcaccctgcggccgtatcaccctgcggccgtaatcacccgggcagcatcaccctgcggccgtaatcacccggtggccatatcacctaggctccatcacccagcggccgtatcaccctggcggcatcaccctgcggccgtaatcacctggtggccgtatcacctaggctccatcacccggcggccatatcaccctggtggcatcaccctgcggctgtatcaccctgcggccgtaatcacccgggcggcatcaccctgcggccgtaatcacctggtggccgtatcacctaggctccatcacccggcggccatatcaccctggtggcatcaccctgcggctgtatcaccctgcggccgtaatcacccgggcggcatcaccttgcggccgtaatcaccctgcggccgtatcaccctgcggcctccctagtgccaaaaaggttgggggccgctgattgtgaacgagctgaggcagtgcagcgtgtgaaagaacagcataatcacaaactcagaaacgagggggcagcctcggcaaagatttgcaaataagaacaaaaacctttcagaatgaagactaatgtagaaggaactcaagaataaaaacatc

SEQ ID NO: 471764 - DNA, 1103 bp, Homo sapiens
gtctggagggaggcctgagcataagctggacatcctcatcatggatgatgacgacgtccccagctggcctcccaccaagctgtccccgccccagtctgcgcccccagccggcccgcctccccggccgcggccgcccgccccctacatctgcaacgagtgtggcaagagctttagccactggtccaagctgacgcggcaccagcgcacgcacaccggcgagcggcccaacgcctgcgccgactgcggcaagaccttctcgcagagctcgcacctggtgcagcaccggcgcatccacacgggcgagaagccctacgcctgcttggagtgcggcaagcgcttcagctggagctccaacctcatgcagcaccagcgcatccacacgggcgagaagccctacacctgccccgactgcggccgcagcttcactcagagcaagagcctggccaagcaccggcgctcgcacagcggcctcaagcccttcgtgtgcccgcgctgcggccgcggcttcagccagcccaagagcctcgcgcgtcacctgcggctgcacccggagctgtcggggcctggcgtggcggccaaggtgctggcggctagcgtccggcgggccaaggggcccgaagaggcggtggcggcggacggcgagatcgccatccccgtgggcgatggcgagggcatcatcgtggtgggcgcgccgggcgagggggccgcggccgcggcagccatggcgggcgcgggggcaaaggccgcggggccccggtcgcggcgcgccccggcccccaagccgtacgtgtgtctggagtgcgggaagggcttcgggcacggggccgggctcctggcgcaccagcgggcccagcacggggacgggctcggggcggcggggggcgaggagccggcccacatctgcgtggagtgcggggagggcttcgtgcagggcgccgcgctccggagacacaagaagatccacgcggtgggcgcgccctcggtctgcagcagctgcggacagagctactaccgcgcgggcggggaggaggaggacgacgacgacgacgaggccgcgggcgggcggtgccccgagtgccgcggtggggagggccggtagggga

SEQ ID NO: 471765 - DNA, 1774 bp, Homo sapiens
acagtgaacagggcctggggatcggaagccaccgaagccaaccatttacgtcagcttctgtgacacgcctgcagggacggggcatggagaatacagacctcgctgactgggatgttgaaggacaggtttttattcaaacacagaagacccctaaagtactgaactgtaaaaacctgtccaatagtaacaatctcaatgatggcagaatgaaatcagaatctgattggattaaaaaggagggaaagggtgtggctaaggtgggtggagacaccctctggtataaaagcccctggcaggcagctctcactccagatctgagctgtccgcagaagcagctggaggccaggggagaaactccagaaggagagacatttgccatggctgagcacttcaaacagatcattagatgtcctgtctgtctaaaagatcttgaagaagccgtgcaactgaaatgtggatatgcctgctgcctccagtgcctcaattcactccagaaggagcccgatggggaaggtttactgtgccgtttctgctctgtggtctctcagaaggatgacatcaagcccaagtacaagctgagggcgctggtttccatcatcaaggaactagagcccaagctgaaatctgttctaacaatgaacccaaggatgaggaagtttcaagtggatatgacgttcgatgtggacacagccaacaactatctcatcatttctgaagacctgaggagtttccgaagtggggatttgagccagaataggaaggagcaagctgagaggttcgacactgccctgtgcgtcctgggcacccctcgcttcacttccggccgccattactgggaggtggacgtgggcaccagccaagtgtgggatgtgggcgtgtgcaaggaatctgtgaaccgacaggggaagattgtgctttcttcagaacacggcttcttgactgtgggttgcagagaaggaaaggtctttgctgccagcactgtgcctatgactcctctctgggtgagtccccagttgcacagagtggggattttcctggatgtaggtatgaggtccattgccttttacaatgttagtgatgggtgccatatctacacattcatcgagattcctgtttgcgagccctggcgtccattttttgctcataaacgtggaagtcaagatgatcagagcatcctgagtatctgttctgtgatcaatccatccgctgccagtgccccagtttcttctgagggaaagtaaataaacatttgaacataatcatctttaggaagtttcagtgctcccatagccatagctaagaacttttccgctagatacacataggtacaaagggacagaagggaaagagccatcactctgtaaaccatgaacagaaagcaattatattaatgaggggaaaattacattgtacttaaagtttgtcatgttgttttctttggggcttatgtttatatttctgttcaataaatattttgaaaattcagattcatttgccaatcttttctattttctgcaagattagtttactatgtgttatggaagttatgaacgaaataataatttgaatgtgacccaacacagtaactgaatttcaaatgataaggacctatgaatacggcaaaattatatatgttcatgtattcagtttaacccaataactgaacactgacattcatttcaagtgcacactgagtgtttgccacgaatatgtgtggtcttagagagaactcgttagctttaaaattgaaatacaatacaccctctcctatgac

SEQ ID NO: 471766 - DNA, 1954 bp, Homo sapiens
accactgtctgaatagaagccagcggagctgctttctgtgaaaagatgcaattggaaaagatgtggaaagtatctaacagccaaaccaaccccaccagtattaaaaaggagggaaagggtgtggctaaggtgggtggagagaccctctcgtataaaagcccatggcaggcagctctcactccagatctgagctgtccgcagaagcagctggaggccaggggagaaactccagaaggagagacatttgccatggctgagcacttcaaacagatcattagatgtcctgtctgtctaaaagatcttgaagaagccgtgcaactgaaatgtggatatgcctgctgcctccagtgcctcaattcactccagagggagcccaatggggaaggtttactgtgccgtttctgctctgtggtctctcagaaggatgacatcaagcccaagtacaagctgagggcgctggtttccatcatcaaggaactagagcccaagctgaaatctgttctaacaatgaacccaaggatgaggaagtttcaagtggatatgacgttcgatgtggacacagccaacaactatctcatcatttctgaagacctgaggagtttccgaagtggggatttgagccagaataggaaggagcaagctgagaggttcgacactaccctgtgcgtcctgggcacccctcgcttcacttccggccgccattactgggaggtggacgtgggcaccagccaagtgtgggatgtgggcgtgtgcaaggaatctgtcaaccgacaggggaagattgagctttcttcagaacacggcttcttgactgtgggttgcagagaaggaaaggtctttgctgccagcactgtgcctatgactcctctctgggtgagtccccagttgcacagagtggggattttcctggatgtaggtatgaggtccattgccttttacaatgttagtgatgggtgccatatctacacattcatcgagattcctgtttgcgagccctggcgtccattttttgctcataaacgtggaagtcaagatgatcagagcatcctgagtatctgttctgtgatcaatccatccactgccagtgccccagtttcttctgagggaaagtaaataaacatttgaacataatcatctttaggaagtttcagtgcccccatagccatagctaagaacttttccgctagatacacataggtacaaagggacagaagggaaagagccatcactctgtaaaccatgaacagaaagcaattatattaatgaggggaaaattacattgtacttaaagtttgtcatgttgttttctttggggcttatgtttatatttctgttcaataaatattttgaaaattcagattcatttgccaatcttttctattttctgcaagattagtgtactgtgtgttatggaagttatgaacgaaataataatttgaatgttacccaacacagtaactgaatttcaaatgataaggacctatgaatacggcaaaattatatatgttcatgtattcagtttaacccaataactgaacactgacattcatttcaagtgcacactgagtgtttgccacgaatatgtgtggtcttagagagaactcgttagctttaaaattgaaatacaatacaccctctcctatgacggcaacagagtcaaattggaaatcaataacaggaagaaatccataaattctccacatatatgcaaattaaataaccacttctaaataaaatgatcaaatatgaaattacaatggaaattacagctatcctgagttgaatgaaaagcacacatttacaaaatttctagatgcggttgaagctcagtgagaaactcataataggaagaaaatatcgtaatcaatcaccttaatttctacttgaacttacttcactaagagcaattgaaattgtcagcattttgatcaaaaccatctgacaagtatctggg

SEQ ID NO: 471767 - DNA, 2618 bp, Homo sapiens
gaagccagttccatgtcgtgtcagcacagggctcttggggcggggctagcgtagcgtgggaggtgacaggtgtgggcaccccggtgtgggcgtggcccgcaaatgcggtggggacggggccgtgggcggggcatcacagtaggtgtggcctgtctcacgttccgcccctccccacgcagcacgctgagcgccgacgcgggtcccgagtgctatgagctgcaggtgtgcgtcaaggactactgcttcgcgcgcgaggaccgcacggtggggctggccgtgctgcagctgcgtgagctggcccagcgcgggagcgccgcctgctggctgccgctcggccgccgcatccacatggacgacacgggcctcacggtgctgcgaatcctctcgcagcgcagcaacgacgaggtggccaaggagttcgtgaagctcaagtcggacacgcgctccgccgaggagggcggcctggggaacagcacgtgcgaaggccaggagagaagaactgttgaaacaacgagaagggtggcacggctggagctgagccagcaagggggatcgtgaggagccttggggttggggagatctgcagaagcatcagaccaggcagggcctcacaggtgcaggtaactggaggttctgaaccaaaggttaaaatgcaaattctcatacagggttgggaagttgtagccagggataagcttatgtgactgttatatggactgaggagcagatgtgaatttcgaaccatgacatggctgagggtaggggtcgggtggatggatgattcagggttgtaacccatagagcccaaaggggaagtgatctgtgacctggggtgagggtgatctggaagatttttggatggctggaaagaaatggggaagtcgagctgcctgagagagccaagttatttcccaaaagattccttaggagtctttctgttcaagacctccgtgtgtgtgtgtgtgtgtttagggttccccagcaatggcccaggcatgtgaaggaaacaagcttcttcagggaatatttgttgaatgagttttcctgactcccaggctagaactgtttttgcaatttccaccctcttttctttcccccagagaactcctattcgtccttcaaaacccatcacggaaacccctcttggagaaaaccctccttccttcccctcaggactttcccagccaccgtctctcctccagtccagcctgatgccatgggactgggggtttctctgtccagctctgtttctcccagactggggtctgaggactctcaggacccccaactttacctagcacaggctgggcacaagtgggtgacagggagtctacgcctagtggaattatgtattggggcagggtcagtgtgagaatacacatccgcatgcatgtctgtccatgtctgtccgtaccaaccttccccttccacacggacctgggcacataggaggtgtctgagcctgacacatgggacagagagtggacatggctgagacacggacagagaaaagacaaggagtccagggggctgaaagccttttgaaatcaggaagttcctgtattggcagaacaaagcccagagaggagcagggctttcctcaacgccacccagcaagtggacacagagcccggccttggatgacacctccagggttctgaaccctggacctcgctttatgcaaggagctggccccacatttccatgaatcggggaaacagcacaagaaggttggcctgtggcagggcaagggttaaaggggtgacattgagggatgcctcagagtcaaagtcccctgaccaagaggaatagagtagaaaacacagagacagagggtgagatcacgccccgatgaggacggagagagacagagatggagagagacatagaggtggaaatatacagagaaagataaatgcagagaccaaggcagggagtgtcgggggaagtaaagaggggccttagtcccggatcacaaccccgtctgctccccagaatcctttcctaagaatcgttgaggaccaaagttgtctttgctgacacgtgttgcttttctctttgccttttattgtttcagagaaaaatcaagttgactgtgtcaagtaacaccccaccccttacccccgtccagccatagtggctctctggagacacaggtcacaggcggagggtcccctgatcatccccaaccacacagccagggggacttgacccctgtccacccctgtctcgtgctccctcagacccccacaaaccggccaagcagtccggggaggcttcccctccacacaactcttagcatgtgattgcagatgtgaaatcaaaacgttgtttgttttttgttttgttttgattctaccccgtcggtccagtgtctgcacagacgccttcatttctctgtaaatatgtgacttggaacaaatgtttaacacaaacgagaagtggtcatgaatgcatggtgttgagatgttttgcactattctgactttttggtctctgtaaaaatattttattaacagcagacattaaaaaaagaaaaaccacacacagccttggacacgtggttgcctcctccttgcattcctttatcagcaaaaaaacaaaaacaaaaacctcac

SEQ ID NO: 471768 - DNA, 797 bp, Homo sapiens
tcctgggagcctggagcttaccagagatgggggcccagggaccaaccccatcctgcgcctacttgtcctgcttcgccccgtccccacctatccacagacaatacgccctctcagcccagaaccgcttccctttcagacttggttccgcccctcacgccaggaccacgcccctccgattccgggcccgccccaatccttggtttctggtcccggccccgcccctccgcagacctggccccgccccgccccccgcgtctcggtttcccgggcctgcgcgcgcggctcccgtcactcgaacgcgcgacggcggggggaagatggcggagtccggcggtagcagcggtggtgctggtggcggcggcgctttcggcgcgggcccgggccccgagcgcccgaacagccccggggacatcctgatctgctttcactctctgtagctttgccttttctagaaatttcgtaagaatggaatcagacatgtggcctttacgtctggtttctttccttaacataatgtttttgaagttcatctgtgttgttgtatcagaaatttgttctttttcactgtggagtgaaaataaacaaactgtgtccgtccatacaatctcgtatggacggacacagtttgtttatccattaactggttgatggactgttgggttgtttccattttgacaactgcaaataaagttgctgtgaacatctggatatgtgtctctgtgtggacgtatattttcatcctcttgggtaaatacttaagagtagaatgactagttcatatggtagatgtgtttaaa

SEQ ID NO: 471769 - DNA, 1079 bp, Homo sapiens
agggacatctgggccctcagtgtccctctgtgtctttcagcccagggggcggtctcatcatcatcgacagcatgccagacatccgcaagaggaaacctatcccactcgtgagcgacttgtccctggtccagtccaggaaagcgggcatcacctcggccttggcctccagcacgttgaacaacgaggagctgaaaaaccacgtttacaagaagaccctgcaagccttaatctaccccatctcgtgcacgacgccacacaacttcgaagtgtggacggccaccacgcccacctactgctacgagtgcgaggggctgctgtggggcatcgcgaggcagggcatgcgctgcaccgagtgcggtgtcaagtgccacgagaagtgccaggacctgctcaacgccgactgcctgcagcgggctgcggagaagagctccaagcacggggcggaggaccggacacagaacatcatcatggtgctcaaggaccgcatgaagatccgggagcgcaacaagcccgagatcttcgagctcatccaggagatcttcgcggtgaccaagacggcgcacacgcagcagatgaaggcggtcaagcagagcgtgctggacggcacgtccaagtggtccgccaagatcagcatcaccgtggtctgcgcccagggcttgcaggcaaaggacaagacaggatccagtgacccctatgtcaccgtccaggtcgggaagaccaagaaacggacaaaaaccatctatgggaacctcaacccggtgtgggaggagaatttccactttgaatgtcacaattcctccgaccgcatcaaggtgcgcgtctgggacgaggatgacgacatcaaatcccgcgtgaaacagaggttcaagagggaatctgacgatttcctggggcagacgatcattgaggtgcggacgctcagcggcgagatggacgtgtggtacaacctgggtgagagaagctgggaggagtttggtcgaggagcataatctgatgggggaggcagggtctaggagcccagtttgatgggagcaggaagcacccaggccaggagggtgagcagagcccaggaacctctt

SEQ ID NO: 471770 - DNA, 2977 bp, Homo sapiens
gataggtccggaaggatccacgtggactccccctacctcccaccctcacccccacacccctgtcaccctcgggctggatctccggggcctgcttcaaacggcctgggaggacccccatcaccaccctaggaaggaaaactgcagcccatggctaacctgtccccattggcacttccttgcagctgctgggatggaggcagcctggacttccggccgggctccccaccaccccatctcctgggccatttcccaggtacccctgatggccgggggccctgggagcacccccttgtccaggaggctggggagggcatcctatctgagcggagattcgaggactcagtcattgtgagaaccatgaaaccccacgctgagctagagggctctagaaggttcttacaccaccggggggaaccaaggcttttggagaaacatgcccagggccgccccaggttcgactggctccaagatgaggacgagcagggatccccccaggacgcagggctgcacttggacctgcctgcccagccgccacccctcgcccccttcaggagggtgtttgtgccagtggaagacaccccgaagacgctggacatggcggtggtgggtggcagagaagatctggaggacctggaggggctggcccagccgtccgagtggggcctacccacgtcagcctcggaggtagccacacagacctggacagtgaactcggaggcttctgtggagcggctgcagccgctactgcccccgatccggaccgggccctacctgtgtgagctgctggaggaggtggccgaaggggtggccagcccagatgaggacgaggacgaggagccggccgtgttcccatgcatcgagtgcagcatctacttcaagcagaaggagcacctcctggagcacatgagccagcaccgccgagccccgggccaggagccccctgcggacctggccccgctggcctgcggggagtgtggctgggcctttgctgaccccactgccctggagcagcaccggcagctgcatcaggcctcccgggagaagatcattgaggagatccaaaagctgaagcaagttccaggagacgagggccgggaggcacggctgcagtgccctaagtgtgtctttggcaccaattcatccagggcctatgtgcagcatgccaagctgcacatgcgtgagcccccaggccagaccaccaaagagccttttggaggcagcagcggggctggcagccccagccctgaggccagcgccctcctctatcagccctacggagctgccgttggcctcagcgcctgtgtcttctgtggtttccccgcgcccagcgagagcctgctcagggagcacgtgaggctggtgcatgcccatccccactgggaggaggatggcgaggcttatgaggaagaccctgccagccagccaggcactagccaggatgctcacgcctgcttccctgacactgctgtggactactttggcaaagctgagccgtccttggcccccatgtggcgggagaaccctgctggatacgaccccagcctggcctttggcccaggatgccagcagctgagcatcagagatttcccgctgtcaaagccactcctgcatggcacgggccagaggcctctcggaaggctggcctttccctccacactagcatccaccccctactccttacagctcgggagaaacaaaagcaccgtccacccacaagggctgggggaacggaggcgcccttggagcgaagaggaggaggaggaggaggaggaggaggatgtagtgctgacctccgagatggatttttcccctgaaaatggggtcttttcacccctagccacccccagcctcatcccgcaggcggccctggagctgaagcaggcattccgagaggccctgcaggcagtagaggccacccaggggcagcagcagcagctccgagggatggtacccattgtgctcgtggcgaagctggggccgcaggtcatggcggcagccagggtgcccccaaggttgcagcccgaggagctggggctggcaggcgcccaccccctggacttcctgctcctggacgcgccgctgggcggcccgctggggctggacacactcctggatggggatccggccatggcactgaagcacgaggagcggaaatgcccctactgccccgatcgcttccacaacggcatcggcttggccaaccacgtccggggccacctgaaccgcgtgggcgtcagctacaatgtgcgccatttcatctccgctgaggaggtgaaggccattgagcgcaggttctccttccagaagaagaagaaaaaagtggccaactttgacccaggcaccttcagcctgatgcgctgtgacttctgcggggctggcttcgacacacgggccggcctctccagccacgcccgggcccacctacgtgacttcggtatcaccaactgggagctcactgtctcacccatcaacatcctgcaggagctgctggccacctctgctgctgagcagccccccagccccctgggccgagagcctgggggtccgcctggcagcttcctgacctcccgtcggccccgcttacctctcacggtgccctttccacccacctgggctgaggaccctgggccagcctatggagatggggcccagagcattggaggggcggggctggaggggcagccgctcagctttcctggaagcattttgagtcactttacaaagtatgttgatgactttccttacaaccaccctgctatttagattctttgctgttaatgacatcttctatcttgagaagcattgttgtatagaactttctgagatgatggctggaaatattctctagatatctgcacgtcttacagggacaccattggtcatgtatggctgttaagaagttgaaatgaagctagtgccaggctagtggggatcctattggatagtgcagatctagagtctagattttctttttttt

SEQ ID NO: 471771 - DNA, 639 bp, Homo sapiens
tgcagccctcggaatgagtgagactctgcccaatcgacgcgatcgtcttccccagaagacccccgcctccctcccgccggcggccgcggaggcggaagaaggcgcctttcccctttgcctgggcccctccggtcactcggacaaccgctacccgttccggtcaaccatcaacccgtcccccgtcaccccggcaaccatcgccggacccacctacccctggacgccgtcctggtcctgtccgcaggcctcctcgccccaaacctccgccgcgggctccgacgtccgcgaccccacgtctcaggggctccctcctcctcctgcccgtcttctcgcctccccggggcggggggcattgctcctcccctggcaggggggccccgggttggacccggctctgggggtccctgctcggtcgggacagtgggaccgccctgtgctgtggccgcgcgcagccccccgcaggcttcggcgctcgcactcttgcgtgggactgtccaaccgccacagggagctcttcaaaatgcaagccatgtcccttccctgctgaaaaccctcccctggctccccttgagaatcgaatccaagctcctcgcagcccctggcgatctggctgtgtggcctcttctctgaagcctcctc

SEQ ID NO: 471772 - DNA, 552 bp, Homo sapiens
ctccctctgttcctgtggaaagaatggggaccctgagaggcctggagcccagccctggaggaacttccagtctggggaagaaaaagctagacgcacacacacccagtgtggagggctcagggctgggccagagaaaggcatggaatctgggaagggcctggggtacacgggtggtgggccctgggctccggaccacagcaaccttccatgcccatggcctcaccctggatcttatctcctcttgctcacctctgaactgtgatattctgatgtcccctaactcagtggcctccaacctctttggcaccagggactggttttgtgaaagacaatttttccacggaccgggatgttcttgtcctccagtttccggtgggtttggacaactggaggcactagcagaagatcttaagagcctctctgccccacaatacaccgatgcttgctgggctatttttgtctttagcccataacatgcttctaagtccctaccccgggatccagcgccgtcagactgaatatatcccaaacctgcctctgtaccttctcagc

SEQ ID NO: 471773 - DNA, 1402 bp, Homo sapiens
gtgtggttcgggtttccttccagcatggtggtcttgggtcccagtggtttgttctagtttatctgcctcctcgtccagactgggtctccaccaagtgatcaagtgatgcttgtctatgttgttcactgctgaatattcaggcctgatacgctgtgcttttggtacctggtgggttaaccacccgcaggcacatacagacccattcgttgaaagacaaaatgcaggtggagggaccggtcaggtttgggcagagctcagcacttctgtggcagtcatggacagtgacaccacagtgaggtgtaagccacaggtggagaaggctttccacttgccccgagtagaagggatcttaaagactgtccagaaaatgcggatgtacgagagaaggatgcaggagaatgggctggtgcccacgacaatgccaaaagcaaagatcaccagctcgttggtgtgcgtgtctgagccggagagcttcagcaggggcatgaggtcacagaagaagtgggagatttcagagccggcgcagaagcagcagcccacagacaggggagcacatgagaaccaagtaacgctgtgggtggacaatggccacgaagcggtcgatggccattactgccaggagaaagctgtccatggtcccgaacaggtggaaggcatacatctggaggatgctggtgcttctagcccagggaccacacttggggagctgctgcattggagaaacttgtttctcaagacctctcctatctgtgcaggtgtcctgcagctgcagaccctcagtgcttttcctccacatatcctgccacagagggtctgccgatggcatcaccaaggggagggtcccgggaagcctccttctccaccaactgctagaggatcccgaggtcagcactaaacccctaggaagggcatgggggctactcacctgtgatcgctggggttagcctgatgtctatgggaaggattcatatgtgtacccccccgcccccagactctgcaggtgtgaggtgatacgtcattgacatcaaaattagtattgatagcaaaattggaatttttggaaagatattaggataggggttgtcaaaccttctctgtaaggggccaaatagtaaatagtttcagctttgtgggccatatgctgtctgttctaactactcaactctaccattgtaggttgaaggcagccgtagccagtatgtaagtgaataaacatgcctgtgtgccagcaaagctttgttgataaaaacaaactgcagactggatctggtgagtgagacacagttttctgaccctcatgtttggagactcccagaatcattgggtgtttggaccgcaggttggcatgtaagtaagtgtatagagctcagtgcatgcatcaccccagatctcttggcccttc

SEQ ID NO: 471774 - DNA, 636 bp, Homo sapiens
gaaatgtccgtggcttcacctctacccagcagatccctgacaagaatgtctcttgtggttcaccctaaccagaaaacacaggcatctagggaaaaagattctgggaagtgtagtttaacctggccaagtacctacgaggctagtgactggacactggaatggtacagccaaaaaaactcaacactttcaccatcctatgagctcacagcaaacagcaaatggcacagaaagatggtctcttttggtcttccaagtcttctgcgagggcctctaattcgcagagctgaatccacacccaaaaccacatctttgagcgcatctgggaaacatataaaaactctggacgccaaggctcgagtgggtttccctgattggcaacactctgcgtgtactgtcccacatgggtgcccgcagaagacagcgctgggaggagacagctggaagctttgcacttgggacattcctggatgcttccgcatgtgtctctgtcctcggctggctttcatctgtttcctttcactataataaaccctaactgtgagtctgagagcattcgagcccactaaactgatttagtaacccatgaatgggctatgacctgaagttgtgaaacactgttatgtaagccctgtgacc

SEQ ID NO: 471775 - DNA, 757 bp, Homo sapiens
gttacctggcacacaggtatcctcacctgcatgacatgatcagatcatgcactttctatgccagggccagtgccagggcaagcttgtatcttcagctttggggacactgtggggcgggtggtggctggaggccagggaagtcaccaggctggagagggttgatgtcagacatctcccaggccagggccctagagctcctggacagggagtttgcaggaacagtgatgcagcatacaacacagcacaactcgacacaacacaatctgccacagcagagcagcgtgcggtgcactgggctgcagcagagcatggcccagggtccagggagtcatgacacaccatataaacgtatcttaggtgatgactgtgacgcaaacctcacaatacccctgcagttcaagaaaggtcatggcaaccgctgatcagctttatgtcagtatagattaatttgcttcatgtaaattcaatcatacagtatggaatgttattatttcttcagagagtgttgtccttctggttcatctgtgtcatgtgtatgaatagtttataccttttttgaatgttaaatttaaaaaactacatacggtgatactcactatttttgatatcttggaggaacagctttgtacttttccctattcactatgatgtgaataggctgtgggcttgccatacatcgatttattgtgttgggctacattccttctatactcagtttgttaagagtttttaccatgaaggactgttgaattttatc

SEQ ID NO: 471776 - DNA, 536 bp, Homo sapiens
ccctcctgctcccccagaatctccccttgcctcctcaactacatctcctgtggcgtccccatctattgcctcctgattgtggccatggcaggaggagatgattttcaccggtatctccttgtgggcctcaagggagccgctcaaaaacccataaatctgtctgagacaactgaagttgtccaggggcctgatgaacctggaacacttttagaaagtctccaggaggcctatcaaacttacaccccttttgacccggcagctcccaagaatagccgtgctattaatttggtgtttgtggctcaggcagctactgatagtaaaagaaaattacaaaagccggagggatttgctggaatgaacaatagccagcttttagaagtagcccagaaagtttttgacaatcgagagtctgaaaaacgaaaacaggcagctgaggcagctgaaaaagctgctgataaagcatccaaaagacaagcaaaaatcttagtggtggccatccaggaagccaaaaagtaagggcccccatcacagaggaa

SEQ ID NO: 471777 - DNA, 936 bp, Homo sapiens
ctgactgtcaatatgccttccatatcctgcaccaccatgctcctgctgcatttggggggcattgctttgccctatgaactcaattctctgaagaatttaagaagggctattgattttcagtttgttcaaccttttgttgttgtgaggatgggagtaacaagctctttacatgctggaatggaaaccagaagtctagatctatattttctatttctcgttatcaagttctctttcccctatacttttgtcaatatctccttttcatgtggaaattttcagaagctttcacaagccaagctggagcttctatcccagggctacataatagaggccaggtaccagacagctagggatgacccctattccctgaaacctgtgaaattgttcaaactcatcaatccacagggagcctgaaacctaactagctccactaaccctgcttgccatacataagcagccctctacagttattccttactgttaccctgtccctgggtgcaaccccctgcatacccttgcctgacagccttctcccctttggagctgattttacccttccaagcccctcgagttctgtttctaaccagtcacataaataatgactaattgtcaatgagtaattttgtatagtactattatttttactaaaataaatttttaagggagaagtaaagctgcaaataattaagcaatttgtttatacattgggatccaccaccttccagaaagtcacattcttctcagtgtaagtgttgtgtcaaaaataaaaacgagttacaaagcaaaattaaattatatatatttacatacatatgtatatatatgtaaatatataaatgaatatatataaatatattcatttatatatttatatatttacatatatatatatatatatatatatatatatatatatatatatatgtatatatattt

SEQ ID NO: 471778 - DNA, 642 bp, Homo sapiens
aaactatcgcccgaggttacttagaagatggaaagtatttctgatgaactgttgtatttggataagggaacctccagacataatgctggctgctcatgtggctgagtatgataatgcataccaagagtgggagattctgagtggggagggaatttgtgttggtgtaagtgtgtgccccacaagggaaggacctgcccaacacaccgtgtgctttgccctcagcaaggagccacagctgcaggtggatttccacaccgggatggatgaggactcagacatcgctttccatttccgagtgcactttggtcattgtgtggccatgaacagccatgagtggggggtctggaagtgtgaggtgaaatctgacaatatgccctttgagggtggccaatcatttgacctgcgcatctgagtgctggacaaggaggaccagggtgctgtattaagctttctaatcaactcttttgtaattatcaacctaccaatacttacattggaggatacttgcaaagacataaaataattggttgaaaattgtgtgaaaaatcttaaaatttcataaattaatacctttaagatgactttcttcatagctacagcaatacagattatattgaaattttctcaccttctctaacgggt

SEQ ID NO: 471779 - DNA, 784 bp, Homo sapiens
tgttgcgcctcatgtcctacttccatgaaactgatgctggctgcctgtgctggaggacttccctataccttcccagctgcctgagaggaagcgatgacctaggccaggctttccacagctataagccccgactccccacttctagtaggtcacacaacagtatcctcaccagcttcccgggcctacccaaaatcagcgtcagcatcaagacaagtggttctccactgggtgcacccaagagtcaaccagggagctttaaatctccagggataggacctgggcttcacattatttttagaaaggccctgggggattctaacacaaagctagggacatattcacctaggtcagctctgtgctacctgatctatctgagcaggaagcagacaactgggcagctctgacccacacccaaggtctccctggagaactggaggaagtactaagctgggggttgtcggcttggcctctggatttcccaggtcttagagtcagaggttggccctgccagtcatttgctggggaacctgggggcatggcggctactcttctctgagcctcagtttcctcctttggaaaacgggtttaataaccacctcttcctacctcataaggtgagaacagtgagagcaggtgtatgagacacaggcacgggtcctggcacactgtttaaagtgccaagaactgttagctactatcattgttactgccctggctccaggcctggtgttggcagtggcatctcacccctggttttctgcctgcttctctggctgctctaggt

SEQ ID NO: 471780 - DNA, 1203 bp, Homo sapiens
agccagtgcctctcaagagcagggcttgggggctcggccacaacccagcgctattccctccccagccctcctgcctgttcacacctgcactggggccaggtcttctccaccctcaatgtacccctgggcaggccccgggccttgctggctcacccctgacaacacagggtgccctgtgactgcagccgtgaaaccatctccaagtggcagtgggtgtgtgggctccgcaatggtggtttctgacctttccagggctggcagaaggatggggaggaggaagacaagggacgggagcaacctccgctggctggcactggaggactcaggcagtggcctcaactccaaggactcctcctggggagtgtggtggggacactgggggtccctccctgaggcacaggggatgtggccctggccggctgcgcagcttccttctctcaaccctggaaatccagccagctgttcagctccccggtggggccacttgagcctcccaggaggacctaaggaagatttctaacctctctggatgctctctcaggttccaggtcccccatcatcagcctctctctgtgtggcctcctggcagctccggtcaccaggtttcgggggggacaacgagggggtctcagcctatcaccacctccctccaaagatgccatctccctcctttttgcgtgtgatcgcttcacccatgggagattcacacctacttgctctgcccgatggagagggtgccagctgctgcaccccccacagtcttctcccacctcctctctctgcctttctcccaccccacctagatggcaccaagcggcagccccagatgcatctcccgttctatgacagccccgttccctgggcttctgagatgtatggaaaatgctccaacatcctcctcacccccactcccacgatcacccacaccctgatggcttttcatcttccccacccctgggcttttgcttatacagactgggctgggctgggagatagctggggacagcaaagcccatgaagctgcctcttattccctcttataaacctgggggaggagggagactccagctcttcatggctctctttcgactgtgaggttttcagtttttctgttctctgccttggggtggcggtgcccattctgaagttgcaggattccatggcacctttgtcccctttctgagccatgaacacccctacctg

SEQ ID NO: 471781 - DNA, 489 bp, Homo sapiens
catacagccggccggatcatgtggcagtcaggtggcgaccactatctagcccaacgagcgcgcccgctgccctcagaccccatccaccccacggaccccacagacgctgagccgactgagccgcagcccacagatgccctcgcagccctttcgcgcttcccagtggagctgggctccaagagggatctagacacccaggtgggccgtctgcaccacctggctgtggctgggggcccaggatggggcccggccaggctcctgcggagaggtgagggcctggctgcaggtacatctgtggcggcaggatcaaggagctgtatggagggtgtggcttcagttggccagtcagcagtggtaccgaacaccgactgtgtcccgagctctgtggtccctgatggggctttaagggtgaacatgacccttggaccattgggaatgaaatgcagtgggatgaggatgagaccctagacagtatggcctttcaggtgg

SEQ ID NO: 471782 - DNA, 1538 bp, Homo sapiens
gactttggagaaaatgttccctcagggttatggtaatataagaggagactcccacctccacaccccatgtacttcttcctctccaacctgtcctttgcggacatctgtttcatctctactacaatcccaaagatgctcgtaaacatccagacacagagcagagtcatcacttatgcaggctgcatcacccagatgtgcttttttgtactcttagaagcactggacagcttactcctgaccgtgatggcctatgaccagtttgtggccatctgtcaccccctgcactacatggtcatcatgagcccctggttctgtggactgctggttctggcatcctggatcatcatgagcccctggctctgtggactgctggttctggcattctggattatcagtgatctggattcctcattacatagcttgatggtgctgtcactgcccttctgcacagatttccaaattccacattttgtctatgaacttaatcaggtcatccgccttgccggttctgatacctttcttaatgacatggcgatgtattttgcagtagggccactgggtggagttcccctcgctgggatcctgtacttgtactgtaagatagttttctccatacgtgcaatctcatcagctcaggggaagtacaaggcattttccacctgtgcatctcatctctcagttgtctccttattttatggtaggagcctaggggtgtactttagttctgctcctacccaaaactctcactcaggtgctgcagcttcagtgatgtacactgtggtcacccccatgctgaaccccttcatctgcagtctgaggaataaagacataaagagagctctgaatcaattcatcagggtagtgccattcttcaggaagtgacagtgatcccagagctctaagccttggactgagaaattgtgatttgtgaaccagattctggaaggaccagtgcttgactccttcctgctgtcttgtctggcgacagagtttcagtctccaccatcaaccattcagagaagaatttgaattcccacacagagactttcctctgagagatcccatccaggtctttgcgactatatttatccacattgaaatcattaaattactgctatttcgtgtctcgtttcggttcattactgatgcttcttttgattttatttaatatattgttattttgaaaccactatatttaaactgattttattctcttgccattcttttcatctcattacttctcattttcttaaaacgtgtttctatacgatgcacatgtattcacatacatttgtgaaaacacaaaagtgaacaaagcaagttaagtccccactcatttatatttggcatgagaatggtgaagacagaatacaatgaaataaatgtgtgtatgacacgatgtcctcagggattaattgcatgaagaaggcatttcagtgtaaaaggacttgtcacagtgtgcacagaattttacgtaataatatcagcgaagcctttgcatgttgcaaaaagaccagaaccagaactagagcgtgccc

SEQ ID NO: 471783 - DNA, 1930 bp, Homo sapiens
ggctgtctctctctcgttgtcactctttctaccttacacgtatgttacaggaaaaggctacaatggctgaagctaggcagcaaagtgggagagtgaggataggtcttgctgtaccccaagccctatttctgtccccatgggcactcacctgtgatgcctgccatctgaaggcagtagtgattatcctctgggcatggaagggggccacagctgtggaggtctcagcaggtgaagcagtcggtggtctcagctttggtgtgggtcacagttgcatgaggacctggggacagaggaagatgaactggatggaagacaaccagtgtgcatgcacgtgcatggagctgagtttccaggcacatcagtatgtgcccatgagtgcgcaaaagtgccttttgtgcgcacttctgcaagaatgccatttgtgtgtgcaagtttgcaggcctgttaagtctgtgtgcacatctggctgtgccttcctgtgttgaattgtctgtgtgtttctgaaactgtctgcaggaggtcagggatgtgtgtttttgtagctctgcaggacactgtgtgagtaggtgtttacctgcgtgtctgtataaacaaaggcgtgtgtttatgtgtatgtgtataaggctggttttatgggtatgtgtgtgtttctgtggctgggtgtgtctgtgtttccatcaaggtgtgggggtgcttgtatatatatatatgttggtatacagatgtgaacgttcatggatgttggtaatgtatttcagcttgcctgtgtatattttgtgcttttgtatgtttgtgggtgtttatgcctgtctctttcccatgtcatatatatgaaagcctgtgtgtccatgcatagatatgttctgtgtctgtgtccacagggatcatgtgtgcaaaaattccgcgtcccacatttctgttgttagtcttcctattttgccctttttctttccatcttgtaaatttcgagctcccaagaaatgtggacaccctgggaacacataggtttgaaaagagcataggggatccagggaggtaagaaaggttgggtttttaggaaggcaggggtcaaagcacctggatgtgtaggagtaaggcagttgcattcaggcttagcggtgagatgaaatccagagtcttctggacccagggtggcattctcatgtaagttgcagacctctggtgtagcacagcccttcagaatttggggaccccctgtggaaatgagatgagattgcaacaagaggctcagagtccaagccttccaacttgatgtctatctttcgctatctgaaagttgccatcttagtagttctatatgattcagtttcaaatctacctggtcagtttttacaacctcttgttgcctgctcacatttgtgattctaagtttattccttcagacatatcacgtgccggtacgctatgttctacagctgataattacaatagctgagctcctcacaggtctgtatctgtgatttgttatttctgctatcactcatggtggcttgtttccttgtgcgtttcatgaactatgattgtgagctcatatttggttgatattcatctgtgggaatcctgggagcttttccctgggaaggaattgcttttgattctactgagtgccaggaggtgctactgaccagggatcattttggcttctgtccgaggtcccttgcttatgtgggaatctaaattccagaagcatgctgccagcccaagacctgtttacctaaagcaggttattatcagcatttgctcccaggccaccatgccttccatgttttctcactgctcccattatgatttctgttcacatttttgttttgcttagggacacgtggacattttcttaactttctgcaaccccaaaaagtgtggaaaaatatttctgtacaggatcttgtttatctgtaaacagtggcat

SEQ ID NO: 471784 - DNA, 970 bp, Homo sapiens
tgaagtctggctgctcttcccccttaatttgtgccctcatgaagaagttctcattgcaagtgcgaaggatgcagcgagagatcaaacttgggcctgtagccccgcagcttgacgctctgctggttaataagcagacccttgcgcacttcgctgagcctgtggtcggtgacctcgcgctggcgcagcagctgtcgcacccgcccgttaatctggtgctgcgcgcggccgaggcgggcggcggtgaggcgcgctccacgcgcgtgcgcgtgcaccacctcggtggtctgcagggcgcgcgctttgcgcgtgacgccctcgcctggcggcggcttctccaaggtgccgccgcctttgatcatctccacgcggaagcgccagggctggatgtaggcggcgcggccgaggtggtgggccacgttcgggtccagcacgctgtccttgggctgccacatggtcaccgcctcctgcccgcagcgatcggtcagaatgtgcgcggtcctcgccatggcctgagctgcctcgcgccatgctggggccccaacgcgtgtgtcctggctgcgctcagccggggcaacatggcccttcttccagctttaggatgtcctaagcgcttccagctgtccaggtcacactctgtcgcatgtcgcacatggcccttctttcagcttcagggtgtccgaagcgccttcacacttggaagcttgggacttgctgttcccacagtgattcacctgcgtgtgtctgaacagaaacagtgatgttcaaaaaatctacagaaacattatgtacacaagaccgaggactaggaaaatttttcagtactctccaagcctaaatacctctcttaaactaacaaataagctatgaaagcaaggtaattatcagagacccctttttaggttccccgatgtcttcccttctgggacaccaggttctacttttagtaggtgcccctctttctcttggagat

SEQ ID NO: 471785 - DNA, 505 bp, Homo sapiens
ttcatttgcacgtatagaccacattttgtttattcattcacgatggatggacactgggcttgtttccaacttttagctattataaataatgctgctatgaacaaacacaggcaaatatctgctggggtccctgctttccattctttttggaatacaccaaaagctgaattgctgcattttgtgttccctacggataaacatcagggtcgttcctggtctgtggccatcaaaaacactgctgtgactagtctagaatgggtgccatttcatgcatttgcaattcccagaagtacactggttagtcagcaggtgagtgcattggtgagaggatgtgactccagtctcaggaaatacggaaaccttcttccctttctagctgcagcacccccagtctggacagcatatggaaagcacccatgatcatttgaaaatcacaaaataactctaaatttctgcacaaggccagtgagtcctaacatgtttgaacatctacccatgctattta

SEQ ID NO: 471786 - DNA, 558 bp, Homo sapiens
gtatgttaccatcatcaaagaccaaaggtagacaaaaaccacaaagatggggagaaaccagagcagaaaagctgaaaattctaaaaatcagagtgcctcttctcctccaaaggaacgcagctcctcaccatcagtggaacaaagctggatggagaatgactttgatgaaataaatagtgtagagaagtccttaaatgacctgatggagcttaaaaccatagcacaagaactacgtgatgcatgcacaagcttcaatagcagatttgataaagtggaagaaagggtatcagagattgaagatcaaatgaatgaaatgaagcgagaagagaagtttagagaaaaaagattaaaaagaaatgaacaaagcctccaagaaatatgggactatgtgaaaagaccaaatctacgtctgattggtgtacctgaaagtgacggggagaatggaaccaagttggaaaaccctcttcaggatattatccaggagaatttccccaacctagcaagtcaggccaacattgaaattcaggaaatacagagaacgccataaagatactcctc

SEQ ID NO: 471787 - DNA, 539 bp, Homo sapiens
aggagccggagggtggggcagatggggcgcttccggaaccctccccgactcgcgagtgggcggcgccggcggcggagcgtggggcgcgctccctggattttccctgattattatgttaactgcttggagagttagtcttgttctcaccctcacactctgtgtcttacaattttttccctatggcactgttggaggtgcagacatgaggtcgattatattcaagaatcatgcttggggaagggaggagaaacaagataaaggggctttgactcaggactccttcagtccactatcacaagaaaaaggagatttccaaagtattcagaccagatctctaattcagtgggtacatgtgcaggtttgctacaagggtaaactgtatgatgctaagggtttgacttctattgatccgatcatccagacagtgaacgtagtacccaataggaattcagttcttgtcctcattcctccctccctccttttggattctacagggtgtgttgttcccatctttatgtccatctgtatctaagatttgg

SEQ ID NO: 471788 - DNA, 665 bp, Homo sapiens
cggccaaaaggatgataacacctaacacatggggttcttaacagtcctgtccccaggcgttcccttctgctgttagtgaggctgaagctaacattctgagcctctgagggggatgatgacagcagctacgtctttgggtgatgagtgttatggctgcagaggaccttgcgagggcggggctgagtggccaggacacctagcaactagtctcaataacccattcattttctttgtggatagctctggaggagaaatctacagccctgcccagctgtgctctctgtttctgaccctgcagccctggtttagactcagtcgaacatttacccattatgttctagacctgtgtgatggtgcatctcccctccccctccatcacattttggagcacatggaagcttttccaagactatttcagcttgccagtttccttctaagttcaatagagctaaggagccctgaggctgaagtagccagggaagtctttccaagagagatggagcttgaactgtggcttggaggaattgtacctatctggactctgagtttgtgttttaccatttgcaactgaaccacttggcttaagcagaggaatatttggtttatgtaactaaaaatttaggggcttcaggcatgtctgaatccaggacctcaaatgaaataaa

SEQ ID NO: 471789 - DNA, 452 bp, Homo sapiens
agccgcgacaccatgaaatatgtatggcttccttctctgttcatcccctctccgtcagatctcccctgggaacacagaattattatccctgaatcacatgagacctttccattctccaaagctatggagaaagctacctcaaatgtcaatgtccgcatatccagtaaaagcaactggactgtagaggagatgaaagccagtctgtcgtccagcaccccagacaagactgggctcagggtccttcaggagtggctgggatcaagagaattcttagaagtctgcagtagtacaccagcaggttaccttccccacccactggtccccagaggaggacactcagtaggacagcttgcttctagcaaagcccaagatggcttttctctaaaaacattgaaaagatacatggtggatgcaaaagcatttggggtggacaatggcagcccagcgtgaca

SEQ ID NO: 471790 - DNA, 733 bp, Homo sapiens
gacgcacccatcatctgagcacccattcgtaaaaggccctcatgactaagcctcatgccaaaaaactcattacaaaagagctagggtcccagatagcgccaaagcttcatgagacctctcctcatctgtgcgcggatgagtggccgactctggagcccaggttgtttcttcccagtctggaaaccaccgagcaagtcctgcagatagggaaggaaacctcccccacccaatggggcaaatcctttaaagaactaagcccagaggatcagaaacatgcttggtttactgatgcatccaccaaatacattggtgggaatcaatgctggaaggctgtggcttataatcctattaaaaacaaaagcatttctgatgaaggaaggggtgggagcagccagttagctgaactagtagcggttcccctgagctattcagaaggagaccagagggatttttcacttctataccaactcttggtcaataccaaatggtcttactacctggatgccccaggcaacaaagcaaatggttaattgggaataaagagggaataggttacttttgtagtttccccataagtgacccgccttctttctctcttacttcccttacgtgactaccttatctaaaaagttttaagtatttagccaatcgggactggtttagactgtgcggtccaaccctaaccaataggggaaagatacagaagtagaagctgtgtcagagataataaaaa

SEQ ID NO: 471791 - DNA, 654 bp, Homo sapiens
ctgatcatacattctatttactgagataggagaaaatcaccttatggctggagcccagtcacaaagggcccttgtgactgagcctcatgccaaacaacttgttacaaaaagagctagggtccaagaccgcaccaaggcttcaagagacctctcctcgtttgtgcatggacgggtgaccgcctccggagcccaggctgtttcttcctgctgtggtgacaaatcctccatagtatgggaaaatcccactcgtctgggctgcccgaattcctcagagcaagcaggaggaaaggctaagtctgctgattcacagaggatgcagcctcttctccccctaggggctcaggcccagggagatcacagttctgtccctgagcccctggctggagctgttggagttcctgctgggaggccctgcccagatatggggcatcaggtactcaagagtggcagcaggaaacataagcatggaagagtccaggcactgggcacaggagatctcccacaagaggtgtccaaatataccaaggggaacctggaagtaacatgaggtgttggggtgatcagacccaacaccaggtcgtgggggtgacgaagtccgttggagtcaaaggactgagaaaaagacagtttgagagagaaagtgggaccaggggg

SEQ ID NO: 471792 - DNA, 1648 bp, Homo sapiens
gctgccaacatgctgtcaggaggcttcgaggccatgcccggtatgctgcccacctccttgagaccccttcctgacactttccagccggtgctacagccgcagcacgtgccaccactgaatacctttcagcagccggtgcaggcttcagacggcaggcgtgcccgacagccgtggcctcagcagctctttcgtggcaaccaggacagtcagggcagtgatgaagtgatgatgcctaggacgacaacacaggtagagcacgatctgcgggatgagctacacggccggccgcccagtgctggcgcagtgccacgtcctccagcacttcctgatgtgcctcagcagcaccgagagaaggcctggaaacaaggcaagaggaaggccttctgtatggcacagcacctcttgaggaaagaaaataagaaaactgcctccgatccaagcagagcaggtcagcgagaaggtgggcatcacttgggggagtggatgtgggtatcgaagacgaacactggatacgtggcctggtcatgggaggaggtggagagcatgattgacagcttcatatgctttctcaagaaggtggatgacggcgctgctgctcagccacagggcatggagttcacggcaagcagcccatcaaccttcactggaggtgcctacaataccatcgtcaagctcttcccagattggcccaggcaggacctggattctgtctgggacctgttactgctgtccaagcagcaacgcatcaaattcccagacatcctccacgttcacagaggagctcttaccaaagtcacggggagcaggagactcgtgggaggaggaatgatggaggtgcgggggctgatggcccaagccaggcccccactgattgggtccaatcatcagtcagccagtggccagagctgcaccgaccaggtccccgctgatgagttacttactaaccaagctcctggaaaccaggtttctgctgacaagaacctgctgaaaggtgttcgctgagtaggtcagtcctaaccagatcatccatgatcaggtccccactgatcatgtttccactgaccaggcccaaaaggactaggccccagtgaccaggcccatcactgagcaggcgctgctgacatagaacaggcccccactgtcaggcccccactgactaggccacaatgactatgtctcagctgaccaggccctgatgattaggtttaatggacaaaaccctcgttgaccaggtcccactggccaggtccccactgaccaggtccccatagatgagactctgagttaccaggaccccactgaccagacatctacagactaggccccaataaccaagacccactgaccaggccctcactcactgggctccaactgatgagattctgactgaccaggtccttagtgaccagactaggtcacttattgactaggccccactacccaggaccccaattaccaagcccccactaaccaggtcccaagtcaccagacccccactaactgtcccaactgacaaggcccccactgccgaggcttccactgaccaggtccacactgaccaggcctcgagagatgaggcccgacttaccaagaacccactgaccagagagacctccactgactgggcccaactgacaagggccccacc

SEQ ID NO: 471793 - DNA, 873 bp, Homo sapiens
gaatgggtatacttggggacagcacccaccccctggagtcaccacgaggatgaacaagacaaccgtgtacatggtcagcacagaacaagcactggtgagtgcccaggaatgaccctctttggcagctgcccagagaccagcatcacccaccaggcagtgactgtccccaagtcagcagggaaggaagagagcaggtcatgctcttgagtctgatctggcagctgttcggagatgtgcctcttgcctagaaaagagccctacgtgcccagcactcacagacactggcgtgcctctgactgctccgtgacacagaggcaggcagcatcccgcgtgggtgaacatctgtgtgagtgtgtgtgtcacactcacgtgcacacccacgtcctcatcactgtcaccctagggcccatggtcagcatcagagcatccatgggtgctcctcagtctctgccctctccatatgggtctgtcctggggatgcagacagaggatggaggcaaggaggcatcagggacaaactgtttacctgaggtcacccagcagccagctgaccagttcccactgacccagtccctgctgaccaggacagggctcctcatccaggacacagggagggacggtcagcctcaggctccaggtgcccccacaaggctctctgggcccatctccaaggggacagtgaggggtcctggcaccacctggacatgtcatctggccctattcctgagccttggagccagaggaacagagggatgaaaaagagtatggccattccttaaataaataataaatacaaagtaatcatatgatccaggaagtctgcttctgagcataccctaaaaaactgaaagcagcaacccacatatttgttca

SEQ ID NO: 471794 - DNA, 756 bp, Homo sapiens
ctgcccgccgccccctccgcccctctcccctgggcttgggtcagagggaagggcccagggaggaccctgcagctgtgcgggccccacgggggcctccctgggagctagaacggggtctccctgcgcttcccagagacccggcaggacaggggtctcaggaacgttcatgggatacaatgtggcagaggatggagctgagtcgccgcccttgcaagacggcagaggtacagcagcagaagaaacagaccttccgcaacttcacccagcgcggcgtggacctggaccagctactggacatgtcctcggagcagcggatgcagctgaacagcgcgcgccggcggcggctgaacccgggcctgtggcggaagcagcgctcgctgctcaagcgcctgcgcaaggccaagaagggggcgccgcccacggagaagccggaagtggtgaagacgcacccgcgggacgtgcttctcctgcccgcgatggtgggtagcacggtgggcgtctacgacggcaagaccttcaagcaggaggcggcccccgtcaccgggcccagcgcagctgaattaattagctgggagcgttcccgctcggctaattgtgccggagacgccgtcgtcacggcgggtgggatgcaggcgaccatcgtccagccgtaaagacctcagtcccctgggccggctgccccctcccagccctaggtgggctgttgctacttcccagagagggaaactgaagcccatggatggctatgaaggatac

SEQ ID NO: 471795 - DNA, 3307 bp, Homo sapiens
tcctccgagcggcggcgacggctgttgctaagggaggggacgcgcgaggaagcgcgacccgggcggcagacggcacccagcgccaccagccgagcggcgccccctccccaggacccttaaccgcgccgcgtcccggtcgcgcccgccgccctttgaaggagaagcaagtgccgtccccacccccggaaggcgcccccaggagccggagcgacctcggagcgccactcggattttggatttcggtctcgcattccgcggccgggactttctcgaggaggacgcgcgctgctccgcgcccccgagtgcccggaggacccggcatccggggagcctctcgcccctgtcccggaggcgcggcgaggattggcggcgcccgccgcccccagccccccagcgcgcgccggggatggagccgcagcccggcggcgcccggagctgccggcgcggggcccccggcggcgcctgcgagctgggcccggcggccgaggcggcgcccatgagcctcgccatccacagcaccacgggcacccgctacgacctggccgtgccgcccgacgagacggtggaggggctgcgcaagcggttgtcccagcgcctcaaagtgcccaaggagcgcctggctcttctccacaaagacacccggctcagttcggggaagctgcaggagttcggcgtgggtgatggcagcaagctgaccttggtacccaccgtggaagcgggcctcatggcctcaaggccggaacagtccgtgatgcaagctctcgagagtctcacggagacgcaggtcagtgacttcctgtcgggccgttcgccactgacactggccttgcgtgtgggcgaccacatgatgttcgtgcagctgcagctcgcggcccagcacgctccactgcaacaccgccatgtgctggccgctgcggccgccgccgctgctgcgcggggggaccccagcatagcctcccccgtgtcctcgccctgccggccggtgtccagtgccgcccgagtccccccggtgcccaccagcccgtcccctgcatctccctcgcccatcacagccggctccttccggtcccacgcagcctccaccacctgcccggagcagatggactgctcccccacggccagcagcagtgccagtcctggtgccagcaccacgtctaccccaggggccagccctgccccccgctcccgaaaacccggcgccgtcatcgagagctttgtgaatcacgccccgggggtcttctcagggaccttctctgcccacatgtccacgccattgcctgagctcatgagctcacacccgtggacgcccgtcctggacatgcgggactgtgcccgtgccgggcactcacggccacctctgcccgcaggcacgctacaccccaactgccaagacagcagcgggcggccgcggcgtgacatcggcaccatcctgcagatcctgaacgacctcctgagcgccacccggcactaccagggcatgcccccttcgctggcccagctccgctgccacgcccagtgctccccggcctcaccggcccccgacctggcccccagaactacctcctgcgagaagctcacggctgccccctcagcctccctgctgcagggccagagccagatccgcatgtgcaagcccccgggggaccggcttcggcagacagaaaaccgcgccacgcgctgcaaggtggaacggctgcagctgcttctgcagcagaaacggctccgtagaaaggcccggcgggacgcgcggggtccgtaccactggtcacccagccgcaaggccggccgcagcgacagcagtagcagcgggggcggcggcagccccagcgaggcctccggcttgggcctcgacttcgaggactccgtgtggaagccagaagtcaaccctgacatcaaatgtgaacatcacgtgttataactgtagcgctgtaaatttttttgtgggagggtgggcagggaggggtcccagagggtagagctcaaggattttgggttttgttttgttttcatttttccaaaaaaaaaagaaaaaaaaatagaaaaaaaaggagtaaaaggggcgggtttgttttttgaagaactgtcttggatacctatttaaatgtgtgttctgttttgttttttaacgatttttaaataacgtctgtgcctccactggttgagggtggaacctccaggcaggaaccggctcgccaccctctgcccgaccccacccttccctctctctgtccctagcctggagctccccgtgagcctcaccaggactgagtcctctctggggtcccacctccacccatgtccgggctgggcagagatgaggcaataacactatttcatgtctttttttaaattttgtaacctgtatttcctcagtcggccactggagggatgacttgggggaccagagaggaagagcagagacagggtctagctatgttgccccggctggtatcaaactcctggactcaaacgaaagtgctgggattccaggcatgagccagcgctcccggcctgcatacgggatgattccatgtggactgccacatcaaggaagcaaacaacaaggaaagcctggcgctgcgtggagctgtcttttgctgctaactgcccttgaccgacttcctaccaggtcttccctgtgcgcctctaaccccaggaggtgctgctggcatgcccacctctcagatgaagcagtgcggtccagagagcgtcttgggcaccgcctgcctcacagctgggcccctgaccctccagggactgtggctgagcagccatggctgcctggacgggtgtcccctggcccgtctgtccgtctggatgtgggaaccctccaggcacgctggggcgggcaggtgccaggtgcctctccagcaagatgcaacataggtgtcttcacttgcactccgtaggtcctgagcccctgcagctgcctgggagagtggggaaatactctccacttgtcccactccactgttgccatggagatacctcccaccctaggcagggccaccctgagcctggttggctttgcaggaaatccccactctttgacctctctgttaggcacaggacgtgtagtcccatgagagggaactgggcccaggtggagatccatccgcctaccccagagcgcgcatctgttgctaagcaacatctgaggctgcatggaggcctggcctttgggctgctgggatggcctggccggggcaggagtagacagggcctcccagcctccacattcctgagctgtgactcaggcctgtggggagggggtgagtcacagggaagggaagccgacccaccctgc

SEQ ID NO: 471796 - DNA, 605 bp, Homo sapiens
ctggatttgtttcaataaaaattacatggactgtgcctgcctctcctctccccttcctcctcttccacctctgccacccctgagacagcaagacccctcctcttcctcctcctcagcctactcaacatgaagacgacagcaagaccaaccccttcccttcctccccctcagcctattcaacatgaagacgatgaagatgaagacctttatgatgacacacttctacttaatgaatattttgtctccccaaatctaggagatgctgagtttttggggctgtccagaagtgcccagcacagactcaagaccaaagtcgacagcgttcactatggtggcactaatgatgctaataatgaagaccccgctcgctactactgttacaggaatggggtcccgatccagaccccaagagagggttcttggatctcgcgcaagaaagaattcaggcagtatgatctcctgatgttgctaaacattccctggcggaaaactctactctgctgggatggccccaatcaactgcaaactcaaacagctgatgtttgtccagcctgtgccctgtgccaggagtggggctgaacaccacctcatcacatgggcttctt

SEQ ID NO: 471797 - DNA, 579 bp, Homo sapiens
ctcagtgctgaagctcccggagcaaagactgatgaccagggaggacaggccgtggaggggcgagggtgggagtgggagcatccaggcggaggggacggcacaggtccaggcgggctatgacagggctggaccttggtgggagctgtgtacctgccatgtgccggccactgtgcagggtccttccctcccccctgcatccggcccccaggtgccgtcctgccccaggctgtttgcatgggctgttccctctgcttggaatgcccttcctccaatgtggctgtttctctacagccaccttgttcatcttcacatcctcagtgaccagcacatagcagccgtcccacgcctgaggttccaccggttgtcccggtgcccaggagcttgccggtatgccgccctcagattttgcaacagtggcatggcctgggcccctgctggcagttcctggaaccctggcatgtgctgagaagccagctgcagaaatctagcagttttggaaacgggaagacatcatgcccaaggaaggagctgcgtcattatttttgttatttactcaacaaacatttattgacttgctac

SEQ ID NO: 471798 - DNA, 1231 bp, Homo sapiens
cagtgcagcggtgggctgaagggctcctcaagtgccgccaaaatggtgccgaaagtgaagaaggaagctcctgcccctcctaaagccgaagccaaagcgaaggctttaaaggccaagaaggcagtgttgaaaggtgtccacagccacaaaaagaagatccacacgtcacccaccttccggcggccgaagacactgcgactccggagacagcccaaatatcctcggaagagcgctcccaggagaaacaagcttgaccactatgctatcatcaagtttccgctgaccactgagtctgccatgaagaagatagaagacaacaacacacttgtgttcattgtggatgttaaagccaacaagcaccagatcaaacaggctgtgaagaagctctatgacattgatgtggccaaggtcaacaccctgattcggcctgatggagagaagaaggtatatgttcgactgactcctgattacgatgctttggatgttgccaacaaaattgggattatctaaactgagtgcagctgcctaattctgaatatatatatatatatcttttcaccatatacatgcctctctgtcaatttctggttgggctgggaggccacacacagacactgacatgacagggcttgggcaagactcctgttctacttatccttttgaaatattcaccctgccactccaccatgtgtgatcactccagagatctttgtgactagagttagtgtcctaggaaaaccagaactcagaacttgcctccatggttgagggtaacaagaagctgtacaagaaccccttttatccctggaagaggctgtgtatgaaaccaatgcccagggtttgaagggcgttagcatccatttcaggggagtgtggattggctggctttctggtagcattttgtcctcacacacccatctactgtgtccaaccggtctgtctgcttccctcaccccttgcccaataaaggacaaggacttcagaggaaaaaaaaaattgttttaattattacatttatagcatcccagcttgaaaaacgaagcaacagagacgtgtagaaagttaaaaggtttctactccaattgtaatttctccaattccatcgtggtatgtgcattcttctggatttttttcagtgtgcatacacatgtgtacatacagacacatacacatacactcgtacgttttttatattgatgggaccattactcacatctttaatttggaactt

SEQ ID NO: 471799 - DNA, 532 bp, Homo sapiens
gaaaagagagtcagcgaagggagatacgggtggggccgttttataggatttgggaaggcagatctgtctcccttagatgctgaaagatgccagatggcccaaggaccaccccttccccctcgtgcctggagagtcctgaggaccacacacatgtgcatgcgggcacacgcgtgtacctgccaaagacgtccacaggccccacacagctgtgttcccacagccgtgcccaggtcgaccctcagacctgggatgaggccagctcttccgccaccttccctgtgagcccaccgaggcctgatgtcccgtggcagatgcgatcgctttcctcggtgggcgagagagagcccaactccagggctctcagcattgggcaacttgctaccctcgtctctgcctcagtgtccctacctgcaccctggaggagggaagcctctcaccctctgcgtccccatccagtaagcctgggtcccttccttgcctccatatccggagagccatagggcctccctgatgaccctgtttaaaattgcaa

SEQ ID NO: 471800 - DNA, 571 bp, Homo sapiens
tgggtgtgtggagcccctctccccacgtgctgacaactcgggccccaccaccggagcagcctctgggatctgtgatatcttcagcaccctgcatcgggggtgattatttgtaagctcaaaccgtccccatcccggcagcttttcagacagtaatgaaatcacctaatcttgtgattggaggcttcacggacacgctgtcgaagaagaaggagaagaagaagaagaaggagaagaagagaagaggaagaggaagaagaagagagaagaggaagaagaacaaagagcagccgcgagcaaggccacttgaacttggaagcagatctttctctggtgaccttgagatgtcggtggccccagtccttaaacgatttctgcaccatcattttcaggacgctctgcagtgtcgctcagtctttttgcaccaggaagctggagagcgacccggagtgggagggataaaggacgccgaggcggagtgcattaggtacagtggtattttcttccctggtggagcctgtgaggaggagctggggaggcaaagagggtcaagtgtatgactccacgctcaggg

SEQ ID NO: 471801 - DNA, 610 bp, Homo sapiens
cgctgtccttcaggcggcctgacggatcgtcttggcgagcttctccgagttaatctaatttttctgggtctggctgggaccagccatggccaccttcttgctgtgttctcatatggcagaaacagagcaaactctctggtgtctcttcttgaactgcactgctgtgctacctgtgggcatggaacagccagtcagggaccaggcagacacggggagtaaccctgagaggtttgggagtgacactgaggtcaacctgcaccctgctggctctgatgtcctgacaggggtccctctgggctgtggtgctgtggctggcgtgattagattttcaccaaacgagggagctcggccagagctcgatgtcagggtgaagccagtcctggaatgtccggggtgccctgatttggaactgggggatggaggctgcagggcggagacaaacctcaggacaggggagtcgatttcagacttgatcggtggctttgaaaaaccctctgtccctttgggggcctcagtttccccatctgtacaacgtgatgatggtgatgatgaaatgagatagcaattgaaaacgttttttaaattttttatggttttttttttttttttt

SEQ ID NO: 471802 - DNA, 553 bp, Homo sapiens
tatgttgatgttccaaaaacacatgggacggagcctagcctacaacaggaacagcttgccagcagagggcacagcctgtgcaaaggccctgaggcaggacctcacctggggtgttggaggaacaacgaggaggcccatgtggctggagcagaaaatcaacaagttccaggcagtgactgctccatcagccagggtcctggagggaagtgataatcttcaagtccctggcccaaaaggtcacaattgcatatacaatgggctgtttgattactgcagcaaaaccaagcctatcctaacagatacaacaggaatggaggcttttgataccacagaaaaaggtgctctgcacagcgcttcttttgagagtttacatgcttacattgaatttgcacactcatgctatgggacctgtctgattgcagagtctgcctttgcccacaatccaccttcctcctggccatgatacgacgttccaagggtctgcagccacatggtttatcatctccaccaacgggacttgagaccacaagagaaaccacaaacctcaagccct

SEQ ID NO: 471803 - DNA, 1838 bp, Homo sapiens
cacctctgcctgcagagtctatcccagatccacccacttctccccgctcctgtgtctccctcttggtccagccccatcactgccctcccggagcaggtgaggcacctccaccctggcccctgccacccccatccccacagtcctctctgaagcagcaagagggcgcagaaaggccacctgcgccagcacctcctgagaccggccttcaaagacacgacgcatgccgctctgccgtccggagcacttaatgcctagagccagcagggtcccagtggccgcgtcactgcctctgagccacgcggtcattccaactcaactgccctcgcgtcctggccacaggccccctgggagaccccggagatgcccaaaggcctcatgcctgccgcctccagtgggacctagcagcacacagacagcgaagcgggtgaccatggggtggccacggccgggccgagccctcgtggcagtcaaagccttgctggtcttgtcgctgctccaggtgcccgcgcaggcagtggtacgggccgtgctggaagacaactcgagctcggtggactttgcggatctgccggcgctgttcggcgtccccctggcccccgagggcatacggggctacctgatggaggtcaagccagccaacgcgtgccatcccatcgaggccccgcgactgggcaaccgctctctgggcgccatcgtgctgatccgccgctacgactgcaccttcgacctcaaggtgctgaacgcccagcgcgccggcttcgaggcggccatcgtgcacaacgtccactccgacgacctcgtgagcatgacccacgtctacgaggacttgaggggccagatcgccatcccctcagtgttcgtgagcgaggccgcctcgcaggacctgcgggtcatcctgggctgcaacaagtcggcccacgcgctgctcctgcccgacgacccaccgtgccacgacctgggctgtcaccccgtgctgaccgtgtcctgggtgctgggctgtaccctggccctggtcgtatcagccttctttgtcctgaaccacctgtggctctgggcccaggcctgctgcagccacagacggccggtgaagacgtctacctgccagaaggcccaggtccgcaccttcacgtggcacaacgacctgtgtgccatctgcctggatgagtatgaggagggcgaccaactcaagatcctgccctgctcccacacctaccactgcaaatgcattgacccctggttctcccaagccccccggcgctcctgccccgtgtgcaaacagtcggtggccgccacagaagacagctttgactccaccacctacagcttcagggacgaggacccctccctaccgggccaccggccccccatctgggccattcaagtccagctacgctcccggaggctggagctgctgggccgcgccagtccccactgccactgcagcaccacgtccctggaggcagagtataccactgtctcctcagcccctcctgaggcccctggtcagtaaagatctagggcagggaggggggtgcaatgaggaatgtttctggtctgaaaagaataaagtgggtttgaaagcggattctcagcctcgctgctgttgggccacccgcctctgactggggttgggggacacccatccccatcaagcctaaggccaatccccgtttctgcgggcgggagagcgaggggtgtcccgggcacacgggtcactcatcctggatggccttattcttcattcacattttttcttttaaaataaacgttttattttggaactggtttagatttccagaaaagttgcaaaggtgccatagagttctccaacccctttt

SEQ ID NO: 471804 - DNA, 2036 bp, Homo sapiens
cgccaccgctgcatccccaatgagtctcggggctggcatacagtaggcgctccatacctgcgcgagtgtctgggatgggcagctcgggggtctttgactactggaggcatgggggagtcttttgtcctttttgctcctatgggaggaactgggcgtcgctgggggcaggagtcccccaagtccagcccctggaccctactgggcccgaagagggggaggggcaagtggggggtttcacagagaggggcatggggggaacgcaggtacccaggtgccaccctgggaacaccccgcccgcgccccgctgggtctccactgcttgcaggggacaagggaatgggctccaggctggccaatggggacgcagagggggcgcattacctcatcaagcggcgcggccattggctgcgggcgtccagtgggcgggagcagggcgcgagctcccgggacccgggaggggttgcagggtccagccccggaggatcctgtggaaggggggaaggggaggagaggggaggggaagcgaggggggagtgcaggaaatggggaatttgcaatatctgcggggctgacaaagtcccatctcctcagcatgtcttataagtggtctgggctctgctgacttccccagctacacccccatccccatccctgccccacttcccacccagtcacgctcatggttggtgagttaaagaaccttgatctctcttggatacattgtatctcccctaatctagccttgcagattagaactcccactcgccagctgctgacttccgggctggtaactgtttgcagggctcagaaattcaccagccatgggtttttggtggggaaattctattcttcccagaactgtccctctcggtatccctgaggacatcattagtttaaaaccatctcctctgatcagctccccgcaggctgccccccatgcaaccacagccccggggcggagaagtggggggttctttttgaagagtgctcctctggcctctgataaatcgagagaattaaaatccatttagagggaaatctctaaataggagcagaactgattctgacttaattgaatttaaaagcaggcaagagccagcctcagggtccttgccctggctgtcccctatgcttgaaactaccggcagataagcctgttttgcttcctgtatccccagcacataaaacagcacccagcacacagtaggtgctcaataaacacctcggtgcttatggaaggcataattcattaaacctgcattcatttggtgcatgccagaatatatatgcatagaaaaaaaaatctctggaaggatatatcccacccacacacccacccacccccgcagaactgggggtggtttttgctgagataacagatctcaacatttttaaatatttgccacaaagaatgtaacttcatcaggcatgaaaaaaacaaacaaaaaactcagtgccgtttcagtgcagtgacccaccagctgtgtgaccccaggcaaatggcattccttctctgagcctcaatttcctcatctcagaaagcagggattatcctagcactatccccagcaaagccctccagagctgtacctccaagtctcaaggaaagagttaaatcccggtctgaggcggtgatatttgcaatgcatgaggtttaaacattttcaataaagaaaaacaaacccaggccgacgcgctttctgatttatagtaattgcaaaccagcagccgttaatataattgtccggtggaggggggtggcggggggcttcacgcggggcccaatcagcccagggtgggatgcggccccagtcaggttaagcaaacgcattactttaataacctggggaggcagctggagccattagcaagaagggagaataaatattatcccaagaagctccagaatccgcagttttatcaccgagaattgtcccccgtgctatttactttcaatttagattttcgggaaagtggttcttggcacattttatatatgaaggagaatgactggaattgaaatatgacctgatttt

SEQ ID NO: 471805 - DNA, 490 bp, Homo sapiens
tgggtgggcagccacttcccaggaagataagatcagagcccctcaatgtagtgttcaaagccctttctatgccttctttctccctaaatttacccctgttacagttctacactccagccagactttattactgtgttttacccactcaaacacttagctctttccaacatctgaacctttgcatatgctgttcccttttcttggaatgcttttccacctcacaaactcctatacatcctgcaaagcccagcttccattacctctctcccagcagagggcacctttggtcagtgccccactctacaaccaggatttgtagctcccaggcatcatgtgtttttggcctgtcatcttccgcacttgacaatgacctccctggagtcaggggctgcattttcctcccttggacacttccccagccctactgcaggaataagtatggctgtaactgcatagagaagaaaggaagccctatcctgaggcattaatt

SEQ ID NO: 471806 - DNA, 643 bp, Homo sapiens
tgattggtgatgatgatgtcccttatacaaaggggaaatttggacacagagacagacccatatagaggggagatgatgcctccgttgtctcctgccagctggcggtgcagacagggcctcttggttcatcccttctcaaggagaaaggcttggattctccaccaggagcccccagagggcggagcaggaggcaccggtgacatcattctcagggccagccactcccagtgtgcaccagacctgatcaagatccaaagacgaccagagttcccagatgacactggggctgcaggcggcaaacttcacccacagctgtgggcgccaggccctcaagagtggctggggcaggacggctacaaagagaatttgattgctccggagttgaagcccaacgtgttcgaggagtcatgccaagattcagtgaaggtcacacaggatgcgagctgctgtggggaggggttgtccttgggactctcctaggacacgggaaggctccacctccatgagaagaggattcatcttcctagtctgttacatgcaaaggtctcgtctgagccaagtcttgcacagatgtcccttttcccggggaaggaagtttctagcaaacacccagagacttttctctttggagaacaataaaaat

SEQ ID NO: 471807 - DNA, 3674 bp, Homo sapiens
tgccttgagctgagcactgggcaggggtttgggagcagaagagggaggtgcagggcgggaatatcaatgttaggggagcagggggagcagggacaaatcatcttcatttcttgttgtcagggacaaattctggggcacagcacctggttctggggcacagcaacccactgctgcagacccacagagcctgtgtcctcgactcctctcctgcccattcctgggtattccttcctgcaccacgttctccgtgtggccccacctgctctcgttccagggagctgcccctggggggcatctggcaatgtccggagacattgttggttgtcagagctgggggagagcccacaaatggtgctgaacatcctagagctcacagacagccccaccagcatgaccaccccaaatgtcattgctgaggagtggagagccctgcgggtccagacactcctgccctgtgtgggtgctggggacatggccatgcgcctgtgtccctaaagcctctgtcactcaggatttgtgcctgaggaccttggctgggctgctgtgtaaacttccagatggagcctttcccagtggggcacgagtcctcccagagatttcaaggagggccttcaccaggaagaatcaggaggaatgtgacagccaccagggtgtagtttccctccagggcctgaaaagaggcacctctcttcatcatttgcccagagtatttgtactgtctccatcatgatggaatgatgccattttgcttctgttctgctaataataattttgtttctagctaatctgttgatgtagtaaaaacaattgttaacgttgctatgttaaagtgtggcattttaacatgatgttaaaacactatgttaaaccttgcatttctggggaagcaactcaaggtggtaaattctgactcattttggtcgtacttcatttgtggattttccgtctttgtttctgagtagggcctgcaattttactttttcattgtttcctggttggcctttgataagaaggttctacttccacaaaaatgagttaatgagtattgtttattttctttttctctggaagtgttgtgtaaggttgataggagctggtctttgattgttttgtagattttaaaaatttaaactgaagagattttatacttcttgtttggtgaagtaacatggacatagcataataaaatgtttaaatttacttgtagcctggaagtccccactttgaattgtcccacctttctgaaccaaaccaatatatttcttaaatgtatttgattgatgtctcatgcctccctaaaatgtatagaaccaagccgcaccccgaccaccttgggcacaggttctcaggacctactgagggctgggtcacgggccatggtcactcatatttggctcagactaaatctcctcaaatactttacagagtttggctcttttcgtcgacagtcttttccttcatctcttttcttctgtgttgttcatgaagtggggtactggataaagtttccttgtcatattccttgtctcatcttgtcatatgcccttgagggcttgatttgtgaccaagtgggagcactcattcttggtctccattatcagcagtgtgtgatttttgagtcacattaggtgaccagccttaaaatggttgggaacccgagattttttgttttgttttgtttgttccaaatgtgtcaagctcccaggagggcttgtcataagaagtcccatccataaggggcttttgtcattccaacttctgttgtctggatagggctgtggcaacaagagtcttttgctatcctagcctattgctgggagtgaatattttattttgttggggttgggggaaagacctctacaattgcttcttcattgaagagggctattgacttgagggctatttagaatcaatataccactggaaattctaattgtctatggccagaagatggattcctgaaatcagactcctatgttaaaagtattttagagatctcttattctaaacagttggtaggaggatcaaatttcaaagaaagacacgtaatcgtgttctggctagccttaaaaattctcttgactaaatttcagagcaaaaatctgacctaaaacaaagttaaatttttttgtaagctcaaactgcttgctttagatcccctgagggagtaagaataaaagccactccaatattccatttcatggaatagttaaaattccatgctttcactcctgacctggattttgtttcaagtcaaggaaccagcctcttttgttttgatatttatgtgatttttgactttttaaggtactcatttacctctttggagatgcctcatacatccttggctaagtcttggctaagtcgtaatcttgattaaggcttattagtttcagatgggaggatacttttggtaaaaaagtttcaaaaaccagaagtttcacctgtttgtcctagctaaaatctgatagtaagaaatctgaaagtgttacatgtatttagtcagacatgagcagggcaggagagagcctcccgtcccccgcatcaggactatcaggtgactattaggtgatggtcaggcagttgttaactgtctttctaaaataataattggccacagccagtgccagaaaaaggcagtctcccaatacataggaaacacctgaaactggtgattagcagcttcccgataagttctcagaagttgggtgagtgggctcaagcatgtgcattaagaggcaaaattgcagagtttaattggtatatgaccttccagggacctttgactggtaagggaagaaagcctcaagtgatcatgcgcacagctccagtaaacacactgcacatgctcctctccgaagtgctggcaggccactgtgcgtgccgacagcccactccaaggaaagaatcaggggaggagagatgcagaccccagaattagtccaacatacaaaagcctaagtcaaatgtcaaacctcatacttgatctcttgtcacctgcttagccctcttttaagcgtactttacttcctttaatttctgctctaaacctttttaataaaacttcactcctgctataaaagttgcctcagtctctgcttctgccttatgccccttagtcaaattctttcttctgaagaggcaagaattgaggttgctataggcttgtacagatttgctgctgctaatattctttggtgccatgactcagctacatttggctgctaagcaaagaatttttaaaaagagctctattgttaaaagtcagcttaattaaaagctgattttcaagccatatatttattttatattaaatatatatcttcatatagaatatatattcctatagaatatatataggatatgtagatattcctatagaatgtatgtataggatatatagatattcctatagaatgtatgtataggatatagatattcctatagaatatataggatatatatattcatattgtatatacattcagaaagggcttgaaggcctcaaggcctttctgcttttcttttttgtatctttaaaagtttttttccagttgactgaaatctttcaaaatcatatacttagtctctctgtttctttctcaaggattctttttcagttcctttctgttcctcctttcttttgctacccttgatgctacatgaggggacct

SEQ ID NO: 471808 - DNA, 1356 bp, Homo sapiens
cttcagaaagtctatgcttctctaagacagaacaggtggcctcatggtctctgagccctcagattgccatgcatctgttttctgacatacacacctgccatgggctttcaaggactcaattgggctgagagacaggaaattccaactctgatcaaaaagtgtccatggagcgataaaagttgccacacagggcaatcttctgttttctgcacagcgaaactatccaagcccttcgtcaccatcagcaactccaaccccgtggagaatgaggatactgcggccttaacctgtgaaactgagattcagaacacaacttacctgtggtgggtaaatggtcagagcctcccggtcagtcccaggctgaagctgtccaatgacaacaggaccctcactctacccagagtcacaaggaaggacgcaggaacatatgaatgtgaaatccggaatctagtgagtgccaaccacagtgacccagtcaccctgaatgtcctctatggcccagacgaccccaacatttccccctcttactcctattaccatccaggggaaaacctcaacctctcctgcaacacagcctctaacccacccccacagtattcttggcagattaatgggaagttccaaaaatcagcacaagagctctttatctccaaaatcactaaaaagaatagtggaatctacatctgtttcgttcgcaactcagccactgacagcaggtgtttcacgatcaagaagatcacagtcactggtgaggatgtagaaaaatgggaagaaaaggagccttggggcagactcctgagctgtgtcctggttctgaagtcactggctgtatgaggctgtgagcacagcacatgggacaaagcacagaggacagttccttcattttgcacaacgtatctgaattgtattccttgttaagattgaataacattccagtgtatggatatacctcagttttctatgcacttatctttcaattaacttttcagttcagttcatcacaacaacctgttggctgttgtcagtgatgctgctgtgaacatcagtgtacaaatatctgttcaaattcctttcagttctttgggtatatgtccagaagcagaactgctggatcaaatggtaattctttaattttttgagaaacagccataccattttccacagcagtataacattttacattgccatcagcaatgcaatagagcttcaatttttgcacctacttgaaaacacttgttttgtggtggtggtgttgttgctgttgttttatcaaagctatcctaatgtgtgtgaggtggtgcatccttgtggttttaatttgcatatccctaagtattagtgatgttgagcatcttc

SEQ ID NO: 471809 - DNA, 919 bp, Homo sapiens
tgagctttggggactgcagacctgtgcttctgactctaactccgtggctccaacagaagccctcagtccccgctcagagctctgtcctccccaggagaccccagccagtcactctgcttcctccttgtgttcactcccagaaagttctctcttcacctgtgagcaggagcccctgtcaggggatgcgctgtgtgcagggaggggctgagaggggcctcatggcttgtgctgcctgtgtgttctcttctgtggagatactgaagatgtcagttgtacccctcacatactcacaattctttcaccaagagatgaaggattttactggcagcagcacctggacaggcatcatggaccccagggaggactgtcactctggagattttggtggcatggactggagacctgaagccaccccaaggcccaagtcactggggagaggctgggtccagagctgctgtggagctttccacatggggcctttcccagtggagcacgagtcctcccagggatttcaaggagggccgttgcctggaagaatcagaaggaatgtggcagccaccaggtgcaggctcctctcagggcctgaaaaaagggacctcttttcatcatttgccactcatgtctgcactgtctgcatcaggatggaatgatgtggaatttcatgcaaggtcattttgcttctgttctgctaataattttttttctagttaatcttttgaagtaaaggcaattgttgacttttgggtgttaaactcacctttcatttttggggaacaaactcaatgtggtaaatcctgacttttttggggtcatatttcatttgtggattttccctctctgttcccaagtagggcatgcagttttactttttcattgcatgatattcacctccctgtgtccatgtgttctcattgttcaa

SEQ ID NO: 471810 - DNA, 859 bp, Homo sapiens
gcaaacattcgatctcgcttggagagatgtcatgctattgttagatcaaatcctagcctttattgaaaagaatgcagctttagctgcagcccgagagtttggagatacctggtatcttagtcaagtaaatgatagaatgacagccaaagaaagggacaaattccttactggtcagcaagccatccccactatggatccccactgggactttgactcagatcatggggactggagtcataaacatctgttgacctgtgttcttgaaggactaaagggaattaggaaaaagcccatgaattattcaatgatgtccactataactcagggacaagaagaaaagccttctgccttcctcgagcggctaagagaggccttaagaaaatatactcccctgtcacccgaatcactcgagggtcaattgattctaaaagataagtttattacccagtcagctgcagatatcaggagacagctccaaaagcaagccctgggccctgaacaaaatctgcaggaattattaaacctggcaaccttggtgttctataacagggaccaagaggaacaggcccaaaaggaaaagcgagatcagagaaaggctgcagccttagtcagggccctcagacaaacaaaccttggtggttcagagaggacagaatatggagcaggccaatcacccagtagggcttgttatcagtgtggtttacaaggacactttaaaaaagattgtgcaatgagaaacaagctgccccctcgtccatgtccactatgctgatgcaatcactggaaggcacactgccccagagtgcaaaggttctctgggtcagaagcccccaaccagatgatccaacaacaggactga

SEQ ID NO: 471811 - DNA, 1057 bp, Homo sapiens
ggagccagcggctgcaacaggttcactcctgaagtcagcgagatcacggtgcgaagaaacttgcgacatgccatctgtaagaactgtaacacttagtgctagggtccgggccttcattcttgaagtcagtgagaccaagaacccaccagttccagatacaaagagatacctcatacaacaagtagaccagtactactggtactatttactggtatcaatagttgcaatactactcattgtaaaggtgaggctgctcctacagctcaggttcaaagggaaccgggaaaactggggacatgaatgtagccagcgttctgactgtctcttggtctactggcctcacctcttatatcagcttccctctttcagcgggaaaaatgggcagagaggagccccgagccttacaacacatagtttttttgtcagagacattgatcttcttcactggttcctgttgaataagtcttggagaagagctctgataacgtcttctgagtcagttacccacccagggtgaatcggtgatagctagaagggaagaggcagatagccaaagtcttttcttattcatcagtcagctgaaggtagagggtgttggtagaatgtgaacatattaagtgaaataaaaacacttgagccagttttatgcagtattttcattgttttgacaaaacaaagtaagtatgcatgtacaagctacaaaatacaaattgtgtattcaatatacaagttaaaagttcttacatttgtgtttaaaactggcaacacataatgtagatgcattatgtggtgaaattcatgtggtgaaattcatatgaatactttagaattataatttttctttacttagaacattaaatgacaaaaaagtaacaaacaaacaaacaaacaaaaaaacaccgtgacaagctgagatgcactatggaagaaagaaaaaagctttatattttagtgactttaattacacttttttcctgatgtttgaataaggccttggtcctgcattttcattttgtactgggtccccaaaattgtgtaatgtgtcctgtcctcttcc

SEQ ID NO: 471812 - DNA, 854 bp, Homo sapiens
cttaagctaactcaatgcaggtttattatcctggcgacttgcagtcacattctaatgattttcaagggccaaaatatagtaataatcatttgaaatatccatcgcttccatgccttagtttaacagctcgtgatcttgattggcaagtagcaatggctgactttattcgtaatatcagcttcaatttaccagcctctaagctcctgaactttttacaaactatgcctgtgaagtttgtatctattgttgtctctgagcctttacttcatgccatcactctctttacagatggttcaggaaaaactggaaaagcagctatagtgtggcaagatgccatgcaaaactggcagtacagaatccaggagcattttaaaaactacacaacaggcagagttaggtgccttgatattggccttacaaattttcctcaccaagacgtaaatatacttagtgattccacttatgcggtgtatagtattactcatttagatcttgcacatgtgaagggcattactaatgaacccctactagctttgtctcttgcagcgcaagactcctccttgccagtcatcaccctctttacatcacacatattcgctctcattctgggctatctggtcccttgtcagaaaggaatgcttgagctgatgctctggtacgaccacagatgtggtttgcagattctcctgcttttttgcgagctcaagctgatcatgctgtttttcatcagaacgcctgcagtcttaaacaacagtttcatttgacacttgcttaagctcacatgattattaaaactgtcctgattgccaacagcgttctctttcccctttttccttagggcttagtgccagcct

SEQ ID NO: 471813 - DNA, 473 bp, Homo sapiens
tacgtgtcttcccgccaggatgcgctattacccccaccatggctctggcaaagagtggtaccctaaggtctatggggcaggggctgcatctagctcattcactcctccatccccagttcaggctataagtcctgtcacatattttggagtggatgatggtgaggacagctgggaatttgatggacagtctgatcatccaaagcaacacaggaagcaagctgcacctttcagaacttccccgactatccaagaagtggtggaggggagaaaagagactagcgagagactaggagcagaatgcctgggaaacagagcaaggaggaagctggggctacttcttatttctaagaagaatgtatttatgcaaagtggttatatttggggatatattctgtatgagtgggtattctctgaatgtatctttctctttatgacccacatcctccctcttattggaatcagcaaatgagctg

SEQ ID NO: 471814 - DNA, 986 bp, Homo sapiens
actactggctcagtaggtcccatgctgcccccattcattagctctgagcccagttcagccctaaggctctcctatgagttgcagtccttgcctgtgaccaatggtttagctagatggccagggacttggaaggagcactattggaaaactggtgacaaggaaatttggagaagagccactcctgtcattgcccaattggctcatgaacacagtggccatgtggcagggatggaggttgtgtttgggttcagcaatacagacttccatttaccaaggcagacctggctacagccactgtcacatgccagtctgctagcagcagagaccaacactgagtccaaaaatgacaccactccccagggtgatcagccagctacctggcgggcatttcaggattaccatgcaacgtggttaaggtcaacagaaaactacaacagcccaatccaggcaacattacactactaacatctcaaaatcttatagagtgaagatttggatcacttaaccaggtcttaaaaatgctatctacttcataaggtttggaagataattaaatgacatcaggtatgtaaaacatagcacagtgtccagcacacagtaagccttcaataaatgtcattaaaaacaataatagtaataaagctttatagtgtgttttcatacctagtagaagctaaacaagcactggccttgaaataaacaatattaaaacaattgcaactcaccaccagatgctcactaactgacaccctgttccacgagccttgattggacaacagactgatttctgtaactttcttctgatgagagatcacttattatgaactggttctggtgggttttacagagactgcacactggaatgccttcgtgtccctgcttcaccttttggcctagctgtaatacatttaaatgttaatcttccacccctaagtgaacatgggtggtgtgtaatatgcatgaggaccaccttcatgaatattaat

SEQ ID NO: 471815 - DNA, 1477 bp, Homo sapiens
ggctgtggggataccttgagaaggccgggcccaaactcggcaagtccagctagcttgggcagtgtctgggctttgcacagccccgtggagcacttctcccctcaccctgctcagtgaccatgccctcaaccactactgctgccctcacacctccacatgcatggtgggtgctccttggttcacagtgcccaaatgccagggggaggtggcagtgtcagggttccagggtccaggggcctactttcagcaagctggatggcgcgcagacggccgcgggcgccggggcctccagggcgagggggctggggccggggctggagcagccggaggacgcggcggagacggcagggctgagctgcacggccgtggtgtcctgtgccgtgggctcgctgctctccatctccagcgccacgggcccggcgcggccgccaccctggcccgggcccgccgcggccgccgagcgcccacggggcgcgaggccccggcggctacacacgcagcaggccgcgaagaagccgagcgccagcaccagcagcgccagccccacgacgagcagcgcgttgtgctcgggcaagaaggaggcgaaggcgcctgccagcgtcacgttcacgcccgccagcagcgcgcacagaccgcaggcgcagcacagcgccggcgacggcaggccgggcacccggccccgggcgcgttccgcgggcgccgggaccggtggcccctcgctcttttctgccggcggcatcggcctgcgcacgccaggcacgcatcaagctccctcctgccgccggcccggaacagcccaactgccaggagcctcctcacgctggtcctgtgggcaactgccaggagcctcctcacgctggtcctgtgggcacacagcaagagggcggcgtcagcagggtatcttgacctccagtcctaggctccgtctgtagctacactgagtgcctgggtgggcagaggtcatcttggccagccccctgcctctgcctctgggaagcaacaaaccatcccatatgtgaagaatcgacttgtttccccacctagttccgggggtccctcgtggccaatcttgccatcctccctctctcctcacttttttgtcctccaaacagacgctgcccctccaacccctctcctccaggaagcctacctgaactcatttgagtgagatagtggctggaaagtgctcagcacagtgtccagttcagcttaggtgctcatcacatgataatcatcgtcttcagtagtcctaactaccatttgctattgccccacatgtctcttttacactttattctatattttctaggcttttccttccttccttctgtttcagtctggatatttttctactgaaatatttttctactatctagtttactaatcctattttcacatgtgtcttttctgctgctaaatccatcaacggagttattgatttcatttgttataacttttcagttctggaatttccact

SEQ ID NO: 471816 - DNA, 568 bp, Homo sapiens
gttctccccagctgattcctgctgacccagcccttccctgttccttgttcacctgacgatgcccctgcccccacctccagaatctcccttccctatcccagcccagcccctgctcacccagaacagcagcgccaataaagacaccgcccatggcagctgcagccttggatacggagatgccgataatgatgctgccagccaccagcccgagagccacgcaggccagctgcaggccgcggaagtctctgctgctgatggggatgtccatgcaggcccacccggggcactgcctccagccggctcttcctgttgtgccacagctgcccctctgggccagggactgcatcccggaggggtggagcagcctgtctgccggaggatcctacagagggacagagtcctggctcatcttaagaggcccagacctacctccacagcacacagtgcttctgtagagtgctcccggagccaaggaccagggagggctcgtctctagcactgggaccatgagttgtgtaattctgccctggtagataacagtaaatacaggagtcccccattatccctc

SEQ ID NO: 471817 - DNA, 2004 bp, Homo sapiens
tgagaatacatagatactaggaggggaacagcagacactggggcctgcttgggggtggagggcgggaggagggaggatgagacaaaaatacccatcaggtagaggcattcctctcatctcttccatcttgggaaggagacctctggaggctgggtggaagcctagtgtgtataagtgcctgaagacaatttcacagccctcagacctcaccctcaacatggccccagtaggcattgtcccctccaaccacttggtgttccaggctcagctttccatggaacccactatgaaggctgcccaggaaattctgtccaacctagccccttctctgctgctggggtgcctccatgtcagcctctggggctgccgcctggagcaacccccacttagttcaaagctcttctatagaaagccctcagattgccccagtctggatgcaccctcctccttcctccacagcacagcatcctttctccaagggtgcccagaggacacagtgcaagctgctggctctgagacaaactgagaagggtgagaaagttccagcaatcaatcccagctccaatggggtgtgcaaagtaaaagtaaaaacttattgcaggggctcccaaatcaggctgagtttcagaattacctggagagttaaagaaaagaaaaatattaagttggtggaaaagtaattgcatttttgacataaatggcaaaaactgtaattacttttgcaccagcctaatattttctcaggccccaccccaggccaacagaatctatatctcaatggtgaagctcaagaatggacagctctgacaagtgcatcaggtgtttctgatgcccagtcgggtaggaaaatgacaagtgccaaaatgtaagatatgtctgctacttcttacctgaccagaggcaaggtcaaaatgggagattgaatgtgggttgaagaaatgagagtgcaagatggggatccataccatattgtgagtgtgggaacaatagcagtaacaaacatgatgtggggtcacagtggaccacatatcaagcaggacccagtagtgattgtttcaaaccatggcaaatattttttgggtaaatgaagatcttgagaggataccactaagctatggttactgccatggcagatgtagaaggggaccaagcagaacaaggataaagatgttgttatcaacctgtcacatcagaagaattgacaagaccaaagttctccgaaggaagtcttccctagttagaacatgatgtcttgcaaaattgtctggaggaatcagaggctgcaaacctgtacagcatgttactgtgctgaatactgtggacactgtaatataagggtaaatacttatctatcgtatctaaacatagaaaaggtacagtaaaaatacagtataagataaaaaatgatattgctgtataggacacttacaatgaatggagcctgcaggactggaagttgttctggatgagtcagtgagtgagttctgagtgaatatgaagactgaggaggacattactgtacactacagtaggctttataaacactgtacactaaatttataaaaatatttttcttttttcaataaccttagcttactataactttttaactttataaactttttaatttttaaaacttttgactattttataattgcacttagcttaaaacacactgtatagctgtataaaatattttctatctttattctgtaagcttttttctttaaaaaattttattttttactttttaaatgttttggttaaaagctaagacacaaacatgtacattagcctaggcctacacagggtcaggatcatcaacattactgacttccacctgcacatcttgtcccactggaaggtcttcaggggcaataacacacatggagctgtcctctcctataagaacaatgccctcttctggaacaactcctgagagacctgcctgaggctgttttacaattgacttagtattttttatacgtagaaggagcacactct

SEQ ID NO: 471818 - DNA, 1006 bp, Homo sapiens
ggccattatagcagtctatatcagggccagtagtttcgtgatctggattttttttccccttgggctcctctagcccagaatgtcaaagttttcagggaatttctctctctccacattcacgcccacagtccaactcacaacccaacccaatccaagaagtaacatcaacagcaataatttacatttaggcgttcatcaccctttcccatcccctgaaaatgaagtagatgacaccgaggtgaatgtgagtaaaaagaaaggagatggggatatactgaatgatcttatgaaaactgcaggcactgctaaggtcagggaggaggtccttggagattacctgaagacactcaagacagaatttacaatgggaatggttcgggcctcatctccagtggcactgggtgtaagaattcccgctatggctcttcccatgagggcacagtttgacgtaactgtagaacagttgtacagcatcttcactatgaaggatttggtgcaaaaattttctaaatcttctgctgtattagaagctgaaaagggagggaaattccaaatgtttgttgggaacatcactgatgaatatatagaatctttaacaaataaaaaaatcataatgaaatggagatgtaggaactggccagaagggcaaatggaattacaattcgactgtaaaggagttcctatctgtaaagaagagaacatgaaattctgttggcagaagcagcattttgaagaaataaaagatttactgcgctgaccaccctgaatggttgaattagttaaaattttataaggcattactttttctaagcagaaaatgtgtcacatttaccttttccctatcctttcttttcctttaaaagaggaaaaaaatccatgaaagtataccaaatttaaagcattgtttgactctttattataactagactctgcattgagttaaaagtagcaaacaacctgaaattaggtattaacctgaccttccatagatgttcccctggaaatc

SEQ ID NO: 471819 - DNA, 1256 bp, Homo sapiens
tccttgcgggagattgggtcacctgccaccatctggctcaaaagtgaaggaaatctctttgatgtttacctttcaagcactggcccatctttgttcactcgctgcgactcaggcaggctgttttctctgttctgtggtgcaggtctctctctacccttctccttccatttgccaagactgtacccatccttcccagggatgcatctcgtactcatttcctgcagagtgtgacacagccacagcttgcagtttcacatggaatctaaagtatcccaccatcctgggcagaggggctggggactggtgtccatgggagggcagggattctgagtcacatcatccccattgtgctgtatctttagctgtccttgtggcagagccatctttggggtggattggagcaccttggaagaaggttgccatgctctctggagcctcaactcaggacaaagcctgtagaatggctgacttctgtccagcccagctgcttcacattcctcactaccctcctgcccttcccatctccaccctccacccttttcccctgacactttcaggaccaagttaaagacacaattgacgaggaaatttgtacctctgtgccatcagaggtacaaataatttaacatcagaattataattattactgataaagtacactaattcatattagaactataggagtttcccataattttggaacacataccgatatcatatttatccaaatacagcccaaagaaaaccaaacctcatttcatatttgataattcttcctgtataatttttataccaaataggccaaattatgtcatttttggactttagggaacctaatatcttaaatgattaattgggtcagaaaaatgcataatttataatttgattttggaaagtctgccaaatatcaagggtttaaaacacttcatatcacaaaataagatcacacattttttgtaaaataagtcattcatttaaccaaagtgataactcaaggatttcaaaaaaggtgaaaaccttcattttttgaaaaagcagacttaattttccaaacaataagccccaataaaaacagcatgaagccaattaagtttgtttttcaaacgttataaagtctataacattttaatcttgactgtaagatttaacttccataagcccttttgtagcctttataacctttgttaaggagtcagttagtgcatcaaggaaaccttgttaatctgacacagaggcccacatactgttcttacatc

SEQ ID NO: 471820 - DNA, 808 bp, Homo sapiens
aacttctgcctggattttagaagttgtatggaaatgcctggatgcccaggcagaagtttgctgcaggggtggggtcctcatggagaacctctactagggcagtgcagaagggaaatgtggcatcagagcccccacacagagtccctactgggacactgcctagtggagctgtgagaaaagggccaccatcctccagaccccagaatggtagatccactgacagcttgcaccatttgcctggaaaagccgaagacactcaacatcagcccatgaaggtagccaggagggaggctgtatcctacaaagccacagcagtggagctgcccaagaccatgggaacccacctctttcatcagcctgacctcgatgtgagacataaagtcaaaggagatcattttggagctttaagatttgactgccctgctgaatttcagacttgcatggggcctgtagcccttttgttttggccaatttctcccatttgggatggctgtatttacccaatgccagtacccccattggacatggatgaaattggaaatcatcattctcagtaaactatcacaaggacaaaaaatcaaacaccacatgttctcacttataggtgggaattgaacaaagagaacacatgggcactggaaggggaacatcacactctggggactgttgtggggtggggggaggggggagggatagcattaggagatatacctaatgctaaatgacgagttaatgggtgcagcacaccagcatggcacatgtatacatatgtaactaacctgcacattgtgcacatgtaccctaaaac

SEQ ID NO: 471821 - DNA, 1078 bp, Homo sapiens
taaatcttcctggataaggcattgttgcctcaactacttgctctgcagagcaacaaccctgattttttttttttttttttttttttttttttaatggagacaggggaactgaagggtgtttaatattgactgaagcacagagtatgggacgcaagaagaaacagagcttgttggaggaacagtactcacaaaccagtgtctgggtctccttgctgccaggatccagtttctgccacgtgtatgactcgaagaccacctgccaatctggactcagtgtcaaggcctgtgaagacccaggctccagaaatggagctgatattgttgcttccaaagaggatggcactggcaaaggcattctttctcagtttgttcaactgctggaacattccagcgatgagattgcaactccagaaggtctgggagtacttgtgcttaaattcatccatcacaaaggtactcgggcaagtgagcaaaggggtcttggctatccgatgctcagcagccagtgcctgctcacattcatccatctcctcaggagcaggaaggcaaccaatcagaggctgaagtgacgttacaaagttaaaccaatctgattggttgttttctgcaaccaatcagagatggaagtgaagttacaaagttaaacccatgcaaacatctgattggttgcagaaggtgaccaatcagaggctgaagtgaagttacaaacttatactcctatgcaaatgaaaacttggcctgagaccagcctgattggttgcagaagaggacaaatcacaggtactttcagtttttcatctgccaggcagaaaagtgggggatgcaaagggagtagcctctggtcctttcgttacttgggtgtgaaccatacttgctctagctgtgatgataaaattatagttgtcaaaattttcaactcgacaactatgtaggtatcagaaggaataccttgtaagtatctgtgctgaagtgtacaatctattggggtcacggaattcagagaatagagggatcacattcagtggagtgcagaggaggggtggtaatcaggaagatttaataaagaaggtagaggttg

SEQ ID NO: 471822 - DNA, 1137 bp, Homo sapiens
gtggacagcttgtggctcccaattcagatctgagcagtgacagacatggaattccagcacagcgccaagaaaacacagctccagctcccccactttttataaacaaatttgtaaacggccctcatcttaggggtgatgttgccagcccaacccagactttccgactcatttcgaaacgacgtcgctgccaactttccagcttaaaaagagggaaacttcataaaaggctccatttccatttggcctgtgggggaggatggaatacatgacaccaagccactccccctcccactcaatcacagcagaagactcggattcctatcttacacagaaaatggctgttactggtggctgccagacctgcaaacctcctgctattttccattctttcctgcttcccgccttcgtcctgtccaaggccaaggtctccgtctgtgccctacagcctgagaaccaggagggcgggtggtgcagctgcagtgtgaaagccggcaggctcgagacccaggaagagctgatgtttctgtttgagtctgcaggaaggaaaaagactgaagtctcagctcaagacagtcaggcaggaggagttcaactgattggccgaggcccaccccatgaggaaggcctgaaactgtgcaagggggaagctccggggggctcccacgttgcagacagcctacgaattctagtgttcgtctcatctaaaacagccgcacagacacacccagagtcacgttcgaccaaatggacacataaaattaaccatcacagcatcctcgaacgccagtgcctctgggggctggtgcacgtgaatgcagaggggaatagcctgagaagagaagcgtttgtgctgcattgagtatttgtctgggctttgaggttagaaatttggaaacatgaactcccatgaagctattcctacagttcaggcacctgcagttcccaatttctaatgtttaagctctggatttgttaatatccccccttcttgaaataatcaagtgtttatgatcacatgatgaatactttcagtcttcacaatgagactgtttataccatagaaaacaaacacaaaatttgctcaaaggagaacgggaaacacaatttcaaataccggctgttttgaaaatgattgta

SEQ ID NO: 471823 - DNA, 774 bp, Homo sapiens
gctataccctggatgatttcaactacatgacactctggaaaaagcaaaatgataaagacagcaaaaaagattggtggttgccaggaactggggagccaaatcaggggcatggatcatcatgttggggacactaccccaaaggaggagatgacatggctgtccacaaaccgggagcccagttgtgcccagaattggttccttctggttggttcttggtctcgctgacttcaaaaatgaagccgcggaccctcacagtttgtggtctcactgacttcatgagtgaagccacagacctttgcaaagaagaagaggaagaagacaaagaaggaggaggaggaggaggaagaagaaggaggaggaagaggaagaataagatggaagaggaggaggaagaagaaggagaagaaggaagaggaagaggaggaggaagaaggagaagaagaaggaagaggaagaggaggaggaagaagaaagaaggaggaggaggagaaggagaaagaagaaagaaggaagaagaaaaggaggagaaggtggagaaggagaagaaggagaaggagaagaagaaggagttcgtgaatgtgcattgactagaccctgggaccttggctgtaggagtgtatgacagatagagcctccctctgcctggatgactctgcccatgagaaccttctggatcatactggacagaccgtgtagagcttgaaggttgtgtgggcccatgcctgatctagcttgtctaaccgacagttctatgggagttcactcagcacagga

SEQ ID NO: 471824 - DNA, 1137 bp, Homo sapiens
gtgtgtgtgtgggaggccaccgctgatctctccacggtgcatccttgcccttcagatgcgtgatcttgacttacccagcccacctgcagtggaaccagcggggctgctgagccaccatgctcaagctgaggatgcgtttccaggaacaaaggggcagagggcacgtgggacgtcgttggggcagcaagaggcgagggcctggctttggggtgctgctggaggacagcaccatttccctccgccccgtccacccagcagatgtctgccaccccagtgccatcctctcacccaagacctggactgagagccacctggggctcctgtggccagcctgcgggcccatccctgtgccctggtcagccacgctgctgagcaggacccctgctgttcgcctcaagggccgtcatcgtgtgcgccactcgggtctttgcatggcgaagctttctcaggtcctgagcgaggcagtgcctggtgcctgctgctccccaagtctttaccacgtggcggaccctgcctggtttgaggacagtttaccaacagtcagctttctgggctgctcttgccccatgtctgcaaacacctagaaactgatggccctatcccagatgacaaagggtggacacacatttccggggacaatcctgaggctccaggaaaatgccctcaacaggttctgaagccacagcgcaattccaacgcctgcccccctgtggccatgtccacaccctgcaggctgcctgcagcccctttggagggttagagccccttaggcctgggatgcatcctccacctggagtgcagctctagagctgggtggctgggggtggggtgtgggggcactggtaggccacggggaggcagatgggggccaggcaggaggccgctaggatggggtggttccgatgtgtctcctgagcaggcagggtgccacatgcccatacatgctggtaacgcccacggattagaggtgtggggtgaatggcaaggggtgggggaagatgctcttagtcccaatgccagtgcctgcttagggcccatcccgctgcttggggagcctccaaagaaagacagcaccctcaccagggaaagcctcttcccagacagaggatgtttctggaagccactctgggatgcaaa

SEQ ID NO: 471825 - DNA, 819 bp, Homo sapiens
ctcagcagggttttcatctgctctttgggaaatttctttgagtttttttaaagtttacagctttgtgagcagctttgttaaggcctacaatgaggcaagtaaccatatggtttcaggacgctcggctggggtctgtgggttgctattcccaggaaggctcttcctgggggactgctgcagcccctactggcttagtaggatcttcctgatggaggtcattggcatgtgcctgggccgagagccacactctttccttctcttccagaaagagggtagagaagagaataatatagagatcatgctaagtaagtttataagactggctgagatatttaaattctttgatgtaagtattgggatcagaggagaaggacccaagatgctttttgatttgggaaagatcagtaagagagaaacgaacatggacatggacaattccttcagctcttgcgacctctcggagcgggagtaaggaagggcatcccgggtccgggagcagcttgagtgacagctcagcaaacagaaatctttgctccaaatctttgttatgatctctgtcataacattttgtttgaaaatcgcctccagacctaaaatgaatttgagcagccaatgtgaattaattaagctgaaaagaactctcaaaacaatgatttctctgatgtgtttttatccaaaccttccaggtcactaatttgtcctgttttctttaaaaggagaaaataatgaaggggtgtatttggtgccctctacagtaaaatatctttgatatcagtggagaaggagctgcttggcataaatgaatgttcttgaaaactc

SEQ ID NO: 471826 - DNA, 1595 bp, Homo sapiens
agtctttttgggcctcctggctggctgaccctccccgtgatgggggatgtgctctggtggctgctcctgaaggctgtggcagccccagggagagaaaagtggcctgagaacaccagcctgcttgtctgtggactccctggccagtcctcagtgttgccgacctgggatatcttcatagagtcctcaccacccactccctgctcttggcaccagaacctcgccttcctggcttcctcactgagtgcactcactcagggtcccagcggtcctcaaagatgtgtgcaaagtgtgagacaatcacaaagaaaggggaccctgctgatcaacaacatctttgccatcatccccgccatcctgatgggagtcagcaaagtggccaaggcttttgagctgatcgtcttttcccgagtggtgctgggagtctgtgcaggcatctcctacagcgcccttcccatgtacctgggagaactggcccccaagaacctgagaggcatggtgggaacaatgaccgaggttttcgtcatcgttggagtcttcctagcacagatcttcagcctccaggccatcttgggcaacccggcaggccaagccatccagaaggagctcactcagacccagcgcagggtccaggccctgccctaccatggccctaatgaggcagagattatcccctttcctgctataaaagagtaccctggctggccggtgcttctggcgctcacaggggtgcccgccctgctgcagctgctgaccctgcccttcttccccgaaagcccccgctactccctgattcagaaaggagatgaagccacagcgcgacaagctctgaggaggctgagaggccacacggacatggaggccgagctggaggacatgcgtgcggaggcccgggccgagcgcgccgagggccacctgtctgtgctgcacctctgtgccctgcggtccctgcgctggcagctcctctccatcatcgtgctcatggccggccagcagctgtcgggcatcaatgcgatcaactactatgcggacaccatctacacatctgcgggcgtggaggccgctcactcccaatatgtaacggtgggctctggcgtcgtcaacatagtgatgaccatcacctcggctgtccttgtggagcggctgggacggcggcacctcctgctggccggctacggcatctgcggctctgcctgcctggtgctgacggtggtgctcctattccagaacagggtccccgagctgtcctacctcggcatcatctgtgtctttgcctacatcgcgggacattccattgggcccagtcctgtcccctcggtggtgaggaccgagatcttcctgcagtcctcccggcgggcagctttcatggtggacggggcagtgcactggctcaccaacttcatcataggcttcctgttcccatccatccaggaggccatcggtgcctacagtttcatcatctttgccggaatctgcctcctcactgcgatttacatctacgtggggacaggatagtaagggggtgttacgaacactggaatgccaataaatatgacaacctagatgaaatggacgaactccttgaaaaacacagagga

SEQ ID NO: 471827 - DNA, 847 bp, Homo sapiens
gggaggcacgtggaatattttggcgtctgtgttgtaggtgaatgaatgaaagacaagctgtgtctctgaccttctgcttctttctcactacgacccttaagtgttcccagacttctttctctatggtagctgttttggggaatgtggcaactggtctagctatgccccgacagcagccgctggtgatggagcttgtgaaatacgcttcaaagagcctgctcaccctggggctggagaacaacactaggttgggctttggcaggtgcagcccagagggggctggcaaagcagaaggcagcctacgccaaccagtagggagtggctctgggtcacttcccagaaagggacttctaccaactcagacaatcgagtcaatgggtccacccaccagaggcaaaatagattgcttccattgtttgcaagcagagttgagcaatgggaatggagggagcacctgggcaacaggagatgctggttttcagtgtttgttcattcttccattagtgcccctgggtccttctgctgtcactctactcacaagaatccagtgccttcctgcttccttgggcgcatcaggcccacttccctccccatcactttggcttttcctcttgggacagtacctcatgccttgaatgcattcatcatcacctctccccttccctctgtcattcaaactcatcagtctgtgtcctctttccatagtgcctgctctttcaggtgaattactgtgaggattgggctctgaatctttgtctttgtgttccctacactacccagtaccaggaaaactgaagaacttgtgtaaacactgttttggactccatctgttgaatcggtcccagcc

SEQ ID NO: 471828 - DNA, 1197 bp, Homo sapiens
ggtgaagataagacgatgaggtacgtaaaagtgtctgacatgaagatgctagccgcatttagcaagagtttgaagagaaaaattgacagaagttcaattccagattttctaatgaatttaagcagtacccacgcagttaagtcattcatagatcacttattaaaagtattgcagtcaaaacaggtcaacccaatagatgctttaaaagcaaaagaaggctttgggaaaggattctggtgtgatttaaggatggactttcagccccaggagtctcatctccctcttcttccctctatctgccactgccccaaactagaaggagcaacgaccacattaaataaattttcttttggtatcaccttcacacctacccagacccatatggaagctgaagtcactttctctcaatgtggtacagacacatgaactctaaagagagaactagaacacaatttatgccaaaataattagtgtcattgacataaagttttagtgtacctcaaaaatcatattttattaaaaatagcaattatgttttctcaataccctactttgccttccataactggatttcaaattatctacaaaacagtatgtaacttgcaaagatgaattccacttagaattgttgtctgcagttcctttttaagctaaaactcactttatttttttaaataaatggaattttcctctaatggattaattggctccataagtctgctatattattatactacttgaaccatttgctgctaaacagtaatagtagaacctataatccagtattaatttccacaaaaatttgacattctttttttaatcatacacctgttggagccatctaatgcatctccatttgctaaaattatgtgtgaggccgtttaaatctgagcaatcactcagactgtttatggaatcttggaatattaaactgttctcagtgtcctggtgttctgctctaatgggaaaataatactctctagaatttctggagaaaagaaatactgtggagcttgagaagcagatgacacatgtatgtaaagaaagggcatgtgagctgtaagaggaaaggggacaaagcggatgcagtataagaggatggaagaagttgttatagaagaaaatgcagaaaagtagcaggtagaaagcttactgttatcagagttgaataattcaaaaatagctttggttgtttcc

SEQ ID NO: 471829 - DNA, 1396 bp, Homo sapiens
gctggcttcaggagtgaagctgcagaccttcacagtgaatgttacagctcataaaggaacagctccagtctacagctaccagcgtgagtgacgcagaagaagaatgacttctgcatttccaactgaggtaccaggttcatctcactggggagtgtcagacagcgggtgcaggacagtgggggcagtgcaccgagcatgagccgaagcagggcgaggcattgcctcacctgggaagcacaaggggtcagggaattccctttcctagtcaaggaaaggggagattaccctccagcgcacctgactcagagggtcctacgcccacagagccttgctcattgctagcacagcagtctgagatcaaactgcaaggcagcagtgaggctgggggaggggtgcccgccattgctgaggcttgagtaggtaaacagagcaattaggaagctcaaactgggtggagcccaccacagctcaaggaggcccgcctgcctctgtagactccacctctgggggcagggcatagcaaacaaaaggcagcagaaacctctgcagacttaagtgtccctgacagctttgaagagagtagtggttctcccagcacacagcttgagatctgagaacggacagactgcctcctcaagtgggtccctgacccccaagtagcctaattgggaggcaccccccagtaggggcagactgacacctcacacagctgggtactccccagaggaatgatcaggcagctacatttgctgttcaccaatattcgctgttctgcagcctccgctgctgatacccaggcaaacaggctaaaggaggagtttcgaacccatggcaaagaagttaaaaaccttgaaaaaagattagacaaatggataactagaataaccaatgctgagaagtccttaaagcacctgatggagctgaaaaccacagcacgagatctacgtgacacatgcacaagccttagtagccgatttgatcaactggaagaaagagtatcagtgatggaagatcaaatgaatgaaatgaaattcaccaaagttgaaatgaaggaaaaagtgttaagggcagccagagagaaaggtcaggttacctacaaacggaagcccatcagactaacagcggatctctcagcagaaactctacaagccagaagagagtgggggtcaatattcaacattcttaaagaaaagaattttcaacccagaatgtcatatctagccaaactaagcttcataagtgaaggagaaataaaatactttacagacaagcaaatgctgagagattttttcaccaccaggcctgccctacaagagctcctgaaggaagcactaaacatggaaaggaacaaccggtaccagccactgcaaaaacatgccaaattgtaaagaccatc

SEQ ID NO: 471830 - DNA, 1040 bp, Homo sapiens
ttgagcccagacaaggcagtgggatgagccaggaagacaggctggaaaagtcacccgaggaggaaactcttttatgtctgcattctttcctcccccacctgcccccccacccccaaccccacccccgccaactctagcagcctgggtgaccaagcaagatcttgtctctaagaagaagaggaagaagaaaaggaagaggaagaaggaggagaaggagaagaagaaggagaaggaggatgaggaggaagaggaagaattatcctgctcccatgtgggaggctttgaaggcctcatcctctaccacctgaacttctgggctggcagccgattgcatggtgcccacccacgagggtgggtcttcctctcccagtccactgactcaactgtcaatctcctctggcaacaccctcacagacacacccagaaccaagactttaccagctatctaggcatccctcaatccagtaaagttgacacctaatattaaccatcacacaatacatagcaaaatgctcagtaaatattagctgttgttattctatactttcatctagcataatcctcatcacacatcaccgtgatgcctatttaatttgttaactttccagaatgagtggaagctctatgaggtcagggagcatgtctgccttggtcttactcccagcatggtggtctggcaggtggtaagtaatcaataaatttctgaatgcacccatgcaagaatgcaaaaatgcaaagctaattccctgggctatgtggattggttgctgatactttgtaactaacagaaaattttctaacctttgaatactgtaggtaattgttctgagttgctctcctctttacttaagaatagaggaaatgagaggcaccattgcaaagtggttaagagcacagagagcaaagccagagtgcgtggatttgaaacctggttctaccacttaccaaaatgtgaccttatgttacttcaatagaaataataaagtacctacctcaggtgggtcttatggagattaaatgagttaacagatgaaatgtgc

SEQ ID NO: 471831 - DNA, 775 bp, Homo sapiens
aggaaaaccagagacctttgttcacttgtttatctgctgactttccctccactattgtcctggatgaagcccacttgatcatggtggataagctttttgatgtgctgctggattggcctcttttcactttcacttggactggccctgacacccatcggtctcagcaacttacctgggctgtaccgctgcaaggcttcaggcacagcccccattacttcagtcaagcctttcttcatgatttactttctttccatccatctgcttctcaccttattcaatattttgatgaccttctactttatagcccctcctgcgaatggtctcaacaagacaccctcctgctccttcaacatttattctccaagggatattgggtattcccctccaaagctcaaatttcttctccatctgttacctacctcagcataattcttcatgagaacacgtgtgctctccctgccaattgtgtccagctgatctctcaaaccccagccccttctacaaagcaacaactcctttccttcctgggcatagttgtatactttcacctttggatacctggttttgccatcctaacaaagctgttgtacctgagcgagttagagaaaatgtcacactttgagatgaattaagagtccatttatttagccagcggccaacagatggctaatgctcaaaattctctcagccctgaagaaggggctagattttcttttatactttggtttagaaaggggagggggctctagttaaaacaattttacagaaataaagt

SEQ ID NO: 471832 - DNA, 800 bp, Homo sapiens
ggcgctttgtaggaggaacctggaagggggacccgggggtggacgcggagctgagggaatggcattcctcagcagtgctgtgggtggtgcagccccctccgcatccccctgggacctagcaggaccccacatgctcacttccggcccccagctgtccctggctccagccctggcagggcccctgtcttcttggggtgtgtgttggattttaggtgtgcggaggccacagatgtcggacatcattgcgggccgctggcacgcgccctgcagccggcgctcggtcccgtgggtgtctgtgctcccctgtgggcaacgtgaccctggcagcgcccagcagtgctcagtctgccgtgtgcacacagagccccgtgctgcccgctcgccgtgcttggggggcttgtgtgagaggacataccacagggcggacggcaggctcctggtggccacagtgggcccctgaccactgactttgcagaatgtggccaactctttgtggagggggaagagggaagctgactctgccatggcctctgggggtgtccgtgctgtgtcagcaagtgggtcttgggtgctcatgggaccctgctgaagcatccttgctggggccttccatagagcagtcacttaactgtctcaggccttcttctcgtacaggctcttccatggggttttgctcccctagggtccagcagctgaaagcacagcagcctccctggctcttctcaaggccagcgtccaaggagggattgctggggctgcagggagcacaggcagggcctccaccctggcccaccacactc

SEQ ID NO: 471833 - DNA, 630 bp, Homo sapiens
ttaggtaaaggaaactggaggtggagaatacaatgcaaggagtgacgtggggagtcacagatctcttagcattgactgtgtgctccgagcaaagtatggggctgccctggactagtggtgaactgtatacgtccaataggagttgccccacagctcagagttgtggtgggaataaggacctctccaaagccaagcagcatctgaaaactcccgtaattggggatggtctgcagcttattgcaaaacacttgtggcctaagccaagccaaaaaatgaaagtaagagcagcttcgctagcagatacagagttaaagaagaaggcccagagggagcaagaaaagccagttttgcaggagccaccagagggaataaagattcctactccatatgtcacagcctaccccactttaccaaggccagcagccccctgggaaccagattcaggtgctagcacaccccaactctcaccctgaaatgaaagactggagacttgagaggtcagggaaagaagtcaagatagtcaagcaggccatctcagatctggttgtgcttgagatatgcaaatgcctctcagggagacacgaggacccatttattaagataaccaaggccaagtccaagggtgggaac

SEQ ID NO: 471834 - DNA, 779 bp, Homo sapiens
ctcctcacttctcagacggggcagctgccaggcggaggggctcctcacttctcaaacggggtgatggggcggccgggcagagacgctcctcacctcccagacggggtctcggccgggcagaggcgctcctcacatcccagatggggcggcggggcagaggcactccccacatctcagacgatgggcggccgggcagagacgctcctcacttcctagatgtgatggcggctgggaagaggcgctcctcacttcctagatgggatggcggccgggcggagacgctcctcactttccagactgggcagccaggcagaggggctcctcacatcccagacgatgggcggccaggcagagacactcctcacttcccagacggggtggtggccggacagaggctgcaatctcggcactttgggaggccaaggcaggcggctgctccttgccctcgggccccgtgggcccgtccgctcctccagccgctgcctcccgggcggcgctcgccggcgcggcggcaaagactgagacagctccgctgcccgctgaactccatcctcccggcggtcgggcggcagctgctgcggtcggtcgcggcagcagctccgcttcatatctgcagctggggcccgcgggcgtcagcgccgcgactgtcccggctccgcactgccctgggccgcagcgcagccgcgccaaccaccacccgcggccaccatggccggacagtataatttcaatggtggaataggttcatgtgtgagattcaggacctcaccaatgggctc

SEQ ID NO: 471835 - DNA, 937 bp, Homo sapiens
cagcagcacagtccagctttggctcggcatgagagggagaccgatcccgaaggtgccttcactaattgctacccacgtggcaagccagggcactttgagaaggggtgcccaggcaccaagaggaatccacctcaaccctgtcgagcctgtggcatggtccactggaatcaaactgcccccagaggtggaggtcatcagcttcagaaccagtctcacagatggtccagaaggacttatgggtcctggggctcaaactcctggctccagtggctcaaactgccattacagcacaggatccccaggagagaacttattcaaaacagtcaaacaggttgttaaggcttatgaagtctaccttaaagataatctcctcaacaagacagcttcttcctctttgaacccaaagggtgggaagctatgcaagggagatctggcagacaaacttcacccacatgtcaaaaccaaagggcatccaacgccttctgaaccaaccttgctattggttctgttcgtgattcaacctggttccatcgatactgcacactatgtgcagggcactgtgctaggtgccctggccttggtgattattacttcgcgggcgtcggagggttgtggcccggcggcccctgttccaggggtggccgcgcggacttggtggtggccgtcctgtccgcggcgggaggtgggcggggcaggcctggcgcccttcctcctctttctgccgcccgggagaccagccgaccgctggggagaggtgggaatgaaggtcagtggactcagactcaggccgcaagcgtcacacttggcctcttcccgcggtggccacgttgaccagatctgtgacccagacttactggctcaataaattgtaccactgttcacctaggatactgggagagtttactcaatctgtatctccccatgtcctaaacaaccc

SEQ ID NO: 471836 - DNA, 557 bp, Homo sapiens
agtaggctcagagagactgcagcatagccacatggtggaaaaagatttatggacagaaaaagcaaagtgacatacagaaaatggggcagaaacagggtttttcgtgttggcaagccttgtctcaaactcctaacctcaagtgatctgcctgacttgaatttcattctctttctttcttttgagacagattctgtctcacccaggcaggcatgcagtggcatgactgcagctgactgcagcctcaaccatctgggcccaagcagtttttctcacctcagccttctgagtagctgggaccacactcatgtgccaccatgctcagctaatttattattattatttttagaggacaagcggcagacaaaagccctcagacaccaagttaaagaaggaagggctttattcagctgggagtttcagcaagactcacgtctccaacaactgagctccccagagttttattaaaaaataatatgttgtatatttatgtattgtgttattaaactgtaaatgttattaaaaatagaaaatctttttttatttaattatgtaaaagg

SEQ ID NO: 471837 - DNA, 626 bp, Homo sapiens
aagtcagcggcaggtctgtgacagcagcaaacagcagtggtggatgctaactgccaaaaaggggctataggaaagcaattagaaaaatggaggctacagaagaaagtgaacggaagcgagaggaatactcaagggaagccttcatatgctcaacaaaacagcccttggattcaagagggcaatgtttatccaaagctgtggacaaattacttcaaaagtcactgagaaactcattcctggagcataacagaaatgaaaagtatacaataagtcataagaagctggcagagccagagttggaattagtgtggattagtggaattagattagaggcttatcttctgcccaccggggagattgtaacatgtcccttgtcccagcactatgttgacgttactcttgccttcacactgcaatcacaagacattgtgacatatttctgggcccagcgccaaggtgatggcccagaagataggtgggattgtgaccctcatatgaaaacccagctgaaagtaaggatggtcaagtaaagatgtaagccatacatcaacacagtgcactgttgaagttctaaatctcacacccagaggcagtcagaagattaaaaaaaaaaaaaggctcttgtg

SEQ ID NO: 471838 - DNA, 724 bp, Homo sapiens
ttgcagtgagcggagatggcggcagcacagtccagcctcggctttcacaactttggagttcgggcagcttcaccctcagccgctccaacagtccgtccatttggctcaagctctaggcagtttctcctggttcttctgttcctggcgtctgagatttgtcagcagggccagattttcaggaaccatgcatggctatcgcctcctcccgcctggagggctgctcctgcgcctctgaccggcgctggttccagccgcggcccagctgagcacagcaggaaccgcagtagcagccggagcgcccacgcccggggtcgcctagcccaggaacgccttagttgcaaccctgcgtcgaggcccagctccgtgcgcagaaagccgaggccaaccagagcatttcctggacgagtcctctcggcctgcggggccagttcctcctaccagcttcctgctgccacctcggcttccatcagagggacgcttaggatggcgcaggggcccggagacactgtgaagaaatgctggggtaacattaatttttcaatggtgccttctgaatcttaacgttgattaccttttatttgagtctattaactaaactgtagtgagctctaagcaattgtaaataactaccttccaaatatgtataatttatattttttatttatataccataaacgtttattaagctgtaatatttacaatattattttctgttctgagatct

SEQ ID NO: 471839 - DNA, 1909 bp, Homo sapiens
gacattagccgtggagcctggttatggagagcgtggtggagaataagttcggcagcatcctgcagatggacatgatggacatgctggccctcatgtgcccctgcagagtgctctcctcactggccattctgcatacatggctgctggtcaaccagactgtggtgctgggcggtgaggtgaagctccgctgtgaggtgtgcagggacttagcatttggaggcgaacagcagcaaggtgggcaccaatgtcatgccctcctcaccatgctcaagcgacgctggcctgggaactgtccaatcaggcacgcagctggagcggaaagggcggcttccgggatgtggcggggtctttgtctctcgctgcagtcggagtatggtctagtgttcgctgttctgcgtcctctggtcctagaggcccatcctctgtggccctgtgacctgcaggtattgggagatccacagctaagacgctaggaccccctggaagcctagaaacgtgtaggtttcttaacataagtttattgtgttttttggttttacaattttagacaatttgcaattctgtttttacattcataccaaattgttttaattctgtagctttgtgttttgaaatcaggaactgtaatgcctccaacattgttttgttttgtttttaatatttttgggtactttattgtatgtagagattctgtatactcgagggattgctgtttctgtttcttcaaaaatgcagtgagaaatttgaaaaacattgcattaaatctgtagattgcattgagcaggatggacatctttacagtattacctttttcagcctttcacaagagcatgctcaagagtgtgttgtttaatttctatatatttgttaatttttcagattttttttctcgttgtatactcatttcattttggtgatagaaagtaatttataaaatttcagttttaaaaaaactgtgttttttatcattagatctctactgactcttgtagaaaaaaaagttggatcttggtttttaaaatttttaatctgttgaaagtatgtctcgatttgaaagttaattttatatatacatttaaataattgataaagacggactgttacatttttaattattttatttgattcttgcatctttgtttctcattttctctctttgtgtctttttgatttttgtattgatatgcttttacttatttctaattcacttttgtatatttgtacagatttttttttttggtggcaccttgggggttgcataaaacttctataagaaacaacagtatagttttaatttggtataaaataaatctcagttgaataaaaaaatcttcctcattacatctgccctgaaatttgtctttgatgttgctaattatgtttttacattgtatattcattaacagttgtttataatttctgtgcttttatttttcaaaatttagagatcatttaaaatgttttctgcaccattatgataatgccacaagattctgtttttatgtatgtgcatatctttcctggaaaataatgtatttttatatgattatgtgtttttttttttaatacttttactttcagtttaaggaactgctttcatcatcttttatatgtagggcatatgcagtgctaatatactttttcagaatttggttgttttggaaggttttttctttttatgtggcaggacagatttgttgatggtattatcctcaacttgatagctttttttttttttttcccctcaggactttgtgtcacacggtatctttctgatctgcagaatttttgttgataattcactggtaatatcataagactatgtttgtaaatgacacattacttttaccttgtagctcctaagactttcttcttgtctttgatttttgaaaatgtgcttaatatgtat

SEQ ID NO: 471840 - DNA, 849 bp, Homo sapiens
caagtcacaggacaacgatgagctttattggctcgagccaggacttctcaagaacatgggatggacatgctctcttgctccttctcataattcaggaaatatacttgtccctggggtggaacattggcttacttgtggggcaagaatatgaaacgctcaccttccaaaccaacagaacctttgtgtgccgctctgggacaaagcttccagaggaaggaacaggcagcaatcttactgttctgcagactccactggtgatactcaggcaaacagggtctggaatggacctccagcaaattccagcagacctgcagaagaggggcctgactgttagaaggaaaactaacgaacagaaaggaatagtagcaacatcaacaaaaaagacgtccactcagagacccccatctgaagattaccaacatcaaataccaaaggtagataaatccatgaagatggggagaaaccagtgtaaaaaggctgaaaactccaaaaaccagaatgcctcttctcctccaaaggatcacaactccttgccagcatgggaacaaaactggacagagaatgagtttgacaaattgacagaagtaggcttcagaaggtgggtaataacaaactcctgtgagctaaatgagcatgttctaatgcaatgcaaggaagttaagaaccttgaaaaaaggttagatgaattgctaactagaataacctgtttagagaagaacataaatgacctgatggagctgaaaaacacagcatgagaacgtcatgaagcacacacaagtatcaatagccaaatgaatcaagaagaagaaaggatatcagagattgaagatcaactcaatgaaataaagc

SEQ ID NO: 471841 - DNA, 735 bp, Homo sapiens
ggcttttcagcccaaccacagagcctcatggagtttggggtgaaagaccaggacaccgacatggcccattttgaccaccagctccgggtgccagctggagccccagaagaggatcaggcatcgtgtttagtcacaacccccactccttcattgggccagcaaatatctatccatcttcccaccgtctactcgcagccaaccatgttcctgacactgaagccagagcccaggctagagtgcagtggaacaatcagagctcactgcagcgtcgacatcctgggctcatgtgatcttctcacctcagccttccaagtagttgggaccacagaagtattttggcttttttattcttatgaattttcgtgtgaatttagaaacagcttgtggattttaaaaggaaatgtctgcttggatttgaatggaattgtgttgcatccagatcactttgaggaaatttgtatcttaattctattgaattttccaacaatagacatgatgtagctctctgttcagctcttctttgattttttaaatagacatttacagtttttggcacagaatctgtatatgttttgttagatttatagctaagcattttatgtttttgatgctgttttaaaattttaatttccaactgttcattgctgccatacagaaataaaacagaaatacagaaatacagggtacaaaataaacttgaccttgtttctttcactctagatagtattgcttatt

SEQ ID NO: 471842 - DNA, 990 bp, Homo sapiens
actagagtcacgacgacatcaacccaataacttgggggcaactcaagaaaaccatgcaggaagctgagaaacaagtggagcatcaaaaccagacaaaaacccctaattacatgttcatggccatgttagccataatgtcctgtgcggtatgttttccatgtgcagaggcaaaaacatatcgtgcatatcttcccaattccccagcagtacaacctatactttggagtgacactcctcctgagatttatcatgatcaaggagcatgggcttcaggacccctaactccccctgacatagaacagttagactctcagaataatgtcattaattatatcgctccactggaaggacttctcatgtgtatcaccacaaagatgtcactcagccataggtgtcttacaattcaagctcaaatatggttgagtcactatagaaaaatcatgtccttattaagtcttagttctattaatgtaactggtgtgctaaccaaccattcccagcccaattgtcctaattgtgctgctctacagaatggattcccttcaatagttcctacccccctccttggacccagtgtcttggcccagtgcctagaaaacaatctatgttaactggagacattatggattggggacctaaaaaaatcaagagtgcacatgaaagcattctcttgaataaggaaggaagccttatttctaatcttctatagactgaattatggaaggtaagattagtgaaacactctatgtccagagcactgaatgtctttctgtccactggccacaggcattaataattggatgcttggtgtctcagggtttattctaaccaagatgactgagagtaatggacacagttttacctttacccaaaaaagtttatttcaagtgaaacattttttaaaaatttactttattaaatataactctaagaatatagagggtttttttttaatgacttctcaagaacaggtattggcaaactttttat

SEQ ID NO: 471843 - DNA, 623 bp, Homo sapiens
gtcctccagcatcctggaatatgggcagagtcagaaggacgccctcgtcagggccgcttccctcccagagaaacagagtcagatctgacttaccttcccaggaccagaaatgcaggactcaggagttgattttggagggcacacaccggcagtcgatccgttcccctccggaagacagtggcctacgggtctctggaacagcttcaggaggtgcctcccctataagcccgctgtccagccaggagagcctggagcgagtccggcactcaccaggtggcaattatcttgctggggcttccaaatgttgtaaccgagcgagttgtagagaaacgccacactctgagactaatttcaggagtccttttattgccggtgaccgagagacagctagtgctcaaaattctctcggccccgaagaaggggctagattttttttatatcgtggtctaaataggggaggcggagtttagctaaagcaatttttacagaagtagaacaggcagaaagttaaaaaaattaattggttacagaagcagttacagaaaaataaacagttccaggtgcaggggtttaaactatcacaaagagattgtgctctcctgaagtcagattgggataggagg

SEQ ID NO: 471844 - DNA, 894 bp, Homo sapiens
accgtggctggaaccggtgcccgccagaggtgcaggagccgccccgcgggcagaaggaggcggtagccgtggtccctgaaaaccaggccctgctgacaaatctcagacgccaggaacagaagaaccaggaaaaatgcccgacagcttgagccagatggacggactggtctccctgaccaagctggtctcggcaagtggcgtccatttgtgggggcttcaatccaggtcaaagggtcaccggagcaatggttggaatggaaaactagctggaggacacccgagtactcttaaagcaatccccatggcaggaattcagcaagctagacgagagggtgatttagagccttggcagttccccattagaacacaacccccagatcaacagggaaatattacagctacatttgagccttttcctttgaaattactcaaagaattaaaacaagttataaatcagtatggaccaagttctccttttgtaatgggactattaaagaatgttactgtttccagtcagatgattcttactgactgggatgctcttactcgagcttgtctaactcctgctcacttcttacaattgaaaacttggtgggcagatgaagcttccattcaggctgctcacagtgcccaggcccaacttcaaattaatataactcagaccaacttttggggaaaaaatcaccgagtcgggccaccagataggggaaaaaagaaaactgctgatcctgaaataagtccaaaaggaaaacattgggctaatcaatgtcattctaagtttgataaagatgggaacccaatttctggaaacgccatgagggtcccgtcccaggccctgttctaaaccggggcatttccagctcaggccattccctcacccctgtacaatggctg

SEQ ID NO: 471845 - DNA, 477 bp, Homo sapiens
gtctgtgtgtgtgtgtgtgtgcacgctcatgcacggaaacctgtgcaagtttaatggtgcagatatgagtgtgctccatacgagaaaattggcagaaattctcaagatctcagggactctcattctcaaagcaaaccccatcttcctcagttggacagaaatagatgagttctgcactgggcagctggaccttctgtccaaaaaaggtcacgcgcacaggatccttcaaggaccacagacaatttcagggatacatgtgccggatgtgcaggtttgttacataggtagatgcaatgccattgctggggagtggctggaattcaaagccagtgggtcttatcctgtgaagctctatgaaagtggggtccacagactgatgctgctcagccccatggattcagctttcttcctaggggtgtttacagaggtccaaattcttgcattttctgagtagctttcacctttgccagagatccc

SEQ ID NO: 471846 - DNA, 728 bp, Homo sapiens
agaatttaggagtggtgttggacctatgaatgtgttggaccccactacttgtgttgaacaggataaaagtcatggagctgctggcccaggttaaaagttccaaacacaaaacattaaaaaataataaaagcacaacatgtgataaatgtggaattcttgttggacttagtcgccagctcaccatgtctaaggtcaaactgatggctcttgctggtgtcaaggttgaccacatggctctcattggcagcactattgttcaggcccagcagagggatacaatcatgattcaatgcagcaacgatcttcgtggtctcatccggaagatgtcagccacgagtgttggacttggtcgccagcttgccatgtctaaggtcgaccatttggctcttgctggcagcagtaccattcaggtccagcagagggatgcgatcatgattcactgcagcctgcatctccccactgcgagcattggacctggccgccagcttgccttgtctaaggtcagccagatagctctcaccggcagcagtattgctcatattactcagcatgaagctcagaaataaaaatcacaggatatacaacaaaaatattcactgtcacgaatttaccttgtaaaaagagaaactgatgttttaatgaatctatgtgactcactaattacctaccacattttcttgtggaaatgtatttattttctgcagccaaaatagaagagagatttccct

SEQ ID NO: 471847 - DNA, 667 bp, Homo sapiens
acagctcattgagaacgggccatgatgacaatggcggttttaattcacactaaaaagacactgttcaaatgtgaagaatgtggcaaagcttttaaacagtcctcaaatcttactgaacataagagaattcctactagagagaaacactacaaatgtgaagaatttggcaaagattttaagtggtcttcaaatcttcctgaaaatgagataattcatattggagaaaaaccttgtaaatgtgaagaatgtggcaaaacttttaagtggtcttcaaacattactggacataagataattcatactggagagaaactatacaaatgtgaagaatgtggcaaagccttttactcctcctcaaaccttactttacataaaatgattcatactgcagagaaaacctacaaatgtaaagaatgtggcaaatcttttagccagtactcacaccttactacccataagggaattcatactggaaagaaaacctacaaatgtaaagaatgtggcagagcttataagtggtcctcaaaccttactgaacataagataactcagaactggagagaaaccctacaaatgtgaagaatgtagcaaagcctttaactggtccttacaccttgctgtacataagataattcatactgaagagaaaccctacaaatgtgaagaa

SEQ ID NO: 471848 - DNA, 651 bp, Homo sapiens
ccaggtgtcccttgccctgctccaccccgccattaccgagtgaaggtgccacagaggagacatagattttccctgagcccctcccccagtaaattgagaaaaagacaagggatacactacagttatgggaccctgtcttaggcaagcagcattagagggggagctcttggcttgcctgatgatggaagatcaacaaggcaatcatgtacatgaacccattgctttcaagacttataaagaaataagaaagagcattagagaaaatggagccactagcccatttatgaaaggattaattgaggccatagcatataacttccacatgaccccatgggactgctttttgaagcacatcttgaccttttgtctttctgttccctgggatgaaaactcatcttcagtgctgtctacaacaaaagagaaacatcatgttactaaaacctcaggaacagagattgcagattgggctaagattgtacactttcttaaggatgatctgcatggaaaagcagcaaacaatttcagaaagatacaagaaaaattgcctctaatgggtacttatactgtagttcaactcgatttgttctgtaagtggtagggaaaataggataaaatacttcatgttcaagcatttttgctgctcagtcagaa

SEQ ID NO: 471849 - DNA, 2855 bp, Homo sapiens
tgggaagagctttttgtccccagacctgatcacctgtctggagcaaggaaaagagccctggaatatgaagcgacatgagatggtggatgaaaccccagagaagtcctacaaatgtaaagaacgtggaaaaatctttaattggtcttcaacccttactaatcataagaaaattcatactgaagaaaaaccctacaaatgtgaagaatatagaaaagcttttagtctatcctcaaatcttactacacataagataattcatattggagagaaaccttataagtgtgaagaatgtggcaaaacgtttaacaaatccttaaccctaaccatatataagaggatgcacactgaagagaaactctacaaatgtaaagaatgtggcaaagcatatgtatggtcctcaaacctaactaaacataagaggatgcacgctggagagaaaccctacaaatgtgaagaatgtggcaaagcttttagccaatcctcaacccttactacacataagataattcgtactggagagaaacgctacaaatgtgaagaatgtggcaaagcatatgtatggtcctcaaccctaactaaacataagagaatgcacactgcagagaaaccctataaatgcgaagtatgtggcaaaacttttcatcgattctcaaatcttagtgcacataagataatccatactggagagaaaccttacaagtgtgaagaatgtggcaaagcatttatatggtcctcaacccttactgaatataagaaaattcatactagagagaaaccctacaaatgtgaagaatgtggcaaagcatttagccgatcttcaaccctaactatacataagaggatgcatactagagagaaactctacaaatgtgaagagtatggcaaagcttttagacaatcctcaacccttactgcacataagatgattcatactggagagaaaccctacaaatgtgaagaatgtggcaaagcctttaactcgtcctcaactcttactaaacataagataatccatactgaagagaaaccctacaaatgtgaaaaatgtggcaaaagctttaaccagtcttcaatccttactaaccataagataattcatactggagagaaaccttacaagtgtgaagaatgtggcaaagcttttaatcgttactcaaatcttacgaaacatacaattgttcatactggagagaaaccctaccaatgtgaagaatgtggcaaagcctttaaatggtcctcaaatctaactaaacataagataattcatactgaagagaaaccctacaaatgtgaagaatgtggcaaaacctttaaccagtcttcaattcttactaaccataagaaaattcatactgtagagaaaccctgataatatgaataatgtggcaaatcttttaacttatcttcaacttttaataaacattgaggtagtttatactggagtaaaaccctacaaatgtgaagaatgtgggaaagcctttttctcatcctcatccctaactacacataagaaaattcatactggacagcaaccctacaaatggaaaaaatttggcaaagcctttaaccagtcctcacttattactacagataagtcatattggagaaaaatcttacaagtgttaataatatggaaagcctaaaaaagtcctcaattcttaacagacataagattattcatattggagagaaactctacaaacctgaaagaaaagacaatgcttttgacaacacctcaaacttttctaaacataaaaacatgttgccaacaaattctagaaatgtgaagaatgtgacaaagcctttaaatgattgtcacgcttgattatagataagataattcatgctgagaaaattgacggtgtgaacaatgtggccaagcttctaaccaatgctcacatcttattgcactgtaaagcatttatacttgagaaccaatgtacaaatattgacaaaaaagccattaatacctgctcaaatcttactcaaaatcagaattcatactaaataaaagcattaaaagtttaattactatcaaaagatctatcagaaaatatgtctataaagtgcagaagagtatttattttgaaaaagcattaccaatatgaagagggttgtaatatctttgcttgtatcacagatcgtattgtacacattttgtactagaggaaaatcttgaggcagttgttaaaattttgttcaacatcaaggagtttatactgaagaaaaccctgccaatgtaataaatttggaaaaacatttttttcaaaaactgcaaattataaaacaccaaagagtttatactaaaatgtatttttgcagatgcattaaatatgaaagatattcagtccaaagttagttagttctatgtaactatcagggaatcattcacagtagaaatatctaggacactcaaactttagacattatactaaatcagaatgctgagtataaaaaatacagactaaagttcatataaacattatttgtatataactttaaaaaaaaattttggagagatgtaattacactcaaagtatactttttgtgaaaatatggaatttttaaaaagtgaataataatggaaattaatgtcttaaattacttcatgctgtttcatcattcctggtgtattcacatgtgaaaatatgtgactaaacattgctgaataaaagatacgaaagattcttttttttaggtaggtgttatttatgaccttttctatggaagggtaaggacattataatgtaggattcatgatgaaaatttaagtagagaggctctttgtggttaacttataacattgagtgatgtatgagtttttgggaacaagccccccaaaatctgtccataaa

SEQ ID NO: 471850 - DNA, 646 bp, Homo sapiens
gcgccttatctctcccctttgaacccagtcccctcttctgcccgagatgctctggctctgctcatctgtccacacccccacactcccggggcgccctgagcctctggggcgcgcagttggatggtgcacaggggaggcccagatttctccaggcctcagcggccaccctgggtaccccgagtctggggccctgttggagggccagtccaggggttcgcccgaggcgcgcgcgggggccaaccgaggcggtgagggcaccgggcaaaggctgcgatttggtggggtgcaggggtcaggcgacagagctggggagataagatgggagataggccgggtgggtggtggcgcagccctggttttggctgagggcagcagcagtgggggctgggtcccccgcttgcctggtagaaccgaaaatgacccagtctcagcagcgcgcaggggcagggagcctgggcgatccctgaacagaggacagccccaggggttttcatagtcgctggcccaccgcatgtactctgggcaagtggcttcgcctttggacaataagcctctgtaaaatggggataataaacctttctctgactcagctcagcagacccaagacccatggggtgaagttggggcctccctgccacagggccct

SEQ ID NO: 471851 - DNA, 1680 bp, Homo sapiens
gcagcctgagtaagacaggggtcgtgccccggggaactcaacgtcccagcggacggactaatatacaagctcacacagtcacagacaaccacagcttgtttgcctcccacactccagggagggatcctggggggtcagccctggagcctggaggagggagagagagggtcccagtgtggtccctgcctggacccagcctctgctgttgtccccagaccacaacgagtgtgccaccagcaccatgtgcgtcaacggcgtgtgtctcaacgaggatggcagcttctcctgcctctgcaaacccggcttcctgctggcgcctggcggccactactgcatggacattgacgagtgccagacgcccggcatctgcgtgaacggccactgtaccaacaccgagggctccttccgctgccagtgcctgggggggctggcggtaggcacggatggccgcgtgtgcgtggacacccacgtgcgcagcacctgctatggggccatcgagaagggctcctgtgcccgccccttccctggcactgtcaccaagtccgagtgctgctgtgccaatccggaccacggttttggggagccctgccagctttgtcctgccaaagactccgctgagttccaggcactgtgcagcagtgggcttggcattaccacggatggtcgagacatcaacgagtgtgctctggatcctgaggtttgtgccaatggcgtgtgcgagaaccttcggggcagctaccgctgtgtctgcaacctgggttatgaggcaggtgcctcaggcaaggactgcacagacgtggatgagtgtgccctcaacagcctcctgtgtgacaacgggtggtgccagaatagccctggcagctacagctgctcctgcccccccggcttccacttctggcaggacacggagatctgcaaagatgtcgacgaatgcctgtccagcccgtgtgtgagtggcgtctgtcggaacctggccggctcctacacctgcaaatgtggccctggcagccggctggacccctctggtaccttctgtctagacagcaccaagggcacctgctggctgaagatccaggagagccgctgtgaggtgaaccttcagggagccagcctgcggtctgagtgctgcgccaccctcggggcagcctgggggagcccctgcgaacgctgcgagatcgttgcagaccctgcctgtgcccggggctttgcccggatgacgggtgtcacctgcgatgatgtgaacgagtgtgagtccttcccgggagtctgtcccaacgggcgttgcgtcaacactgctgggtctttccgctgtgagtgtccagagggcctgatgctggacgcctcaggccggctgtgcgtggcatcccggagtgctggaagtccagccaggatttatctttgaggacagtattaggttcacagcaaatatgaacacatagcccccacctccacacacgtacagcctccccaactctcaacatcttgcactggggttagaaggtgcatttgttacgatggatgaaactgcacgggtacagcattgtcatctctaagtccatagagcaccttagggtttacccttggtgtattggacattctatgggtttggacgaacgtataatgacgtatgttcaccattgtagtgtcatacagggtagtttctctgccctaaaaatcctt

SEQ ID NO: 471852 - DNA, 990 bp, Homo sapiens
tgtgcaaaggccctggggtgggcctgagggatggaaggatgatgcctctgtggctgaagaacgtggacgagtgtgcaagggacccgctgctctgccggggaggcacttgcaccaacacggatgggagctacaagtgccagtgtccccctgggcatgagctgacggccaagggcactgcctgtgaggacatcgatgagtgctccctgagtgatggcctgtgtccccatggccagtgtgtcaatgtcatcggtgccttccagtgctcctgccatgccggcttccagagcacacctgaccgccagggctgcgtggacatcaacgaatgccgggtccagaatggtgggtgtgacgtgcactgtattaacactgagggcagctaccggtgcagctgtgggcagggctactcgctgatgcccgacggaagggcatgtgcagaactgcttgagcgcccccagactactcgagtgaccatcgctatcctcacctggctacaggtcgtcctggggcctggggagcagatgtgtactgggtggtctatcagggcaaagctaagcacagtccccaaccctgctcccccagacgtggacgagtgtgaagagaacccccgcgtttgtgaccaaggccactgcaccaacatgccagggggtcaccgctgcctgtgctatgatggcttcatggccacgccagacatgaggacatgtgttgacctcatgctctcttccccaacagatgtggatgagtgtgacctgaaccctcacatctgcctccatggggactgcgagaacacgaagggttcctttgtctgccactgtcagctgggctacatggtcaggaagggggccacaggctgctctgtgccccggggggtcccctgaacagctcaggaagggaagccccaagtgtctgcagcagcatttctgaaacgtgaatccctcataatttgatgcaatacagggatgaacacttaaacatttgaatagtgactgtgtt

SEQ ID NO: 471853 - DNA, 1311 bp, Homo sapiens
ggaaatgctgatgtggatgaatgcgaggttggaggacacaactgtgacagtcacgcctcctgtctcaacatcccggggagtttcagctgtagacctggatgaatgcgtctcccaggagcaccggtgcagcccaagaggtgactgtctcaatgtccctggctcctaccgctgcacctgccgccagggctttgccggggatggcttcttctgcgaagacagggatgaatgtgccgagaacgtggacctctgtgacaacgggcagtgcctcaatgcgcccggcgggtaccgctgtgaatgtgagatgggctttgaccccaccgaggaccaccgggcctgccaggatgtggacgagtgtgcgcaagggaacctctgtgcatttgggagctgtgagaacctgcctggaatgttccgctgcatctgcaatggtggctacgaactggaccgagggggtggcaactgcacagacatcaacgagtgtgcagacccagtaaactgcatcaacggcgtgtgcattaacacccccggcagctacctctgcagctgcccccaggattttgagctgaaccccagcggagtgggctgcgtggtacagaacctgtgcccgggtggtgagggcttccagcctaaccgcatcactgtcattctggaagacatcgacgagtgccaagagctgccagggctgtgtcaggggggtgactgcgtcaacacgtttggcagtttccagtgtgagtgcccacctggctaccacctcagtgagcacacccgcatctgtgaggatattgacgaatgctccacacactccggcatctgtggccctggcacctgctacaacaccctggggaactacacctgtgtctgccctgcagagtacctccaagtcaatggtggcaacaactgcatgggtgacccttacccacattcttctcctgttgtcgccaactacagatatgaggaagagtgtctgcttccggcatctacaacggcacatgtcaaaatgagctggccttcaagcgtgacccggaaaatgtgttgctgctcctacaacattggccaggcctggaatagaccctgtgaggcctgccccactcccatcagtcctgactaccagatcctgtgtggaaatcaggccccgggattcctcactgacatccacacggggaagccccttggtgatccctggaacccaccattctactttctgactctgtgaatctgacggttctagggacctcctctgagggggtgggtgagtgtgaagaggagctgtggaggagagaaggggctccactgaaacaaaagttgggccggtgt

SEQ ID NO: 471854 - DNA, 604 bp, Homo sapiens
tccgagtgttctcatttgagataaacctggtacctcagttggaaatgcagaaatcacccgtcttctgcgtcgctcatgctgggagctgtagactggcgctgttcctatttggccatcttggaactgctgaagatattttcttattacaagtgtatacatgcacaaacatctttttaacaaaagaagaagaaaatactcatgacaatttcagtccttgttttgcagctggtcatgtggttgtacctggtattgatgaccgccttcttctactacccattctgtattccctttgccttcagcaaacacctcagcagtttaatggaatcgttgtcgtgtctcctggtggcagcatctctccctctggaactaagaccaccagagacagcgctgtgtggaataccatgacagtggataaggcattctgtgagtccacagatggtagttttggcagaagcattgcatgtgggatcggcaaacccatatctggagtaagtgtctattccagtgaggacaaacctctgtcctttgtataatggaagaggtctgatataatcaacctgctaccaggtagctgcctgatcactgcaaggaatggtgccatatc

SEQ ID NO: 471855 - DNA, 1331 bp, Homo sapiens
gaaaccatgaatgtgatcatctgactcctgtttgagggtgcatccatcttggtgtaaccattctcgcattaatggaatttaaagggtacttgttagacattcattgctttggcagtgtcatgcacaacacagaacatcttgtttatattacgggtataacattttattcaggacttgcactattagcacaagtgtctggggcaggcccttcaagaggcattcctgaagaagacattgttatcataggagataacagctcatgcatgttactgcccctgaagaccttccactgggacaagatgtggaggtggaagacagtgatatggatgctcctgggccctctaaagagagcagattggtggcataaatacaattgccagtgttgctgctgtccgctacccgctccttggaaaaatgaaaggagtgctatttatagctattgtaaaccagagtcaagtttagtaatgctgccacacaacctttcgctggaatcaagcaaggccggtatcatgaaagaagagatgttctgttgtgatgaagctgcatagaaatattttttcattgctttttttgacctcagaagagaaacagcaattggacattttacttatgtccaaggcatacaagagaagtatctgaaatgtagttaaaacaagatttgcaaaatatttgttttctgttgtgtgtgtgtgtgtttttaagtggatccttttgttttcactctaaatttcaaaattctgattgtggcagataagacattttgtaatttgttcatgcatgcttctctagagtcaactacagccaccctcagaggggaatctcttttttgcctttttacattctgtcttctttttttttgtttttcttttttttttttttgtttttggcctgaaatactttttcttgcttcacctggttatccaattatctttcaggatgatgtcacttccttcatgaagtcctcttcacatgctaccttgggttaaatgccccatttgatgctcccttagcgtcctgtacttggcattgtcatagcgttcatctcagtgtaacatgattatgcgtttccttcacttggctatgagttgtttcaggacaagttttttttttttttctttctctgccaatgcctaacattgtgcctggtatagagtaaacaatcagtaaacatatttttaaaataaaggatagacctttcttattaaaatatagaatttgattataagcatgaactttaataaaagggagagtgagaggattataaacctttgaaattgtgcacattctgtgttcgtatactttgagcatattacatctctattaagcttggt

SEQ ID NO: 471856 - DNA, 903 bp, Homo sapiens
ctgaatatctagatgcaaaagaatgaaattggacccttacctaactccatttacaaaaattacctcaaaatggctcaaagacctaaccatgaaacttacaactacaaaacctttgaaagaaaacacaaaggaaaagtttcacaatactgaatttagcaacaattttttggatatgataccaaaagcacaaacaacaaaacaaataacaagtgttggtgatgatgtggagaaactggaaccctgcaaaccactggtgggaaagttaaatggtgcagccactatggaaaacagtatgacggttccgcaaaaagtacagcctcattcctcactatcttctgggcacatctgtgagctgcctgctgatgccatcggctctttgttccaggaagccatctaattcccatggtggggaaccacagccagctcccttacaggactctcagcagtggaatcagcatgatagtcagtctaaccctgttttcttaagatgtatccagctctctactttctccactttgaggttaacagtaagactttggatttagtcaatgagggtttggattcagttccctcacttactaggtgagagacctcaagcaagtcactaagcctctccaagcctcagtttccttgtatggaaaatgggtacaatactgcctacctctataaactagtgtgaggattaagatgatgtgtacagagccagcacagggctgggaaaagaataaacccctaataacccatagctaggaggataaggagaaggttaatgtcaacattagcagtactaccagaattttatcttctctaagacaggcaaaggaaattctcactggtccatctttgagttttgaacttcgtatcttttgcatttaataataaaatagattactgccaaaccac

SEQ ID NO: 471857 - DNA, 670 bp, Homo sapiens
gcgtcttcattcttgaagtcaggaaaactctgtctttccaggaagcagagaaggggaatggagaaggaagaagaagaagaagaaggaggaggaggaggagggagaaaagagagagaagagagatctacgggatgggaaagaaacagccacgcaaagagcaaagcgaagagagtttcaacagataagacagcaagtagacagaacagatgccttggagcagaagacggtgtgggatgtttgaggaacagaaaggaaggccatgtggctggtgggaggcagacaggtcagattaaacagagcattgcagaacagggtaagaagtctggactttactccaacttccataaaatgaatgaaattggccatgtgaccttgaacaatccctttctagcctcagtctccatttttttaaatctattgggcatgggtaagaagccctgcctcatgtacatttcagagattgtttaaatatcaaatctggagactttctggtcacagagaaagatggctaatttacctgatacatttatctgtataaaagtggagtcattggaagactgattgtagaagaaaggaagctgaaccttggggtttctgaaggttaagtctctcattgattggtagtaataatagtaataagagtaaatattccataaatgattactctacc

SEQ ID NO: 471858 - DNA, 800 bp, Homo sapiens
cttctccaacaccattggagcccacagtcctgatatttacaattttccccttgtggtacagggtagaatgtgggtttggaatgaggtactcctgagcttggggtcagactctcaccatcaaacagctatgaccttgagtctgattgtcagtgaaggaaactcatgtaggacagctgagcccacatcacagctttctaaaaacaacttaaatgccaaccctaaaattctgaaaccatggtataaatcctgcttcagtcagactaggtctaggcactgggatgggtctggtccaggaacagtggctgctagactgccagggcttactggaggctgctttggcaaacagaggccagctagtccaggaagtctgagctggaccccagagtccagggtgcttctggagaaagccaaggcttgtcccatgtcaggaagaaacaggctagctgagcagcaaatacaaatcttgatgaagaagaaaattgagaatacagaactggcaatattattcaaggcttggagtctgaagaacaaggcaagatagtaaaaggaagcaaggcataagagtatgtttaagcttcttactggctgtttcagtgtactcgaggtgattggctatataatacactaaacctttcaatacttattttacaaaattattcagctctagcaggctagacaatttcataaggttggtctctaaaggagacttatctgcctataagatgaaacggtgtacatcctcaccaaaaattcttagcatttcaataagttctaaggacactcatgattaacagtaatat

SEQ ID NO: 471859 - DNA, 524 bp, Homo sapiens
ttgttttgtttcaaattgtactgaatgatggataataaatgcacattgtttgggtctccctggggaaagggccgacacttgtgctcatttgcacccaagctgctgagggcttgcactgacagaaacagatgtcagcagggtgaaaccaacacattaattttgcctgatgacctaagccagatgtggatagaagtctccagaggccctcaagatgaggaactttcctaccctgttccctgcacgtgccccactcccacatgccatgtgaccaccgatgttccttctgtccctatcaatggaataatacgaaagcatgctggagagcaccaggggaaagttgatatcactgtggagcacaggaaacccaggacagcgtcacggagaggggagcaaggcgttctgcctctgcccacactgcctcctccactgggataggctcagggttaaggggacttcttacagggaaatggtaagctggagatccccagtagtcttcattgtcactaccaacgccatccaacctt

SEQ ID NO: 471860 - DNA, 1555 bp, Homo sapiens
tgtctgattcaattccacatccacagcacgtaaagcaacgtctggcagagcaaagaactcacccatcaattgaatgacatcatggccaatctacgattttacaacatgatttctgagatctcttccaagtctgacatgctagagtcctctgacaggaatctagagtttctagtaaattctgtgagatgtgaaggccttcttcgaggcctccatattggcatccttcagcttgctggttggagcccaggtgacggacagctgcagtctgggattttcctgaggtcgacttcactggtgggtaggcttcgattactgggcatgttccagcaggctcagggcacccctgtgggcaggtcagtaaatactggctgcttgacgatgtcttggatgggaagccagttggatgagggatgtgtgcgaagccctggaaaacgcagcagttcaaaggctgtgctgagtaggtttccaaatggacttaccctctcagactttgaattccagctccatcggaaaaacacaagtgtttgattccaacggaatggcttctagtaataataataataataaaaagggctttgatgacttcttggaaatcagtttctataaaatggtgttttgagaatttgagtgcaagtcaagcagaaacatggattgaaattcttccctttcatacccattcttttaaaatattttatttttaaatatgaaaataatgtgtgcatattattaaagaatgcaaacactacagtaaagtacaaaataaaaagagcaagtctttcttcctccctcccttctcatcctgtctcatgggataataatttatttatttgtgtgtgtgattacttctagaggtccactggcatcccttggcttgtggccccttcctccatctacaacaccagtaacattacatgtccctgaccatgattttgtagtaacatttccctctaaccacagtgttgaaggtttattggtttttaaagaagacgttgattcttttaattgactaatcaaaatggtatatatttgtggtgtataaaatgatgtattgaaatatgtgtatactgtggaatggctaaatcaagctaattaacaaaggtattaaagtatcttgcttttaatgactcatgtcaaggtctttaatttgattgcatctgcaaagtttcttctgtaatgaaaggtaacatattcacagttttctggaaatacaatgtggataactttatccgtggtggaggctaagaggagccttgttttttctacgacctaacatttcagaatcctcccaaatactggaatttctttaattaagcttcacactgcttatagaattctaggttcaaaaacatgtctcctcagaactttggagacacttgtcctctgtcatttggggtctagtattgttgaaacaagatctgagcgcagtctgatttttgtcctttattctgtcgtttgcattttcttaatgtttgtctttttctttctcatcagttttcctcaaaggtggacccagttgacttccttttatttgtgaatctcttgcttgatagcatac

SEQ ID NO: 471861 - DNA, 1512 bp, Homo sapiens
aataggaacagctccggtctacagctcccagcctgagcaacgcagaagacgggtgatttctgcatttccatctgaggtaccaggttcatctcactagggagtgccaggcagtgggcgcaggtcagtgggtgcgcgcaccgtgcgcgagccgaagcagggcgaggcattgcctcacttgggaagtgcaaggggtcagggagttgcctttcctaatcaaagaaaggggtgacggacggcacctggaaaatcaggaaaatcgggtcactcccacccgaatactgcgcttttccgacgggcttaaaaaacggcgcaccacgagattatatccccgacctggcttggagggtcctaccccacggagtctcgctgattgctagcacagcagtctgagatcaaattgcaaggcggcagagaggctgggggaggggcgcccaccattgcccaggcttgcttaggtaaacaaagcagccgggaagctcgaactgggtggagcccaccacagctcaaggaggcctgcctgcctctgtaggctccacctctgggggcaggacacagacaaacaaaaagacagcagtaacctctgcagacttaaatgtccctgtctgacagctttgaagagagcagtggttctcccagtacgcagctggagatctgagaaccggcagactgcctcctctagtgggtccctgacccctgacccctgagcagcctaactgggaggcaccctccagcaggggcacactgacacctcacactgcagggtactccaacagacctgcagctgagggtcctgtctgttagaaggaaaactaacaaacagaaaggacatccacaccaaaaacccatctgtacatcaccagcatcaaagaccaaaagtagataaaaccacaaagatggggaaaaaacagaacagaaaaactggaaactctaaaaatcaaagcacctctcctcctccaaaggaacacagctcctcaccagcaacagaacaaagctggacggagaatgactttgatgagctaagagaagaaaaaaaaagaataaaaagaaatgagcaaagcctccaagaaatatgggactatgtgaaaagaccaaatctacgtctgattggtgtacctgaaagtgatggggagaatggaaccaagttggaaaacactctgcaggatattatccaagagaatttccccaatctagcaaggcaggccaacgttcagattcaggaaatacagagaacgccacaaagatactcctcgagaagagcaactccaacacacataatagtcagattcatcaaagttgaaatgaaggaaaaaatgttaagggcagccagagagaaagaagagagtgggggccaatattcaacattcttaaagaaaagaattttcaacccagaatttcatatccagccaaactaagcttcataagtgaaggagaaataaaatactttacagacaagcaaatgctcagagattttgtcaccaccaggcctgccctaaaagagctcctgaaggaagc

SEQ ID NO: 471862 - DNA, 611 bp, Homo sapiens
gacctggatatgagacctggaggccccaaggctggaatggctaagtcagccaaacagcaaagatggcagcctgcccctccccctgggagtttcatctcgaggaggtataatgctgttaccagtggctggctggaattccaagccagagcatcttatcctgaggatgtacaggagtctaacctcctgcttgccagagttgcagctgcttttgcggggaagcccagaaagcttgggtatctaaggctccttgcccatgtgactttcaaggaaaataaaatccaggtctgtcctatccctaactgcaaatcattccgttgccttcaaaatcaaagccaaacatcttaccatgtgcacatagccctctttgatctggctccttcctaccactcctatttcaccttctaccacttcagtcaggatgacatgagttatcttctcagcaagcagctttcctttattgacggcagtgacaggccaattgccctgatgtacgcacacttcactctccttgtcagactgtaacgtgagagatatgtgtattggtttcttaaaaccgacagattcatgaaatgagagtgcctgggagagaaaacacatgaaaatggaaaatg

SEQ ID NO: 471863 - DNA, 572 bp, Homo sapiens
accactatacccggcacacagtaggtatcaaggcagagcacaggactcctggaagccatgtctgatactccaggcatggttctcaatactccattaaacggtgctcatgaaggaggtatcaatgggccctcgccatgcaccaagggctgtgcaaaaggctgggaatcccgtggagaagagatcagatgctgccctggctctcgtggagcttggggtccagctggagagaaaaacgttagaccaaaacaaattccagacatgcatttactcagcctcatgatttttaagtgccaaggagggaagcttagggaaggcgctagaggaaaaacagccgagggctaccataacaaattgccacaaaccagtgaggacacttacttgcctttggatttagggcccacaaagataacccaggatgatctcatcttgagatccttaagtacatctgcaaatacctttttttccaaataacatcacattggcagtttcccagacatagcttttttgggggatggggttgggggaaaattcaatttactacagatgaaaatcacataacttgtttcagagag

SEQ ID NO: 471864 - DNA, 708 bp, Homo sapiens
ctctctggaataggaggggctggtgaatgaggggaacagtagtaagagctggcaagaccaagctggcaagacctaacagtagtaagagctggcaagatctggaattggaggggctggtggagacactgaaggattgcaagcatacgactgacatgatcagacaggatggtctcaggaaccactctgaagacaactctggctgtgttttggttgttctcagaagacaactctggctgcattttggagggtggtttgaaaagaatctactgctgctgagagaacgtgagagcactgggtcttggaaggagacagcagcaaatcagaggaaagagactcttctctgggtgtgttttggagccaccccttttcgcattcaggaaagagagaaaccaagagacagagaatgccagagaaagggtggggcctgttctgtctgtatttacaagtctgaattcacatccgtggattttgaaggtgtctttccacccaaggacttgagagctgttataaggcataaaagagatttctcactgtattggctaagcttttcctgaaatcatgctacgtccaaacccccacaaatgtagtagctgaaaacaggagtcactgattggtacaactagtggaactagagctgttgtaagggaagagtatatatttattacgtttatttggagttgcacctattttcaagctgccggtctgtag

SEQ ID NO: 471865 - DNA, 512 bp, Homo sapiens
tctgaggaggaggcaatagaatgataatctggaacgacaatcagaattctccatcacacttttcctctcgtattgctgcttcttgtctagtgtttgcttttgtggagagatccaaagctggaactggggtcactacagctcccagcccagtgagtccctgtgccctggggcacttccctaagccctggctggatccatccatgcccctgggcatgcccacaccatctttgcttctgggatttccctctgagatgttggggggcaggggtgataatagtggagttctgccaggatctctttctttaacttcatgggagccccccaatccattttctatagactgggcgcatgtcaggccaccccaatctcagaacctctctggaatattcttccccttgcccttctcaggactgactccttcctgacatgcaggtattagctcaaaactcaccgcacttggagagctttccaaaccaccctggagtagcctgcctacccatgtgcgtttccca

SEQ ID NO: 471866 - DNA, 765 bp, Homo sapiens
gggcctgtacagcagaggagaaggacttaggagcgctttctgggggtgagaaaagatggaggaggcacagtttctgggggagctgtcagctcagttcctgagttgaaaggaatgacagaacattatgctgtcagagagatctgctgctttgctcttcaaaagacagatgcagaagcatccccttcctcacttgtctcttaggaatatcagttcacatctgattgaggtgatccctcatgcttcagggtcatccatgtttcttatgtcccccacagaatccctggtggcccacacattctgctcaatggctatagagctggccccactgcaccctttggatttaactgatactggacccatcatgaccttgacccagccatcaggctcctctgctcatcccttctatctgctggagaaatgcccatcttgctctcagtgcccgggagaggctctcacaactctcagcttctcaggatttcttgttcctagggtcctgcaccacctcctggggcttccctatgccctgccctctccgttacgaatggtgcctctataaatgctcctcactgaccctaggttgcttgtgaaattggtatttttctttttaaaatgtaactattctttttttttttgtctccctcccccacaccaaatgggtaacttttcttttaaaaaaaaaatcaatatgttcattgtgataccttcacttgagattagatcagattttctgtaataaatattagcttttacctcagaatacctcag

SEQ ID NO: 471867 - DNA, 645 bp, Homo sapiens
caacgtctgcttcagagggttgtagatcagatgagaatatgtacattatgtggcactcgtctctctcatggctacaggaaatcaaagtcacttcaaagcttccataaaggccttctggttttcacagcatagcctgaatatacagttggagatcttgtgccttttgttctctcatttcaaggtgtttagtgcagttaacaaaaggccaccccactctaatctgtgtaattattattgtctctgcacattcaattaccgtaaccaccgtaacccacacctcaccttccaactagctcttcatctccgtcagcctcaggcggaagtcttagttatcagaatgccactgggtgtcagggggctggcacccttgaaagcagagcctgagacaaaggcttatatacaagcacttttttgggactatgatcccagggagcagaagtgaaggacaagtgagtggagccaggcaggagagcaagccagtgcaaagatgcattaacctggctacggtcataagcaactggtcgctcagtcccacaagaccatctgaaaagtcctctgaaatgtgtctcagccaacacacttagaggcagaagagggacatttatctactgattgctgtcacccatgggtcacagcattgcctca

SEQ ID NO: 471868 - DNA, 938 bp, Homo sapiens
cagtgcctggcacagctgggtccctgcaggctggctgcggagtgggtggaagagctggcattgccctctcctctatcctccatggccagcccagcaggtaggctagtgtgcatttgggggagggactgtgtggagcaagagggtggaggagaccctggcagcccgagagaggggggctgtgtgtgtatggtccaccatgggccagctgcaggcctctgccctagtctctgatgccacgtatgtgatcatctgcatggatgtgtctgggggtgtggatgaggtcgtctgtgtggacgtgtctggggatgtgggtgaggtcgtccgtgtggatgtgtctcggggtgtgggtgaggtcatctgtgtggatgtgtctgggggtgtggatggtgaggtcatccgtggggatgtgtctgggtgtggatgtgtggatggtgaggtcatctgtgtggatgtgtctgggggtatcgatggtgtggtcatctgtgtggatgtgtctgggggtgtcgatggtgtggtcatctgtgtggatgtgtctgggggtgtcgatggtgtggtcatctgtgtggatgtgtctgggggtgtgggtgaggtcgtctgtgtggttgtgcctgggggtgtgggtgaggtcgtctgtgtggatgtgtctgggggtgtggatggtgaggtcatctgtgtggatgggcctgggggtgtgggtgatgtcatctgtgtggaagtgtctgggggtgtggatgtgtctgggggtgtcgatggtgtggtcatctgtgtggatgtgtctgggggtgtgggtgaggtcgtctgtgtggttgtgcctaggggtgtgggtgtctgcactatccctggagacaataacaatagcagcaggaggagcagcagcagtgaactttcgtaagtcaaccatgcttagcatttaaatgtattatctcgggccaggtgtc

SEQ ID NO: 471869 - DNA, 1037 bp, Homo sapiens
cgacggggctcccctcccacgatgacagccattccagcagcagtgcgtccacagcagctttccccacagcagctccccccacagcagctccctcacagcagcagctcccccaacagcagctcccccatggcagtttcccccacagaagctcccctcacagcagctccccaacaacagctcccccacagcagctcccccgacagcagctccccaacagtagttttccccatggcagctcccgcagttccccctacagcagctccatgcacagcgtctccctcagagcagctcccctctcttcctccctggactggctccaaatcaggatgcatcctgtgggggagacatgaactcttccttgtcttgcccacagaggccctgtgtgtcatcatggtcttaaggacctgcacaggcctgcaagctgcaagctcctccatgatttggagatggtgttcccaccacgcagggccatcccagctgtgcgtttaaaggtgtgagtcccctttccctgggagcacctgcttttttgtaacatgggctctctgcactgaggctgcaatttaatttcaggctggggtactttatgcaaactctgagtgaaatgctgtttactgtttattatttctgcaattatttgcttagtgctggtagcctccgtgttctgtggtggtggggaccatgtacctagcacatatagcaagcatacaataaatgtttgttgaatgactgaatgaaggaatgactgaagggagatataggttctagcaactgaatgtctccgtatggtctctctagacatgggaaaacttactgtgcttttttcttttttctttttttttcaagagtaaagttgatggtaaagggagaatttgaaagaagctaggtactagatgcagtgttgaaagataactaagcagaactactttgggatcggagagatgacaagatccggggccttgcgcctgttgacatactcaatgggccttttgtgggctctacagagggggcgaggacattctgcctgtgggagaaatgcc

SEQ ID NO: 471870 - DNA, 1106 bp, Homo sapiens
tcacagctctggcagttaatgggggcacagatcaggctagtggacacacagcagctgtgagaagtgcaggcacagagctgggcctggcagccacccacacctgcagttccagccacaagagcagggccacagagagccacaacccacagatggagcatagtgaaccactgcagatgggcctgaggcagggcagcagcccctaatgggggaacaggaagatttgcagacagcgctgaccgtccataatcagagctttgagcagcagacagttcgcaagattaaagctgggaggcacagcagcagccagggcccacctgtggaggatgaagaggaatgcacccagggcctgaactgcccagaacttcagaccctggatacaagccccagggatggggaagctaagcagccagtcccccagctcggagaagggctgtccatgggccaggagaaagatgcccctggttgggggattgaggacatggagggctggggaggtgctcgccaagagttcaaatgctgtccccaccgctgccacacggcctaccaagcccccatcatcctcccccaggttactgctgtggcctcctctctggtctccctgcctccacctttgtgcccctataatctgccctcacagcagccagagcatcccctgatgacctaagtcagatcgtgtcagccctcctcagagcctcaggtgattgtcctcactcagtcaaagctaagtgcttacaggagcgtaggaggtctccccacgctctggcctcctttgcctcttagcctctcattccagcaggaactctccaccctctcattgccctacagtctcaccacccttcatgggccttgaacacaccagatgcactcctgctgcaggccctcggcaccagctgttccctctgcaggaagtagccttttcctagacttctgcacagctttctcctttacccacttccagcctttggtcaaacatcacctattcaaggatgccttccctgccgccgtctttacaattacacttctgtcccccttgagccagcagttctgtcactggtaaactgagttatttccctactttgtgtcagttacagagaaagaacacccaa

SEQ ID NO: 471871 - DNA, 805 bp, Homo sapiens
gttcatcctcagaaccatgcaccatgctgccctgctgtgtgccaggccttgtgctgggaacacagatggaggatgcactgtccaagtggggcccatgcacccctggccccattggctttcctcctatgctcattggtgcccaaagtccagagggggccaaagtgtcagggggctggcatgtcagcactgccctaagcatgtgcacacccagccgggctgtgactgtgcccaggcttagtgccgactttgctctaagattggaatgggtgctgacagcagggggaagccaggcagtgggagcaggcatttccaaccctgcaaggacaggggctgccttcctgggcccccaagagtgcagggatgccagggtccatagctgtggtttgggcggctacagctgtgcccagtttgggttggggtgcagggctcctgcttgctccatggagcaggagacaatgggtctgcagccacaacttgggctgctgtggctgcatctggggagctcctgccccaccaacttggaagggtttagaagtaaataccccttcctccaggaaattttcctgctctccttctctgagcccccacagcacagcatcatctagctctatggcaattatttaacaacttgtttccttcaatggattctaggctctaggaaaattgacaataataaatgcctgaactgtaagggagtggaaaaagaaggacgcacaaaccaagagctacaacatgccaaggcctgcttcgagtcagcctcattgggcttcttctatgccataccagttgcaggaaacactgtgtg

SEQ ID NO: 471872 - DNA, 838 bp, Homo sapiens
ggacttatatccgcaatagttcaacaacctgggtcataattgacgaatccaacaaaacctgtggcctgttgagcaggaggcaggacagggaggccccatgaggccgcggccaggaacctcctggtggcacggctgtctgcgtggccggcaacgctaggaacatccggcctgcacgctggaccctggagcctcacacgtcctcagcctgtagaattcccccagcacctccacgaatgaggcaaggggccctgtggacccaaccacaatgggacctgatgcccaggcccaggtcagacacaccctgcacgcccaccaacaacgctgccatgaaagctggcctccaactcagagccgaccatcagggtggcagtgccaggcagcaccaagaaacaacagcactcgaccgcatctgccactggcctgacagcctcgcacactccaggcattttgctaaaaacttccacttgactgaaataatcaaaaagtacactgaccactatttgcacagagaagacgtgagaaggaaagacagtgagttaaacagcaaacccagctgcagtgactttcacttcactgtgggcaaaggaaaaccaacaggttcctctttgctgctgctacaggccaggcacacggtaggtgccccttcacagaagagcagccccatcaggcccgactgccgcactctctgagactccctcccccaatggcactcacagccttcggccccagcaggtcactgtcatctcttcatcacacagaagccctctccatgaacaccaccagtcccggcagagcccccgcccagctcgcacaaaggaggggtggggagtctgacttg

SEQ ID NO: 471873 - DNA, 1172 bp, Homo sapiens
ttttttttaagtggtcaagagtctaatacagagcccatgccctgtgaccactctgagtgagctggcagccctaggagcagcgggacatgcccctcagtgggtgtctcacctgggagacaaagctcgccacctctgagggcgggtcattcttgctgtcctgccaggtcacctcgcctgatgtcctttactgatacgttcttcacatggaagcccaccttgtcaccaggcagggccttggtgcatctccacagactcgacttccatggtgatgttgcatggggcgaaggtcaccaccatgcctgcttccacctgccccacaagcacagtgccaatacctggagggacagagcacccagggccatcagcaaccagaccccagtaggcccccaaccccaagcacctccacaaggcatgaacttatccccagtcttgtacctgcctgtcaggggcagctgcagaggcttgtccgtggagtgggtagcagtgtgattgagtccagtgcttttagcagtgtcacacctgccacattccattccttcctggtgaccttacagccttcaaaccagggcatctgtgactgtgatcatgttcttgatgaagtcacagtgacccatggcatcaatgatggtgacatagtattgctttgtcccgaacttctacagaaagatgttgatgggatgccactcatatggtttggctgtgtccccacccaaatctcatcttgaactgtaattcccataatccccacctgtggtggaagggacatggtgggaggtaactgaatcatgggggcagttccctcatactattatcatgatagttacaggtagtgatagggatggttgggaaatgtagctaatttcaccttcctgtaagctttgttttccatgaattattttgcatcttggtgtattgatgtaatttcttggctataactcccacaagttcataaaaggcactttgatttggtctaagacttcagctcccagctaaaactgcttctagctctaaggaaaaccaatactggggcctggtgcatatatatatatatatatatatatatatatatatatatatatatatatatatatatatatttaatatataatatatatatataacttttaaaaaaatatatatatatataaatgtaacaaggtatagacattttg

SEQ ID NO: 471874 - DNA, 883 bp, Homo sapiens
cccagggcctagtgcagtgactggtgagaaggagaatgacctcgatggaccttcacagatcatttggtccaacacccttatttgacagacatggaaaatgtcattcactgactcccccaatatcacacaacagaatcctcatcatccccatcatcatccccatcatcatcatccccatcatcatcatcaccatcaccatcatccccatcatcatcatccccatcaccatcatccccatcaccatcatccccaccatcatcatccccatcatcaccatcatccccatcatcatcatccccatcaccatcatccccatcaccatcatccccaccatcatcatccccatcatcatcatcaccatcatcatcatccccatcatcatcaccatcaccaccatcatcatcatccccaacatcaccatcatcatcatccccatcatcatcaccatcaccatcaccatcatcatcatccccatcaccatcatcaccatcaccatcaacatcaccatcatcaccatcaccatcatccccatcatcaccatcatcatcaccatcaccatcatccctatcattatcatcctcctcctgatcaccataattgtcatctgcatggaagctagcctatattgattactccctgctgccaagctgtgtcccatttcatcatcaaagcctcttgaggtggccactctcattattttcattttacaggtggtgaaacatcacagagcagtgagctgcatgatgtcagtgtcattgtctgtcttttcattcctgtgtccccagaatggtgtgctgcaggcccagtgcctggcatgtactatttatttattcagcactgactgcaccaccccacctccaaagccctttatatgaattaactc

SEQ ID NO: 471875 - DNA, 1636 bp, Homo sapiens
ttagcccacgacgcaaaggcccaggtgacctttgtgggtgacatcaatggcccccattgccctctggcttctggctggctcctatcaggcagccctgtgcatacatctctggccatgggtccaggtgacctctccctccccacccttcaggccacaggtggtaacagctcctcatattgcctgccagccctgggtgtcatggtcagcaattccctcctcaccaaaacatccagaaacacccactcccgagcctcgtgtagtacgcagagttcacagtgaattagtcaccatcatcttaaccctgatagttgagaaattaaaatgtgttgagaaagcttctggtggtggccgtcagttcttggcattccctggttttcgacaaacacccctccagtttcagcctccgtcatcttgtggcattctccctgtgtgtctctctcctcttcgtataatgacaccagtcatatgggatgaagggcccatcctgcttcagtatgacctcatctgaactaattatacctgccacgaccttatttccaagtaaggtcacattctgaggctcagtctgctccattcagacaaatgcccatctccatccctgccatgtagacccggttcaggcctttgcctttacctctggaactattgcctcagtcttcagactgatttccttgctaccagcaggcaatcaggtcaccctaaatatgaatctgatcacttctctcactgccataaaactttcgatggctccctattgctttcagaataaatgtaaatctgcagggttcagaccagcagctggagatggatgggcaggaagcagtaacaatggatgaaagaccctctgtgcccaggtgggtgggggagggaaaggcaggaaacagagaaaccgcctgcctatggaggcctggagccgccagccggctggagggaggcctgggatgccagaacccgcagggtttatttggattccccaaggatccaagctggggagccctttgcaaacatcagaccagctcatctccatggggtgccaggcccaggacctgtgcgacaagaatgtcgctttcattcatcattgtttgtccccagggcctaaaccagggctggctacacagtaggggcttgttttgctgaatgaaaaaattaatctggcactactaataactaaataattatagtttcatattgatttgcttgtttagaaaaataaaaaggattcccaaccatcccttttccccctcacagctttttgcatatgctgttccttccgcctgccgtgctctttcctctgctttttgcaaggtcagctccttctcatcctctagttgcagctcaaataaaactcttcagtgaagctctgggaacctgctaaggtaacccactttccctttccccctctaacccagcactgggtgatttccttcatgacacttattatcagagatcctctcatttaatatgtatctttatttttgaacttcctgtctctcccaccagaatgtaagctccaaaagggcttcttgctcattgttgcatccccagggccaaggacttagaaaatgctccataaatagtcgttaactagataaagagacgaacacttgaatccctgtaataatgtcattcacaccct

SEQ ID NO: 471876 - DNA, 1821 bp, Homo sapiens
ttgctcccttgagaaggagcacaagctctctgggttgtatggtccccgccactctgggttggttaacatggtaggcaggatcatagtcacctccaaagatgtctgtgtcctaatccctataatttgtgaatgtactgttacacggcaagtgggaattaagtttgcagatggaatgaaggttgctatgcaggattatctaggtgggtccaatggaatcagaagggtccttaaaagtgggagagggcagcagaaaagagtcagagaaagagaggcaaccacgaaaacagggtcagagagatgccatgttgctggctttgaaaatgaaggaaggggtcacaacccaaggaatgttggcagcctccagaagctggaaaaggcaaggaaatcaattatcttccagattctccgaaagggaagtccctgcaaacaccctgattttagcccagtgagatcaggttggtttgagagcataaacttaagttgttttaagtgactaagtttgtagtcattttgttatagcagcaatagagaagtaatacagttaatatgggcccttgtaggtctccagggatgggggagtggggcacagctgtgagagctgttcttaaaaaaaaaaaaaaaaagctattaaaagaaagtaaaagtttcaaaaccaaatcctaggcaaacaaccctgaaaacaatacacacacatacatatacatacagcacccaaggtagctctgagaacaggatatgaaaccttgcaggccggcactaagaaatgattcacaggcctttgagatgcttctatttcaagacacagtccacccactggatctggtggctccaaaaacaaactttcagctgctgtttcttatcgcagtgtggttcgcctggccagtatccttgggtctcaagagctccagacagaagacaaggttgagtcctgtgaattccctttctgttctatttcaagcctcaagctgctggcttgtttaaagaaagtcttttgcatccaccttttggttggctgacccgagtttaaagcaacatagcctaatggagccttcagggtaaccccaccctggcgacacctgcttttggactgctggcctctagaactgtgagagaacaaatttctattgttttaagccactgagtttgtggtagtttgtaacagcaaccctacgagatgagcacagaagctgggctgcagctcagaaagcaacgctcatctgcaagttgggacagcagaggcccttcattcctccccagggctcccacaccttgggagggactgtgaagagtgactcttgtccagtggttttcaaactgggttcctctaagccctggggtattagtgccccagggacccctgaagtttgttactgctgctctgaagcttttcagcatttcttgaaataatgaattccagtaacactgatagctcttggccggcccaccatgaagcccttgatcccagcctggctgagaatagactgtttcacacatcactaactctgccccagcctctggctcagagctagtagcaggacatgaaggtttactgaacaccaaacagatggtgagtgccctgctaagaacttcacatacatctgccccctccatcctcctcactgtgaggaagtgtcatcgtccccaccagaaaaacaaggactgggaggtgtcctgacttgcccaggcagagactgtcatggccaacactttcctccattttggattctgtctgtccagcccccaagcttagcctttcccagactgaatctctctgccttctaagacactggaatgcttcttcccccaccccatgacagctct

SEQ ID NO: 471877 - DNA, 647 bp, Homo sapiens
ggccatggcttgtgtccaggtttctcgcagctcatgaggaactggccttgccttctgtgtccttaccggttttttggttggttggaacgcaattcttttcccagagtattaattatcaatattccttgctgggaaaagaatttagcaatagctctcctacttgcacatccgtttataggctctctgcaagaagaaaaatatggctctttttgcccgaccccgcaggcaggcagaccttatggttgtcttcccttgttccctaaaaattgctattattctgttctttttcaaggtgcactgatttcatattgttcaaacatacatgttttaccatcaatttgtacagttagatacaattatcacagtggtcccgagaccgtctctgctgcctgccctcagcttgactacttcccatggaatcctgacccactttcagatatttaggaacttagaaatcacttcctcatatggagttgtctttgttttgccctaaattcgattaaaaaaaaaaaaaaaaccctaactattgaatgacccataaagcctaaaatatttactatctggcctttttcagaatagtgtactagttcctggtctagaacaatgaatctcactgagaaggatgacaccccacgccatggggctta

SEQ ID NO: 471878 - DNA, 659 bp, Homo sapiens
gcaggcggtggcctgggcctgtgagtctattctaggtttgtggaatgcaagtgaccttgtggcatccttgtccagaggatgacacatacggaggagaaaagcccaatccttgcagcattatcaccattgtcatcactataaacattaccatcttcactattaacatcaccatcattaccaccatgttcaccatcataatcaccatcatcttcaccatgttcaccatcatcaccatcaccatcatcattcttcaccaccatcaccatgatctccattaccgtcttcaccatcaccatcaccatcaccatatcatcactatcttcactatcatcatcaccatcaacaccatcttcactaacaccatcaccaccatgttcaccatcatcaccatcaccatcatcatcaccatcttcaatatcatcaccattgtcactaacaccatcaccatcatgttcactatcattatcaccaccatgctcaccatcatcatcattatcatcttcaccaccatcaccatcattatcaccatcatcttcaccatcaccatcatcatcaccatcttcactatcaatatcaccattgtcaccactatgttcactgtcatcaccaccatcatcctcaccatcatcatcatcaccatcatcatcactaggtagagc

SEQ ID NO: 471879 - DNA, 785 bp, Homo sapiens
ctcccgctaactcaggccaccctcacagtgagaattcacagactaggatgattgggcagtgtttcatgccggcctgctgcctgccagccctgggcctggagaggctgttgatggtgaggctcgatggagaaaatgcttccaaggagctgtctgctatccctggctccaattcctctccccttgagctctcactcctaccactccaccaatggctgtatgccacatatgacccccgtatcacttatgacctctgcatcatctatgacccccatatcacttatgacctctggatcacctataacctccacatcatctgtgacctctgcatcacttatgacctccacatcatctatggcctccaagtcacctatgacctacacatcacctgtgacctccacatcacctatgacctctacatcacctatgacctacacatcatctatggcctccacatcatctatggcctccacatcacctatgatcttcatgtcacctatgacctccacgttgctgaatgcagtatcaaccctaagtcctcagcagacttggcatgttcattcccttgacacagctggccatttcccgtccctgaactatgtccttcattggcttctgggaaacctccctggctgtctcagtctctaacctcttaatgttgaggattggactttattcatctactgtctacacttgtgcccttggggatgccatccagtcttgtgagatccaccatggcccaaagtgaactccacatcttcctccccaggagtgtccccagctcagct

SEQ ID NO: 471880 - DNA, 615 bp, Homo sapiens
tgctcctggaaccatgcaggagttcctcccaaggagaaggcaaggcaaggctaccgtggagcactcagcaccacttcccaacaggatcagacctggggaaactgaccagcttggtccgggagtgttattctgcccaaggaccagtctggagctggatttagtttctagaagaatctttctagctcagcagccccgcagcttcagaagatgggcatgtcagggcaagctctgctttctgcctcttcgaggagtcttgctgccactcagagacctgctcacagaggcaggaaagtcaaggatctgcttccccaaagaacaggctgagcctcacacggccaaatcccagaatggctttcaaggaagagaacccagtgtggaccagaggattcaaatgacctccttggtgtgggactcaccacaggaggtttattttattctttgagcctacagcagagagtgtcatctttctccaagatcagagaaatgcccattacttaatatttaaaacaccatggataaatcatagagaggaaaatgtgcatagatttgaagtactaaattagaaagctccaagaagaagtgtgccagtggctggttgcttcagctcctgcctct

SEQ ID NO: 471881 - DNA, 802 bp, Homo sapiens
gctgaccaccatggtgggagtgagcaagagggagagcgtgactgtgaaagatgccaaccccgaagagacaggaagaccacagtctgaaatattctttgaatccccggatccagccatgcctgaagctatgcacacctggatttttcaggtggcctccccaccaggtcacgtgtggtctgagcagggaacaggctttggtgcagggacctggggggttgaggacacgccacccctcttggagaagaccaccaggctctacctggaggaatggagcccatccagcccccaccctgtaggaatccagcaaacagagagctctggggtaggtggtgggggcacctccaaacacctggatcaagagcctcaaggattcttctctgccctctatcttccctctttcctcacattcacttgctcccaaggctgtgaaaagccagggtccctgggagcccaggccagtgatctgcagagccgtctggctgaggccttggcctgtgctgggaaggagagggttaaggcttgagaagcccttctggttagtgtttaacttgcagtttctgaaggccatcgggagccccatggagctaatgttttctgtcttaatgacactgtagcagatgaaggcgggacccacctcccagagagcattaaaaagaggcatccattacccagaatggcctggcctagaagctggattaactttcccaaagacctgggtggaggaggggtcttctcatccttgtcatcagcaagttttccctgtccccatggtccaagatttgggaggtgagcatggatgccc

SEQ ID NO: 471882 - DNA, 1312 bp, Homo sapiens
tctgataaaaaaattaccctcacatctgaaagtttactgaatgcttactctgaactatgtactcacataacctctattttcatgactttccaggctgtgatgatgacgatggtaatgatggtgataatggtgatagtgatgatggtgatgatgatgatgatgatgataatgatgatggtggtggtgatgatgataatgatggtaatgataatgatggtgacaatgataatggtgatgatgatgatggtgatgataatgatgatgatggtggtgatgatgataatgatgatgatggtgataatgatgatagtaatggtaatgatgatggtgatggtgatgatgatggtgttgatgatgatgatgacaatagtgatggtaatgatggtgatgatgatgatagtgatgacgatgatggtgatagtaatggttatgatgatgatggtgatggtaatgatgatgatgatggtgatagcgatgatgatgatagtgataatggtgatggtgataatggtgatggtgatgatgatggtggtggtggtgatgatgatgataatggtcatgatgatgatggtgatatgatgatgatgatagtgatgatggtgatggtgatgatggtggtgatgatggtgatggtgatgatggtggtggtggtgcaattgaggaagagagcagaggccagtgtttctgaagcaaaagtggggccagaggagagtgtgcaaggtggtcactcacccaaggagttactgaaggaacagcatgcttgtcctgaacaagaagagttgaaagtgatcgtgaaagccatcttcaaacattggaaggctgtcacatggaccagagcattcaagtacataaagcacccagccctgtatctggcacaaaataggtgctcaattaatgtcagtgatgataatgatgatggtgatggtaatgatggtgatgatgatgatagtgatggtgatgatgacgatggtggtggtgatggtggtgatagtgaactcaccaatcaattcccgactaatcactcaggcatgaaggcttcaaagaaatcttgatctacttccaaattatgaagatatatattcaatatttttctcttatctttagtttttatgtttaggtctatgttttatgtcaaattcatttctatgtaaggtgtgagcaaactttttctataaagagtcagagagtaaatattttaagctttgcagaccataacgccctctgtcacaactacttaattctgccattgtagcatggaagtggccacagacagtatgtaaacaaatgagctttggctgtgttccaataaagg

SEQ ID NO: 471883 - DNA, 1455 bp, Homo sapiens
cgtgttgtcagtcgtcactggatgcttttgctacccccttctcctgggcactgcctgggctgcagccaccggcctggtcctgagcctatgaagacaaagtgagggactccaggttcctgtccacgtctgtgctgataaagctgggaagataaagcagcttccgggactgcacagtggagggggaggcaaagcactgacatctgaatcctggaactgaggctgcagctttagagcaacaggatcctgacttgcagccaaagcagccatcgggtccccagtgagtggtgaatcagcagagactccccagacacggctgtgagctcaggttcagctcaggaggggagccagaggcactggagcagggaagagaagaggcccagagagggagcaggatttcccaaggccacacagcaaacatgggcagaactggagacggctccagagccccactttgtgccctcaacaccagctccctgctggacgtcataaccaggggccgtggactctctctcctgtggaagctagtggtccttgaggaaactgctcctgtgatgctggagcccctttcagggtgcaccttgcaggggctggggcctggaggtggcaccgtggccgaggcggcagcccttggcaccttcctctgccagcagatctgctggacagcagccaccccagagcgtggatccctctgcatggctggggctcaccgaagcacagagtacagagccccacctgggctgagcagacgagcctctagggcagcagcacgtggtgccaattgtaactggcaagttaacagctcacagcctggttccggcacagcttcgccagtcttgcgtggagcagtgaacacagcagtgcccgcagtgctgcccactaaggtcctgcagggcttggggagtgggtggccacaccaggccactgacagaggacagagcctggaatcatctggccaaggagagactccttgcctgggggtcaatgtggggctggacaggccattgtgctgagggacagaagccaggggttgaggggaagaagtgagctctaggaaggtagcaagacagaaccccaggcacatgtgtccacaggcacacgtataaggctccacacctgtgtgctcaccagccgcatgatgggccgtgtccgcccagcaccagccccacagagctcagagcagcccaggcctcttctctgttttgttgctcccagaaaattggaaaataaataaatgttaaaatagaatcacaaatactgggatattacctaaatatttacattgtacaaatgaacacttttgtcaacaaatatgtgatgtgtgatttatcaggtaatcacaaggtttatttttaaaaagctaattctttccacaggtgaggcagagtggatgggaaccaggacacacagaggaggctgttagatgaaagtcttgccttctttccctgtgcccctgag

SEQ ID NO: 471884 - DNA, 5575 bp, Homo sapiens
agctgtgcaggaacaatggcgagcctctagccctatggggagcggcaatcggcgcctcactggatcagaagcacagtggacaccctgccggatccggaggggtggaagtcagcagtgggtctgcaacagcattgatcagcagtggtggacagggagcaaaagctcagctcgagccggaacaaacatggaccagaagagtgtgctgttgcaagatttaatagagggtggagtggagcaggctaggctgggcccagttttggggctggctttagggctggacaactgttcaccagcacagtccaggaggaacctggggcctaagcacctgagcactggggaggccaaattccatgatcaaagcagaggggctggggatggaccagccaagggaaagagcacccaggtccggcctggcagctccaggtatccagatagcatcagagaagggcctcccaagaggtgccccaatccccagcagtgtcccctgctgcccacctttgtgggcctgaatgagagtacacagcttcgaaaagcagtgtgtagcagaagacgagagggtgtgtgtaaagctatgtttctagaatataccaaaggaaatagacataaccccaacgtggccttgcagaccctcaatgctgctgcatacccggggcaggcggctacttcctccagctgactttgggaatgtcataatgctcccatttctctaccatgcaaagccatctcaagtcccccttcctagtggtgagatggtttccatctggactggcactcagcagaaaagagaacttcttttcctcatggttgatcaaaagttctaggccactggctctaagaaccacagccccatccctgaatcaccagaaaagatagaggcctggaatatgtcaatcagggtctatcccatgagtgagcttaaccccatgtagactgagagttggggagagggcagttttatcagtaaaagaataaaagtgtactaggccaccaaaacccatagatgcctggagtgagtttggggcagggagcaagaaaagaaaacgtattaacagaaacaaaagggtggataggaaaaatacaaatatttatgcatcctggattgatttcatttcactttcccaataatacaatgatattggagctgttataatcctaggtatagaattctcggtgtttagagttagaaataccttcaatactctcagaccaactctatatccttatttatgtattttaattgacaactaaaaaaattatatatctctatggtgtacaacatgatgttttaaaatatggatacattgtggaatagctacactaagctaattaatatatgcattacctcacatactcatttatttgtggtgagaatacttgaaatctattcaatgtcacttttataggcagggtgtcaaagacccagaaaggttaagtgactgtctccaggtcacatgcctcagggtaagatggtggagtagggaatccatcttcccatctaaatagcagttgcactagcaaaatcttctgatataactattttggaactcgaaagtctatgcaaaggcttgaaaattagagggaaggcttatgtagtacatcacagctgatttccctcaacttcagctcttagttgggtagcagcttccaaccctccatcccacagccatgtggcaggtaaccctgactaacgacttgccatttcatatttatatttgttagctcgctggatccatacatgggttccttggctgttgtgaactggcagtaagaggctaagtgcctgccccaggccccacagcgaggtgttggcttagccaagctatccccagagcatccaatggctccctgaaatttgttcttctgacctctttgtctgcctctctttttctctctgtcccaattctctgcctctccagattcccagaccagcccggatcagcacattcctgcagcctggaaaggaggtggcagtggtttatcagttatgttgctgacaccactttcagcttgaactactttaaacaactctggtattcaagtccaaactcaacaaacccccggccacacccctgtgtcacagcccctcactcacattctgctggtagatgttcactgggaataaccttagtggaggatatttgcacaacattcattaaaatccagatgcatgtggatttgactcagcaatttaaattctactagtaagtcatttcaactcataggaatatttatatattcaaggatgttcacatcatgtgtaaaaatgtaatatcaaaaatttgaggtaatctaatgtctattcataagagattaattacataaataatggcacatttctggcagtcattaaaagataataagcgtgagtcctatgcactggctcaggagactgttcatcatattttttagtaaaaaagtttgatgaaaaatatgaactgtctgctgctgctttgcataaaatttctgatcattttgtacgtgcacagataaatatcttgaaggatgaacacttgtactaggagacccttgaggaaatccttaatgtgtctgacactctctgataacaagaactatctgaggccatttgtgctcaagattaccttccccctctcactgttcaaggtcattgccccagaattcctctgctctctttcctgcatcgtccatagggtcattaccctcatgtgccaataccacattatctctccaaactcaaaaaataaaacaaccccaaatcaaaaccaaaatgaaccctcctctgctacctttgctttcctttacatgaaagcaccatacctgctctctctaattttcctcctcccattttcttttcatttcactctactgggatttcagccctcacactccaccaaaaccactctcattaaggtcaccaatcatctcctcattgataaatcctatagtcagctttcaatgactcttgacctgtggtcatttggtaagtggcttactcctctctgaaaccttctctccccttggctcctgggatcccctcttctcctgggtctcctcctatctccctggctgctcctcctttatttgctttgctagttccttcttggcaccttgaccagtaacccttgagctgtccccaggctctgtctttggtcctcttcttgtcctttctcactcccttggacctttacatgccattcctatgcagatggctccccaatttacatgtcagcccgacacctccctgaactccaggcttatacatccagctgcctactcaccatctccctcatctcggttaaagcaactcaggccaaaaacctggagctgtggtggacccgtcttgctctcataccgcatgtcacatctatcagcaaaactactggtcctttttcaaaacatctccagaactgactgcttctcttcacctccacagccacctcctggtcctccataccagtctcggccccctctctcctggatgattgcagtggcctcctaactgctctcctcactgcctccctccccactaagaatctcttcctcacagagcagcagagtgatctcatgtcatcctatttcatttgtcagattctatctctcctctgctgattctcattaggtcagagaaaaatccagagtccttacaatggaccatctgcccctacagggactgagccccgaaccacaaccaccttgctgaccttggtcctgctgctctccccctgctccctttgctccggccacactgacctcatgcttttccttgaacatcccaggaggtttaaaatttaacattttctcttctgtggctgttggcattgttttatctttgtaccgtatgtgtgcatgtattatttatattttggcgttgttttacctttgtactgtatatgtgcgtgtacatttgtactgtatgtgtgcatatgtgtgtgcatacacatgtgcatgtgtgtgcatatacatgcatgtgcatatacatgtgtacgtacatgcatgtgcatatgtgcatatatgtggatgtgtgcatgtgtgtgcatatttgtgtgcatatgtgtgcataaatgtgtgcatgcatgtgtgcacgtgtgcgtatattgtgtgtgcatatacatgtgtgcatgtatgtgtatgcatatgctaatgtgtgcatgtgtgtgactatgtgcgcatgcatgtgcatgtgtgtgcatatacgtgtgtgcatgcatgtgcatatatgtgtgcacgtgtgtgtgcatgtgtgtgtatgtgtatatattaacctgtgtgcattgtgtgcatatattagcatgtgtgcatgtatgtgcatgtgtgtgtgcatgcatgtgcatgcatgtgtgcacatacgtgtgtgcatgcatgtgtatatatgtatctgtgcatgcatatacatatgtgcgtgtatgtgtacatgtgcatgaatgtatgtgcgtgtgtgtgaatattaacgtgtgtgcatatatgtgggtgtgtgcatatatattagcatgtgtgtgcatatctgtgtgtatattaaggtgtgtatgtcccagcttccgaagtgaggtttatttacagtagaaagggattctacagtttacaaaaggatttgccaaaggcttctttgaagtgctgtgctctccagggactagcagaaaagcttttcatttataaacccttcccttgcatgctctgaagcaacccttaaacacatggtcaatttccatttcaagttctgttcagtttaagccacagtctcccaagttgcagtgtgcagcattgtgcttggcatagtgggggaacaaagatgaagacttgtgttcaaagagtaactggcactgtcaactctctcacagaggagacctctaacgaccttttcagaaactattgccagaacggggactatagcatgagaaaatcacacaaatacacatcaaatgataactgtgacttctgcttctggctaagatggaataacagggactggatttcccatgctgcggaaaacaactaaaaaaactggaaaaaatatatagaacaatgttttttaaacattaggcaccaagcaaagagggcacaatgatccctgaaaggcaggaaagaaaaaggcaagccctgtgagtatttcagctttgtagatcaaaaaacgtttttatttctcctttgtttctgaaaggcattcttttagcgtttagaattttagagcattttaaaatatttatccaccatgttcgcacttgaataatttctgaggagaatctgctgtcatccatatatttgctcctctgtgcataatgtgccttttttccctttggctgcttttaagatttttttaaaaaacactgcctttgagccctttgattaggatacaatgtattagggttctctagagggacagaacaaataggatagatgtatatatgaaggggagtttattaaggagtattactcacatgatcacaaggtgaggtcccacagcaggccgtctgcaagctgaggagcaaggaagccagtctgagtcccaaaacctcaaaagtaaagaagccgacagtgcggcctttagtctgtggccgaaggtcaagagtcccaaagctgaagaacttggagactaatgttc

SEQ ID NO: 471885 - DNA, 1595 bp, Homo sapiens
cccatggctcctgagaggtgggaaggggctgcctgcatccgtgggccctgaatcacgacatagaggaagatgcctctgcttctcgatgttggagctatcctcctgctgtggcaggaggccctgatcctaaggaccttcagtcaacactggatggggctcctttgttctggtcgtcccttagaagctgccctaaagaaccccctggatcccatttcacctgttccaggtgggaagaaagcaagggcaggacaatgccctccaggagatgccaatgtggatgaatttagcctgcagtacagacgaggacactcaaactctccagagatgaagtgtcacctcaaggccacacagataatcaacagagaagcaggccctacactcagctgtactgtgagctccacagcagcagggatactattgtcctggttcacccctgggtcccaaatcccaggacagtgggggcaccaaggagatgcccccataaactggcatcagaagccccaaatagagaagcggcagtctcgtttccaatgcaatggaaaatgcgagtggggaagagcaagcccttaggaggcagccagccactaagaacaaagtttagagggaaagcagaccttggagtagctgattacaacagactagaatgggtgctttgaaaggtcagcgccttgcttcattcacaccgtgaaagtcctggcaccatttgtaattgatgaatcattttaaatggacatattttgcagccagggagagctgtgagaggacacaacctgagtgtttgttggagcacagaggaaaggcaactggccttgtcttggaggatccagatgggttcctagcagagatagggtccaaacagaggcctgaaggacaagtgtttccaaggctttaagatgtcagggtttgatccaaaggttataaaactacaaactcagcctaaaatagaataatctttctttgtgcaattctttgaagagtaacattaatgtaatattattagtttaatgaaaacagctgtagcttctaaattatcagcaagatatttatatatttaattttaagagtcctacttaggtaacacctgttagtcacaggatgtaaaaatggttaccagggaaatagcttgaaatgatgactgtctttgtctaatatctcagttttaataaatactccaagtgtaactgttaaaaataaataaattatgtaaatgtaaatgggatgtttataaatgaaatttttgtgtaattaaaaaccttaaagttactttattttaaattaaagaataaatattcattaagtgtctgggtcatttccaaataagaaaagaactgaaataaaatgctgagcataaatatgtctttgttttggcttcacaaattgtataacaaaagtaaatacatttgggtctattaatgtacattacaattatgttacaggaaaacattttttaaagaataaagtggttattgttacagacaattcaaaacctttagctttgtaggttttcactgaaaattaaggttactatgagttacatttctgaatcatgtatgtaattctgtatacaaaatgtatcaaaagatgtttttaatttg

SEQ ID NO: 471886 - DNA, 1056 bp, Homo sapiens
ttttaaggatttagggaagagtctccatgggatacttgcctccgcaggcaccataggagcagtggcagcttggctgatgagctataagccagccttgtttgggttcctattccttctgctgttgcttagcaactggttggtcaagtatgaacacaagctcaccctcccagagccccagcaggaggaagagaaaccaaagacttctgaaaacgactccaagaacagcaaggccgtgaacacaaaagaagtcaatagaacgcatgcctgctttgccctccaggacgagatcctccaacggctgttgttcagtgaaatgaagatgaaggtcctagaaaatcagatgttcatcatatggaataaaatgaatcaccacgggcggtcaagcagacatcggaattttcccatgaaaaaacacagaatgaggaggcatgagtcaatttgccccaccctgtctgactgtacttcgagttcccccagctaatgaggccgaggcgggctggcctctgccgatgttaccttttacctcagtaaaacccagtcacagcctattgaatgttcatagtaagtcataacagaaaggtgcctaggagccaggaagaggatcagaggctgaaagattgcctctggaaaagaaatctgtacacaccaggtctaccagtctccaccccaagctgtgggtcctttgaatcctccttttctatgaacccatctgacctctcccctctttcccaggctgctcctttcgaggtcccaattcttcctcagcctccgctcccccaccctataatccttctatcacctcctctcctcacacccggtccagcttacagttttgttctgcgactagccctccccagcctgcccaacaatttcctcttagagaggtgactagagctgaaggcacagtcaaggttaatgctcctttttcttcatccgacctctcccaaatcagttagtgtttaggctttttttaatcaaatatgaaaacccagcccagttcatggcccatttggcaacaacccttagatgccttactgccctagacacagaggggct

SEQ ID NO: 471887 - DNA, 538 bp, Homo sapiens
tctacctgcagtactaagtgatttgttcctgattgagcaaaatgtcagagtattttagattctgctttgtgacctgcagtgttctagaccccaacaagccacagtccctgagatgcacagagctctacactgttctcctggaacctgcagtccctggggaagacagaggagtgctgtgggcgggcaacatgtcctgtcccttggcagaaaacagatggttcccccatatgacttgcttcgggcaatgggatgtcggcagacgtgacgctgctgtgacgcacttgggctggctcttgcatcttaccactgctgtgagaacatggctggacagccttctgaaggatgagaggcacacggagcagagccaagtttctcccgtcaccccatccaaattcaactacatcagccaaggtcagccaacatcagccagcaatgatggaaccccccagacatgtaagtgaatccaaccaagagcagcagggctgcctagccaacctacagctgaccccagaggagtgagcaataaatgtgttctgac

SEQ ID NO: 471888 - DNA, 1517 bp, Homo sapiens
cacccattttctggagagctcctgagtccggaggatgatcagagggcctcaaggtcagccagagatgaaagaggagagctttcacgggtctttcctgggtgtaggctcagccctgtacatgcacaaggacttctggagccccaggaatatgctgacacttttcaatgccccctacctatggatatttaactttccagatcctccttttaagtttcttggccagcatattgtttgcttcaactggtattactgtcttctctgctgcaaggataaacaatttctgctgattgtttttagcaaacaccctgaagatagggctttccccacagctgctatgctgctggtgctcacagctacaatggctgctaagttgttgcttttcaaggctactacacaggaggagcagaacaggacgctccttggattgttgcaagcctttgattaatttccagactttctgaacaagttgattttgacaattttaccagtgttcttgtttctttcatagaggagcagaatgtttaaaggcccttcctctgccattccagaattcctaccttaaaggcagctatttgtgctattactttttataatagctttattgatgtataattcacatatcataaaaatcacccatttacaatgtacaattcaatggtatttagtatatcacagatatgtgcaaccattaccaccatcagttttagaacatttttatcacctgataaaaaaatcccataccctttagctatcaaacctttattcttccatcccccaagccccaagattagataaccactaatctattatgtgtctgtatagatttccatcttcttgacattttatataatggaatcatgtaatatgtggtcttttgtaactagcttcttttacttagcataatgttttcaaagtttcttcaagttgtaacatgtattaatacttcattcctttttatgttcaaataatgttcttttctatggttaaacgttttgtttatccattagtcagttaatgggcatttgggttgtatctaccttttggctattatgggtaggccactgtaagcatttgtgtacaatttttgtgtggacatatgttttcatttatcttgggctcatatcaaggagtaaaattgatgggttttattgtaactctatgtttaacactttcatgaattgccagaatgttttccaaaatggctacaccttctacattcccaccagcactgtataaggattctaatttctccacatccttgacacttgtgacactttttagattcatctgatttttctagtagtttcttggcagtatcccttgatgtacaaatgtttttaatttttattgagttgtttacctattttgctttaataactcatgctttaggtgtcatatctaagaattcattgccaaatctgaggtcatgtggatttacctgtatgtattcttctaagagttgtataggtttagctcttaattatgcgtgagccattttgaattatttttcatatata

SEQ ID NO: 471889 - DNA, 599 bp, Homo sapiens
gctgcagagctgtctgtaatgacctgctcctaactggtgctcacggcttccactttaaactgtgacacctggggaagcgatgcagtgtatgtgggtctgtcagccctgcgtcgccagcacccaccgaagtacctgcactgcctttgagggagcagtttttgcaccatgcaagaggggcacgctctgcctaagtgcgagttcactggtgtgctctggagagagagggccctttaaggaggtggggctggagaaggcggcgctgggtttaggaactcctgtcttctctgttacttacaaccaccctggtcctaccagccttcccacattcaggctagtggagagtcagaatggaaatctgggacctcagcccatgagagctgtgtttgaagagggtttgtttatcctggatcccagggtccctgtggcctctgcacagaatgatcgtcactacctgtgctggttgatttgcactgcttcagtagacacagcctgtgcctcttctgctgaaagggaactgcaggtggtttggcatttgattggaatgattgggctgccccaggtgtgcctctgagggtgtttctggagattggcatgatatt

SEQ ID NO: 471890 - DNA, 684 bp, Homo sapiens
gcactgcctacgtgagcagccctaggccacaagacctaggggttgcctggcaggtagagtgaccaagtacctgggactaccaggggacttcctggggcaggggactatgagtgctaaaaccaggacagtcctgggcacactggggtggttggacaccctatcggcagagacaaaagcccaggtcaggtgtcatgtcagtcaagagcggcgtgctgagtcagccgatgcaagccaagctcgaggggggatgtcacaacatgaatttgatgatacaaaggcagatttcctgggctgttaccatgtgccagataagcctgacccacaaaaggagctgaacacctggctggagtgggggagtggggacctggaaggactcagaggccaggaagttgcaatattgattgaatgccaaaaagagccaggcattgggactacagcaggaaaccagacaaacggatcctggcagggggactcagacactgtcttgttaattacagtgaaatgaattaccccagcaggcagccagggaggagatggataacttggtttgatctggtcccagggctcagttgaaatgtgccttcttccaggaagccttccctgaatcccccagacccatttggaaggatagaggtgtgttattcacagacttaacccttgcccttttctttgacattcaaggag

SEQ ID NO: 471891 - DNA, 2248 bp, Homo sapiens
gcctttaggatctggcatataagatgttctctcaccactgtggggagggctcacatccccaaccaccatgggcgcttaaaatggggcctgcaaagtgctagggcgttggtccgccagcctggcggggccatgcaatgcacgtggtagtggagagagcatcttcgctaaatggtgtatccacgcacccactgggtcctgcagcttcctcctccccgctgccacacagctgtcctgaacacctccagctccatgaccacgcggctctccctcctcagtacctgggcctctgcaggacccctcagccctcagtgtcctcccccttctctgtctggctcagccagttacctcttcctcaccctgggccatgatatctccatcttcgccatgggtgagacattcctgggccaaagcacctaccatggctgggagctgagcagctcttccatttccacagtccctgtgggtcccagctctgagctcagcagcctcacaggaggagtggaatcattacctaagagccttcagttaacaccgaccccagtaacaacactggcttgcctcatgtggagactcaaagggaaagccgtgctggtgatgcagggcaggcaagctctaaagtggggcttagccgctgggttcttggctttgcccaggaaagaattcaagggcaagccagaggtagaagggaacagctttgttaaggaggcagtgtcacagctctgtgactgctgctgcagagcagggctaccccataggcagagagtagcagctcagggcagttttgcagtcacatttatacccacttttaatgacatgcagattaaggggaggtttatgcagaaagatctagggaaggggtagtaacttttgggtcattatgtcattaacatggaaaggggcggtaactcccgggtgttaccatggcaatggtaaactgacatggcacacaggtgggcttagctgattgaaagccgcttccaccctggctctgctttagctagtcctcagtttggtttggtgtctgagccctgcctctggagttgagtcccatctcctgcctccttcccatttctcctgctccttaatcttaagggggctgcagaagggtggaagtccattttctgcacctgtttcccgctgagtttatgggcataggccctgcctagcactggaggagtaaaaatcgctggatacctgatctaaggtgtctagaggcaggatgctttcattctctgggttagtaggtgagatgagttggaagcctggtgccagctttgcctttacctgaaactgttgtaatctagaagactcaaactttattaagaggttaaacaatcaagggccaaagattagcagcaagacatctattaaaggtcctaggagaggtaaaaaccaggtgagacttcagaaggcacttttgatagttgaccagatatagctggggtctgtgccctaattatatctatgtaacaaggtagcttgctcatagacgttttgaatgttaatcccagcttgtctagagttgttaatatgtgtgcagcaggttttattaataacttcacagactctaccttgttcagctagtaaacaatccaacgacagtctgttatggaaaactacatttgccaaagagtttaagactcttaaattccctttaatgcctgacctgtgttggtggctaagggtttgatcaagttccttagggttgactcatggtaagcaaagccaccccagggtgctgctagtcccatcactatcccgattcctgccagcattaattctactactcacttactcctggtattcttgggtcttatgggattagacacagtggcccctggagggtcaagaatggccaacgtacattcatctcttttccaagttttcaatatacaagggaaaactgcccctaaaaaacaagtgactccctagggagttgggagcagttatggggtgtgattttttcctgtttatggccacaaacaaaaatgagcccagttgggccacaaatagaggctctacagggtgtgatattttatactttgctgccaagttgggtctgcagagatattctctccccttgccacaccctggttctagtgagggtggttggacaatccttgttttccagagcggagcggggagtactcccaccttcccagactaggcagttgtttttccgttgtatgttctgatccatgagaaggcatcgtatatgctctccttgcttacacgtggaatcccattt

SEQ ID NO: 471892 - DNA, 809 bp, Homo sapiens
cagtttcccatctgcccagtgaggactcctggctggccaaggacatgtgggtgctgtgtccttgtgacaccagtgaaaatggacagggatggccctccccgctcccaggcccagtgccgggtgcttcacccctccccccactcactcctcatgagagcccattttgcagtccagagatgaccactgttgaaactcatggtgcattcatgaattcgcccatctttactgggtacccgctctgtgctgacactgtgccaagcgctggggatacaacacttggtgcccagtgtggagcaaaggaagaagatggcatgagagatggcaaggcggtcggtgaggcagcagccagcaggatgatgaaccgagaggtggtgaagcagagctgcagcacctgagcgccaacattagccaaagctcttttcacagccaccattttccctggtaggcagcagagccgagcagatggcccttttctctcctgactccattgtactgttccaccagtcattttattttcagtccttaaacatgtgcaatattatgtttgcttttaattttctgctaattgtgtgtgggcagttgtttaaggcaggccacatggttgtgagaggtcccctgttgtgttgactctggggcaccagagtcatgttgttatgtgaccccaacgtggtcttgggttcactgctagctgcctcctgggtgccccaggattttcagccttggtgaggggaccctcattggctgaaactcaaacattccaagttttcagcattggtattctggccacccctggatgctctggggtcttt

SEQ ID NO: 471893 - DNA, 649 bp, Homo sapiens
aatcttgctaatttgatgaggaactgctgtttcatttgcacatcacaactggagccagcaggagcatccctcacagaagttctgctggctaaaagagggagtcattctgaccgcatctccccccagccccagggtatttggaacaaatttggtcctgggccttacatgtccaagacctgcatctctgctcagggccccaagtgggaggttcctctgaacatgcctgatttcacgctaaacagtcctcgagcttttgttggcattggccccattttcatggacagggtttttgggggcctagggccttatggcagaaggaagcatgaaacagaagtgcagagaatccaagatgaaacccataagcgggtggacaggcagggttgcctgggtccctgtttcacgctgcgtcagacccaggtcccttaagttccttaggacaccctctagagctagtaccctcccatatctcatttttgtttgcttaaactagactgaatgttttcctgttatttacaaggaactctaattccatgcccccccccaaaaaaacaaaaaaaaaacccctgttcattaaaaaataaaatctgcattaaaaaagctccatttctaatactgaatgtctttttctcggagagccctcataaataac

SEQ ID NO: 471894 - DNA, 2594 bp, Homo sapiens
ttcttgctccccagaacccacatgtcagtttcttttcattttggtgtttttcctatggctgtagcatggcccagtctcagtcagagtcacataagaatataccccgagtctgtacccagcttctgttggaggcctgtgtccaagctacagtgccaatcttcatctacaccagtaccctagaggtagccaggcccaattcctacaaggaaatcattcagaacggtcatgaagaagagcctctggaaaacacatggtacgctccatacccacacagcaaaaagcttgctgagaaggctgtgctggcggctaatgggctgactctgaaaaacggtggcaccttgtacacttgtgccgtaagaccaatgtttatctatggggaaggaagcccaatcctttctgccggtataaatgaggccctaaacaaccatggaatcctgtcaagtttcagcaagttctccagagtcaacccagtctatgttggcaacatagcctgggcccacattctggccttgagggccctgcgggagcccaagaaggccccaagtgtccgaggacagttctactatatctcagatgacacgcctcaccaaagctatgataaccttagttacaccttgagcaaagagttcggcctctgccttgattccagttggagcctgcctttatccctgacgtactggattggcttcctgctggaaatagtgagcttcctgccgaggccagtttacacctgtcgaccgcccttcaaccaccacagagtgacattgtcaaatagcgtgttcaccttctcttacaagaaggctcagcaagatctggcatataagtcactttacagctgggaggaagccaagcagaaaaccatggagtgggttggttcccttgtggactggcacaaggagaccctgaagtccaagactcagtgatcgaaggatgacagagatgtgcatgtgggtattgttaggagatgtcgtcaagctccatcctcctggcttcatacaggtgacaagggcaaaagtccaggtcctgctgcctccctttcacataatagccaacttattgtcttcctcatgtcatcaaaacctgcccagtccctggcccaaccagaagctttttgtcctaatcatataccagaggaaagacaatgtgatttgctttttccatatctcagtggctgattccgaacaattgtagtctcttctaacttgaggtcatttttaactactagagctccatttctactcttaaatgagaaaggatttcttttcttttaaatctcctatttcttcacgcagtccaatgtaaagagcaataaatgttttaatccttaacctggagggaggtgtagtttctgttaatacctagttccctccttttcttttcatttccaggtatcaccatcttttacctaggagagtagcatggagctggggaaggggggttggcagagtagtgggaggatcaggaagggcgatgaagactgaataagctctactatgtttcaggcatctacaacatgacctacatgtgacatatattccctcactcaatacttatcagaaacctatcacgtgggggtgactattcccattttacccttaaggaaacttgttcaccatcacactaatgattagtggctaggcctgctaccaggaagttggtcttgaaagactttatctttccctagaatcatgcagcctgaactggtcttatcagtggtacagcagagcactggagcatgggatgctgatacttgggagagccccagctttttggggttacctctttcttgcccaatctggtacaggggaatctctagaaccaaggataatccctgaggggcatctgaaagggtttgcatgcctttcctaatgggcctgagcagggcagagagaaacaaaaatgcatcaggcctccacccgcttcagtgtcaatttatttgaaggtctctagaacactcctggctatatgtgtgttggccattctgatcatacataaccctgcatttcaccctttcaaatcacacaatgagccacaccatgggttcctggacaagtacaaaaaacaagtgtgaacttcctccaaaatataccttctactcagcccaaaattagaagtctactatcccacatccccagatttaactgtctctctcttctttctccttctcttctttaaatcaaatcctttcttcctttattcttccatatccatagcctctttcttctctccatctcctctttaatcaatggttctctcattcttctcaatttccctgaagagaggaggccaatcaagacaagtttggggacttcagtgatgacatagtcattaaccaatcaatgaaaacacactcaaaagaaacactgtcaggggcatcagggacagagttgaactgaagcaggtgaggaggttgctatgggtccagagtgtggggtggaagctgtctccctctggacctttgtgtatcacagccatgatgagagtcacacccaacatcaagatggcttttttcttacacaggaaattaacagatcattactcagttgaatttgattaccacaatggagttagtttcagtgttcattctgaagaga

SEQ ID NO: 471895 - DNA, 3759 bp, Homo sapiens
gggctgacaggtcggactctccaagacaaagtctcctctttctgtctccacacagggcccgtgttgtgcttttggcccaggtaggtggacagacatgtcccaggcgggggacgtagaaggccccagcacaggagaccctgtgctcagtccccaacacaactgtgagcttttacagaacatggaaggagccagctccatgccaggcctgtcaccagatgggccgggagcaagctctgggcccggagtcagggctggcagcagaaggaagatccccaggaaggaggcccttcgaggtggcagctcccgggctgcaggtgctgctgaggtccggccaggggtcttggagctgctagctgtggtacagagccggggctcgatgctggctcctgggctccacatgcagctgccctcggtgcctactcaggggagagctctgacctccaagaggctccaggtttctctgtgtgacatcttagatgacagttgccccaggaaactttgtagcaggtctgctggcctcccagagagagctctggcctgcagggagaggcttgcaggagtggaggaggtgagctgcctcaggcccagggaggccagagacggtggaatgagttctccagggtgtgacagaagaagccccacactcagcaaagaggagccccctggaaggcccctgacatcctcaccagacccagtccctgtgagggtaagaaagaaatggaggaggcaaggggctcattcagagtgtgaggaaggggctggtgacttcctgtggcttgatcagagccctcgtggggacaacctcctgtctgtgggagaccctccccaagttgctgacctggagtccttgggaggcccttgcagacctccctctccaaaagacactgggtctgggcctggagagccaggtggaagtggggcaggatgtgcctcagggactgagaaatttggatatttgcccgctacaggggatgggccccagccaggcagcccctgtggccctgtcgggttcccagtgcccagtggaggggagtccctcagttcagctgcacaggctcctccacagagcgcagcactgtgcctgggggcgtcagcacaggcctctgcagagcagcaagaagctgtgtgtgtcgtgcggactggcagcgatgaaggccaggctccagcacaggaccaggaggagctggaggccaaggctcagccagcttccaggggaaggctggagcaaggactcgctgcccccgctgacacctgtgccagctcccgggagcccttgggcggcctcagctcctccctggatactgaagccagcagggcctgctcaggcccattcatggagcagagaagatccaagggcactaagaacctgaagaaaggtccagtgccctgtgcccaagaccggggcacagacagaagctcagacaactcccaccaggacaggccagaggaacccagcccaggaggctgccccagactggtgagctgagtctgagagtttgggataggaagggcctggccatgtttctcaataccatacttggcagtggaatttaataaagctaagctagatgggcgcttcatgaacattctcacatccctattaactaaactgggtaaaatgaggcccacaaactgggaaagagaaaataaactacattcgctgaatccttgtgaggggtcattatcttttggagtcagcctggcctgttttgtgctttgcatatgttttgcatttctacactttctcccatgtaaaaacacaattgagttttgtttattgattttgcatccagaaatcttgcttttattaatctatataatttatctatttggattttgtttgttttctatgtagacaaatgacagtttttgttatttcctttccagttctttacatctctcttcccttccctttccttactgtactagctaagactgttagtatagtgttgcatagaaatggtgatagcaaggaacccgtgacttattctggattttaaaggaaatgtggtcatcgtttcaccttaagtatgacacttgctatgttatttatatagatgccctttatcaggtaaaggaaactcccttctcttcctggtttgctaattatttataattattattataattattacaattacaatatttacaattattataattattattattgcacagtgcatttaatcacatgtgttttttccatttctgagataatagtatgatttttatcttcgaatttattaacgttaatttaaggagttagtgtttttttttttaaatattaagttttttaaaatgttaagttcttgccttgctggaacaaacccaatttggtaatgctatatctttttcgtattttgtgaattcaatttcatgttttgtttcgggttttcaatggatgaattaactggcctgaaatgatttgttctataatacccttgtgagattttggtatcagggttttgctagcttcatagaatgaattgtggattatctttttgttttctattttctgggataatgtatttaagattggaattatttgttctttggacattttgatagaatggctggttaaaaaaagtatggactgatgttctctttagggaaggtgtttccttccctactgattcaatttatcttgtggctataggtttattcagtgttgtttttctcttgaatcaattttggtaagttatacttttctagatatctatttgtttcatctgagttttcaaatttattggcatgttggcatacagtatttcacaatagcctcttatctttaaggactgcgcacttgtaattatacattccaaattttagctagttatacctcctctcttttccttaatcaatcttgtcagacaattgtcagttttttcaaagaaccgatttttggtttgttcatcctctccactatatgtttgttgtcaatgtcaccttccgttcagtttatgctactatttataaagtcttaaaaattaagattagttcattagttttctgccttttttcctttctaataaagtcatttaaagctataaaagaaccttttaattatcgcttttgctgcattcatagacttaacatacagtcttatcattcaatctcaatattttatcatttttaattacaatttttctttgacctatctgttatttaaaagtcccttccctccccttctcttccctccccctccgtttgacatttctaacacattctctactgcctattctgttcttactcacctttattttttatattcacactaagttgtttactctcatcttgttctttcctcttccatcagttgttcatattatttttcttttccatttaaatctcgcttcatcttattatattttcacccacttagattccactttttataatcccatttctctttgcacactgcccactgctcgtatccgttctgtattgtttcttatcttcctcctatctctaattttttccttacaatccgattgatctctcttgcacattttttttcggtattcccagccttctcttcctctacacttattgttttttattataggctattgtatctaataagccacgagtatcttatcccgtcaagtcagtgctcttgaccatcaaagattttatttccccacctctcctctctctctttttcagttgtagtgtgtgtatttcacatccagactgtgcgcatccatctagaaaaagagcgcgcacgtcattaactcaaatcgcaacataccatagcaa

SEQ ID NO: 471896 - DNA, 1122 bp, Homo sapiens
gcttgggcctttaggtttaggggggttgggaggtcagaataggagtaggggtggggctcaccttgagggtctccagcacacctgcagcccttccatgggacactgtggggatggcagagggaaaaatagggctgtcgttgtctctgacaacatcctcatagaacccttctagcaacaccatccctaacgggtcccagtggagctgtccggggtcctgtcctcagcctgagcactccaacgttgcccagactttcatcggttctggttcaatagctttgtctctaacaggtactatcctgcctgccccatggggctgtggggcgatgcttctgagaagatgctcgaggccaggtgccgtggctcacacctgcaatcccagcactttgtgaggccaagaggacttcctgctgcctcacgggggccagcgttttcagcttctcctcacctgcctccaaggtttgctgtgccccacatactgcctggcacagagatggggcttggcatgtgggctgggagctgggcagggccatgctggactccggccacccggccccctgcccaaggcccttggctgtgcaggtgaagcctggctttgggaagcatcagcctgtgtgtcccagaccccagccagtgctcctttgtcatccctcggctctcccaagcgggctcctctgcccccctggagctcacaggttgacaaatattgtaacagcttcctgctggtgggggaggcaatggctgtccttcggtctgctgtttctcagtgagaacaccgcagcaagtccagcctcccgctcctggctggtcgtcaggggaggccacctccatgctcccaccagcgttgccgcctgtcactgtgcctttgaagtggtgcctgattttccagtctgtctgaagttgctcgctgtttatgcagcagctggtccggcaagtccccccgccgggcctttccatgacggtgccagccgctggggactcggggagacagccaccgggcctccggggggataatgggaagaagccgagatgccatttctgtcttcagggtcttctagactgagtttgcttattttttgcttaaaaggacaaaaaaaaaaaaaaagagtttctatgaaccccaac

SEQ ID NO: 471897 - DNA, 832 bp, Homo sapiens
gccaggcaccgcattattctggaagcctcacgacccagccatcctcggagggtaggcacgtgggacaggctgtccatccactgggtcactaggccagccagggatgctccagcccccagtgcccacagcagcgttctctgtggctgatgagggaccggaggccccgtctggcccctccccagaatgtgacgctgctctcccagaacttcagcgtgtacctgacatggctcccagggcttggcaacccccaggatgtgacctattttgtggcctatcagaggtgccagaaaacacctaatatttactgtgtggctggcactgtgtcaacacatgtaatgaacttaatctcacagcagctctctgaggacaagttcaatttaacagatacctttccagctgtccattacgacaagatgttccaggtccctctgactcttggacttaagttagtggtttgctgggggctctcggatctttggtcacagactgaaggctgcactttcagcttccctggttttgagggtttcagattcggactgagtcactatggcttctttctttcccaccttgctgacggcctatcgtgggacttcgccttgtgatcgtgtgagccaattctccttaataaactccctttcatatatacgtataacctattagttctgttcctctggagaaccctgactaataaagggttgttgctttttctttaaaatctagtaattttatttgactgtgtgttggtattgctcattcattctgagttgatatttttaggcactcaatattctcacttaatacatggttccaaggcatttttattttaggaagg

SEQ ID NO: 471898 - DNA, 828 bp, Homo sapiens
tgctgtgagacacatatggctatggctaggaccccacaaatcatccagtttccaaaactttcaaagtacattccatcctcttgttcacaaattctgtacttgctaaaagttatttgcaacttcaaaatcaatactgctagtgcttttgtaatcattcgcggacatcgcagagtagcgaaaaatttgagtcgctctaccagtaccttccggctaaggtccagcaaggaccttctttcccatctcatgcaaagctggccagaggacagggacggtagggggcagcgcagggtagtgcaagaaggtcctgctctggggaccatttggcggggtttgaatcccaactctggcatctctgaccttaaaatcaggagattatcctggatcatctctctgggtgggcccaatgtcatcgccagcatccttataaggaagcaggaggcagaagaagagtgagtgtcagagcgttgcaatgtgggaaagactttgccatcattgccggctttggaaagggaagagggtcatgatccaaggaatgcgggcaacttctagatgctgatgaatgcaaagaaacagtctcccctccagcctccagaaaggaatgcatctttgctgagaccttgattttagctcagtaagactgatttcagcctgctgacctttagaactgtatgagaataaacatgtgttgtgttaagccactaaattcatagtaatttcttacagcatcaataggaaactctttctatattcgtgtggcattttagtgttttcagatgctttcatctatgtgaccctgcatgatctttataattctgggtgagggagaga

SEQ ID NO: 471899 - DNA, 612 bp, Homo sapiens
gggcgggaaaaacaccactctggaaagtttgagattctgtgtcaacagatatcaacgtgacggctgatcaacatgatgatcctgttagaaaataccatgagtccagagacacttttgagttatccagaggaaggcattgtcatcataggagatgacagctccatgcgtgttattgcccctgaagaccttccgctgggacaagatgtggaggtggaagacagcgatacggatagtcctgtccctgtcacagagcccgagttggggaataaacagcaactactgaagtgtccattgttcccccacttcaagtcctgcataaatgtaatgatggtagttcccaaacaaaatacttcctcactgaccagacacaatctatgtagggtcaaagggccctctgaaggtttgctgaaaaatcaactcttgaaaggcagactgataggagaaaaggtcttatggctggctttggggcaaaggggttttgtcctggagacccgctagaaaagagggattccagtttctatgctagccttaggagagaataagagtgagacaggagggcaggagaaggtcagagaaaaacgtctgctttctgaggctgttgctgaggctgtc

SEQ ID NO: 471900 - DNA, 888 bp, Homo sapiens
gatttctctggatcaggaaggcactatgtacgaggaacaggccctctgcagacatcgaatctgctggcactttgctcttgatgtagacttcccatggacagttctggtggaggctcagaataagagagttgtagaagagacttcagtccccttagaaattacccaagtggtcataaacaatatggaccctaaaggccattctgatgaggtctcagacagaaataaagaccatgttactgaaaactggaggaaaggtgatccttggtataaagtggcaatgaacttggctaaattttgtccatgtcttagtgctttgtggaagtcacagagcacactggttgtgggcgtgtggctgtgggctttgcttagtaaagtcatggaggtggggccacttggagccatcaagatttcaaagaatgacccagagagcttgatggtacaggcagagaactgccacaggagtgtggccaccacagacagccttcaccaggctccaatgcctagtggagccatgaggagtaagagaagaatgatcatccgtggcaatggcagtttcagtgagaggtaaccaatttcctaaaatagtgaatatcactttcaggttttaaaaaaagaaaaaaaccatacttctatgtcacacacattttgctctgtggcttatgcaagtttctcaagaggtctgtggttgggaggactccggccaggtcggctgtgcatatgcttctagaacaatcagattttccttctttgcttgctatggagtctttgcaagtcttcagatgtccagtacttggcacctgtaaggctacaaagaggcagtagataaatatattttggggtgtcacttccatgaaatatagtttaaagttttgtcagcactgctatgcc

SEQ ID NO: 471901 - DNA, 1291 bp, Homo sapiens
accaccgctttttgttttatatctaggaaatctttgctcatttcaagacactgatatagcagaatgaagagaaagaacttcacagaagtgtcagaattcattttcttgggattttctagctttggaaagcatcagataaccctctttgtggttttcctaactgtctacattttaactctggttgctaacatcatcattgtgactatcatctgcattgaccatcatctccacactcccatgtatttcttcctaagcatgctggctagttcagagacggtgtacacactggtcattgtgccacgaatgcttttgagcctcatttttcataaccaacctatctccttggcaggctgtgctacacaaatgttcttttttgttatcttggccactaataattgcttcctgcttactgcaatggggtatgaccgctatgtggccatctgcagacccctgagatacactgtcatcatgagcaagggactatgtgcccagctggtgtgtgggtcctttggcattggtctgactatggcagttctccatgtgacagccatgttcaatttgccgttctgtggcacagtggtagaccacttcttttgtgacatttacccagtcatgaaactttcttgcattgataccactatcaatgagataataaattatggtgtaagttcatttgtgatttttgtgcccataggcctgatatttatctcctatgtccttgtcatctcttccatccttcaaattgcctcagctgagggccggaagaagacctttgccacctgtgtctcccacctcactgtggttattgtccactgtggctgtgcctccattgcctacctcaagccgaagtcagaaagttcaatagaaaaagaccttgttctctcagtgacgtacaccatcatcactcccttgctgaaccctgttgtttacagtctgagaaacaaggagtatttcaatactattcctgctcctccaacactttgtagatgagtgaataccccactagtgtttgttgttttacatactttgcatggatttagactcactagagaaagcagcatctacaggcaaagtgcaatagcataagatatgtaattacaaaatgctcaacattggggaaaaaaacaacattgtggcccctatcaagagaaaatgagtcaacacgtcaaccctaagatgactccattcagtagtcaggaactttaaagtagctagtgtatataggctcaagaacttatagaaaattttcttataataagtaaacatatgtagaatctcagtcaagaaatct

SEQ ID NO: 471902 - DNA, 1086 bp, Homo sapiens
gaggagctcctccctgccccgttcagctgaggacaggacctatgtgtataataccagggctcgggttaccacgggtgagaaatcgtggtaagtcagaccgcccattttctccacctgaagggaattcagaaattttaaagagaaaagaaaaacaggaacaagaacaacagggaggagctcctccccccacttcactcccttctgtggggcataaagaaaaaactttttctagtgatgaggatggactggagcttttttctccccagaacttgaaagctttgatgaatgttgtgaagggtgtggaagtgattagagaaatggaggctaccgaggaagagggaggaaaagggagcccatgtctttgctgctacacaaacacagcaagagccatgggccacagcaagagccacgggcacaagagcaactgggagtgtgtgcctaagaagttacatggcatgaaaaatgaaaacagagaaaaggcaaattgcccccgaggcactagcaaagctgtgcctgttgtggcattcaaggccctgcttaacctaccaggggacaagaacccaggacctgctgagctgcaggtggcaggaacaagctgtaacatacccgtatttgctgagctgtgggcactgggaccaagtgagagctgtgacacacccccattcactgaactgcaggcagcaagactaaataagagctgtgacatgcccccatttgctgagctgcaggcagtgggactgaacaagagctgtgaggtgccctcatttgctgagctgcaggtggcaggaacaagctgtaacatacccgtatttgctgagctgtgggcactgggaccaagtgagagctgtgacacacccccattcactgaactgcaggcagcaagactaaataagagctgtgacatgcccccatttgctgagctgcaggcagtgggactgaacaagagctgtgaggtgccctcatttgctgagctgcaggtggcaggaacgagagagagagctgtaacatttcttggggtctcaggccttgggattccccaagcaaagctgtaacaccccttagggctccgcagttgctggcatctcc

SEQ ID NO: 471903 - DNA, 650 bp, Homo sapiens
ctgagaaacagagacagctggggaaatgggggctgtgtgctccatgaagtcatctaatgaccctctgagatactcatgggccatttatgcagtccagagcagcgattcctgcaccgtcacaccaaagaggtgggctgacctgaatgtggtgggcatcatccaattcattgagggcctgactagaacaaaaaggcagaaagaggaatttgtcccttttgcttcccgcctgcctgttgagcccttgtactgggatttacaccatcagctcccctggttctcaggccttcaaactcgaactggaattacaccactggctttcctggatctccagcttgcagacagcaggagatttcttgccactggcccaggtcaacaaacagactcatcaggggcctgccgtaagcatgattctgctcttcttatcctgagttatacactgaggctccacaggccctgatatttctgacgcaagacaggttcatttatttttgctctgattttagttatttcttttcttctgctagcttcatcaaaaaaggttatcattgcatggttatatgtagctaaaggaacatgaagacaaatatgaattagaaccacaaggatttcactcattacttgtacgaccttggataagtcatggtgttggc

SEQ ID NO: 471904 - DNA, 495 bp, Homo sapiens
ctccagcaggcctgcagcagaggggcctgactggagataaatccatgaaggtggggaaaaaacagtgcaaaaaggctaaaaattccaaaaaccagaatgcctcttcacctccaaaggaacacagctcctcatcagcaagggcacaaaactggaaggagaatgagtgtgatgaattgacagaaataggcttcagcaggtgggtaataacaaactcctccaagctaaaggagtatattctaacccaatgcaaggaagctaagaagcttgaaaaaagattaaaggaattgctaactagaataaccagtttagagaagagcaaaaatgacctaatggagctgaaaaacacagcacaagaacttcgaaccactaaacatggaaaagaacaaccggtaccacccactgcaaaaacataccaaattgtaaagaccatcgacactatgaagaaactgcatcaactaacgggcaaaataaccagctagcatcataatgacagga

SEQ ID NO: 471905 - DNA, 796 bp, Homo sapiens
ggtgtttggctttctgttcctgcattagtttgctgagaataatggcttctggcttcatccatcagacaggaccctcttttgcaagactgctgcagtttgctgggggcccactccagatcctattcacctgggtccctccccaccctggtggtgtcaccagtggaggctgcagaaccgcaaagatggctgcctgcttcttcctctgggagctccagtccgcagccccagtacccacagggactcaatcccagggagatcagggttctgtccataaacccttggctggagttgctgaaattcccacagggaggtcccattcagtgaggagggatgagtctgggtccagcctaaagatgcagtctggccacagtctgccacagctgctgtgctgcaccatggggaattcctcctggttccaaaccaccagtccctctggcactggcaggggaaagcagcagacagaagctgcagtgatggctgctgccccttcccccaagaactcagtagtcttagacggtctccagccaagtggcagctgagaatctgcacagctctgtgcttgggatccaaggcccttgtggtgttggctcacgaggggatctcctggtccatgggttgcacagatccatggaaaaagcatggtttcctgggtggggtagcacaatcactcaccacttcccttggctggggaatctgcttagttctacctctctcctctctttcctaagacactgctctctttatactttgccaattttcaaaaatacttcatgttttttaataccttccaaactaa

SEQ ID NO: 471906 - DNA, 1140 bp, Homo sapiens
ggcttcgccctgacctgtttctgacctgtgttccctccgctgtgccagaacaggccccatgctgctctggacggctgtgctgctctttggtaagtcaacgagcatgggcatcccctcttggagcactaaggaccgaaaaccagactctgtccatgggagcagcaacagtgcagagccgtggccagtacagctgctctgggcaggtgatgtatattccacagacattcacacaaacttcagagactgccatggttcaagtccaagaggacttcgaaggccccctctgcctctgacttccaagattccagaagggcctggctatgtgggagtcatttcagagtttgtgggtgaggagctgtttccacctcctgtgctgagtgccatcccctctcctgagccccgagagggtagcctggtgaccctgagatgtcagacaaagctgcaccccctgaggtcagccttgaggctccttttctccttccacaaggacggccacaccttgcaggacaggggccctcacccagaactctgcatcccgggagccaaggagggagactctgggctttactggtgtgaggtggcccctgagggtggccaggtccagaagcagagcccccagctggaggtcagagtgcaggctcctgtatcccgtcctgtgctcactctgcaccacgggcctgctgaccctgctgtgggggacatggtgcagctcctctgtgaggcacagaggggctcccctccgatcctgtattccttctaccttgatgagaagattgtggggaaccactcagctccctgtggtggaaccacctccctcctcttcccagtgaagtcagaacaggatgctgggaactactcctgcgaggctgagaacagtgtctccagagagaggagtgagcccaagaagctgtctctgaaggtccatctgtccactgagcctggcagagaaatattgaagtccatggagagtggggagcctcacggggggagcagtcacgtggtcactcgtggtgtcaccatcatccttgctgccatcccctgagccatccttcatgcccatctatgaggctcccccaggccagacggttcccctaatatcagtcattctgcctgttctgtgccaggctagaatgcatttcc

SEQ ID NO: 471907 - DNA, 1942 bp, Homo sapiens
atcaagatttactacaagtgaatatgactcgagtggaagaaattttccatcaaaattcaggaccctcagctgcacgtctgttggagtttgatggaggtccactccagaccctgtttgcctgggtatcaccagcggaggctgcagaacagcaaatattgcagaacggcaaatgttgctgcctgatccttcctctggaagcttcatatcagaggggcacccagctgtatgaggtgtcagtcagcccctactgggaggtctatgccctgccccccagaaatgaagtctacagaggcaggcaggcctccttgagcggcagtgggctccaacgatttcgagctttccagctgctttgtttacctactcaagcctcagcaatggtggatgcccctcccccagccttgctgccaccttgcagttcaatctcagactgctgtgctagcagtaagcgaggctccatgggcatgggaccctctgagccaggatataatctcctgaaatccccacatataagaagattaaatcatcatcatgcagcaaactacaacaatgttagttggggacatctggacaattattctgctcctccagaaaaggacgtgccttgtcattgctgaatttaagtcagaaccagaaaaaatcattattaaagaaaaaaaaaaagaaagaaacagggaaagaaagaaggaaaggagggagggagggagggaggaaggaaggaaggaaggaaggaaggaaggaaggaaggaaggaaggaaggggggaaggaaggaaggaaaagaaagcaaaagaaaaagaaagaaaacagaagaaagaaggaaagaaggaaggaaggagagaagaaagaaagaatagaaggaaggaaagaaagaaagaaagagagaaagaaagaaagaaagaaagagaaagaaagcttaaatgagagctgacagtttatttatataaaatgtttagaatttttatgaagtaccctcataaactggaactccagacctgctaagataatcatgtgaatggacagtgttgccagcatctgcctaccccttttcaaggtttctgtggtgctgagatagatgcaactgctcctgcttattgtagccagtttatcattgctaaaattacatacccttggttaattaaattgggaacatactataaccgttctgtgtatgtgtgtatgtgcatgtgaatgtagtctttttctgtaaataccaaacagagatgttcctgactcagggatatatttttcaaccacagtaaaattcattttggatccaatatttcaaaggttttgattattaaatatgaaaataatggttttttaccatatccctcatacctaataatgaaaaatagcaagtgctttataaacatttgttattgcttctctacacttaaactgaagaaagataaatatatgaaaataatacatgaatattcttctctagattttactagaaaatttagagcatttcatttttaatattacatggaacagataatctataaatatggcatatggtgtattgctagacaagtatatttaccttcctttaaaaaatatttttacttctcaaactacccccacgaatgctctctaaggtataatgcttcatatacttcactttacaacctcacactatacttacaaacattaaaacatatgtaactcttttaataggctatgcatatttttttcatttcagagctactgacatgtttctgcaaatttataggaaaaaatgataaagataaattaatatgtctaatcaagttatggatcagtgatgcctccagtgtgtactctaaaaaatatttttaattagtattctaatatctaatactcctacaatatatttttctgttctttagtcaatccttctgtatactttagaaactacagaaagggcttattgttattaatgaaaatgattaaatgcatact

SEQ ID NO: 471908 - DNA, 720 bp, Homo sapiens
aagttgagaaactttcctgtgtgtctgaagacagcacatatgaatatgcccgacaccagaagtctatgtgtagtgaaggagaaacaagattaaaaagtataaagactatgatcagctgttatagcaaggatctggcccagcttgagccaatctggggagaaacaaggtctttggctgacatcagcattcttgtcattcaaagtctttccaagtgcacttactttgcagaccttggcttgacagtcactttaactgctccaacttctttctatcccaacaataatgcaatgcatccctttgtacatgtgtctttatgggtgattgtgaagacatctcggggtatagcttttgagctgtattccttttccaaaaagtttatgtatcctaaatacgattttataccaactaattgctctctggaatgtctacatcagtctatattacaatacagtatacaaaggctcttatatccttatatctcactattgttttaaaatttgtatatctctagttactaatctagtgttgctgaaataaaatgattctgctcatgtagctggacatgcttagaatataggacacgttttgttacatttttatttctgtagatagaatctattttagcttgaatcaagggtcacagaataaaactaatcaagaaaatagaggaacacgtgtctctctgctctggtgggagaagttgaattcccgtcggttttg

SEQ ID NO: 471909 - DNA, 646 bp, Homo sapiens
cagccaaaatcttggtaccagcatgaacaacttttgttcatccaccctcaaaagaactaatggggatccctgctactcagacgcacctgagggagaggagggctccagatcagccctgtgggagttggctccagatcagccctgtgggagttggccccaaatcagccctgcaggggttggccccagatcagccctgcaggagttgactccagatcagccctgcaggagttgggacacagacaaaaagttaagaggtcttggagaaggcagctcagacattgacaaggtcagcagtcctcgagcagcagtggcagtgggagttttaatgatttctgagaatcaaggaggggacttgaacaatgggaaagaaatgaaaagaatgctgtggtgtggagactactggcatctagcaagggaaagcttcctggaggattgatgaggctgccttatctcttttatgagtattccaagataaaaatacaagagctaattagtaaaccaaatgctctagttgtatactaaactgtgttgtctacaactctgattgttgtttggaggggagcaaaaacagtttgagcaggccaggggtggggaaaagttattgcacagaaagtgggactgtcgaggtatgaggccctgtggttgc

SEQ ID NO: 471910 - DNA, 914 bp, Homo sapiens
gttggtgaggactgtgcttctggtcatcccatcagctcctcgacttccttggtctcctttgaggcagacatgtgagagagctcactgaggcagtggcttgagaagcatgcagcctggggcacttggtccttctgttcccggcagtatggctgtttccatcgcgatggaatgggatcctctcaagacatctcagaggacaggcggaaggcagcgaacatggcagtgccgaaggacacagctgtgtttagcaggggcgacaggaaagcacgcaggcgagcaaggttcaagcgctccaatagtgtgacggctggcgtgcaggcagacctggagctggagggcctggcaggcctggccacggtggccacagaagacaaggccctgcagtttggacgctccttccagaggcacgcctctgagccccagcctgggccccgggcccccacctactcagtcttccgcacggtccacacgcagggccagtgggcctaccgcgagggctacccactgccgtacgagccgccggccaccgatgggtcgcccggccctgcccccgcccccacccccggccctggggccggccgccgtgactcctggatagagcgcggttcacgtagcctccccgactcaggccgcgcatccccctgcccacgcgacggcgagtggttcatcaagatgctgcgggcagaggtggagaagctggagcactggtgccagcagatggagcgtgaggcggaggactatgagctacccgaggagagtgagtcacggcatcggaacaaggggactctggggaccatggcctcgtgtgtgctcaggagaccctgatgggggtggctggggctgcagtgtaacaggaggccccttcggttggtgcctcactggtcttctgcactggagcgtggcgggtcaacatc

SEQ ID NO: 471911 - DNA, 529 bp, Homo sapiens
agaagctgagtgccagctggtaggtcatgccttcctgcaggtacctgtgggcctgcagcaggtagaacaggatacccagatgctggtgatgaaggtgaagaaatccagcatggacgggttggagccggtaaagaggatggtgcttattagggctatgcaaaggcagaagctggtgatgctggagaagaggaggaaggcccaggaaaggtccagcaaggtcttggatactgacctggtgattgtgaataattggcaaggggtcttggatactgaccaggcgattgctgctggctggtggaggctgttggatactgaccccgtgactgttcctggctggtggagggtcttggatactgacccgggaattgtaggttttgattgtgattttggagttggtatgcagggaacattgaattctgtgctccctgctgtcctaaggaagggacttgaattagtcaggagtttttgggtcacaagtgacacaaactctttttttttaaattttttttattttttacttttttaaatt

SEQ ID NO: 471912 - DNA, 2023 bp, Homo sapiens
ccgcggagccggcgcgggtgagggatagtgcccgcagtatggacgataggatattcagtaggaagaaaactcaaaagtcctggtctgaggatagcgacatcgcatgggtttatgtgaagtttcaatggggacgtccacacaacacgttggacacacaagagcccggcaaatgggatctcattgctcattctgcaatgattagagctggccagaaaatagacactggcaatacagcaaataaagtcgaagggaaaatgcaatcagagagatctaggaggacgacaatattttttactgagcacttccgatatgccagacacatttttattatgacattttattttgaaacagttcaaaactcacaaaaattgcaaactagtgcaataatgcccatgtacccttcatccagattctcccaatggtaacattttttataaggatagtacactgtcaaaactaggaaaacatcgttgataccatgctgttaactcacatagagaccttatttggatttcatcattttttacatctctctctctgtctctctctccaccccatccccaccatctgtttgtctctgtttctctctgtctctcttttcatgtatctagttcttatagctctatagataaagtcaactctgcttcatcgaacaactcatactcaatacatacatgaataagcatggctgtgttccaataaaactttatctacaaaagcaaaacaaaacaaaacaaaagaccacctttgagttggtcacaaactttgtgaaacatcattgagtcagttgctgctcagagcatgaaccttttctgctgactttggaaacttatctgcaaacagctcgaaggacacgtggcctaagggctctccatcaacggcgatgtcaaagaacacggtggggttgaccgtggctgatagtacaggactcgcagcggcagtgtctgcaaagcctattttaattttttaaaaccgatctgatgggtgggtggtagcgtctaattgtggcttgaattggatttcctctcatgacgaaagaagttgagcattgtttcgtgtgctttatggccctttgtatgtctgctgttgtcaagtggacctgtgtacaccgagagctgacccactcgtgtatcagttctgtggggctgctgtaacgaactagcacaaactgggtggctttaaacaaaagaaatgtattctctcagagctctggagactgtaagtctgaaatcaaggtccccatggtgtcggcaaggccacacgccctcaggctctgcgtagagtctttcctggcttctgttgacggctgctgaccactggccttccctggctggcagctgcaatactccaatctctgcctctctcttcacatggccctctccctttgtgtctgtcttcatattttcttccctgtttttataaggacaccagtcatactggattaagagtccaccatactctaatctctctctgggtctctttctcttcatctctcctcctccctccctcctttccttcctcaatcctcttgctctccctatgtccttcttccatcactttctctatgatcagtgtttcagtctcttctctctctctgtttctctctctctctttgaatgtcaccaaagctagctcttcccctctttctgaatctttctctaccctccccacccccagtctctttaaacttgagtctttctgttgaggtgtcctacaaaatgtgcagtgtggttcttatgtatgagtgaatgtgtgactttaatttacttaactggcattaggtgatattcttactctatcctaagccactttgcaaatagcactatgtttttaaggcccacccgtgttgttacgtgttcatacatataatccaggatcatctccccatctcaagacccttaatcacatcagcaaagcccccttgctatagaaggtaacatattcacaggctccagaaattaagatggcgtttcgaggtgggagggaggcattatgctgcctcccatgccctccttgatcatcc

SEQ ID NO: 471913 - DNA, 598 bp, Homo sapiens
tttcattagctagtttattcaagggatgtctaggcccaggcgtctgagctggaagctctccctgacccccaagcctggtcaagcatcccttctgggctcccccatcccagccctgcccactctgtatcatcactatctgtgtccccccctgaactttgagtcccagcagaacggggccagaactgtcttgttcgccactgggtccctggtatcacccatcgcaggacccaacactgggctcagaatacatgactgtcccttgaaggaaatgtctagttggagacagccgagtgcaggggtagccagggtgtctgataggagatgcagacaaggatcagaaacatctgagttcagatttcttgcttatgcctggggtttgggccacagcaagcctcattacccttatctgcttccaaatcaggaaaatgggaatctcagtgcagatgtcacttccttccagtggctgaactgttcactctgtcactcataggatgcttttgctttctcccaacgcttagttccagctgacagcccaagtttattgtcttaaacaaaagaagagagaaagaacaaaaaattttaaagcacaaataaataa

SEQ ID NO: 471914 - DNA, 521 bp, Homo sapiens
tgaactcagtaagtccagtcagaatgaaggtaaggatttctgcaactgcgtcggtgaacttggggccagcaccggagcagctctgtgggggcaaaaggcaccagcttcccctgcaggtcaagcgtggaattgaggttgaagccatcctgggccgcatgcagcccacgggccgcaagttggagaagcttgatctagggaaagggtgtggggaaagacgaagagatggcccaagcccatgcctctggcagtcccagcgtgtcagtgtcagacagcagacaaagaatccaggagacagcagaagagggctggggggaagcccaagagaactggagcccagaggcaggggtgaggagctggggagctgggggcctggagggaaagcagtgcccagaacttgcagggcctctgaagctgggctggagtttggctctgggcacgagagccaacagggcctgtcatgggcacagtctccaccccatgatttgagggctgaataatggtcctcaaatacaaccacctcc

SEQ ID NO: 471915 - DNA, 554 bp, Homo sapiens
aagtacagagaggttaagttacatgctcagagtcacacagccagcaaatggcagaacgggacttgagcaccagctgactggctgcagagtctgtgccctgagccagtttgcagtagcattgagcactttatgtgtcaggcagtttacaggcactttgggtcctcgcaacagccccattttacagatgaggaaactgaggcacagaagcagcaatatacctgaggacacacaactaggaaggaggatagagcatattcggtgggagataataaaacctttgatgccaaatgctaaaataatatttggggaaaagcttttgaccccttttagcaaacaaaaattttatgatggcaagaatttatcctgctgctctccgtttgtcacacaaaaggggccgattctgtttgtttctatttgtctgtctgagtttgagctcgggtaagtcattctttcctgttcaataatggaggaggatctgtgtttccctgcatcctagaatggtaaccccctggctagacaccccatagcttatttggcagagtctcagaggaaac

SEQ ID NO: 471916 - DNA, 931 bp, Homo sapiens
gatgtaggttagcgttaaacttcgctcagaggttcccagcagctaaggcaataagggaaatgattggccgctttgaatgatgtcagagactcaagaatgcgcggctggtcttcagtggtccagtacctggccctgagtgattcaggcagattgatgtgtgagggtcagatagaggaggtggctgggaaagatccacctatgacctcaggtcctcagactgaccagcccaaggaacatctcatcaattttaaatcagcctgtgttctcaaaaacttaaaacctcttcaactcacacctgacctaaaacctaaaccccttgttttcttctgcaacaccacttggccccaataccaacttgacaatggctctaaatggccagaaaacagcactttcgatttttccatcctacaagatctaaataattcttgccgtaaaatgggcaaacggtctgaggtgcctgatgtccaggcattcttttacacatcggtccctccctagtctctgttcccaatgcaactcgtcctaaatcttccttctttccctgctgcctgtccctcagtcccaaccccaagcattgctgagtctttcctctttccaatcttccttttctacagacccatctgacctctccccttctccccaaggctgctcctcaccaggctgagctaggtcccaattcttcctcagcctctgctcccctaccctacaatccttttatcacctcccctcctcacacctggtccggcttacagttttgttctgtgactagccctcccccacctgcccagcaatttcctcttaaaaaggtggctggagctaaaggcatagtccaggttaatgttcctttttctttatcccaaattggatagcgtttaggctctttttcatgaaatataaaaacccagcccagttcatggctcgtttgacagca

SEQ ID NO: 471917 - DNA, 1066 bp, Homo sapiens
tttcctttcacatggcccatcagctgattgtcccctggctccctctgccatggcccagggtggctacctctgctgcaggcagccatggaagcttctcagaggctgcctgctgggtgctggcctggaccccttccattgaggctcctcagctggctggaaccctggcctcctgcaggctggaccctgttgggaagagagatggccagagtgtccctggccactgggcaccagcaggggcaaaggatcccagtttgagccaggcaggacaaacgtttgtgtgtggttggctcaggcgggctccacccccaaaccctgctgcatggcagggcatgcatcttctcggtgaccttggtgacctcaggatggggacagtgcctggaggtctctcacccaaaccaggctgcaggcactatggcttctccaccctgtctagcctggaggtgtttgcacgggcagagccttgagcttcccaggctcatccttcagaaacctccccagacctggtcccgatctgcccacaccttcctagctcacagtacagcccagcatggagcatcccgcttgacaataatgtgtttattgggtgattacttgacaagactgtgggcttttcaagaacagtcttctctgatttggtcagcttagcacccagcttggcttgccacatgtgctcattaaaaaccactgattccattaatgattatgagaagaatgtgcacacgtgcttaagtgtagtgtgtgcatgactgtgagagcgtgtgatcgagtgcacacatacatgaatgtgtgagcacgtgtgcacatttgtgtgcagttgtgcatatgggtatatgtgtgtgcacatggtggtctggggcactctgtaggggcaagcgggatcctggtcgtttattgctttggctgttacaaggctctttctggaaggccacatctgttctcggatgttcacccagcagcccaaacagacaggtcagatcccagccctgcaatgtgacttattcaggaacctttaaagtggctttgaaagtcatttggtgccagatgtaccaaatgtcttggatgggct

SEQ ID NO: 471918 - DNA, 997 bp, Homo sapiens
tggtgactccaagctgtggatttggtctgcgcccctccgagtgggtttccagcatgcgtctgattctctccttcatgtcaccaatcaagggcaggagagaacgtcagcgccgcctgaatacctactacgcgccgggccctgtgccaagcgaggactcggccctcctctcaatgtttccccaagtgggctcccagcaccccagcagcctcaacttgctggaggatggccgcagtgctctagacctggacttggcctggcccggaggacacctgcagcctgggcaggaacacctacccatccaggtgccctgggatgcttgttctgcagaaccacagggaccagggaggcagccgtcccccgggaccactagctgcaggcctggaggcatcctgctcatgcccctgcagggcgagccccatcagctgtcttcctgcttctccttctggttcatcattcttactactcatgagcaccgactctgagcctggcactggactggtgctttccagaccgtgctgccctgagaattgagtgtgacatcatgaacgcctgttcacaggttaggaagctgaaactccaagattctacagcatttgtccaagcttccccagggagtcaatggccctggtcgcctggctccctggctcttgcccttaagttctgtgccttgctaggcaagaacatccaccttttatagaccaggactccggccttccagtgctatcagcacacccaggacaaacatggggctccttccctctttcccttgcgtgtcttgttggattaagatttatttttaacccagagcaaatctggggagctggccaccctgtcagatgccattggctggatgcttctctttttgcaagagaaatggctgactgaggacctgcagccagacctgggacatgttgtccaggacctggacttcatgttaatggcatcttctgaaatgacagagcagcatcattactcccagtcctattctaaaaatgga

SEQ ID NO: 471919 - DNA, 2160 bp, Homo sapiens
gactgtgggctctctggcatacctctctgcaccctggacgctaccatacactccagcggaacgatgatcttgtcaggcttggttcgctgtgcacaccgagcccctcactcagtgcctggcatacagtaggagcttactaaacagctgtcaggaccttgagcccagtccagagcctggtccagagaaggtgctcagtaaacatctggagactgaaagccaagtcaccctgtggagagcagcggttttttctgagtggacttcagtggccttggctgactcccttgtgggtgtctgcagacccggccctcagagcctctgcgtgttgaaggcacacagcacctgcagggaaacaggcccttgcctctgtcggctcctcctgctactgagagaccagctcagaggccaggacagcagctcagaaggggaggaaaggaacggagacctgtgggctggtcctcagtgaggcctggcccaggagggagaccctccccagcagatcatgagagctgtgcaccttgccaggatggtggcgctcagcaaacgcctacctgaggtcatctgcagagccccctctcagggcagcgaggcagcctgccaggattcccctgcatcaggagctctgttttaaaacatctgttgatccacgtaagaatgatacagggaagaggctctccgagcgcaccgatgcttcaaaaggcctcaaaaattagaattgctgtcacggcctctgcacttcccagtccaggccttttgtttgggtctccctatgtggccaccaggggggctaatgccctccagccacatgctcagctttgctggccagacaatggcctctgaataggcccatccagagtgcccttttgagtgatagaacccagtgcaacagcggagactctaggaaactaagcctgcgggctccagggcctggggcaggcgttgctcattgaccaggtttgggtggtgtggggcacacaaagacacaggctctacagtgctcctaccgccagcccgcactggggatggtggcctctcccccttgggaaaatctcagtgtctgtcctgtcgacacagcttggtacagaaggtcagctctcggcaggtcctgggaagcgcatggccttatggccacaaagtgcaaacacagctgaggagcactacagccaggccaaccgaagatggctgttctcccattgagtggaaaaacaccttgccacttggggattcgggctctgcgcagtgatagctcatcaaaagcgaggaagatgcatatttatatttctgcaatttagttggaatacccttctgagaacctgcagcaggggcgccttcagtgcacagcttctgagttgttaaaattttcattctaggtccccaggaaacagtgcattaaaacacatcactgcttcctcgcctcatcaaaactcccccgcttgctactctcctgccccaataacgggctgggaaatgaaagcaagggagcctggggccatggtctgtgaaggagaagggccagtcatgcaggcaccagggcagatggactcaggtccagccacgatgcgcctcagccacccgctctgcaaaagatgccctcagctgtgcccctcttctttaaaagttttccccagcaactcaagccaggaggacttgcccctgactttcctcgcctggttgggctcaggtttctccagggtcaagctcctctttctcaaccctgtttccatagcgtaccactgggaaggtggtcactgggtgcagcccacacttaagagctgggatgatcatccgcctcctcgagggaggggcatctacgtcaattacgtggaattcttctgcacgggatacctcagcagctggcatgtacctgcactttcccaaggccagaggcagaggttctatgcctctgtccctgagaacttctccaggatcttggaaattcctggccttcaaagccagaagggccaggtggatgaaccgatgagaggtgccaggggattctggcatctgagcttgcacctgcccagagtctccgtgagcccccagaaaggctccatcagtcagagggacgcgcccgtgtcccatgaagggcggcagtcgacagtcgactgatagatctaggtgcgcccatatggagctccgtgctggaggtgcccctgccctgcc

SEQ ID NO: 471920 - DNA, 2548 bp, Homo sapiens
atcactgggcaagcccagcaagggctgtggccacaggcagggtggaaactaagctatgaggatgcaaaggcataagaatgacacaatggacttcagggactcaggggaaaaggatgggaagggggaaggcctaaggctggcagggcagacctggccgctgcagctctccaccccgcagcggacccaggagacgcactcccagcagcaccctggacacctccgcctgagtccccaatcacacagggccacacagcacaggagggtacagtgtgtacaagatccagcgggaccaaggctgggatctgctgtggcccagggccctcagcctcagtgcaaaagaggaaggggacccaaggtgcaggggttggagctgtcagggctgaaccctggctgtggtgagtcttgccgcaggccaggctggcctcgacactgtgcacccgcggggacggtgagcagcaggggaccgtcctgggcatgaggactctcacgctcagggtcagatgcgcggtgataaagggaagctccactccacctcatttcggcgtggttctgggtagaccccgctgaacaagagctctccctcccccgagccagccgcctaacccatgaagtttctgtgttttgtgtgcctctgttcaaaccggaaatattaccttggcttttatttacattttctgatgatgaaaccggctttaaaatgccccacgccctagtggagggggctctggtacaactcgcgcgcagttggggtggatgaagggccccacttcacctcatctctcctttctgcttaaatattatgccatatcctgattaataccagaccaataaaatcatctccgcaatctggttagaggcttttgtcttcccagatggcctgcaatgttaatgtgtgacaatttcaacaatgaactaggactgttttatggaaccaacatttgttccactgctttttttttagactcagaattttgacacagatggtacaaattactcaaaaaacagaaatgttcatttagaaggcttaaatatgtggttttactcaggccatcagaatattttacatttgcaattcagtaaatttactaacaaccctgctataattaaggcacacagtgggcaccaagcgctaatgagaactattgcaaaatggaagacacaagtcatggcttcctccaagcgcttagagccccagtgcaggtccaaataagtgccctctgaacctgcaggttgcttttcaggggtcaaggtcagggatgcctgaggagaggcatgaaatctcttacgtggggtttggaacatgagatgcttagtaaatgtctgctgtttattttactttcatgattatgattcttttgaaaaatctaattaaatctgtaactttcctgttctggggttggggggcagtttccaagccttgttttgggggcttctgagtgtgctccaggcaatccctcaggaccctccagttgagctcacccctcctggctgcatttgtcattgtactgatgtcaacccaaggaaaaatgcgcccaccacacagaacctcaacaggacagggagtcctcgccatttccctctgcccaacaacctgaaggaggatctgtttaaatattgtttctgatattatttttccgataataatggcaaggacagaaaacaacaccagggtcctgctcgtggcttcacttgaccacagttttgttggtgtgtgctttgtgtatcaggtgatagccagttctgcttctgccttggttcccgtggtcccattatgtaaacaaataatttatttcaacttttgagttaaaaaaatttaatgcatcaaccattgttgtcctttgctaattgttgcagtaagtaccatgcatttatgtgtgaagcttcaattcattagaggattctattagcactgccaacagaaagtgcattctgagtttttaaatgttgtttccattaaaatcaatcactcctcacaattaagccaatagtctcaccatttttgctgctatgagctaaagcatcctaaatatattgacagctgtcttcaataggatgacacaaacgggggaaggggggcaggcctaagactaaatgtcaccaaagggagcaagtgagctcctcttgctgaaatgcacctcattttcataccccagaaggcatttagtacacttttttttttgcagtggcaacatacagtaatcaatgttttgcatattacaatcaataacacacttaaatgtttaagttttgcattcttttgcaataaatattgatatattacaaactctggaaaaactgttcattggactttttgtttgcactgtgtactgtatcattcagcaaataagtgagctaaatattgtttgttacaaaacagatgtcaaataaaattatgccatatgtgctattaaacacttttcttattttttttttcagcaaaacccaagacttagtttcagaagtgaatgtatttggcttttcaaggatttgaagcataaaagcaacatctttgaaatatttttaaacctgctggctttgtgtaatccag

SEQ ID NO: 471921 - DNA, 829 bp, Homo sapiens
ttctcatcatcaaatttctccccatagatgtacttgccaccactgccattatggtgtgtgaagtcaccaccgtgacacataaaccccggaataattctgtgaaagcaggaacccttataaccaaatcctttctctccaatgctcagagcacaaacattttctgctgtctttggaaacttgtctgcaaacagctggatggagatgcggccccagggctcattgaagaacttggttcttggtgccttgaacaaggaattggacaaaacacacaaagcaaggaaggaatgaagggatttattgaaaatgaaagtacactccacagtgcaggagcgggctcgagcataggggctcaagggcccggatacagaatcttcttgggtccaaatactccctacaggtttcccattggccacttggtggtcaactcgtgtaaaccaagtggtggcccgaaatctgtctgattggttgtggaaagcaaccaatgggaagttgaggcaatccagtcaggagtcaatctgggtttggcttttgttattgccatggtttccgtcagtgtaacactaggttcaaattcctctagaattaccttgtgcttcagatgggggttgagttgcttcagtgtctttctttctccctccctccctccatcccttctttccttcctcctgttatatgtaaagtttcagtgccgcaaaaccaattgcactcaaatataaaattttcttttaattctcagcaaggcaaggtacttccatagaagggtgcgcccttacagatagagcaatggtgagcgcacacttggacaagggaggggaaggggttcttatcc

SEQ ID NO: 471922 - DNA, 779 bp, Homo sapiens
ttgcctatttttatgttatttcttgattatatgctaaacaagggcctgcaaattaaagtttctgcatctttttacctgagggcattctgcaaagctccagtgtgcaactgtgcctacctcatggtcatcaggaaatgccaggggattaacaccttctgggatggcccctaccaagtggcactggtggatcaataccccaactccttcacctcagatgggatcatggaatgggtgttttatgcagtctcccagagtaccagggaggccttggacctccagaatgctgagaagatggctgctgcgtcacttccgcctcccaaatctcagggaatgtctcttgtggcccaacccatgcgaactgggaactgcatagggaaggacatgctgggaaatgcagctgcagctcatctgcgggcacattcactgattcacttactcattctccgagcccctgcatcgagctggcctttgcgctgagcctgggactcaggggcgaattcatcagagcttatagtcaaggaggcagacacatgtttgtgtttataacacagcatagaaagtggtggcaaatccaggctcctggtgtctgggtccttggtggaggggcacctggcctagcctgcagccctgcttcccctgccttcctgggtcctccacaatgcttctgcgggctcctgccctgagccttggtgtgaatacactcttcacacccacagctgcctagagccggagcccctgctccagggagacttctctgcccatcctgcccacctgcacac

SEQ ID NO: 471923 - DNA, 1197 bp, Homo sapiens
gggaacggagcccaatttcctgtccccgggcctgatagccagggagccaaaaccacagagagaaattgtatcgtgccaagagatagagcaggaacacgaaagagcatgggcacttcggaagagcgaggccctccaccctccacccagctgtccccacgcacagccagccccgctgggaagtggatggacagctgggagaccagtgcgtgctgcctccagggcgtttcttggagcgccattcagatccatagttggaaggaaggacagaagaggagactgaggtccaagtgggccctggaccaccagcaggacaaggctaggaggaacatcctccctctaggaggtggcggagctggcactgagcagtcatggatcgcagccttgaaggctcagcttgaagtccccctccacccgctggtgacaagcagtgtgtacacaggagatggtgtttcccagcatcccaatggccccactgaccctcctggttattactctgcctgtgggatctcagaccttgtgttttctgctctctgtggtatagaggcctggctgccccttcaggacttgtaaacccaaacgtatattcatctggaggtgcaaaagggggtaaagtgccccaagggggaaaccagagggagtgtggggaccatagtggaggggagaacacaaggcccctctaaagaggacccgcattctcaaatcttctgatttaagagaagctgaagatcctgatttttatgtgaactctccccatatgaaatgttcacagcaatgcattttaaaaatgtttaaacactttgaaagcaaacagacattattcgggtcttgtggggttcagggttacttaccaggcggtgacttctgttgaatgctcataaaagctgtccttgctgatgagggcaacggtagtgggtgggcgccatgaagtggtagtggggagggggctccccaaggccacagctggtggccctctcacttgcctgtcccctctccctccccctccgtcaccccctttcccttcccttctcagctgggagaggaccgtctccagcactgggcccacctcacagcctcgcccatagccccctgccaagagagcaggcacctcttctagctccagccccacagccctacagcccatcagccctccccccgctgctcccctctcacctggtcctggcccagcaggcctgcccc

SEQ ID NO: 471924 - DNA, 639 bp, Homo sapiens
cagagacaacatgttgagcccaagaagccagacacacttatttgaaggacgacacggtctcctggttcccttccctctttcctggctgctccccttcatgccttggctcctcctcctctgtgtaaatgatgggattcttcagaacgtccctgggagcttgggagcagtgagctccataggctccctccccaggaggccctgctgtctcccacccacgcctctgccctgcccacttggcagctctgctcacttgcctgtttcccaagcgttgctaattgatgtaggctatccaaagtcacagcgtggggccaccttgcaggatgtgactgtggcgaggcagctgtctgcagtggaggcaggcccagaagggctacagctggaggctatggcagtgggcttcctgcaggtgggccctgggggtcatatctgtgtctaccacccttcattaactcagacatgaccaacgtgtaaacctgcagtttgggtcatgctaaagtcacatcttcctgttccttaagcaagaacagccaaaggttgcagaccatagccagctcaaatgccacctcctccagggagctgtcctccctcctctcttctggatgccatggcgtatatccaccctccctcagacactgactt

SEQ ID NO: 471925 - DNA, 755 bp, Homo sapiens
ggaagcaaaatgaaagcactgttattgtcaagtgatgatcatcgacatagaaaacaagaatcaacagaaaaattaacctaatgagagagttgcacaaagctccggaagggttgatcagatattaggtagttgaccatgacaagagcaggacctctgagcaacgacgctgtcaacaagttggcctccggaaggatcgccatggctgcaaactgcctagcctctcatcgcccctcacccgctgtcactcacacacctgggcctcctaccgtgctggccaggaaagagctgcaagtcctcgggcccgaggctcggcaggcagccgacctaccttgcagtcctcaggagaagctgtccaggaaccccaccctcctgagctcccggggctttggtggggaagggagcctcccagggtcccggagcactaaacaaaaaggagctgaaggtcaccacactttggccatttgcagggagcccttccccacacaggggcggcatgttcccttgtggctgccagggagcccccaacacccctgggaagatggcaggtcgaggggaggggacatggcctgaaaacaaggaagcagtctgcaatggggagatgtggggcatggggctgttttagacagaggaggcggcagtagacacaattgagactggctgctgggttcccctggaggcagtgtggtaccagtcttcctgcctctgatgacagattcaggccttgacaacaggggtgaacatgtgacccagtctgg

SEQ ID NO: 471926 - DNA, 562 bp, Homo sapiens
gaaggcacccgcgggcggggagcaggggctgcactgcccccgcttgggcgcctactgtatgcacattgcaccatgtaaattaggctgctggcatctcctggcagtggcaaaccagcaccgcagtttcaggcagcttcgacttcaggggctggcagggagtgagctggccaacgtgacccttctgctgagtgctggcagtgtcctctcaggccatgcgggcatgcagcccaccaggtttcctgaggccagcagtgctacacagaatgccaagttcccttttccagggggaggacagagaggggctcctgcatgggcggttgtgaggcaagaaaatggattcacgaagtcttggatggtaatggccaaaatgcagggaattccctgggcagctcaggatttctcgcaaggacagtgtaagcctggagctgctggggctacaactggaagaacacttgcaggataacgaagccaatataatgaaaagcaaagcccaggaagaggtggggtgtggctcagatcctcccttcattctgaagagccgaggacatattcaaggaaacct

SEQ ID NO: 471927 - DNA, 1110 bp, Homo sapiens
cacctccgtctctcattgactctcctctctgttttcctcttgatatatcctccccacttctctgctgcagaagaggcgagtcgcctttggcgccactggggagagcctgcctgtgaaagaattccactccgaggacagctgagcctctcatgacaatctgggtcctgatgccgctgtttgagcccctgggtgcagggctgctggaaacttccggaaggagattgctcttctctctgggagacgtccccggggaagcttcagaccctgccatctcgtccatccccaccatgcccaccaccgctctggctgaggcagctccctgcggagtcctgctccgggctcagtctcccagagaggcagagtcgggcaccaaatggcccataaatggcacagcaggcttcagggagctgaacttgtacttcccgctgggactgacttactcctactttttggaatcaggtgcacctgcagccgttcaggagctggctggccgactgtcccagtacctccttggtcaccttcatacggagctttggtccttcaactttggaaagggttttgattaccgaatgccaggctctctttcacatgttccccgctggtggggagaaagggccttgcttggtctcatggaccagccaggcaggcaaggaggccgcaaacacaggactaatagcaccctcgtggcctgcccccagccctcatttcagaacgtggcccttcctgaagccgctttagctggctgggggaggggtggggttggaggggtggagacgccaaggcagaagagccagaggatggctgctgctcctggcctgcgcactgcggctcctggaagccaagacgggcaggcttgtgtggccgcggaccccctcccagctcctgagcctgtcaaccctggctatgcacagccctcgcctgagaagcgtcttcaaaattctagtgccttctcctcccttcaattccaggataatggcacacacagcaccagtcaggccctggcctgtgttgcaggcacacctccgatacattttgacctgcatgccaactgcagaacctaaacccaggcaggggtcactccccagcagggtgctgaggttcaaagagctc

SEQ ID NO: 471928 - DNA, 750 bp, Homo sapiens
cctgcaccggggctgcagcccttgggtggtcggatgggactgggcgccgtggagcagggggtggcgctcgtcgaggaggctcgggcggtacaggagcccacggagggggtgggaggctcaggcatggcgggctgcaggtcccgagccctgccccacggaaaggcagctaaggcccggcgagaaattgagcgcagcgccggtgggctggcgctgctgggggacccagtataccctctgcagctgctggcccgggtgctaagcccctcattgcccggggccggtggggcgggccagccggctgctccaagtgcagggcccgccaagcccacgcccacccggaactccagccggcccgcaagcgccgcacgcagccccggttcccgctcgcgcctctccctgcaagctgagggagtgggctccggccttggccagcctagaaaggggctcccacagtgcagcggtgggctgaagggctccccaagtgccgccaaagtggaagcccaggcagaggaggcgctgagagcgagggagggctaattgtacattttaaacaattttatgctatgtgaatttcacctcccttcctttcctccctctctccctccctcccttcctccttccttccctccctcccttccttgcttacctccctcccttccttccttcctgtctttctttctctctctctctctctctttctctttctttctctctctctctctctctttctctctttcttctttctttctt

SEQ ID NO: 471929 - DNA, 3879 bp, Homo sapiens
ggacccgggttcccctggcgtaggtcggccctcggccgcagggtggggctgggcatgcagccgggaccccgggcgtcctgtcccgttcctgcgcggcgactgcggccccggcgccctctctgggcagctccgcgcccgcagcctcgcgtctcccgagattgtgcggctgtaagcaacacaggttcgcggcccgactcactgcaccgagacgctgagggctgcagcagaaacagtttaatagccagagaggggaggacaccccagatccgcctccctgagggatttggggtctggacgggggcggctgggtgtagggtcgttggttggtggggaagtgaggggtgaatcctgggacaggaggtgaagaaaccgcattctgctgaatgggctccctcgttgggacttcaacctgattggcgccagcctttgctgggattcaggatctgagaactccggcgactcttgagcagttctcagagatcttatccccaggcacaatggggaagccggcggtcagcgtctgctgtgacctgactctcagggaggcggccccttgaggcagcggggctgagggcacctggttaatatctaactgcaatctcgcctccagcctggctcgcagttcctgtgaacccggcctcagtggctttagaggatgtggctgtgaacttcacccgagaagagtgggctttgctgggtccttgtcagaagaatctctacaaagatgtgatgcaggaaaccatcaggaacctggattgtgtaggaatgaaatggaaagaccagaacattgaagatcaatatagatatcccaggaaaaatctaagatgtcgtatgttagagagatttgttgaaagtaaagatggaactcaatgtggagaaacatctagccagattcaagatagtattgtgaccaagaacactcttcctggagtaggtccatatgaaagccgtatgagtggagaagtcatcatgggtcattcatcccttaattgttacatcagagttggtgctgggcacaaaccatatgagtatcatgaatgtggagagaagccagatacgcataaacaacgtgggaaagccttcagttaccacaactcacttcaaacacatgagaggcttcacactggaaagaaaccatataattgtaaagaatgtgggaagtccttcagttctttgggaaaccttcaaagacacatggcagtgcagcgtggagatggaccttataaatgtaagttgtgtgggaaagcgtttttttggcccagtttattacatatgcatgagagaacgcacactggagagaaaccatatgaatgtaagcagtgttctaaagccttttctttttacagttcctatctaagacatgaaagaacacatactggggagaaactgtatgaatgtaaacagtgttctaaagccttccctgattacagttcttgtctaagacatgaaagaactcacactggaaagaaaccctatacatgtaaacaatgtgggaaagccttcagtgcttccacttcccttcgaagacacgaaacaactcacactgatgagaaaccctatgcatgtcagcaatgtgggaaagcgtttcatcatctgggaagctttcaaagacacatggtaatgcacacgagagatggacctcataagtgtaagatatgtggaaaaggctttgattgtcctagttcactgaaaagtcatgaaagaactcacactggagagaaactctatgaatgcaagcagtgtgggaaagcgttatctcatagctcaagctttcgaagacacatgacaatgcacactggagatggacctcacaaatgcaagatatgtgggaaagcctttgtttatcccagtgtatttcaaaggcatgaaaagactcacactgcagagaaaccctataaatgtaaacaatgtggcaaagcctaccgtatttccagttctcttcgaaggcatgaaacaactcatactggagagaaaccctataaatgcaaatgtgggaaagcctttattgatttctattcctttcaaaatcacaaaacaactcatgctggagagaagccatatgagtgtaaggaatgtgggaaagcattcagttgtttccaatacctttctcaacatagaaggactcacacaggagagaaaccttatgagtgtaacacatgtaagaaagccttcagtcattttggtaacttaaaagtacatgaaagaattcactctggagagaagccgtatgaatgtaaggaatgtgggaaagcattctcttggctcacttgctttctacgacatgaaagaattcacatgagagagaaaccctatgagtgtcaacaatgtggtaaagccttcactcattcccgttttcttcaaggacatgaaaaaactcatactggagagaacccgtatgaatgtaaggaatgtgggaaagcatttgcttctctcagttccttgcatagacataaaaagactcactggaaaaaaactcacactggagagaacccgtatggatgtaaggaatgtgggaaagcatttgcttctctcagttccttgcatagacataaaaagactcactagcattctctctaaatgtatggaatgtgggaaagcatttattaattttatttcatttcagatacttgtacgaaacacattggagatagaccctgtgaatgtaagcacttggtaaaaccttaagtaatttcagtttctttccagtacagtcatcccttgatacctgctgggtattggttccagcactccgtgagccatgtccagtcccttttataaaatgacatatttgtatgtaacttacccacatcctcttgtatactctcaattatgtctagattacttaaaatacctcatgcattgtaaaagctatgcaaatagttgttctattgtattgtttagggactcatgataaggaaaagagtctatgtattttcagtatagatgcagtaattgtcagcctatcaacatagtatagtcagccagaacattaaagtttctttgtttcaactctcacatattgcttttgtttaatgtgttaacacttaccaaaaccctgggtcttctctcttgataacccaagtatagtgattataacgatgatgattctgtggtgcccagtgttttgatgtgttgagatgactagatgtatggcattgtgggtaagtagtgagacatcaggttaacttgaatcttgacaggccatcaggactatcatctatgttggaagaaccaacttgtgattatagatgtggactcatttgaggaggctatgtaatactaatgttaggatctgtttggcttgagggctgaagatctgtaaccattgaatgttccatcttctttgcagatgcttagttataggaagctagttcttcttttcctttgcttcattaaaaaaaaaatcttgcagtgtttataggcatgttgttatttctcgggtggagtgaaagctttgttccattgtaggatctttgaggatcgtacctctttttcacctttgcctactgaaaaactgtggcaaacttttcaagtgtccaaatcaatggctctgtgtcctctaagttttctagctcatcatcatctgtagtggatttcagcagactttgaagttcctagctggtaagggtttctctttgcttttcggtgtgttccttaacgtcatcctcagtcgtttcagacagcgttctccatcaacttttttagcaacattttacatattcttaataactgcattaatagtggggaagcccttgaaatcattgactcccttaccccatgatggcttgtaacatgcattggctgtcctgggctttagggcatctgtagccttcccaataagcacaattgtatttgtaattgtgaagctcttcaataaaa

SEQ ID NO: 471930 - DNA, 686 bp, Homo sapiens
gctttcccacactgcttgcattcatagagtttcttctctccagtgtgagttctttcatgactttgcagtgtactggaacaatcaaagcctttcccacatatcttacatttatgaggtccatctctagtgtgccttatcatgtgtctttggaagcttcccagatgatcaaatgctttcccacattgcttacattcatggggtttctctgcactgtttcccaaagaattgaaggacttcctacattccttacaatcatatggtttgtgtcctgtgtgagaaattttgtgggtttgaaacgagtggcaataactgaaggttttccaaaattgtttacgtgtattacgcttctctccatattcctgatactcatgtggtttgtgcccagcatcaactctgatgtggcaatgaagggatgaaagacccgtgacgacttctccactcattgttttcacgtggacctactccaggaggcatgtgcttgttcacaacagtatctccaatctggctagatgtttctccacaatgactactgtctttactttcaccgaagcgctctaccatatcgcatctgtaaaaaatgggaagtatattactaaaggtttgtttataaatgattttatatgtattaatagagacccttgagatgtcatatgtaaaaaaataaaaaatgttaaaaaatggctcct

SEQ ID NO: 471931 - DNA, 1342 bp, Homo sapiens
tgcgctgaacattcggctccttttcccaaatctgcctgttggcttcatgcagttttactatttgcaagtgtgggaggcgctgctgaccctggtcttcttcccggtgtgcgtggtattcgcctggatggccgacaagcggctgctcttctacaagtacgtgtacaagcgctaccgcaccgacccacgcagcggcatcatcataggcgccgagggcgaccccccgaagagcatcgagctggacggcacgttcgtgggcgccgaggccccaggtgagctgggcggcctgggcccgggccccgccgaggcgcgcgagctggacgccagccgccgcgaggtcatccagatcctcaaggacctcaagcagaagcacccggacaaggatctggagcagctggtgggcatcgccaactactacgcgctgctgcaccagcagaagagccgcgccttctaccgcatccaggccacgcggctgatgaccggcgccgggaacgtgctgcgcagacacgcggcggacgcctcgcgcagggcggcgccggccgagggcgcgggcgaggacgaagacgacggcgccagccgcatcttcttcgagcctagcctctaccactgcctggagaactgcggctccgtgctgctgtccgtcacgtgccagggcggcgagggcaacagcaccttctacgtggactaccgcactgaggacggctctgccaaggcgggctccgactacgagtacagttcctcctgagcacctactgtgtgccagatgtctttatttaggggatcaacctagaacaataaccaagatagataagatctctgtcctcatgtggcccacaaaattcatctatttgtagttcttctgtccatgacacactattttaagacttatagctttacagtatgttcttttcaatgattttcaccagcctacatcatgctttgaacagtatgtgttgttaattcatgcacaagtctcccctttcccataatgacatttatcatgtgtctactatgtgcaagaaacaaacagatctggcaccggcgactagtggtgaacaaaactcataaagtcccggcccaaatggagctgacattctcctgggaaagacaggcagttaggaagtaaacactgattacataaaaatgccagagtttcgcacttgttgcccagactggagtacagtggaatcccatgcaagcgatgctctatccccctgggtgcattgtatcaggaggaacatgatgtccactcgtccattactgtgatgcccagtttaattgtttggtaaagatgttgctaaatctttggattaattgtttggcaaagatgatgctacaggatgta

SEQ ID NO: 471932 - DNA, 563 bp, Homo sapiens
atccctggagctggggtaccctcggcggatgcggagagtcgggcgttggggggcgcaggttggggcttctgcctctgcctacagtattcagtacagttgcatgctgcatgtttgtagcctaggaacaataggctacaccatacagcctagctgtgtgctaggctataccatctgggtttgtacagcttacgacgttcacgcaacaaggaaaaaatcacctgaagatacatctctcagacagatctccgttgttaaatattttcataggacccttccttacttccttcagatctctgctcaatgcaatctcaccagagaagcctttactgacctgtataaaacaataccctctgaccccatcctctttcctttgtttttcttcaagaggtatgctgtcagtaccagagccactcgctacaaggttccatggagccctggaaatgtggctggtctgaattgagatgtcccgtgaatgtaaaatactgtatatgtggggttttaaagacagccccaaaagtgtaaattatctcttagtttttatactgataatgtgttgaaatatt

SEQ ID NO: 471933 - DNA, 1191 bp, Homo sapiens
gtccccctcctcacccacctcgcaatccctcttggccccttccctcaccctgtcactggtctgctcccggggcccgtctctgctcgccgtccgtgtcagtctgtccgcttgagccggagttcccccgcccactcctcatcgcccccaccccaggtgttctaccagcgcgcagacatggccatcggctccctcaccatcaacgaggagcgctccgagatcgtggacttctccgtccccttcgtggagaccggcatcagcgtcatggtggcgcgcagcaatggcacggtgtccccctcggccttcctcgagccctacagccccgccgtgtgggtgatgatgttcgtcatgtgcctcactgtggtcgccgtcactgttttcatcttcgagtacctcagtcctgttggttacaaccgcagcctggccacgggcaagcgccctggcggttcaaccttcaccattgggaaatccatctggctgctctgggccctggtgttcaataattcggtgcccgtggagaacccccggggaaccaccagcaaaatcatggtgctggtgtgggccttcttcgccgtcatcttcctcgccagctacacagccaacctggccgccttcatgatccaggaggagtacgtggatactgtgtctgggctcagtgaccgcaagttccagaggccccaggagcagtacccgcccctgaagtttgggaccgtgcccaacggctccacggagaagaacatccgcagcaactatcccgacatgcacagctacatggtgcgctacaaccagccccgcgtagaggaagcgctcactcagctcaaggcagggtcagcgcagactcgggccgggggtgggggttgggccgctggggacctgaggatgctcaaagatggcaaggggtccaggttcattcattcagtcccagaggtcagccctgggtgggtcagcttggagggcggaggtcactgagggtggaagtggactcctcctcccaggagcaggctccttgggatattttctgggatgcagtatttctggattctggggtgagactgatggggctcaaatctttgctcttccccttcttggctttgtgaccttgggcaagttactcagcctctctgaacctctgtttcctcctctgtaaaatgaggataacaagagtatccccactgtaatgatcataaggttgtt

SEQ ID NO: 471934 - DNA, 631 bp, Homo sapiens
agtgacgcaatttttgtccatctgctccttgtttagggtcaaatcctatacaagggacaggaagaaaaactaaagattcctctacaccctttcctgtctcttcaaacctccaacacctcctccctcctcctctctcttagctaatggccttgcttgctcttgtcacagaaaatagatgcattccaaagctaacttccacacactcatacattctctccaatcccgaccctacatccggtcctgtgtgccctgccttccctcccaacactctagatggtccgtcctgctgccacctgagttggagggctagagggctcttcaaatctcttctcttctgtctcggatggatggatggatggacggatggatggatggatgaatggatggctggatggatagatataagcagcagctttgggtcatccttgacttctctctttttcccatatcctgcatccaatctgttagaaaaccgtacagggtttaccttcaaaacagatccagaatctgaccacttctgttatcattccagtctgaagcatcatcatcttgagcctggtttatccagcagcctcctaactgatcttaggaggtcagttgcctgttgccagccctatccctgacagtctac

SEQ ID NO: 471935 - DNA, 920 bp, Homo sapiens
cctccagcaaactccaacagacctgccgaagaggggcctgactgttagaaggaaaactaacaaacagaaagcaataacatcaacatcaacaaaaaggacgcccatgcaaaaatctcatccaaaggtcatcaacatcaaagatcaaagttaggtaaatccatgaagatgagggaaaaccagtgcaaaaatgctgaaaattccaaaaaccagaacacctcttctcctgcaaaggagcacaactcctcaccagcaaggcaacaaaattagatggagaatgagtttgacaaattgacagaagtaggcttcaggatgtgggtaataataaactcctctgagctaaaggagcatgttctaacccaatgcaaggaagctaagaaccttaataaaaggttataggaactgctaactagaataaccagtttagagaagaacataaatgatgtgatggggctgagaaacacagcacgagaactttgtgaagcatacacaagtatcaatagccgaatcaatcaagtggaagataggatatcagagattgaagatcaacttaatgaaataaagcatgaagacaatattagagaaaaaagaatgaaaaggaatgaacaaatcctccaagaaatatgggactatgtgaaaagatcaaacctacgattgactggtgtacctgaaagtgatggggagaatggaaccaagttggaaaacacacctcaggatattatccaggagaacttccccaacctagcaagacaggtcaacattcaaattcaggaaatacagagaacaccactaagatactccttgagaagagtaacctcaagatacataatcatcagattcaccaaggctgaaatgaaggaaaaaatgttaagggaagccagagagtaaggtcaggtcacccacaaagggaagcccatcagact

SEQ ID NO: 471936 - DNA, 889 bp, Homo sapiens
tgcttccttaggcaacttcatggcatggagggaggtttgcatttgggagggtgtgaaggatttcattccaaagctgttggcaccttttgccacacccctcttctgcattatgaggaaaagaccactggacttgaaatcacaggtctggagatgaattctgactccaccacttaccagctgtgtgaccttgggaggtcacttgacctctctgagcacagggttctcacgattacaattaaagaaacattctcacctccaataactattatgcatattaaatgtgaaagtgctggacacataataggaaggcaaagtgttaaacctgaaatgaatgcaagtgtttaccacatatgtattttgccaaggagtaaaataataaaaatggtgactatttattgagggcctgctatgtgccgcaacttagggaacctggggcctactgctggccccatcaacaacttgctgtgggctttgaccaagtcatgttttcttctttctaggctttgttttccctatctagtaataaaagctgccatttactaaagactttctacttgccaggaactgtgaaaatgacttatgtctctctccctcttttgcttcctacctccctccctctttccttccttcttctttctctcccctcccctcccctcccctctcctccctccttccttccttccttcctccctccctcccttcctcccctacctctctttctttctaacatattgagtaccttctgcttgccaagcactgttctagtcactgggatacagcaatgaacaaaatggacaaaatttgatgcccctgcatttatatctagcaaggggtactggagataaacaaaataaataagtaatttttatagtacattagaagattctcc

SEQ ID NO: 471937 - DNA, 587 bp, Homo sapiens
aactgggccttgccatggcagcctccaacaggactagcttctggcgggcccacgtggacatgggacttccagatcctatcctgggagtcaccaaagcctttaagagagacattgatagcaaaaaggtgaatctggtaattggtgccaaccaggacaacaacagaaagctttatctgctgtctaacatctgcaaggcagaggcccagactgccacaaaaaatttggacaaggaatacctgctcattggggtactggctgaattttgcaagacatctgcaggactagccctgggtaagaacagcgaagtgttgaaaagcgactggtttgtcactgtgcaggctatttctcgaactggggccttaaggatcagaaccagttttctagcagtggaaggaaatagcaatggggtgaagaaaaagaatctctacattatttgacatggcctatcaaggctttgccagaggtgacggtaacaaggatgccggggctgtgtaccacttcatcaaacagggcattaacatttgtctctgccaatcatatgccaaaacatgggcttatggagagcgtgtgggagactttactataat

SEQ ID NO: 471938 - DNA, 1045 bp, Homo sapiens
gcttgccctccactctgttctgcagctactcaactgccctcctcccgtccaccatggccctgccgcactcaggctacatcacctcctggatcaccgctgccttccaactgggccttgccatggcagcctccaacaggactagcttctggcgggcccacgtggacatgggacttccagatcctatcctgggagtcaccaaagcctttaagagagacattgatagcaaaaaggtgaatctggtaattggtgccaaccaggacaacaacagaaagctttatctgctgtctaacatctgcaaggcagaggcccagactgccacaaaaaatttggacaaggaatacctgctcattggggtactggctgaattttgcaagacatctgcaggactagccctgggctttgccagaggtgacggtaacaaggatgccggggctgtgtaccacttcatcaaacagggcattaacatttgtctctgccaatcatatgccaaaacatgggcttatggagagcgtgtgggagactttactataatctgcaaagatgtggctgaaatgacaaaggatggccacatctctgtggcaggggtcacttctggcaacgtgggctaccttgcctatgctatttaccaggcaatggacgagctaagtgtaactgtccttcaattaaagcaagaaaaccctactctggacactgggttaaagtgaatcctctgctgttcaaattacaggaaaagaagagatgatgtggtgtgaaaaggggaaaggctaaaaattcttgcttctttcagttgcttttcctccttgctttttgattctttgctgttaatatatggttgcccccaaagctggtgctatcttaggttgtactaaaagaagtatagtgcctgaattagaggagaggaacattctcctcaggtcagagcacctctgaatcaaggattcagctctgaggccatgaagcatgagggagccagatgaatgagtatgcattagagaagaatcttccatggaactggtcttgttgacaaggaaagtggaagtaaaac

SEQ ID NO: 471939 - DNA, 785 bp, Homo sapiens
tgggacatcacaggctgctgcccacgtggctggcattgcagccatgatgctgtctgccgagccggagctcaccctggccgagttgaggcagagactgatccacttctctgccaaagatgtcatcaatgaggcctggttccctgaggaccagcgggtactgacccccaacctggtggccgccctgccccccagcacccatggggcaggttggcagctgttttgcaggactgtgtggtcagcacactcggggcctacacggatggccacagccatcgcccgctgcgccccagatgaggagctgctgagctgctccagtttctccaggagtgggaagcggcggggcgagcgcatggaggcccaagggggcaagctggtctgccgggcccacaacgcttttgggggtgagggtgtctacgccattgccaggtgctgcctgctaccccaggccaactgcagcgtccacacagctccaccagctgaggccagcatggggacccgtgtccactgccaccaacagggccacgtcctcacaggtggaggtgccaggaagctccctccctcactgtggggcatttcaccattcaaacaggtcgagctgtgctcgggtgctgccagctgctcccaatgtgccgatgtccgtgggcagaatgacttttattgagctcttgttccgtgccaggcattcaatcctcaggtctccaccaaggaggcaggattcttcccatggataggggagggggcggtaggggctgcagggacaaacatcgttggggggtgagtgtgaa

SEQ ID NO: 471940 - DNA, 821 bp, Homo sapiens
gaacatgtgattgatgacccccatccttccctctggtagcccgtgcctgccccagtgggtccagggaagagcagagcaaagcccttcctgcctgctcatcagagctgccccaggcttgaacactgggaagggagcctggttaatgtgtgacactctcctttggtgctgtttggagccccagcactctttggagtctggggaaattcggcctttaaaaatcaaattgccatggagactgccttacgtgaaattttggttcacagccttcattggattatctattggtgcaaacaaagtaaaaacaacgagcttgtattactgtctcatggctaaggttccaagctattggatctttgtttgtgtgtgtatctacatgtctttgtattgctgtgagaaatgggaaagttcttcttcaaagattataaaaagtcataatttcttcttataacactgttaaccactattagtgtgtacatatgtgtgtgtgtatatatatacacatatatatatttgatatatatacatatatatttgatatatatatacacatatatatttgatatatatacacatatatatttgatatatatatgtgtgtatatatatacacatatatatatttgatatatatatgtatatatatatatatattccaaatcagctgtcctagcttgctccggcatacctggacagaactaggcaagccccagcccatagtgcatgccattccttatttggagattcttccttaactatccctagataacttccttttctttctttgttctgttccccttacctaattaagaaagttttaagct

SEQ ID NO: 471941 - DNA, 842 bp, Homo sapiens
agcaggagtgaggccaggtaggatgccgacaaaaatccaggaatgataggacagaatagcaagtgaaagtggtccaattattactcactgctttggaggtcccttcatggttgccaaaatgttattggggggtcgttgctcccagagctcccaagatggtggcgggcctcttccaagatggtggcaagcctcttgttctctgacctggggttcttggcctcacggattccaagagatggaatcttgggccatgcggaacaatggcaagccttcagcccaatcaggagtggtaatggatcagaagcacagcagacaccctgccggattcagagggatagaagtcagtggagggtctgtgacagcggcaaacagcagtggtggagttaataatactttccttctggttattaatagaactagaagtaatgtcagtgaaaggctgactcctgtgattggagcctcctttggagagctgccagagcacaacatgttaaaaggagattaagtcaatctttgaaacagaacaagaacaagaagcacatgttttcagcatctttttttattttaagtggccagttttttttttttttgcagtaattgcatttggaagttaaaatacaagacaactggtcagcagggttaaccaaattgtgagtttgagaaatgccccaactagggcattatccctttactattagtgctaatactttattgagcccttttataaagttggaattgaggagagtattattttgatgattaacataacttgcctcaaataagcctgactagtgtctaaaagtcttttcaaatctttcaaagcatgacattactgactcatc

SEQ ID NO: 471942 - DNA, 751 bp, Homo sapiens
ctggggcagccatgctcacagtaggtgctttaagaagacctctgccatggtctgctcagtggatgcctcagaagtggcccacgacagtggcgatgagtccttggactccacccatacctcagtaccccaggccttgccacctgaaggggcaatacaccacactttttcctgccccatcctgccctgccactggtatcccaccccgccctgcccacagccaggcagccaggcagagctccagagaggaggccgggcccacactggatgtccgctcccttcaggatctccaatgtgcgctccgggaccaagcccctactgtgtgcccccaggaccgagcccctactgtgtgccaggcattgggattgggatggcttctctacagacattgactcatctgtttgattcccacaggcagagtgtccactactcttccctagtcccattccaccccactggccaagtcagagatgaagaaattgaggctcagagaggctacaccacttgtgtaaggtcacacggttcccaaggtaaacagctggactggcagctgctccctggccatacaaaatccagagcactggcctggggtgggggctggctgcactcactcaggaagctcagaacatgctgggtttggcagaggtcgaagagccagtgggcccagcagttcatggagagtcatcccgaggtgtgaagccaaggaagctttggcccatgggagccaaggtgctctggttggggaaaacatgcc

SEQ ID NO: 471943 - DNA, 1991 bp, Homo sapiens
caggcacacagctggcaggggagctgcatgtgcgaaggcacagaggcctgcccgtggaactatgcggagctttatgaaaatcggaatgggtcaggggtacaagcaaagccccagcgtttccagcgttcttcccaaccctgtcgcctgtcgctcgacgcggacctcctgcaaacgaagcgcggcggctgccactatcgcctggcccttggttctccagcaaaggtggtggcagagccccaacagaagatagccatgggtgccaaagcccggatgggctcagaatgggcaggcttcataggcgatgagaaatggggaggggcggcgtggaccgtcttcaaagcagctctctctgcccacactcagcctacccacccaggattgttgctgctgctgaggtggccgggctggagcgggtcctggtaccagcacagctgataggaccaggggagtcacttgaccaaagccaagacaattcagttgtcccttctagaaattctttctttctcctttctcccttcctccttccttccctctcttcctcctcccctccctctcttcctttttccctcccttccttcttccctccctccttccttcttccctctcttccttctcccctccctctgttccccctcccctctttctcttcctcctctcctctttcttttcctcttcccctctttctcttcctccttacttctctctcttcctccttccctgtctcccttcctccttccttctctccctccctccttccctgtcttcctccttccctctctttgtccttccttccctctcttcctccttccctccctggtttctttcttctctctctctcttcctccttccctccctgttttctttcttctctctctctcttcctccttcccttttcccttcatccatccctctctctcttcctccttccctccctctcttcctccttctctccttcttttccttctcctctccctctcttcctcctcccctccctctctttctcttcctccttccttccctcttttcctccttccctccctttctttctgcctccctctttttcttgctttatccctctctcattttctttcagcaggaagagaagatggaatcaaatagctgtgaggttgagctagagtagtggacagtagtttttgaaggccacatttttgaatagacacagaatgtcccatagagtggagctgcctgagtttgcatcaccatttcaggttatgcttggacatcacctcattgaacacttggccttgctggctgcccctgggtccccatgactttcctttcctttcccttttctttccccttttctttccccattctttcccctttcctttcccctttcctttcccttttcctttcctttcctttcctttcctttcctttcctttcctttcctttcccctttcctttcctttcccctttcctttcctttccgctttcctttcctttcctttcctttcctttcctttcctttcctttcctttcctttcctttcctttcctttcctttcctttcctttcctttcctttcctttcctttcctttcctttcccctctttcctttctttggaactccctccctccctcctcagttcagctcccctccccgctccccagttgctctcctcaccacacatctgcagcctcacccagtcactgtggctcaggcactggcacggggatgggatggcctggtggtcagcactggctgctacctgtctgtttcctcgcaggaggagctgactgagcctcagtgtccccagataaggaggggaactaacacaaacaggatgaggacacagcatgtcagggcccaaaacgtggtgcaagctggggcacacaagtgactcagaagagggactgatgtaaaagcagcagcatgaaagtgctagcaaaaaccatggaggagttttcataaccagacactttaacagatattataaattaaattatcaacacattcaagttcccttt

SEQ ID NO: 471944 - DNA, 642 bp, Homo sapiens
gtgctgagagcctctcacccgctgtcgcatttgatccccacaacagcccctggcagaggtgacagtgctgtcaccttgttacagatgagggatctgagacccttagaagcaaagcgccagaccacatgggtagcaaagccaggacttgagcccagcctgtctgactccaggttcatcctcagaaccatgcaccatgctgccctgctgtgtgccaggccttgtgctgggaacacagatggaggatgcactgtccaagtggggcccatggtacctctctgcaaggctgcagctggaccaagtacaccgcaagcagcttccatggcggccactggagaacacagtggcacccagaagcttggagactccaggaactgcagggccccaaagagggagtcacagcccaggcttggggagctcccagcgcagtggctataaacacagaccctggaacttggcagcttggattcacatcctgtcctacaggatcctggaggggctaaaagcagagagggcagaagggagagagaagatgcagaccttgggctccagctcctgcgggggtccctacctccagtcaggcccgagctggagcagagacattgtggcttaaccagactggaccggtcaatgctgacaggtgga

SEQ ID NO: 471945 - DNA, 1506 bp, Homo sapiens
tctctggctttgcaaatgtcagtaggctgcccatgagctgaaggaatggttgctgatgtctgccctgttgtgggccagagctgtgttttgaaggataaagaactggtgcagaattgtaacaccaccaccaccaccgccaccaccaccatcactaccactgtcaccaccaccatcaccaccatcaccaccaccatcaccaccaccaccaccatcaccatcaccatcaccaccaccaccaccatcaccaccaccaccaccgtcaccaccaccatcaccaccaccaccaccaccatcaccaccaccgtcaccaccaccaccgtcaccaccaccaccaccaccaccgtcaccaccaccaccaccactgtcaccaccaccgtcaccaccaccaccaccaccaccgtcaccaccaccaccaccaccaccaccaccaccaccatcaccaccgtcaccaccaccaccaccaccaccgtcaccaccgtcaccaccaccacagtcaccactgtcaccaccaccaccaccaccaccatcaccaccaccaccaccaccaccatcaccaccaccaccaccacagtcaccactgtcaccaccaccaccaccaccaccaccatcaccaccaccaccaccaccaccaccaccaccaccaccaccatcaccaccaccaccaccaccaccatcaccaccaccatcaccaccaccactaccacaagcatcactaccaccaccaccaccatcaccaccaccacttactgagggcttctgctgtgccaggcactgcctgtgccatctcacttcatcctgaggcagatttcccatttcaccaatgaggactctggagtcagagaggttgaacacagtagggagctgcagaatttgaacctggctctgtgtaactccagagtcaagctctgaagcccttggtgggagaacaccctggataaacacctagtgcaaaggcaggatctgacattgtccccatttctacagaaaagaacactgagactctgagtcagaaagtgacctgcccagaaaataacacagcaaagaattgcagctggcataatgatgaccatttggtttctcacgacgagtttttagaaggaaaatgacagagcacaaagccttgtttttcagtgtttgggaaagggagggaggtgctttgctgtcaaagccggcaagaacagaggaggctcaagggagcaggtgggtccttacagacttgaggtgtgtgaaagcaggagggagctctgggaggatgatggcaccctcatccctgctgaagccagggtgaggggtgtgggccgggagctgcctctatattttctctgatccctgcacctctgtgtccacctgccagagcctaaccctgtgtgtggacttggcacttttcagttcccaaagtgcttcatttatttgttcattcattaattaattcacagattcattcgtattattcacgtgttgattagggctcaccatggatcattatctgtatagggctctggggtt

SEQ ID NO: 471946 - DNA, 800 bp, Homo sapiens
ggtttctccccagacagcagccctccctgccagggactcggcctgcacactaagcttaccatgaggctgaaggtgggagaggcaaagggagtgggggtgtgtgtgcatccgtggccctgggatgctccctgcctcaaccctgtggagggagatggtgacagtggagttgaccagactggagaccatgagatctacaaatccagtctggtgccaccaccctcactttcccgggagatgagcatggattctgcctccagcgctgaccagccccctaccccaagccctcgccctgccctccccacagatgccctgaagctgacaggcatagacactgccctctctggctccttggccaacatggatcactccagatccctgcagttctgtgctctggctgaaaatgcacttgggctgctatgttcattacaaactcagggcttttggggctgggggtgctgcagagactgtgtatatggagaaactgaggcctgagagcaggtgcttggtctcattctatggagctgggcccagggtccttgttcttagacctggtctttgtactgcaccacagagtcactcccttgcattaactccccacaactggagacccaccccttcctctccctaagcctcctcctagtctccttcaccctcagacctggcagctggccaacttcttccaccctgcctgcaccatccttggcatcttctcctatccccaccttgaggttcagtcatgcctagctctagaaagttggtggtgatcatgcataatgtttactgagaacatggaccgctcc

SEQ ID NO: 471947 - DNA, 3960 bp, Homo sapiens
ggtactaggccagagcaatgtggccagacagccaagagatttcaatttagggctcccagaactttcagtatatgagtcatcacagctaccatcgcctgagggcctactccacttgggcctccctgctgacccttgagcatgccagggtcactctcacctctgggaatctgcacgtgtggcttccgctgcctgggctgaccacccaagatgtcctcatggctcccagccttcgggctgttcccaaccattccagcagcagtgcgtccacagcagctttccccacagcagctccccccacagcagctccctcacagcagcagctcccccaacagcagctcccccatggcagtttcccccacagaagctcccctcacagcagctccccaacaacagctcccccacagcagctcccccgacagcagctccccaacagtagttttccccatggcagctcccgcagttccccctacagcagctccatgcacagcgtctccctcagagcagctcccctctcttcctccctggactggctccaaatcaggatgcatcctggctcctgggacctggatgcacatgccctgggctctcgtgcagggccagctttgattcaggggggctgggtgggccctgagatgctgcagtctaccaagctcccagggatgctgctgctgttgctggcacgcgacccacagcaggaagcaggaaagctgacttccctgaaagaggtaacctgcctggggctgtcaggaggaaggcccatgggaatgctcccagcatcaggggactttgtggttttctaccagaagaaggcactgtactggtgtcttccagagaaggtagtggattttgtctatgaaccttgagtgtagctgagatgggtggagatggaaactcccattaaacagtcattctctagtctctgggaactaccattctactttttctgtttctatgaattcacctactttcaatacctcattggccatcctaatgagtgtgaggtattatctcattgtggttttgatttttctttgctaatgattagtgacactgaacatcgtttcatatgctgttggccatttgtatatcttccttgcagaaatgtctattcaagtcctttgaccattttctaattgtttaaaatttttttttttttactgttagagagttttaaaaaatattctggatcttaaccttttatcagatatatgatttgcaaatggtttctcccattctataggttgcctttttactctattgatcattttctttggtgtacagaagttttaaactttgatatagtcctattcatctatttttgcttctgttgtttgtgctttttgtgtcatatccaataagtcattgccaaaaccaatgccatgaggtttccccccgttttcttctaggaacgttatagtttttaggtcttatgtttagctctttaatccatttagagttaatttttgcatgtggtatatggtaaaggtccaactttattcttttgcatgatgttatacagctttcccagcaccattttttgaaaagattgttcttttcttattgagtggacttggaatcttattgaagatcatttgattatatatgtaagggtttatttctgtgttttctattctgttccattggtctatttgtctgtgtttatgccagtagtacactcttttgattattgtaactttgtaatattttctaaaattaggaaacataaggcctccaacttttcaagatggttttggctattcaggatttcttgggtttccatattaatcttaagaatttttttcaatttctgcaaaaaaaatgccattgaaattttgatagatctcaatgccttaaatctgtaggttgcattgggtagtatgaaaaattaaacactgttaactttttcaatccattaacatgggatatctttaaatttatttgtgtttttaatttcttacaacaatgttttgtagtgttcagtgtgcaagtcttttgccttctttgttaagtttattcctaagtgttttatccttttcaatgttcttgtaaatgggattattgtcttaattttcttttcagattgatcgttgttgttgtatagatatgcaactgctttttgcatgttgagtttgtatccagcaactttgctgaattcatttattagttctaactgtgtgtgtgtgtgtgtgagccctttagagttttctacacatgaaatcatatcatcttgattggagttaattttacttcttcctttctaatttggatgtattttaattctttttcttatctaattactttggctaagacttccaggacgaagttgttagaagtggtgagagtgggcatccttgccttgttcctgatcttagaggaaaatgttcagcatttcactattgaatatgtgttatctgcgtgcttttcatatacagactttattatgttgagatagtttccttctattcctagtttgttgagtgtttttaacatgaaaagttgttaaatttttgttaaatgctttttatgctgtgattgagatgattatgtggtttttgtctctttatgtggtgcactactttgattgatttttggatgttgaaacatccttgcattccaggaataatctccacttagtcatggtgtataatccttttaatgtgctattgaatttgatatgcaagtattttgttgaggattttttcatcaatatacatcagaaatattggtttgtagttttcttttcttatagtgtatttttctgactttggtatcagggtaatactggccttatagaattagttaggaaatattccctcctcttcagtattttggaagagattgaggagggttggtgttaattcttctttaaatatttggtagaattctcctgtgaagcctggtctggtcctggtcctggacttctttttgttgaggggttgttgattactgattcagtctctttagtataggttataggtctgttaggttttttatttcttcatgacttagttttcatatgttgcatgtttctagggattatccatttcttttaggttatccaatttattgacatataattgtcatagtattctcttataatcctttgaattcctgttgcattagttgcaatggcctctcatttctaacgttagttatttgattttttatattttttcttagttaatccagctaagaacttgcaaatttgtttatcttttcaaaaaacgaactcttagttgcattgattttttctattgtttttctattctctatttcatttatttctgctctaatctttattctttccttccttccctaactttgggttttgtttgttcttatttttttccttgaggtgtaaagttgggttgttgatttgagatctttcttcttttaatgtaagcatttacagctataaacttctccattagttctgtttttgttgcttcccataagttttggtatgctgtgttttcatttttattcatctggagatattaactaatttttcttgttagttattctttgacccatggttgtttaaaaatgtgttgtttaatttccacatatttgtggctattctagtttttcttctagtactgatttctagttttattctattgtggctggaaaagatattttgtatgatttcaatcttcctaaatctattaagatttgttttgtgctctaacatgtggcgtatcctggagaatgtttcatatttattgtgttgttgttgggttgagtattctgtctatgtctgttggtccaattggtttataatgtttttcaagtcccccggttccctactggttttctgtctggttgttcaatctgttattgaaagtggaagtattgaaatcttctactgttattgtgttgctatctatttctctcttctattctgtcaatgtttgcttcatgtatttaggaactcacctgctgcagtcacactggcct

SEQ ID NO: 471948 - DNA, 657 bp, Homo sapiens
tgcctgcctgctcttgagggtctggctccatcatgggaccctgagggtggaggtgggtgaggggacaatgcagaaattaacaatccaaggacacttccacgggcctgtgaaagcaaaatgtctagagcaactggccctaaggatcacgggggcttcctagagcagaagacttctgagcttaacagacaaatgccagggcagagcatgtcaaagggatgcatttccaaggatggggacgaggatgtcagctttgctgagccaggagcctccttctacagctgctaccacctgagccgagcctactcagcttcctgctcccgatgtgcaaacgtgggactcagaataggaggacttgggggccagctgaaagggcaccccttgtgggtggccaagaaggaccatgttacctcgtgcaccgagcataaggcctggagcatggcaggaggtctgctgcagatcccagttcagccattccagtcctcagtgccccaggtcacggctggtcagtggcagatttcagatgggatttcagtgcaggcctgttgagctccgaagtccagtcttctcttttggactcattgtctgtacattgtaaagtgttggggacatgcatagagttaatgtgattatccttttattgcagtatcctgtagccca

SEQ ID NO: 471949 - DNA, 1699 bp, Homo sapiens
cctcccctcccctccccttctcaccctaattggctgggcttccctgcgagtttgagcagagttaggaggtgtgagcatgtgttttctctattccgctgacatatgatgcaatgaatccccgtctcagatggagcttgtgttctggtgggggatgcagatagtacacaagcaatcatgctgggaagtgagaagttccgtgggggaattggacagggtgaggagacggaagtgaggagggtgggcagtgtgtcagtggggatgtggcaagggacagatgagatggcacagtcaagtcaggcaatttttggagagtgtaaaaaagagaccaagaaggcgaaggcatgggcagggcataaggaaatcctggagatggtgctgtttcctggcatccggcaacagagggctccattaccacccttggaggatgaggagccccttgatgtagccgataagggctgccacccagaagcacagagtagaggggacaagggtgaagcgagggtgggaagggacacccctgtgcagggggaaggtatcttcttcatcatcatcattttttccatcatcatcgtcatcatcctctctgtcatcatcacctccatcatcatcctttccatcatcattatctccatcatcatgttcatcatcattctctccttcatcatcattctctccatcatcatcctctttatcatcatcttctccaccatcatcatcaccattatccccatccttgtcatcattctctccatcaccaccatcatcatcatcatcctctccatcattatcgtcatcattatcctgttcatcatcaccatcctcctcatcttttccatcatcatcatctttcccatcagcatcctctccatcatcatcatcatcatagtactgtcaccaaaggaagcgctggcagcccttcttccaggagtgaaggctcacacgtgcaaatcccagcccctaagaactcacctgccctacagtcctgtccacccttctctgctaagtcctgtccacccttctgatcgcatcccatggccacctcctccaaagccctccttgaccccccaggccaggtcagacccccccatcatcatggactcttctaaagaggagacttctgagcaaggatctgaggctgcagtaactctcaaaggcactgatgacgagggacggtgcaggaccccaggattaacagcagcagggagtccttcagtgccaaggtctgaggaggggcagtcagagccagctagagagctgcatgtggagctccgccgagaagggctgtggcctttgggggaggaatgcagccaatccggagacacagcaggggaggtgcagggagatgaacgcctgttctctcatctcctgctagtggccccagtggccaagcccaccctgaagccagagggcctgcctgcacagggcctctgggaccacagagcaggatggcagggacctcatcagaatggccttcactatacgttttcctacagcattctggtcatgaccacttaagtaatttctaagaagactgagactttctctacagctcttgttttctgagccctcaccagaatcacccttacttaataccctgttcatagcaatgcaggctttttctagattcgcttcaaaattgttccagtctgtaccccatcacctgcttccaaaactgtctccacatttttaagtatttgtt

SEQ ID NO: 471950 - DNA, 1522 bp, Homo sapiens
ctctgcaatctcacatgtccccgacacccctccctcaggcccccaaggctctagtttctctccccaagtccccctgtgtggtggttaatactgagtgtcaacttgattggatcgaagatgcaaagtattgatcctggctgccagcgaatatacagcaggaagaaaaacgtgaaaagggtaactgtgcattgggcaaagggaaatgatcagacatttcagggactactggacactggctctgagctgacattgattccaggggacccaaaacatcattgcagtcctccagttagagtaggggcttatggaggtcagctagttaatggagttttagctcaggtccgacttagagtgggtccagtgggtcccctgactcatcttgcagtcatttccccagtgtcagaatgcataattggcatagacatacttagcagctggcagaacccccacattggctccctgactggtagggtgagggctattatggtgggaaaggccaaatggaagccattcgaactgcctctacctagaaaaatagtaaatcaaaaacaatatcgcatccctggagggaatgtggatatgagtgccaccatcaaagacttgaaagacgcgggggtggtaattcccaccacatccccattcaactctcccatttggcctgtgcagaagacagatggatcttggagaaaaacagtggattattataagcttaaccaagtggtgactccaattgcagctgctgtactagatgtggattcattgcttgagcaaattaacacaactcctggtccctgttatgcaaccattgacttggtaaatgcctttttctccattcctgtccataaggcccaccagaagcaatttgccttcagctggacatccccgaagtacaatggtgaagggacatcttcccagtgggcagaactttgcctctttcccaagccatccctgtcatcacccaatgggcccatgaacgaagtgaccacggtggcagggatagaagttactaatgagctcagcaacatggacttccactcgccaaggctggcctggctatggccactgccagctacctggtggcaggttgattatattggacctcttgcatcacggaaaggacagaggtttgtcctcattggaatagacacttactccagatatgggtttgcctctcctgcacacaatgcttctgccaagactaccatccatgtactcacagactaccttatccaccgtcatggcattccaaacagcatagtagtagaagaaggtagtcatcgataccagctatgaccacgtgatcagctgcagaaatgaagactgtaaccgtcatgggtatttcctccttctttggttaaaaacatgtctgtgcatgtatacactcgtactaagaaaatatattcattttatttccttttcctttatcacgtgacataaaatttattgacttcatatcagcattaaagtattgttaactttatgaatagtatttgagttggggaattggtgggtttctggttgt

SEQ ID NO: 471951 - DNA, 1163 bp, Homo sapiens
gagctgggctctaacttctatgccaaaaggatgggaaaaccttgcgtgccgacctgagtgcttctctggaattgtctgctcagggagaagccagctgtcacgtcctgaagcagccctttggagagatcgtgagggcaatttcataacacatatcaaagccttaaaaatgcccatatcctttgacctgatgagaccagaaatctatcataaggaaataatcagagatgaagacaaggatctatgtgtagagttgaacaaaaatgaaatgggtgcctgggatattgacaaaattgtgcatgaagctaccatagaagtcctgaaattcttaaatccagaattttcttacatgagggaaaaacaaatctttcttgaagccgctgtctttcagattccaattaatagctgatttatttcctaacaaatacactgagccagggtcaaagattatatatatatataatatataaaacatatataacatactatatttatttattttattatattaaattttatttatatatttttaaatatatgtaacacatttatgttttatatatgaatatataacatatttatatatttaatatataaacatatatgaaacatgaatatatatttatatataaaacatacatgtgaatatatatttatatataaaacatacatgtgaatatatatttatatataaaacatacatatgaatatatatctatatataaaacatgtgaatatatattcatatataaaacatacatgtgaatatacacatataaaacatattcatatataaaacatgtgaatatatattcatatataaaacatatgtgaatattcatatataaaacatatatgtgtatatatataaaacatatgtgaatatatatttatatataaaacatatatgtgaatatatatttatatataacatatatgtgaatatatataacatatatgtgaatatatatttatatgtaacatgtatgtgaatatatatttatatgtaacatgtatgtgaatatatatttatatgtaacatgtatgtgaatatatatttatatgtaacatgtatgtgaatatatatttatatgtaacatgtatgtgaatatatatttatatgtaacatatgtgaatatatttatatataacatatgtgaagatat

SEQ ID NO: 471952 - DNA, 1594 bp, Homo sapiens
gatgaagcagcttgggaatggtcccagaagttagagatgcatcctgtggccagagaatagcagacacacaggggataaataaggcagtaagctgggagacatgcagggaggagagcagctgcccaagccgggccctggggggcttcggggatggagcagctctgagctaagccctggctggggcccttggtggagcagagagggctggtggtagctgaggacaggatgggattggggatcccagcaggggccctgggccagggcagccaggaagaagccagagaggcaggactcggcaccctgggctgggagtcagggcctggtgggaagagcagccaggagcacaggggcggggcctggctgctgacctgggtagggcctggccctgctccacccttctctgcccccaacctcctggtgactggccaggccctggcgtccccgactcttgagaatccaggtgattggaggtgcccagcaaagccggcccttcctctgggaacatcctgctcctatgccaggcagcgggtcgcagaaggaggtccagccctgctggctccttttgtctccaggaacccagctcttagcccggacagagaagggccatttgtcaggcttcgacagtgggagtttagcctcaactaagtctcgggaaaaggattttctgtgtccgtgaaaactgacaattcaccccaagaatcaaaaaagacagttttcctttccacttagtgacaggagcacagaccttttggggtctgctttgtactattatacacaattcaaaccacatcacctgccccactctaccctcaccagccaggggctcatcagtgacaatgtaggaaaatgcaatcggtactttcaagacatactatgtaaaaagtaatttccaccgtacagtttttacctttccttcttttctttaaatgacagtatttcttgtttgctctcctctctcaggacagatccacaaaggaggatgaatctacaaaattcacaagtttctgagaagttgtggctcttaaagatgtactaaccttaacctgcaacatgaaataccactgagtgtgagcatgtaaaacccagcaacttcgcggtacaggtaatctgtctccctgcagctcatggggcctcctctcaatcttccagaatgcacaagcctcttggctctgcttgcctctgttcatgccctcctcaggcagactttctcctccccatggggaagatgcactgccccaggctccaaggtccttgcagcttgtcatcccagaggagagaccttctccctccaagtgtccacctgtcaaatctctgggaagactaggaatgcaccctcagctccaccacatggaactggctcctcaccacaaaggtaattctggaagaggtaagagggcttccagacaaacaccccagaggtcctctacgtgacctgtgcaccttttggtttgtaggatcctgggaaagcaagggtttccctgacatgactgtatccatccccctaagcccacagaaggtgagagtggcatccctgtgctggttgtttaggtcaaagggctcaagggtaagactcgtggaaaaagacttttccaag

SEQ ID NO: 471953 - DNA, 598 bp, Homo sapiens
ctcctccccaaagctctgcagggcagtctggggtgggcaggagcatggaccttagtgacagaggcttgggtttgagccatctctgccatcttgagctgtgtgaccttgggcacagtgccaagtcatccataaacattgacagtacagagtttcatccaacacaacagccttacaagctgacaatttcattacttgatttttcatttaccccagaaaagccaagaggtctcgaacctaaagaaccaggtcgatgttccacttcaggactggagcagggagagctgcttttggacgggcctgccctccatctcctgtctctggacttgggaggcctgtccccttcaccctgtttcagaccctgcaggccaggccacagagccttggcctgggtcaaactcacccctcactgtggccaattagttttaacttgtcataaattttttaacgaattgctgatcgataagaacttggcagctactactgagcctcaaagtcaaggggtaaaaagaatctaaatgatgtctgccaggttgttgtattaacctggctccatgcttattgcctgttgttttgagttaattacctggtgcctaagtgt

SEQ ID NO: 471954 - DNA, 758 bp, Homo sapiens
gaacgtcaccgtcaggcacctcaaggccaactctgcagtggtgagctgggatgttctggaggatgaggttgtcatcggatttgccatctcccagcaggagcggggctggtcaccgagtgttgacagcagtgaccggcgcttgtctgcagaagaaggatgtgcggatgctgcgcttcatccaggaggtgaacaccaccacccgctcatgtgccctctgggacctggaggaggatacggagtacatagtccacgtgcaggccatctccattcagggccagagcccagccagcgagcctgtgctcttcaagaccccgcgtgaggctgagaagatggcctccaagaacaaaggcaggcccgggtcactgttaagaggaatggggtgggatgaggtaaccatgaaagagatggggaggaaccaacagctgcggacaggcgaggtgctgatcatcgtcgtggtcctgttcatgtgggcaggtgtcattgccctcttctgccgccagtatgacatcatcaaggacaatgaacccaataacaacaaggaaaaaaccaagagtgcatcagaaaccagcacaccagagcaccagggcggggggcttctccgcagcaagtgcttgccctcagcagctaagaagacagacagtagagaatgtgagaggatctcatggttctgatgatgattatccaacaaacatctggccctctctacatctcttccctccatctccttgtaccctctggcttactgtcctctctctggc

SEQ ID NO: 471955 - DNA, 739 bp, Homo sapiens
agctctcaggaggtcaactcccaggcgagccgaccacagacgcagcagccaggaatggctggaggctgaagagggaatatgatggcccagagtgacaagcccaggaatgctggcattctagttggctctggtcccacctgctgccagacacacccatctgtgtttgtgggtcccggggcttacgtcagggtgtctgcgggcttctggcagcaagtcccggaagtggctggaaaggcaggttttacagaaaatggaccagaggggttgtttttgccaactttccccaaaagacaaaaggccatgccaggatttgaacctggatctgtcaccccgggaaatctgtactctcatattgaggaaccagctaagatgcagcactttctctatctcttgggctccctgacagtggacttggcatggaactgggtgcttttacccaggagtcagggctcttcttggggacccattggagccatctccatcttgcagagctcagcagcctcaggggctctcccagcaggatcttcaagcctagacttctgtttggagaaggaccacctcaagcagccccagccttcctgatctcccaacaccaggggttgcctaggagccacgtggagccctatgctggggacttcccctcccctggaacttgctcgcccttccatggaccctgccactgcctggctctctcaattacctgcctctgcttctaccccacccctgcctctccctcctt

SEQ ID NO: 471956 - DNA, 583 bp, Homo sapiens
tttatgaagacatcgggctggcatcggaatgttgatgtcctcagacaatcttttaaaaaatcaagggccacgtttgggtatgttctcgagctcctttaggtatgcaaggaagagccaggctcagaggactttcagtgatggtggctacaataaggacacagaggaagtgaggttattggggaagccctctcagcagcgtccagcaagtccccggagaacaggaactgggatagacttgtgctctggccccatgccctctgggcatgttcccagcatcgatgtctcccataccagacagtctcacacaggcattggcctccatcacatccagcttgtccaaggcagcaaatggctcgggcccaaatcctgtgtccagtcagctacagtgaggttggcagggctggcctcattggacttacgtgacctagatcacagtgatttcatgaagccagaaggaggcaatacaggaggagccaagctggctgagagtcgaggcgaaagtgaggtttggctcaaaaggaccttggaggtagaattatgaatggttcatgagcggagccatggaggagggctccggaccaaa

SEQ ID NO: 471957 - DNA, 547 bp, Homo sapiens
gaggttcccagcagagaaaacatggagcaagaccaaagtgtggcacttttgaaaatgatttgtctaattggagaagaattgttgaatgggatgagggcagaacactggggaacccaaactctaaggattgagcaaagatgtctgagaaggagcactacagaggttggaaaaggaagacttcaaaaagacagcaatcagcatcctgcactgcaagaaggcaggtcaactaacaaggacctgaagtgcttcattaatgatcttggtgagagtgaggagtgggcacagaagcttgaccaaaatccattcccccagcctccaccaattgggaggggagccagaggggagggtgtccatggatttgccttgggaggaagagctatgaggaagtcttcatgaatttgtccctgaatggcagccaaagcaggaagcctcctaagtttggaatggggtctgcacctgcatcttacatcccacaacgaagtggagcctctgtagcagtggcagactacaggtctgtatttacatgggtccgtatttcatctgcatc

SEQ ID NO: 471958 - DNA, 600 bp, Homo sapiens
agagagtgggcacccatcccagcacctggagctgcctgtgccatggcagcagctgtcgtgtctgactgtgtgcagtggctggaccccacactcgttcacacaccccttgctgttccatgcctgactcccactcagagtcgtggggtccaggctggtggcgtgagccgagcgtggcctgccaggccaagtgagtggaacaagctcagtgggcccgagcaacactcagggaaaggtgccaccagccacagaggtttctggccagaaaagcaacaccccaaagatcctcaagacaccttttctcctcctgcccttggacaccagactctccgttcttcagcctttggacctgagacttgcactaacaacctcttggagcctcctggaggctctcaagcttttggtctcagactggggcctgcactgctggcttccctggatttggagccaataaatgaaaactctgacaacaagggcttaaacaatggggcttatttttctcatgcattaaaaatctggatgtaccagcttgaggctggtgcaggctcctaaggtgatcaacaaagacccagtctccttggatttatctgttcttccattatg

SEQ ID NO: 471959 - DNA, 886 bp, Homo sapiens
tacaagcatgacactagcagctgcttctggtaaatcctcaggatgctattatggcagaaggtgaagagagagcagaacgactctttcagctttatccatccttcaaatttcaatgcaagcaccaatctcttcaagaaccattccagacaccttctccctgcactgttccgcagggaaatgtcaatgtttttactcttacacagacaaatgagaataagaatatcctttatatacagggagttcttacaaatcagcaagaaagagataagcacaacaatagaaaaacagatcatgagagtggaggccccatgaatcggattagtgccactacagaagaggccctggagggctccctcgccccttccaccatggtaagggtccaatttcattcttatgcatgtggatatccagttttcccagcaccacttgttgaaaaaaactgtccttatctccaatgagtattctggcacccttgttgaaaatcatttgatcacatatgtgaaggtttattttcttcatgttcttaacttgcttaaaattatttattgaatttccctaataccaaggaacaaagagtatttttaaaaattgttcaagtttgttcaatggatgccttttttcttcagcagattttttttctttttatgtcacacaaatataagactcatcaagatgaataacaccatttaaaaattcattcaggtacagatgtaattatctttaaccagactcaacgaaaatttggatttccacaaatggcaaatcagaaatgatcatttatcttactgaatcacctaaatttccttttaaatatcaaaagtataaaaaggaagaaaaattattgagtttatattgtattcaaggtactgttatctcatttaatctt

SEQ ID NO: 471960 - DNA, 472 bp, Homo sapiens
cacttcctggatatagcagccatgaaacgagaatgtgactccttcatcattttggtaaacttctcagtcatagcaggcataaggcagagcccaggcccagacttggcaaatgccaccggggaaggaaacagctggtggtcatcagctcacctagaatgggctcttctctccacagaatcatctaatccaggatcccccactgcatttggtggctgtgtcttcttcgttccctccaatccaggacccttcctccatctgttcttgtctttcatgaccataacacctctggcaagcactggagattttgaaaatgttcagcctttccagatggcattaggtgctaagtgtcagaaaagactgctaaaagtgtggtgtagagaaaaggctgggtgtgtgattgacaacacatctttttctaaaaccacagaaatatcaagagatcacacaagaggccccatcaagagatgaaggg

SEQ ID NO: 471961 - DNA, 548 bp, Homo sapiens
ctgtgcccaatgcaactcgtcccaaatcttccttctttccctcccgcctgtcccctcagtcccaaccccaagcaagtgtttaggctctttttcatcaaatataaaaacccagcccagttcatggcttgtttggcagcaaccctgagacgctttacagccctggaccctaaaaggtcaaaaggccacaaaccccagccacatctccagcacacaagaacttccaaacgcctgaactgcagcagccaggtgttcctccagaacctcctcccacaggagcttgctacaagtgacggaaatctggccaccaggccaaggaatgcccgcagcccgggattcctcctaagccgcgtctcatctctgcgggactccactgaaaatcggactgttcaactcacctggcagccactcccagagcccctggaactctggcccaaggctctctgactgactccttcccagatcttctcagcttagcagctgaagactgacactgcccgatcgcctcggaagccccctaaaccatcacggacgctgagcttcgggtaact

SEQ ID NO: 471962 - DNA, 566 bp, Homo sapiens
ttcctggaatctaggtttataaactaaacataggtaggaaagatgaggatatcatgttcgaacatttccctggctcaaaatgttaccggaaaggggtctcaatcaggacctcaagagagggttcttggatcccacacaagaaagaatttgagtgaagaccaccagaggtcgcgaagtgaagacgaccagagcagtgaagacgaccagaggtcacgttcatcatcttgcaataggcgcactgtcccctctggaagactaggtgggaccaaggagatctgcagcaggtgcggaaggactagagatcaccttacaaagatcaagagtttatgcagatcaaagctggtaggacccagaggacagcaccaggacgtgaaccctgctgtacacagatgccgtcctaggagacaggcaatacacaacagaactgatagagaatctgaactttaagtttaaagcttggatggaagaaaaactcaatttagagaaactggttgttttaccaaggctttgactagaagggtatgcttccctttaaggagtcaagctcaacttgcagagccaataaa

SEQ ID NO: 471963 - DNA, 888 bp, Homo sapiens
ccctcctctcagcagctgctggccaggttcggtcttcattccctctcacatggactctgcctctagtgtcccctcccagcaagggctgaagaagaggagactggggtgggagaaggtggaatgggggctgcctttgtcgctagcctccgcagtaacctttcttctgccacttcaaggtcagagatgaacagcagtgttggggacctgggtgttggcggctgcagcctctgggatgaccctgctcgcttcatcgtggtgcccgcggcctatgccttggcactgggcctggggctgccagccaacgtggcggccctggcaatgttcatccgcagcggcgggcgcctgggccaggccctgcttctctacctgttcaacctggctctggttgatgagttcttcacgctcacgctgcagctgtggctcacctactacctgggcctggcccggaggccgcctgccacgcggccggggccacctactacgtgtccacctatgcggcgcgtgtgccgctgcggcttcgtacgcggtcccgggcccagggcggctgcccgcctggcccggtgcctacggcgccccgcgcgcgctgcctgcgccttcgcctggctggcgggcctggcccctccctgcctggagcaccgctgggcaagctcggggctggcctccgccacggtggccttcgcggccgccttcctgctggtgctcgcggccaacgtgagcctggcgcgggcgctcaaggcgccctctggcccgggcccgggccctgcaaccgccggcgcgcaccggcgcgcggccaagaccatggtcctggggttcctgctggtcttcgccctcagtctggcgcccaaccacctgctgctggcgccctaggtggctgggggggaagacaac

SEQ ID NO: 471964 - DNA, 1016 bp, Homo sapiens
ggccacagaaatggtaaattctttggcaccagttccccttcacccctagcaccatctgcctcccccttcccctgactcccaccccggacacataccccactcactatccagcctagggaggcaccagcactgagctcttagtccaggctgccatggcattaactgtgaagccacttacaagtccactggcctttggaatctggacacttcctgctccaatattagatgagctgtcctgggctgtgatagcactgctgcactccagcctggacaacagagaaagaccctgcctcaaaaaaaaaaaagaagaagaagaagaaggagaaggaggaggagaaggaggaggagaaggaggaggagaaggaggaggagaaggaggaggaggaggaggagaaggaggagaagaaggagaagaaggagaaggaggagaaggagaagagggagaagagggagaagaagaggaagaagaagaagaggaagaagaagaggaagaagaagaggaagaagaagaagaagaagaagaggaagaagaagaagaagaagaagaagaagaagaagaagaagaagaagaagaagaagaagaagaagaagaagaaatgattgttttaaaaataattgtagcaaaacagttatttgaatattcatctatcagtggcatttgatacggttgatcattcttccctgaaatactttcttcactggtctccacactcctgattttaccctttacttctagctattcttgggtcctccctgtctccctgacctctaaagactggagactacgaggactcagtccgtggacctctgtctagttttttcttatttacactcactccctagataatctcagccaatctcagggctttacataccttttcatgctgatgactctcacattcatatttccaacctggttccccttcatcaaatttcaaaactgctgccagtatagtcctgttaatatgtaaatcagaccacagctctcctctgttcaaaagtctcttgcgtcgtag

SEQ ID NO: 471965 - DNA, 850 bp, Homo sapiens
cgtgcagcctgttttgtaggtggccggcgctcggcaagttctcccaggagaaggccatgttcagtacgagcgccaagatcgtgaagcctaatggcgagaagccggacgagttcgagtcccgcatctcccaggctcttctggagctggagatgaacttggacctcaaggctcagctcagggagctgaatattatggcagccaaggaaattgaggttggtggtggtcagaaagctatcataatctttgttcccgttcctcaactgaaatctttccagaaaatccaagtccggctaccaacttggaaaagctgtacaaaatataagcaaaagcatcccaggagccatactctgacagctgtgcacgatgccatccttgaggacttggtcttcacaagcaaaattgtgggcaagagaatccgcgtgaaactagatggcagccggctcatgaaggttcatttggacaaagcacagcagaacaatgtggaacacaaggttgaaactttttctggtgtctataagaagctcatgggcaaggatgttaattttgaattcccagagtttcaattgtaagaatcacagccaacgcttctgagcacatatgaggcagacactttttttttgtaagagctttgcaagaaagaaatcatctcaccttcatagtgccccagtgaggcaccatcattattcccattttacagtcaatgaaactagcaaagagagaagaaacagatttacaaaggctaaataacttccaaaggttgtacaatttgctaaattgagaaaaaaagatgtaatataaagttactatcataaatgtttatttattgaccaatatttttgaccagctgttt

SEQ ID NO: 471966 - DNA, 646 bp, Homo sapiens
attataatctgcatgcctctaatgcctggcctatatggctacccatgtaaccgcccaacgggctcactttgcccactgcctggacatagccgatttatcaagacagatgaattgcatagagacagagtaattcacacagagctggctgtatgggagacgggagttttattattactcatatcagtctccctgagcattcggggattggcggtttcaagaataacttggtgggtagggggcaaccagtggccaaatgtgaggaccatgacccatgacacagccccaggaggtcctgagaacatgtacccaaggtggttggtttacagcttgattgtaccatttaagagaaccgaagttacaggcaaacatcaatcagtacatataaggtgtacattggctcgaaatgggaagggggaagtagaggaaacataccagatctggactgtctatttccaggtttaagtgatctcaagatgaaacctggaagcaaattacagaaaccttttcttcccttagttttaacacatagcgttgaaatttactttgaaattcccctctcttcccttttctaccatacactcttttaccccatgcacatttatctaactgtatgcttgttaaactcataccatgcacatttatctaa

SEQ ID NO: 471967 - DNA, 692 bp, Homo sapiens
accatatgagatccttgcttctaggcccggcatgttcactagatgaggcaacagctgcaacactgccagaaaccacgggaagggcgaaatatttgctggttgctgctatttgaagccttgccagaatcaacaatgatgcctgtttgtgaagatgcccacaaaccctatagagattctgccagccagcttaggccgcaggtctccatcctgcctttgcgaatgttctctcccccatggctggaaccagggctttccttcaggactgaggactccctggtgcagctgcagtccaggtgtgggagcagcaggctgactcggtgcattcaggggccacattcaccccagaacatcattatccttccccagtgccattgcaagtcatttcctacaatactgtcacatctttcctctcctgatgttgaatccctgctttatgatcaagttgagatgaggaaaaaaggaccccagtattttcagccttccctgatttggggagagcctccatttcctgaggactggctagatagaggaaggagcaggggaattgactgggaagaggcacaagaagactttctggtgtcacggaaatattctatatattgaaaggagtgtgaattacatgggtatataatttgtcaaaaatgattgaaccatagacttaagatctgtgtctttcactgtttgtaaattat

SEQ ID NO: 471968 - DNA, 2063 bp, Homo sapiens
gctgggggagttagaaatcccagaggcacagaaggatttgaaggaaatggttaaaagtaaggccgaatgtgataatgtgggttctgtggagaatggcaaaaccaattctgttgttacatgttcaggtgctggcaatgggagaaatgttagctccctaaatgaggaagtcacagaattggacatggagaccaatatattttgccctcctcctttgtattacactaacttgacccaagaaaaaccgccccctgcacaggctaaaatcaccattgagcctcaaatgaatgcacctgaggaaatggatgatgcttctcctgaaaaaaagcgtgtaaatcccccagcacacaggagttgtctaaagcatccaagttctgcagcacacgaacatcctccaatgcttgtaaatcctccacatattcagaatataggagcaactaatcaaacatgtcaaactgaacaaaatcgaattaatacaataaggcagttgcctttgttaaatgctttgttagttgagttgtccttgttatatgaccaacctgtgacaagtcctgctcatatacatcctcacctagcctggttatataggactgaggataagaagtcacccgaatcttctgccaaatccacatgccggtctgaagccaagaaggataagcgttctgtggggggatgtgaaaagtcagtgagtcttcagtataaaaagaaccaaattgaaaactataaggaagataaatattctgaaaagagcagtggtgccctccataaaagagttccaaaagggaggctactttatggcttaacaaatacactaagactacgtttaaagctgacaaatcctgatatgttggtggtacatgaaaaaagagaactatatagaaaaagacaatcacaaatgttgggtacaaaattcagaattccgtcatccaaagttaaactattaagctctgcagaacaaagtcagaagccacaactgcctgaagataagtatttagattcagatgcatctttcactgaaaatagtgatacctcaagacaaatcagtggagtttttgatgagcccagcacaagtaaagaaactaaactgaaatatgcaactgaaaaaaagacagttgattgtagtaaaaatagaatcaataatgtttcattggaagaagttgtgagtcctgcaaattccattattccagaaaggcttacccctacaaatattctgggaggaaatgtggaaatgaaaatccaaagtccatgtgttttccaacaggatgctgttgttgacagaattgtagataaggaaatagatattagacaggtcaaaaccacagataatgacattcttatggctgatataagtgacaagagaacaggtaaaaatagttgctatgaaaacatctcagaactgaagtattcagatgatttgtctagcccttgctattctgaagatttctgtaccagtgaggacaccagcagaagtttcaaagctcatgatagcagttcaaggacagaaaatccaaaacatagtcaatatacaagcaagtctagtgacacaggagtgtccaaaaagaaaaatagtagtgacaggagttctatccttagcccacctttttcagccgggtcacctgtacactcatacagaaaatttcatatttcaaagactcaggataaaagtttggaggaagcatctagtatctctgctagtgatttatcttcaacacattggactgaacaaaaagaaaaccagatagatcaaaatagtatgcacaattctgaaattacaaagagagctcaagacatctctgttaaaacaagaagtagttggaaatctttagaaaaaagccagtcaccacaaacatcccaggtgggaattgaacaatgagatcacatggacacaggaaggggaatatcacactctggggactgtggtggggtggggggaggggggagggatagcattgggagatatacctaatgctagatgacgagttagtgggtgcagcgcaccagcatggcacatgtatacatatgtaactaacctgcacaatgtgcacaggtaccctaaaacttaaagt

SEQ ID NO: 471969 - DNA, 1197 bp, Homo sapiens
agcagcaacaacagcagccttaagagagagacagcttcccataaagtactcagaagaagcttcagaaagcccccagaggaagcttatcatatgtgcttggcattgcatttggtctcttacagactgtgtttaatcttcatagcaactccaggaaattattggcatactcataaggaaaccaatgaaactaacttggagagcttaaataatgtattcaaagttacacagcaagaaagtggacttgaagtcagtggaaagagatgcttgaattatgataagggggattgtgaagatgaaggttcttgttatgtagatgaagactccagatccagcaatggcctagttgcattaatggagattgcctacagacacaaatttcccccagcaaagacagctttcggggccatttcaaaggatggcaaagaaatatattttggggatggctacaagcgaaaaaaacggaagataagaactgtttccaagcatgtggggaaattggaagcctgctgtaccactggtggaattataaaacagtgaaactgctgtggaaatgagtttggtggtgacatgcatggaattgtgtccccaaaaattcatacattaaagccctaacacctaatatgactgtaccatatttagctatgaagccttccaaagataacaggacattttccatgattttagattttagatgacaacagattgatgtataaaaccttattgcctaaaaatcactaatttaatgaattcgtactaagcagggtagggagagagataatttgggattttatgttctttaattttatcagcttaactaataatttcaatgctggatacctaattgaataaaaaccatgtagccttggtccctttatattgtggcttctctgaattccataagcatgctctaaaaatttattgtatattcatgtactggactgtcccagagacttttcacaaagcagtagctctctattaggtttttatatttaaatgataatcagtgcaaaaatcacttaacttggcactcactacaaattaaagaaaacaagcattaagtatattgaaaatgtacccagacaaaatgtaaaaatgtatcatggacatatttataaaacttgagaattgcagacactcataaagattttaacattttagcattgaattgttctccagttcctggtttcttttgtacca

SEQ ID NO: 471970 - DNA, 979 bp, Homo sapiens
gagcagaggcctgaatgaaatgagtgcatggactctgctgtcatctggaggaaggacattccaggcagaggaagagcacgtgcaaaggccctgaggacgtgagaaggccaggttgaatttcctgtgtgaaatggtgtgtgggctttctgagcaaaacaagggtcaggctgtggtcctaaaggagccgatgccaaggtcacctggaatccagtctccggcagtgcagccctccgggatgcccaggccactcctgccctccctggggatgagttttccagacgtgtgctggggagagagctgggacgggcacagaatgttctaccacacaccacagtcgcgccccatttatccaggtcctcaccgcagggccagaggtcccccacccccctcccagcccctaagtccaggccctgctccacctcctcctgctgtgggtattagctggggcaagtcactgtgcctctccatcaaaagcacatgtctgatcagctcctgccctgctcagcaaaattcctggttccccggtgcccaagacacggagatccagtccttcagcctcagcttccttcagggcaatggttctcaaccctaggtgattttgtctcttaggggaacatttgtcaatgtctggagacattttcggttgtcacaactcggggcgtgcaatggcacctggtgggtagtagccaggaatgctgctaacatccaacagtgcccagggcaacctcctacaacaaaaaattgtctggtcctaaacgtcagtagtggtgaagctcagaaactgttctacgctgaccagttgtcccagttagcctgggactgaagggtttcctgggacatgggaccttcagtactaaaactgggacagtccagggcaacaaggatcgttggtcacgctagcttcttcctctgtaaaatgagaccatcgttaccttccccacagcactgtcacaggctgcgtgagagtctgtgtgctgac

SEQ ID NO: 471971 - DNA, 687 bp, Homo sapiens
tccatagagatgaaaagtagggcaagtctcagccggatccttcctgctgccactcctgccccgccccgccccgcccctccccgccccgccccaccccaccccaccccacccagggatccaggccttggccccagcaggcatcacagcagggcagcctgaaccaagtcacagaggggaaccaaatggctgtgggtacgggatggaggaggtggtaaatcggacgtgtttagcagcattcctcccatgggcgtcgaaagtgggccagccccgcacaatggcaaacccctcgcaggagcccagcgccagtggccctcagccacctctaggaaatgccgcatccaaagagcccagtcacctttccaaggtcccccggagcagcacgctgttccgaagcacagagaactgggaagcaccctcaccctgtggctttgtggactggcatcctgtttgcaagccaggaaaggcctctgcctcacaggaaacaggggttctcaggcccccggcgaggccgcgcatcagaactggcttctggagggcagctcaacaggagctgccaccactgctccgggtgctgctgtggcctgtccagcctactttggggacttccatgggcgtggccatgtcccaagaagagtaaataaagtcgttttcagttcttgatttaaaaagtaagaaagggccaggggc

SEQ ID NO: 471972 - DNA, 493 bp, Homo sapiens
gggagatcagcaaagacagctggagtgagagacggtattggcctcggtctctgatcagaaacgcagccaatcaggccaacatgaggagggtcgcagtgtggatgctcaccaggcaaaaactcttaaatggacaagatggctgctgcttggaagaacagctgcttcctggagaagaagaacagcttcttcttctccctgctcctcctgcattgccctgggatactggggacctggagcaaagccatgaggcagggcatttttctttgatttctttgccttaccagcccctggggtcactctcttccagcttgtcatgccagcagtctttattagatacaatattcctgtggcttcagtcccatggcagatgccatattagaggctacaagggattcttgtctcaggtcctggccctcagcttggccagttctgtttcgtcttccattgaggggaaggaaattgggcatgtccattctcagacacctttgtagca

SEQ ID NO: 471973 - DNA, 729 bp, Homo sapiens
gaaactgcaacaataggattttcctttcaaagagtctagcgaaatgaaaagggggcagatggaatggaaagaaaccctaggccaaagactatggctggaagcatcctgatagccaagtcgaaaagagaaaggcgagatgcacatatctcacacagcttattgggagcaacaattgtcctctggattctcagctccaaaaagacctctactcaacatctgctcatgagcacactgagaaacagaatgggcacaaagtcacaaaccacagaccaaggagatgatggagctggcccactagaagcaggtcatcaaccccagttagccaatgatctcctcacaagcagatccgctcttccccaattgcacacaaagacctctgaaatgagtggatgtcatgaaaattgtgttaacacattattgaccatgaagatccctttcctgccagaaggagttgcccaaactggaagagaaaatgcccttgcttctctggcaggttctcttttctgtggtagttggtgaatagaaatccattatcccctgcccatctccttcgcagatgaaaggcaagtgaaaacactttaagcatattaagtagcaagtttgatttataaattattaggaagattacctcctcttgggggttttctgaagtctttaatcgtgtggaaaggctttccagttgccacgggccactaagttaattaagaggcctcaatatgtcttctgggg

SEQ ID NO: 471974 - DNA, 896 bp, Homo sapiens
tcctacctccatgcttagatgtcacaaccccctaattcaaccacatccacacatccatgtcacgggaaaatcactaataaccttaccaaccagagggaacctgctatggtttggatgtttgtcccttccaaacctcatgctgaaatttgatcctgaatgtggcaatgttgggaggtgggacctggtaggaggtgtttgggtcttggggacagatcccttatacatttcctccaggatgcagatgtccggtcctgaactttccatccaccagaaccatgagccaaatacgtctcttttctttataaactacctgctctcagagtggaaagatagcatggtggttagagccttgggcttcagaccccaatggacgtggtgggtgaggtgtatggtagctgctcagttatggagaaggcatgggcatgggtggaatagtggaaagtattgtgacatgggtgaaaaactggtgtagatgccaaagaagagaataaatgagtgcttctcggaataaaaagcattaaccgtggggtcttctagaaaccactacttcaaatttttaatttaacattttaatatttttatagaagagagaggtcataatgaaatttctttagtgtgcaatcgacactaaagtcttccacatacaggaatgtaagccaatggaaataaatttcagaactatcagagaagcttaaatgagagaattgaagaataatttctttttttaaaaaaaaataaaacttcattttttgcagcccatgtgagtgtgacctacctgcataagatttgtctgactgttccaatgattgctcaccctctaaaagccttttatgcttattgtttatgctgtctacttggcatgggggcatatgttagcttcaaaatgttatttatct

SEQ ID NO: 471975 - DNA, 665 bp, Homo sapiens
tctaacgttggcggcggtggcggtggcggcggcggcggcaccgacagtaaagcggggagcaagagaatttgaaaagagacatccgctccctctcacacgctgagggggaggcattcgctgactctctctgaccatgctcgctaaaatacatgcaatgccagtattaaccaagcaactaaagtataccaaatcccccggggggcagtctgatgacatcaggcaacagcaaagtgatgctggagtttgtgtgctttccctcctgactcacacagttgtgtctggcgccaaagtgtttgacagctgggctgcagccatggagaagacaggagcattcttgactcttacttcccctcttcaccaaaaatggagctggctttgtctcccagaatggagtgatgtgtgctgcagtgtgggcacaagaaaggaggctgacctagttcatctgcgattgattcgtacagataatgagaactatcagtattcaaaggaaggagaatttgagttgagccatgagggatgcggtgggatttgtttggatagaaagaatgagggaaagggttctagctgacagaaataataactgcagcactgttgggaagtttggaaacttcgaggcttgcttgattccttggggtttaccctgggctacctttcttttctgcatt

SEQ ID NO: 471976 - DNA, 591 bp, Homo sapiens
gaggcttagagagaaacttaagaaagttgcttaagttcacacagctattaagtggtaaaaccagagtttgaactcaggggatctgactcttaacccttatgttatgttgtgtccatgcatcctaccttgacccactcgacaccatccatttctgtcttcctcttccaaaaatgctcaatctgtttctgcagttgcctcagactgtgggctgcctctcgaagtttgatgtaagcacatgctgtcagaatctgcccatctcccctcgtcagcaccaattcggtgtgtgccagaatgacctccaacctccagcacctgtatttcatggcttgagaacattctctgactgccaaagcccagagacaggctccctggggatgaggcaaggagtgttaattccctggcagttccagactctgatcttcaaacatgataaaattccaataattaaaacagatgatactggcacacaaattggacagcagatcaatgcaatagaatagatagctcagaaataaacctttttatatattagaacttagtatatgaaaaaaagcatcagacactaattgcatggaggatggaatattttat

SEQ ID NO: 471977 - DNA, 2558 bp, Homo sapiens
acacctttcattgaatattcccacacccgctggatttttcccttaaaatttttttttactagggccaggtgttagatgcttagctcatgtttaacacctaatgcctggtgcctcgcatgcttgatgctcaggacatcgcctttgcagtctgggtcccacccacctctgcctccgccatggctgcaagaaccgttatcattgaccacgggtctggctttttgaaggctggcacggccggctggaatgagcctcagatggtcttcccgaacatcgtgaactacctaccgtgcaaggagaaccctggccccagctatgcccgtaggcgtgtgagcctgggcatcgacatttgccatcctgacacctttagctaccccatcgagcggggccgcatcctcaactgggagggtgtgcagtacctctggtcatttgtgttggagaaccacagacgggagcaagaggtcccccctgtgatcatcacggagacacccttgagggagcctgcggaccgaaagaagatgctggagatcctgtttgagttgctgcatgtcccatcggtcctcctggccgaccagctgcagatgtccctgtatgcctctggcctcctgaccggagtggtggttgattctggctatggcctgacccgcgtgcagcctttccaccagggccgccccttgcccgccagcggcaagacgctggagttcgccggccaggatctctccgcctatctcctcaagagtctctttaaggaagattgcgatagacgctgcctgtttcagctggagacagtcgccgtgactcagatgaacaagtgctacgtgccgcagaatctgggggaggccctggactttcgtgagaggcagcagagtgccttggatgagagcaacacctatcagctcccagacggctcccgcgtggagctgacccccatgcagcgggtggctcctgagatgttctttagcccgcaggtgttcgagcagccggggcccagcatcccacgggccattgtggaatccgtggagtcctgcgagatctccctgcgccccctgctggtctcccacgtgatggcctgcgggggcaacaccctctatcccgggttcacaaagcgcctgttcagggagctgatgggggatcacgtctcctccaccaaggccacagtctgggagggttccaatagaaactttagtgtctggctaggagcgtccgtggtggctcacctttctacctaccagtctgagtggatgtcccgagaggagtatgtgcctgggaagtggttgcacgtgctctccatgtttgaggaaaatgaggccactgcggctcagaggagggaggtgacgtccgagtcatcctcaggtctgtcccgccagatccgctgcctcctgcacacttctgcccacttctcaccacctctcccgcagcaccgcatctccctgcagcagcatcgactccagcctcggtcagagcgctgcttttgcatctgtgtcctgtgtgagtccagagctgctctgttgctcctgcccatgctgggtttgatactgcggttccatggagcaacttgccaggacggacagccaggctcagatgggcaggttcccttcccattcacgggagctggcaaagacccaggcctagcacctgctgaaaggcccctcaagtggctggcaccaaatctttgagcggagctcaagggagccccattggcagcccagggcctggagaaacttcaaaacacaacaagaggcctagaaaactcttcagagcagagattccaaataagagagtggggaagggagggagagtagattttgctccctaggggacagttggcagtgcctggaaccatttttggttgttacaattaggggtgggggtgctactgaaatctgaatgtagcaaatctctctgcttttcagtgcagaagcccagaatttaacccccattcccgaggggcagcagcctgctcaagttctgtttgcaaagcgctttgggattcattggctggtttcagacatctcaggcccacacatgtgttcatccatccaatcatgttaccatctatctacccagacacccttccatcctaacccacccacccactcatccatctacccacccaccctcccacctatatccacctgtcattgtctgccttcccacattttcagtctactactatccatatgtctactcattcatccttccagatgatcatgttaacacccatccatgcatccatttatgtatggcctagtggagagtttgaaaaccatactctttgattatgtgaccataacgttgttggcacatgtttaataacagtctctctgggacattaataaaaacaggacctggtttgtagcatttgccagtttctgtgatgaatgctagggaggggtttagggggaatcagaggctgaatcagttcataccacagatgccttccagtgttgagctctgaggagtctaatggttatgttcaggccacctgattcttatattaaaaaaattgtagtaatgcaagagaaaacaaaaaagagcaagagtcactattcttgtatcag

SEQ ID NO: 471978 - DNA, 600 bp, Homo sapiens
tgggtgtcctggggggtgtcagttatggtccctgcctcctgtcctcctttgtcatagaccctgcatctcccacggcatataggctgcctcttcctgcttccctgagttcagatgaaacaccatgccctgtcctgttctcattcccagccttggaggtggcttgtccctgctgagcctctgccatttgtttgccaaagggctccttacatgggcagaagccgctgtttctccttctgagggaggcatctcctgtcccatgcgctttctcctgcagattctctctgcccagctctgggaaggccgtctgcccctgtcacacttcaagctgctgcgtggatccctgcgcctggtgtgggagaacttggattctgcagctgggaaacttggtatgaaatcctggtttctagatctactcaggtctatccctgtccaggaggagccagggagaggcggtggcattttccaggcaccagcctccaggtctctcctgagaacacacccacccagtgaagctgttgctggctggatcccgctacccctggaagaagacattgcaacagcctgtgcgtgctgagtcctgaagtgagggatttggcttgc

SEQ ID NO: 471979 - DNA, 554 bp, Homo sapiens
acacctgctgtttgcatggccccgtgtcagattatgtacccatgtggtcaacctcctgtgaagcaggcaagtggaaactttcatgcacacagcacaggacccacaggatggcaccgtctgcatgcccactcattcaaccagcaagtcacaggcccactctctctgcaccagtgctgctttgaacactggggacgtggctgccctcttggagctcatgacctagttaggggagacggacaatcagcaagagtgcaaataatcacaacaatttcaagtaccaacatggactgtgtgctctgcagggtgtcggcagtggccgtcttagccaccactgcatctccctcactgagaacagtgcctggcatacactagtgctcagtaaatattgatgggtggtcctgggtttgtctaatcccgccccttcggaagaactgctctatggctccccagcgatatgatcagttttgtggactgaatgtgtgtgtctcccctcctgaattcttatgttgaagtcctaacccacatatgatggcatttgaaggtggggccttttc

SEQ ID NO: 471980 - DNA, 942 bp, Homo sapiens
gacaggccatcatgtgggccaagtgcctcggacagttcaaagaggggaagaagagaaaagacccactgggtttggcaacagtggagtttccttgtgatgtgcccaagggtgccaacagcttcagggtctctggaagctccggggtggaggtcttcatggtctacaaccgcacacgtgtgaaagagcccataggcaaggcccgttggccgctagacactgatgcagacatggtcgtatctgtgggcacagccagtaaggaattaaaggacttcaaggtgagggtctcctactttggggagcaggaagaccaagctctgggccgcagcgtgctttacctcactggcgtcgatatttcccttgaggttgacacaggccgcacaggcaaggtgaagaggagccaaggggacaagaaaacctggcgctggggccctgagggctatggggctatcttgctggtgaactgtgaccgggacaatcacaggtccgcagagcctgacctcacccacagctggctgatgtcgctggctgacctgcaggacatgtccccaatgctgctgagctgcaatggccccgacaagctcttcgacagccacaagcttgtcttgaacgtgcccttttctgattccaaaagatcctcaaggaggaggttcaacaacaacgagttccattttatggagaggaaaaccgaggctcagatgcaggaattcactgtggcacaaccatctggggtggagcaggcattccaacccaggtgtcttgggtgcaccaaagctcctccttttaccattgccccacacccgttccctcctctggtcaatcagcgtggactgaactgcatgccaagcactgtccaggcagggagggcgtgagaaccagtgaggctgaggcctgggccctgcctctggccccagaacctgtctttctcatcagagtttttattaa

SEQ ID NO: 471981 - DNA, 579 bp, Homo sapiens
acacataactcatgtctttcccacatcaacacaatgggacaggtactactgttacagctgccaacttacacatgaggcagctgagtcacagagaggcacgttggaaaggatgctggcaggagatagcagagaaggtggagttggctgtggagtctggaaggaaggaactagggtctagtcaggtcctccttggggccccagctcctgggcactgggctcaggacattggcttcaatcccctgggtccacctggttctaaattctgtgagcctaaccctgtgactgcccaggctctgagactcttctatgttgctggactctgtggaccccacaagggcaaagccaaggatgatttgtctctgctttcctggtgcccagcatgggacctgatgtacagtagctacccaggaaggccgactggattcaatcatgactcagccacctccccgctgggcagtcctgagaaagccactccaccatcctgagtcgctgtgtccttgtccagaacgcgttgattgtgcccctggttcatgccaggcactaagctggatgcagagatgacagcagcgatgcagacag

SEQ ID NO: 471982 - DNA, 671 bp, Homo sapiens
gttgggcgtcttttgccctatgctatgtttgtgagatttatccacttgttgcatggtgacatctctctggattgcgacctgaactgtgagggaaggcaggacaggaactttgtagacaagtgggtctgggggcccagtgggtatggcggcatcttgctggtgaactgtgaccgtgatgatccgagctgtgatgtccaggacaattgtgaccagcacgtgcactgcctgcaagacctggaagacatgtctgtcatggtcctgcggacgcagggccctgcagccctctttgatgaccacaaacttgtcctccatacctccagctatgatgccaaacgggcacaggtcttccacatctgcggtcctgcttacactccgggagatgccctggtgggtggcgggtcgcagtaagaacagtcagaagtgggggctttggaactgatgaactggtgcccccagcacaacacctggcctgaggtcattttatttgatgaatgaccttttcaaatacattttaagcatgtgtagaaattcttatcaaaaatttcaaacatacacaaaaagcagtgctgtgaatccccatgtgcctgtcactcagattaaacaattatcactgttttgtctgtctcgctgaagttttgtaaaaccaaccccaaacaccatagatttcaccc

SEQ ID NO: 471983 - DNA, 604 bp, Homo sapiens
tcagctcagtgtggtccggcaggggtgagtaacggtaagaagctgctttgaggaggagttgagatacaaaagatgcgcagcagtcaactgacaaagcgggggtggggagagtgtttcagtggaggcagcagccatgtgttgtatccagggctaagcaaaagtgagctgggtttcactgacctggaggaggcggctgcctgcctgctacgcctgttgcggatgattgtgatgggcaagaacctggggatccccaagccttttgggccccaaatcaaggggacctgctgcctggaagaaaagatttgctgcttgctggagcccctgggcttcaagtgcaccttcatcaatgactttgactgttacctgacagagacaaagatgtgctccaacaggccccagtccccatccctccccactgtgttcccctgcaaaggtcagtggtcatttggcgccatgcttgcactactgctgtagggaaggagaggaaatgctccctgtactggccaaaggcaagaaaacaagtctggagagtgggctccattgctattgtctggtgtgaacaccagctaagctggatcctgagaccctccagcttgaccatccc

SEQ ID NO: 471984 - DNA, 1666 bp, Homo sapiens
ccagcacttcacaggaactgggattcttgaggaatagagaaatggccgagaagtgccagtgaagaaccaagaagggtacccaccttcctgtaagtccagcagtacatggcagagcctgctacgacagatggacagacagtcgaggacccagcagaggctggagggagccctttaatatgcccccaggggcctccaaggaggggctgctgcagaactgcagagtccatcgggagggctgctggggctctaacccagagcaagaggccgaggacccagggcagtgcctaaccaggggcagccacggccgcagctgcagccatctgctggcacaagacaactccagtacctttgagttggtgctggggcccgaccagcacgcctataccttggccctcctcgggaaccacttgaaggagactttctacgttgaagctatagcattcccatctgccgaattctcaggcctcatctcctactctgtgtccctggtggaggagtctcaagacccgagcttgaggtttgctgggggagagctgcagaaggcaagtggggcccagctgggggccggactgaacggccggaaccctggggtgcctctggaggtttacctgtgcagggagctgcagctgcagggttttgtggacacagtgacgaagctgagtgagaagagcaacagccaggtggcatctgtctatgaggaccccaaccgcctgggcaggtggctccaggatgagatggccttctgctacacccaggctccccacaagacaacgtccttgatcctcgacacacctcaggccgccgatctcgatgagttccccatgaagtactcactggtgtggaacttgagccctggtattggctacatgatccaggacactgaggaccataaagtggccagcatggattccattgggaacctgatggtgtccccacctgtcaaggtccaagggaaagagtacccgctgggcagagtcctcattggcagcagcttttaccccagcgcagagggccgggccatgagtaagaccctccgagacttcctctatgcccagcaggtccaagcgccggtggagctctactcagattggctaatgactggccacgtggatgagttcatgtgcttcatccccacagatgacaagaatgagggcaaaaaggtctgctttgggggcttcctgctgctcctggccagccccagtgcctgctataaactgttccgagagaaacagaaggaaggctatggcgacgctcttctgtttgatgagcttagagcagatcagctcctgtctaatggaagggaagccaaaaccatcgaccaacttctggctgatgaaagcctgaagaagcagaatgaatacgtggagaagtgcattcacctgaaccgtgacatcctgaagacggagctgggcctgggggaacaggacatcatcttttttccccagctgttctgcttgcagaagctgactaacatcccctctgaccagcagcccaagagtcctttgcgaggccatacttccctgacctgggacgccccacccagagagcaagtgtacagggcctgaaggcttggaggttccccaggcagttactatgggccaggccctgggccagggtccagggcagcagtgtctgatacatagaggtacatcagcccttaaaataa

SEQ ID NO: 471985 - DNA, 1235 bp, Homo sapiens
cgggtaacactgtcactacctccacctgcaggagacacacaccctagaactgagaccccagagcctgggcatgctgccacacattgccatcctgaccgctaccatcaactcctcccaactgccctctgcagctgaaggccacagatgcctaagcaaccggcctcagactcccctggcctgcagctctgcaggcacgaggtgtgccccccagaagtgccagtgcttcaccatccatggctctgggagggtcttgatcgatgtggccaacacggtgatttctgagaaggaggacgccaccatctggtggcccctgtctgatcccacgtacgccacagtgaagatgacatcgcccagcccttccgtggatgcggataaggtctcggtcacatactatgggcccaacgaggatgcccccgtgggcacagctgtgctgtacctcactggcattgaggtctctctagaggtagacatctaccgcaatgggcaagttgagatgtcaagtgacaaacaggctaagaaaaaatggatctggggtcccagcggttggggtgccatcctgcttgtgaattgcaaccctgctgatgtgggccagcaacttgaggacaagaaaaccaagaaagtgatcttttcagaggcaaatggattccagactaactttctccaccccacccccgacaccctcttccccagtccccatgcctgggctgatcaaaccttttgtcctgagttgtagatgtataattggagtgctggcctccagacattccttaacctttgctttgtcttttgcccagaaataacgaatctgtcccagatgactctgaatgtccaaggccccagctgtatcttaaagaaatatcggctagtcctccatacctccaaggaagagtcgaagaaggcgagagtctactggccccaaagtgagtgttcttgtgccagctccagctttgcctgctctcgacgtgccaggcaagttgtgcccacacctcctcccagcaaggtccccagcagaagcctgctggagacctagagctgcagatgagaggctgttgtggctgtacttgtgtttccaggattctctggctgccaccttccccataggctaaatctgtacacatgggtgagttattgcacctctaagccactttctccacttgtaaaatgggggtagctgtgccttccctgcaggctagaagagaagagagacatatccactgaaacagtagctattgcct

SEQ ID NO: 471986 - DNA, 4487 bp, Homo sapiens
atgcacacaggcacacgtagtgtaatgcacgccccactttcacacacagtgagactctgtctcaaaaagaagaagaagaagaaaaaggagaaggaagagggacaagaagaagaagaggaggaagaggaagaggaggaagaggaagaggaagaagaagaagaacaagaagaagaggaagaagaagaagaagaagaagaagaagaagaagaagaagaagaagaagaagaagaagaagaagaagaagaagaagaagacggaggaggaggaggagaaagaagaagaagaagaagaaaaaattttcccctgtgctgtctctctctcctgctgacttgtgaagaagatgctgacttcttcttccaccatgattgcaagtttcttgagacctccacagccatgcagaactcagcaggcatgaagaagccttctggggtgttggaaatgttctgtatcttgatctgagtggtgattacactgctgtaattatatgtaaacatacattgggctatacacttaaaatttatgtactttgtgtataggaacttcaataagcaattaaacatttttttccgtacagtgaaaacacgcccaaaccaggatagaaaccagaaaagccattgtcaggagatgggtgtcccctctcttggggtcccccaagggctagtaggtctgagatggtaccagtctcctccagaaacagaggtggcttcttccgtttcctgtggtggcttctctccgtttcctgagtgtaacacaaggttacgctcttgtgtgcctgtcttgttaagttcctttatttaagacttctctttttcccattgaaccttgccaaaagttcatccatttaattaatcttttccaagaaccaacttttggatttttgttttagtcctatttttttcaccaattcccacttttacatttatctttccttttggggggttaatttcattatttttctaaattctccagtttggcgcttagttcattcactttctgccattcttcgtccctactgtaaacattcaagactatacatttctttctaagcacaattttagttgagtccatgagttttcatatgtgacctttctactgctcagttcggaattgccattgcaatgtctcctttgatcaatgagttatttaaatgactggtttttaaaatttccagatgaatagggttttcttattatccttgctgagttctaagttaattgctttagagttagaggatgtggtctggatgatacactttatttcaattttgttgagacttgcttttgccaatacccacctaagtcagttttcatgtatgttttatgtgcttgagaaaaatgtgtcatggcccatgcagggtcacctatacgttgattggatggagctttatttgtgttcatgagatctcctattgactactaatttttttgtcagctttatcaattattgagacatgttaaaatctcccactatattagtaaatttgtccagttcttgcagttcaataaattttagcttcatatcttttgatgtcagggtattactagtttgataaaataaattgagaaatgacctctcctcttctgttttctggaaagattgtgcagaattggtgtacattctttaaacatttggtaggactctctagtgaaacaatctgggccaggagatttcttttcaggagtttttaaattactaattcatctgagtagatacccagtatcggaattgctggatcaaatggtaattctactttcagtcctttaaggaatctccacactgttttccacagtggttgtactagtttacattcccaccagcagtgtgaaagtgttcccttttcaccacatctctactaacatcttttttttttttatggccattctttcaggagtaaggtgatatcacattgtggttttgatttgcatttccctgatcattagtgatgttgagatttttttcacatgtttgttggccatttgtaaatcttcttttaagaattatctattcatgtcctcagcccatttttgatgagattgtttgtttttttcttgctaatttgtttgagttcattgtagattctggatattagtcctttgttggatgtatagattgtgaagattttctcccattctgtggattgtctgtttactctgctgattgtttcttttgctatgcagaaactttttagtttaattaaatctcacctgtatatcattgtttttgttgcatttgcttttgggttgttggtcatgaagtctttgcctaagtcagtgtctagaaaggtttttctgatgttatcttctggaatttttgtggtttcaggtcttagatttaattccctgagaaaaagatacttgtacactcatgtttatagcagcacaatttacagttgcaaaaatttggacccagcctgaatgcccatcaatccatgagtggataaagaaattgtgatatatgtaaatatatatacaccatggaatgctattcagccataaagatgaatgaaataatggcattcacagcaacctggatggaattggagaccattattctaagcgaagtaactcaggaatggaaaaccaaacatatatgttctcactcataagtgagagccaagctataaagatgcaaaggcataagaatgatacaatggactttggggacttaagggagagggtgggagtggggtgagggataaaagactacaaattgggtacagtgcatactgctaaggtgatgggtgcaccgaaatctcactaaccaccactaaagaacttatttatgtaaccaaactccacctgttcccccaaaaacctacggaaataaaaaaaataataaaatagaggaaaacatgaaaaaagtaaaattactagttcaatttctttaatagctatatggctattcaaattacttatttcatattgggtgagttttggctgtactttttgagaatgtagtccgttttatctaagttgtcaaatttatgcttgttaagttgttttaagtattccattattattgttttgatgtctgcacagtctgtcttgatattcccattttattcctgagattggtaatttgtgtcttctctctttttttctttgttgatcttgctaggcatttgtcaattgtatttatcttttcaaagaaccagattttgtttcactgatttttccctattgcttttctatttttattttcttgggtttctgctcttatcttcattattttcttccttctggctgcttttggtttcttttactcttctttttctaattacttaaggtgggagcttagagtatcaatttgaagctttttcttttttctaatgtaactgtttagtgatttagatttccttctcagaacttgctgtgttccataaatttggatatgttgtatttttattttccttgagacttcttttttgacctatgtattatttagaagtgtgctgtttagtttttaagtatttggaaattttcctgtcactgatttttattttaattccattggggtcagagatcaccctctacaatgtcaattcttttaaattttttgagatttgttatatgaccaaggatgtggtcaattttggtttatgtcccacaggtttttgaaaaagaatgtgtgttctacttgggttggatgagctgatacaaaatgttgagtagatactgttggttgacagtgtttgttgagttctgtaactttgctggtttctgtctaattgttctatcaattgttgaaagagtattaaagccttcaactataattgtaaatgtgtttatttctcttctcagttttatcggtttttacttcatatattttgtagccccattgtttggtgcatacacatttaagatttctgtattttcttggtgaattgactcttatcatatgtaatggctctctctatccctggtaatttatttgctctaaagtctatgttatctgatattaatacagccactcctgctgtttttcaattaatgttgacatggtatatctttttccatccttttgtgttaaacttacttatatcattatgtttgaagtgagtttctcgtagacagcatatagttagtgtggtaatatttatccactttaccaatttccatcttctaattagtttatatagaccatttacatttaaggtaatcatttgtatgttagagcttagacctgccattttgctttgtttctctgttttctttttcctaccttcttgtgggttactggaactattttttataatattttaatcatctatagtgttttttagtgtatctctttgtatactttttttagtggtttctctaggtattacattatatatacataactgaacataatctactggtattatcatcttaacagtttgagtgaagtatggaaaacttgtctctctttacattgttttttccccatttataattgtcttaaatattttatctacatacattcaaaatcacatcagacggtgttac

SEQ ID NO: 471987 - DNA, 694 bp, Homo sapiens
ttatgaggattagaagtcaagtgcttgtatcatgcttgtaacatagtgagccctaacgaatgagagctatcatctccactgtcttcattgtccccctcatccccaccatgatcctcaccatccccaacaccatccccaccatcctcccttccatctccatcatccctaccaccatccccaacatccccaccatcatccccattacaatccccaccactatttccaccattcccaccacagtcaccatcacccccaccatctccatcatcatccccaccattcccaccatccttaccatcaacatcaccatccccaccatccccaacaccattcccaccatccctaccatcaccatcaccatccccaccaacatccccaccacccaccatgcccaccaccatccccaccatcagtttgcctacttgcctcctccagactgtgaacccctacggcatggctgtgctttggcaatctctgatctcagtgggatgctcagaatcaggcatgtagtaggtgcttagtacaattttcttgggcaaatgaaggaagcagggccctggcttgggggctggattatgattgcttctctgactggtctctctgctttctacccttgcctccctctaatctgtggtcagcaaagcagccagagggattctgccaagttatgcctctcctttgctcaaacccttcc

SEQ ID NO: 471988 - DNA, 626 bp, Homo sapiens
ccaagctcacagcctctagttttcagatgattccatggagatgtgcctgcatccccttcgaagacatgcctgcttcccatttgccttccatcaagatgaagaagacaggaagatgagagaaaatttggaacttcctagagacttgttgaattgttgtgaccaaagtgttgatggtgttatggacaatgaagaccactctgagaaggtctcaggtggaaatgaggaacttattgggaactggagtaaaggtcactcttgctatgctttagcaaataacctggctgcattgtgcccctgctttagggatctgtggaacttcgaacttgagagtgatgatttagggtatctggtggaagaaattcctaagcatcagtgttcaggatgtgacctggctgcttctaaattcctatgtgcatatgtgtgagcaaataaatgacctgaaactggaacttatattttaaagggaagcagagtgtaaaagtttggaaaatttgcaacctggccatgtggtaggaaagaaaagcctattttcaggggagcaattcaagctggctgcagaaatgtgcataactaaaaggaaaaagagacttggattttggactttcaagttaatgctaaaataagct

SEQ ID NO: 471989 - DNA, 494 bp, Homo sapiens
atggaagatggagctccaggaacgggtgcccccagacaagagggaatgtactaccccaaaatatggtgctttggatattgaatatttgaaactgaaagaatttgagaaacggcgggtgcaggaaggactctccgagctttcctctgaagcagatcacaagaccttcagtcccgatgctagctttggtgtgaaccaaaccagaacacgtcaagtgtttagcacagcaccaggcaaacaggattcgtcctggatgggcacctccctgccaggtgcacacttcccttcttcctgggctgaggctcaacagctcattcagttggttctgcatttgcccatggatgccctgatctggtgcaaccagccagggctctggagccagcatgcctcctgaggtctttagctcatgttggctgagcacctctcctgtgtcaggccctgggctaagtattttctgtgttaccgaatttcattcccacaacaacccgttgaggggc

SEQ ID NO: 471990 - DNA, 1537 bp, Homo sapiens
gggggtggtcgcgatggtggaggccggctggagcgtcgctggattttctctgagacaagcccacccgtccagcaaaatagagtccctcagggtgacagttgacttcctgaaggtgcctcttggcctaaagaagccggtgctgaaggaggtggctgtggggccccccaagaggccccagcctgcggccctggagcgctacaaggcgcggcgttcagacgccatggacaccgagtcccagtactcgggctattcctacaagtcgggccactcccgcagctcccgcaagcacagggaccgccgggaccgacaccgctctaagagtcgagatgggggccgaggggacaagtcggtgacaatccaggctcccggggagcccctgctggacaatgagtccacacgaggggatgagcgggatgacaactggggggaaacgacgacagtagtaacgggcacctcagagcacagcatctcccatgatgacctcacacgcatcgccaaggacatggaggacagtgtccctctggactgctcccgtcacctgggtgtggcagcgggggccaccctggcactgctgtctttcctcacgcctctggccttcctgctgctgcccccactgctgtggcgggaggagctggagccttgcgggacggcctgcgagggcctcttcatctctgtcgccttcaagctgctcatcctgctactgggcagctgggctctgttcttccgccggcccaaggcctcgctgccccgcgtctttgtgctgcgtgccctgcttatggtgctggttttcctgctcgtggtctcctactggctcttctatggtgtgcgcatcctggatgctcgggagcgcagctaccagggcgtggtgcagttcgccgtgtcgctggtggacgcccttcttttcgtgcactacctggccgtggtcctgctggagctgcgccagctccagcctcagttcacgctcaaggtcgtgcgctccaccgacggcgccagccgcttctacaacgttggccatctcagcatccagcgcgtggcagtgtggatcctggagaagtattaccatgacttccctgtctacaaccctgccctcctcaacctgcccaagtccgtcctggccaagaaagtgtctggcttcaaggtgtattccctcggagaggaaaacagcaccaacaactccactggccagtctcgggctgtgattgcagcggcagctcggaggcgggacaacagtcacaatgagtactactatgaggaggctgagcatgagcgaagggtgcgcaagaggagggccagctggagataatgctgattttaaagagctcatgtgatgagatcaggccctaaaggacagtcttcttttaaggccactgacttggcacattaattacatctgcaaaatgtaccaagattgttgtctaatgaggggatgggagtctggtagaagtggagggtatctttgaattctgcctgccacagtggggtagggacccaataaagggatggtcatccaatctcctgtactgccaccaccattttt

SEQ ID NO: 471991 - DNA, 1457 bp, Homo sapiens
ctggctgcaaaaatttgcataagtaacaaggaaccaaatgttaatcccaaagacaatggaaaaatgtctctaggccatgtcagagaccttcacagcggcacctcccattacagccccagaggcccgggaggaatacgtggttttgtgggctgggcccaggatccccatgctgtgtgcagcctagggacttggtgccctgtgtcccagccactccagccatggctgaaaggggccaacatagggctcatgctgtggcttcagagggtggaagccccaagccttggcagcttccatgtggtgttgagtctgctggtgtgcagaagtcaagaattgaggtttggtaacctcatttcagatgtatccaaatgcctggatgcccaggcaaaagtttgctgtacgggcggggccctcatggagaacctctgctagggcagtgcagaagggaaatgtgggatcggagcacccatcggagctccatctagtggagctgtgagaagagggccaccatcttccagaccccagaatggtagatccaccaacagcttgcagtgtgtgcctggaaaagcagcactcaatgccagcccatgaaagcagcccagagtggggctataccctgcaaagccacaggccggagctgcccaagactatgggaatctacctcttgcatcagcatgacctggatgtgagacatggagtcaaaggagatgattttggagctttaaaatttgactgccccatctggatttcggacttgcatgggccctgtaacccttttgttttggccaatttctcccatttggaatggctgtatttacccaatacctgtaccgccatgtagctaggaaataactagcttgctttttgattttacaggctcataggcagaaaggacttgccttgtctcagatgagactttggactgtggactttcgtgttaatgctgaactgagttaagactttgggggactgttgggaaggcatgattggttttgaaatacgaggacatgagatttggaggggccagggttggaatgatatggtttggctgtgtccccaccccaatctcaacttgaattgtactcccataattcctacatgctgtgggaaggatcaggtgggaggtcttggtttatttatcttcataaattttgtttgatagctataggaatgtagaggatttgtttttatatcatcatcatcatcatcatcatttcaagcccttgctctaggtcaggcatcatgctaagtgccttccctatagcaccccattgaatcatcacaaagatcatctgggggtcaactcccaaataagctcacttgtagccaaatccttaacacaggtcttgttttagtggaaatccaacccagttgacaactgtgtacagttgttgagccagtaatcaatgggtcttattgtgataaagtctagctcatctttccctttcttgtgcatttat

SEQ ID NO: 471992 - DNA, 540 bp, Homo sapiens
ccagtaccacccagttggaccatggggccagtcctaggagccagaactgaggtcaggccccagggcaccatgagggtgcctgaggcatcagaggcccccagccaagggtctgagtcatcctatgacctgcgctgctccactttcctcattccagaaggtcctgtgttggtgtctctaaccgtggagaggtactggctacgctgggcaatattatcgggacctggggcagcatttgatgtctgcagcaaggcacatcaagatttgtcccggcgtgtctcccttcgtccctcggagcctgacagcactggctacatagtcattggggtgggctggcacttgtgcctgctggtgaggctgactgtggctgctgtgctcccaggcgtcatgtatggcctatgcttcttcatcaccctgtttggcagctatgtcagccggctgcggcgagtcatctgtgcctcctactacccatcccgggagcaggggtgttgagggggtgggggatgagggacgggggagagttggagagtggagcaggcagca

SEQ ID NO: 471993 - DNA, 1506 bp, Homo sapiens
gtaggtctaggttggagcctgagattttgcattttaagaagttctcagaagatgctgatgcagctgcaggagctgccgtcacatgacgtctatcctccagagaacgatttgtcttcattggggttggttgctgctgctgttgctgctgctaccttcgccagctacttggctccgtggcagctcgaccctgtgcctcctccatttgacaggactctttatgttggatatgacagaaaattcatctccaaatggttgcaatataaagcaaagttactggttcagagcttggtctttctggtgaccagctccaattttggagctatccaggagcccagcaagagtcacctcattataacaagaagtgggtcctatcatccaggaaatcccatgggatttaggagctctgtgccaggaacaagggacaaagacccaaaatatatttcttattatgccacataatgtccccatttctctcctctcccctctgcctttggtggtcttcatcctcatgttccacatggtggccctctgtcaactcctccctctcccctcatcaaacaaaagggttgcagcagctcctgatcaagcagcacctcaccctcctggggtagagggtcttttctggttgctctggctcaagccctgggctctggggttcacttgctcccattggcctgatttgggccctgtgcccatccgttggctagggtgatgaggtactctgattgtcttaagcctgccatggcccaccagaggtctggaagttgtattaaccccacccaagtgcatagttgggatgggagaagggcaaattcactaaagaaaactctgcatgctgttggcagagaattggggaatgggtgctctagagatagtgaataaatgtcctctacagttttctcacatcttatttccaagtacagaactgagaatgtcagttcctcttattgatgatctgaccatactcgtcgagcattttctcaattaaactgccaccaaacagggtcctatgttcccaaatttgtgaatcaagtaaacattgcattgttattattgaaaaaagtctgtaggaaatcctaagggtaaatttgttaagattcccaaattctgaagtttaggatgagttatgtatctaccttctcattccaagaggtgggaggtgaggagggtgttctaagaaagggcaattgaatcacagcttacaggcacttacagaagacctgacatttcccttgatgagtgactgggatgtgggtgccccattactgtatgcattctttcttgagaagtacttgattgcttttaagtgataccccagtgtttgaaagtaggaagcagaagaggtttggaaaagcgttttacctaggtgaagaggaaatcgccctcaggtattgcatgcgtgttttccacctttggttttccgggggggaggaatgcattttaagagaggctattaagtgtgacttgttctcagaaaaaataaagtgtaaatttcaaattcatgct

SEQ ID NO: 471994 - DNA, 599 bp, Homo sapiens
cagatgtcagtacttcatggctgaatgagattccagtcactgaccagctcggaccgcaatctcagagccagggcggggcggggatctgctactggccacctggggtccagggaggggctggctcagggggctgtggcctcaactgccagccggccctgctcgtccctcactgccctccctgtgggagagacatccatccaggcccacgagacactggccgccttcttccctgctaggaatccatggctgctccggtctgggccctcccttgggctgctgctcaggtgcctgttctgcatttgggaaactggtctagacatccagggactctcaggaaagaagtgtggacagaaggcctacacttaccagttggcattcctggtggccagccgggcaagtaaggggcaagtaatgtgtcctgggtcaaagtgcccaaactctcagtcaggctaaactcactcaccctcttacctgcttatgtattcaacacacaatttgggtgcagcgtgaagtgcagtgttttgtgtgtgtgtgtgttttccaatttataccataagctcctgtcaccaaggagcttatggtgtcaattaaaatcaggg

SEQ ID NO: 471995 - DNA, 483 bp, Homo sapiens
cagagggatggaggatgtactgcaggaagtcaggaagtcctccctgccatttggaggtccatttgtcagccacttttggctgcatcaggcctactgcctgggctgtgggcagccccaggatgagggagacatggagaacactgtgtcctgcagtacccccggctgccaaggtctctactgcctcacttgcttccgcctcctggacaatacctgctccgtgtgtgcatctcccctctcctaccagggggacctggacctggagctggactccagcgatgaggagggccctcagctatggctggctgcagctcaaaggaaggaccctgagcaggcatggttattgcagcaacagctccaagaagtgctcggcaggagcctctcaatggagtccacttccgagtccaggtgagcaggaagcaggagttggcacctgggaattgttggaaagtgatatgctcatatttgtcttttaagaccataagc

SEQ ID NO: 471996 - DNA, 662 bp, Homo sapiens
accatggggccagtcctaggagccagaactgaggtcaggccccagggcaccatgagggtgcctgaggcatcagaggcccccagccaagggtctgagtcatcctatgacctgcgctgctccactttcctcattccagaaggtcctgtgttggtgtctctaaccgtggaaggtactggctacgctgggaatatttatcgtgacctggtgtcagcatttgatgtcctgcagcaaggcaacatcagtattttgtcccggcgttgtctccttcgtccctcggagcctgacagcactggctacatagtcattggggtgggctggcacttgtgcctgctggtgaggctgactgtggctgctgtgctcccaggcgtcatgtatggcctatgcttcttcatcaccctgtttggcagctatgtcagccggctgcggcgagtcatctgtgcctcctactacccatcccgggagcagcagccccagcccgctctcctctggttgaactccaaagcaaatgacctggactgcaagcctctggacccaagatggggctgggagaaatggtgcctctggggtggggcttcctgagacagcatttacatccaaagttttgttaaaatcacaggggtgttgagggggtgggggatgagggacgggggagagttggagag

SEQ ID NO: 471997 - DNA, 896 bp, Homo sapiens
ggcgatgtgtgcaactcggaactgggcaacccttacctgaagtgtgcacgggttttcgatgatgccaaggacagctgcatgatggtcataccacaagcctaccacctgtgttacgtgctcatgcccttcaaactggcgctctgtggacttgccagcctggtccaggtgttctgcgtcatccctaagtacattcaacccttcttgcgccagaccatcggcacccccgtgattcagttgctcaaccgggtgcgtcaggagtttgagttcaacatgacagccacccaccacttctctgtggatctcaatgcctctcggagcctgtcccaggtagccatggacctccacgaggctgtcagcatgaagctgcaccgtgtccgagaggccctggctctgatgggcttcaccacgcctctgctgcttgtgcttctctacctccaagccctattttaccggtattgttacctgaactgggaccattatgacaatatctacatcactagccgattcctgcgcatggaggctgtgcgctccacggcagggctgcccacagtgctaccgctcagtgctcacgaggccaggcgctacatcccaccgggctccatcttcttgtcccaatgggagaagtttttttacattctggagaccttcaaccttatccgacacctcctcctcgtgctgttcctagtcttcctagactatgctgtcttctgggtgcttgacctggcccggcaccagctgcagggggagattgtggcccgcaccccctcggcctgtttctgatctccccgcctgctcccaagccttctcctcttcccatcctcagtcctggtgactgcctgaatgtccccatgtcactgttactcagcagcccacaagtgtgccactctttcaactct

SEQ ID NO: 471998 - DNA, 1640 bp, Homo sapiens
taagtgttgcttagtttttcagtctgagaaagagcgacagtgaggcagcgggaaagaaatatatcctttatttgttttaattttccatggaaatgaccaagcttttcagctatattgtcattaaaaatgtttattaccctcaagtcagctttggaatctcagcaaacaccttcctccttcttttccacatcttcacttttgcttatactcacaggcttaagcccattgacatgaccattagtcacttgcccctaatccacatactgctactcttcactcaggcgatactggtgtcctccgacttatttgaatcatggaatattcagaacaatgatctaaagtgtaagatcatcacatttttaaacagggtgatgaggggagtctccatctgcaccacttgcctcctaagcgtgctccaggccatcaccatcagccccagcacctccttcttggaaaagtttaaacatatttctgcaaatcacaccttaggcttcatcctcttctcatgggtcctcaacatgttcattactaataaccttttgcttttcattgtgcctaccccgaataggattggggccagtcttttgtttgtcactgagcactgttatgttttgcccatgagctacacccacaggagcctgtttttcatactaatggttttgagggatgtcatcttcataggactcatggtcctctcaagtggctatgggtgattattttgtacaaacaaaagagactgtcccagcacctacatagcaccagcgtctccccaagagcctccccagcaaaaagggcctcccagaccatcctattgttggtgagctgttttgtcttcatatattgggtggacttcatattctcattttcagtggttgtgacatggataaacgaccctctactgtggctgtactgacttacattgccaccaacagtatataagttttcttttctccacattcttgccaacgtctcttgtgttttccttttaataacagtcattctaactggggtaagatgatatctcattctggttttgacttatatttcccttgtgactggtaatgttgagcattaaaaaaaaaaaacctgttagccatttgcatttcttcttttgagaaatgtctatgtatgtcctttgcacactttttaatgtgattgctttttactatttgagtatattttggatgttagttctttatcagatgaatagtttgcaaatattttcttccattcaacaagttgtttctttgctccattgattgtttcctttgccatgtagaagtttttttatttaataatattttcccatttgtctgcttttgtttttgttttcattttcattgtgtgtgtttttgatgtcttagccataaaatatttgcctaatgttctgaagtgttttctgtgtgtttttatctaatagttttatagtttcaggtcttatgtataagttcataattcatcttcagtttatttttgtatatggtgagaaataggggtccagtttcatacttttgcatgtagatatccagttttcccagcaccattcattgaaaataatgtccaacacccagtgtatgttcttggagcctttgtggaaaaccagttggctgtaaatacatggatttatttctctgttctat

SEQ ID NO: 471999 - DNA, 907 bp, Homo sapiens
tgagcctgggtcctcccctcctggctgacaggagcctggtgggcagtgggctgtctcagagggctgctgtcgagcacatggcagagttgcatcctcgaggcaaggatcagttggcaaagctgaaaatactgactcctggctctttagggaaacagtttccagtgcctggttaaagggctgtgtggcaggaccccaggatcttggtcagattgttcctcactcagggcctgctgtggccttcgctgctatgtctgcaaagtctgggtgctatggtgactctcatgggggcgttgagctctgtcatgctagatttcagggtgtctgcctcatggtcatctgtctcaccaacagagaccctgtggccagattcaaactagcaggaacagttggtctttggcagcagggataccttagagctgagctgccactcacccagaggtggtcccatgccacccactgtctgggtcaaggttggggcagggctggtgtcctgaactgcattctgatggggccccagtggctgctggtgctgaatgccttgcaagagaacgctgaggccaacagccgctggcagcggctcacccaggttatgtgtactgtgcccttctgtgtgcgagtgacaggtgagtgcctgcaggggtcacctgtgtgcccctgtgtggccctcctgtgtggagggggccagaggttaaatttccctgagcagctgtgtggtccaggagcagccaaggggtctctggaggtgtggctgccacaaccctaccctgaaggtcttgcttgtcattggtagagaggagaggacccccaggaggtgctgcctgaggggctccattcccgcttgtgaggggcgcctagggtcctcctggggcgagtcagagcctgagcccttggggtgaaagtcccttcc

SEQ ID NO: 472000 - DNA, 1051 bp, Homo sapiens
catcaattgggaaaccttaatgttttcttccgccatctgtgacagcttcttgatctgtccccagttgggtggctgtgttcaacaggtgttgctcgtgacaggtggggtcctcctcagcatcagtctcgacatggctgcaaccaggggggtcctcgggatcatcccggaatctcttcctctgcatctggctcatgataaagtttcaggtggaacatgtgtgacatccatttgccaaagagagttaggttccaatcctcgaggattaactcctcatgtaaaagatgaggaatgtgccatttggcaagttgggcatctctggataatagctttagcttctttccaggggatagtaaagaaacagtcttttaaatctatgactattaaaggccaattttttggaattatagcaggagaaggcaattctggctgtaatgctcccataggttgtataactgaattgatggctcttaaatcagttaacattctccatttacctgattttttcttaattacgaaaactggagaattccaaggggaaaatgttggagctatgtgcccatttttgaattgttcagtaactaatttctctaaagcctccagtttctcttagcggccattgttctgtccaaattggcttatctgttaaccattttaaaggtataggttctggaggcttaacaatggctgccatcaaaaatgacatcccaatctttggcgggaactttttaaaccttgcaaatttttttctagtcctgtaccagggacataccccatttcatgcatcatatgttgactttgagggctatataattgttctggaattataatttgtgctccccattgttgtaataaatctcttctgcataaacttataggtacagaagttataattggttgaatagtcccaggttttccatcgggcccttcacaatgcaaaatatagctactttgatatacttcaggggctttaccaactccaactatgttaaattgagcaggttgaattggccacgcggatggccagtgctgtagagaaatgattgaaatgtcc

SEQ ID NO: 472001 - DNA, 859 bp, Homo sapiens
caccttcttaatcatagctgaaagtcccacctctttactaggtagagacatttcagctcgcatggggatcaacatcctcatagccccaggacaaacacttttctccccctggtggaagagacaatatctcctaaagccagaggctagcaaagggctagaagcccttattaataacctgaagatgaggggcttcctcaagccctctaacagcccttgcaataccccaatattaggagtgcaaaaacccaatggggaatggagactggttctagacctctgcctcattaatgaggccatagtcccaattcatccagtggtccctaatccctatatcttgctgactcaaatacctgaaggaactaaatggttctcagtcctagatttaaaggatgcctttttctgtataccattacatcctgactcacaatacctatttaccttcaaagatccctccagccaaactgcccagttaacatggatggtggtgcctcagggatttcgagacagtcctcacttgtttggacaggcattgtcaaaggacctttctgagttttcccatcctcaggaaattaacaggttattatcatcggttttccttccacaaggggtagcagcgatgcattgtaagggacatcagaagggaacagatgaagtagctgaaggaaacatgttagctcatcagacagccaagtcagtggcaaggaagcctcagggcacaacacacttgaagccgcttgaatttgggaaggctccgtaagagaaatgaagcctcagtactcccctgcagagatagaatgggccacctctcgaagcccgctcttgctcgtgtgttttgtactaatatttggaccttgtatac

SEQ ID NO: 472002 - DNA, 638 bp, Homo sapiens
gcctggagcagcttgtcacagaagatagagaggaaacagtcaaagacaaatttgatttgatagagtcgtaaaatggtctcaggagccagggtgaagaggctcccgctggccagagatgtgaaaatggatggactagggcagggttcaaaggcccaggagaaagtcaaggaggctcccaggaccttgctccagagaaaccaagaggccatcaggcagagcgacggggtctgggtcaccaggaaccaggtgaagacaaatgaggaaactgagacccagaagagcaagttcttggtcataaagcccagtgatatcgcagaggggcaggagagtgctctcaactctgcaggaagttcatggctccactgctgctcggggtgtgtgaatcgggagagaaaagacttggaaacccatgtacacctgcccgatgcagaaaggacgagggtgcccttcttctacacacagattgcagatggcctattgtgggaccttgtgatcatgtgagttaatactacttaataaacttcccttcatatatatatatatatatattcccttcatatatatatatatatgttcccttcatatatatatattcccttcatatatatagatatcatatgtgtatgtatatatatata

SEQ ID NO: 472003 - DNA, 977 bp, Homo sapiens
aatagcagacaaggaggaaatgagtttgaagggtctgaacacatccgagagactggcagccgactctggaacccagattgttgcttcccggtctagtgatccttcctccatagtctggctggctttggcccaatgccaggcctatgtcctgactgatcaagcccaaagctaccaggctattgctgacaaaacagctgtctgggtggcctggtacaagtataagaacaggcaagccaaggtggataggcagaaggtacagaggcggccacgggccatagagtgggggcggaatggacagatggtctggagagacgctgtagaagactttacccagcaggaaataacagacattttacaaacctttcgacaaaagggaggggaaagtgtaattacttggttggttcgaattaatgaacagggtgccaatggcattagagtggactcagggaatgttttaaagtttgttaccctctcatgggtacccaaaattcagctggctcttcgaaattgggctactgcaccccaccctactaatgatgagggaaatgttttagatgaaatatctttgtggcaattggccatcaatgtggccagacagaaatattccacagaggatgcctggccagatgggggaaagccctggcatacacttaaggagtatgctatgcggttaaaggaggaggccatggaaacagctgtgtcctacaatccgcaataagattttaaagattgctccacctgcttatagaatggtgttaacatctttattattttcccatacagatactcccacacgggaggtactggaacaactaggtcagctacaggacttgggggatcggatgccctgtggggaggagaggattaaggagtggggcagacaaacccgggaccaatctcaggttagtcagaaggatatgtttgcagatttattgaaggcaggggttcccagagaacaaattgatggcaaggaagct

SEQ ID NO: 472004 - DNA, 668 bp, Homo sapiens
ctccttgctttgttaccctgggaagggctccaaactcaatgaaatcctcctgccacgataacaacaacaatgaccaggaatgtgcggaaacatataatcacggcagaaggtgaaggagaagcaagtatgtcttcacatggctgcaggagagagagggagagcaaagtgggaggtgctacacgctttcaaacaaccagatctcatgagaactctatcatgagacaggacatgggggatggtgataaaccgttagaaaccaccctcatgatccgatcacctccaccaccaggccccacctctgacaccggaaattataattcaacacaagatttgggtggggacacagagccaaaccatatcaaactctgtgagaaaatttcaaactgccatcttagggatattccgaaaaataatggaaaatgtctgcagcccatagccaatgactcactgacacatagagacccaagattttccacatagacaattatataatctaaataaatagttttacttcttcctttccaatttgatgcctttttattccttttccttgtcttattgcactgtctaggacttcaagtacagtgttaaataaaaatgatgctgtttatcaagttgaggaagtttccttttattcttagtttcatagctttgattttttaacttca

SEQ ID NO: 472005 - DNA, 1165 bp, Homo sapiens
ttctcacagcttggctgaggggacacaggaggaagatgcgtggtggagagaaggaggaggtaatgggtcctgtctctcctgatcttcacaaggaggaggtaataggtcctgtctctcctgatcttcacaaggaggaggtaatgggtcctgtctctcctgatcttcacaaggaggaggtaatgggtcctgtctctcctgatcttcacaaggaggaggtaatgggtcctgtctctcttgatcttcacaaggaggaggtaatgggtcctgtctctcctgatcttcacaaggaggtaatgggacctgtctctcctgatcttcacaaggaggaggtaatgggtcctgtctctcctgatcttcacgaggaggtaatgggtcctgtctctcctgatcttcacaaggaggaggtaatgggtcctgtctctcctgatcttcacaaggaggaggtaatgggtcctgtctctcctgatcttcacaaggaggaggtaatgggtcctgtctctcctgatcttcacaaggaggaggtaatgggtcctgtctctcctgatcttcacaaggaggaggtaatgggtcctgtctctcttgatcttcacaaggaggaggtaatgggtcctgtctctcctgatcttcacaaggaggtaatgggacctgtctctcctgatcttcacaaggaggaggtaatgggtcctgtctctcctgatcttcacgaggaggtaatgggtcctgtctctcctgatcttcacaaggaggaggtaatgggtcctgtctctcctgatcttcacaaggaggaggtaatgggtcctgtctctcctgatcttcacaaggaggaggtaatgggtcctgtctctcctgatcttcacaagtgaaccgagtttaccacaggaactgtgagcagttggggcctactgctctggggagagcgcctctcaccagtgtggcccttatctgtttgcaagagccgcctccttcctgggccccagccacctgtggttgactgaagctctcaaatgaagtttgacccaaccacacaacacccaacctgaacaccacaataggtcttggattttccagggcagtcctgattttgaatctttatctcactgtctaaaaatggtatgttccagttcagggcccaaaaacctgatcagctgcacactgggagtcctag

SEQ ID NO: 472006 - DNA, 2065 bp, Homo sapiens
tgagagaaactggatatttcagttgaaggtgctgacttctctcgctgctttcattcctctttgctcaaatctcatgttcagccccatcaccatcaccatagaatttcatgatcctaccaaccatggggatgaaaatacatggtatccagagaaaaatcctgataaattaacaaaaattattcaaaagctttttgtgtttgcctttacttgggcatttggaggagctttaaaccgtgaagatgaacacagagaaaatataccattttgtcccagtcttgaacctgattctcttgcaaaagtaacatacgattttgacaaacttgttcatgaattatttggaaacagttcacaagtaggtgctacgaaaacctataatgccagtaaggcagaagataaagccataaaactatcaattcagcctacgtggggtcaagttcatcaatatcactgtcttccacctccatatattgtcccactggaagttcttcagggcaataatacacacagagctgtcatctcctaggacaacaatgccttcttctggaataccacatgaaggacctgcctgaagctgttttacagttaattttatatataaatagaaggagtgcactctaaaataatgataaaaagtatattgtaaatacataaaccactccattataatcttatggtaacatcattatatatccagtccatgattgttaaaacatcattgtgtggcacattactgtatttgttaaaagttctatttaagacatctggatggcaaagattctatgttatttcctgtggaaattaacctttaatccaaaagcattgcgtgttaatttgttgttgaaatgaatgattcaactccatcctctaactcctatagataaataaattgccttaatttatttgttaggcagaaatacctagaactgtgtttgctcttcctgtaaactaaaaggcaagttaataaattattcattatatttgaatgcttatcttaaaacaatgaatatgaaattttgctttgtcatctgaaatatcagtataaaactaggttagaataggagggtaaaaagggaaggaaaggcaagtagaagcaattatagaactataaaaccaccaaagtagaaatgaggaaaaagaaaaaaagggggagagccaaaaaaaattataattacattgcaagaaaaaattgtaaaacacataaagaaaacctaatctgttaaggaaatataccaccaaaatggcccatcatatgaattcatctcagggaaaattattatgacctaacacagatttgaatgtaagtgtttagggtcctaaaaagataaatgaatggcatccatttttaataaatgatgaattacggaacaacatgtagaaattttaaaagaacatatagctatgaaaaagaatgaaatagacatctggaaatgaaaaattttgttatttacaaagaggagctggtactaagacaaagaaagtcttatcagcttaaggagtttttgggctgagacgatggggttttctaaatatacaatcatgtcatctgcaaacaggacaatttgacatcttctcttcctatcttcataccctttatttctttctcctgcctgattgccctggccagaatttccaatattatgttaaataggagtggtgaagagggcattcttgcattgtgccggttttcaaagggaatgtttccagcttttgcccagtcagtatgatattggctatgggtttgtcataaatagctcttattattttgagatgtgttcaatcaatacctagtttattgagtgttttttaacatgaaagagtgttgaatttatcgaaggccttttctgcatctattgagataatcatatgttttttgttactggttctgtttatgtgatggattacgtttattgattattgatttgtgtatggtgaaccagccttgcatcccagggatgaagccaacttgattgtcatgggtaagatttttaatgtgctgctggattcattttgccagtattttattgaggatttttcatcgatgttcatcagggatattggcctgaaa

SEQ ID NO: 472007 - DNA, 1439 bp, Homo sapiens
cagggaaagcttccctgacctgcagtggtggttccaagcagggccggcacagaaagttgacggagtcctactaagggtgtgagatctctgagcaagctgcaatgagcaaacacgcagatggcagaggaaaggagcagaagcaccgcatgggcaagacactgacctcttgcatgtcccccagtgctggccccaagcagtattgctgcaggagctcagagaagccctactgcgagtttgagatctataagcaggctgcagagagcaaacatgcagatggtagaggcgaggagagaaggagccccatagggccctactgtgggtctgagatctacgagcaggcagcagccagtgaggactcaggcagtagtgacgatgagcagaagcgcaccacgggtaacaggctgaccccttgtgtcttatgccagccccaagcagcacaagcacaggaagttggcagagccctaccatgggtcagatctaccagcaggcagaaacaaagaatggtgcagatggcagtggaaaggagcaaaggcacaccaaagagtgccagccccaaccaggctgacccaagacttcggcgggaacactactgtgaggctgcattctccaagcagcctgcaggaggcatacaagcagatggcagaggagaggagtggaggcgccccatgggtcacaggctaacctcttgcatgtcccggggttccagctccaagcaatgtcagtgcaggagatcgacagaattctactgtgggtctgagatctccgagcaggctgcagagagcaaacatgcagatggtggaagagaggaacagagctgctctatgggtaacaggctggcctcttgtatgtcccaaagtgccagccccgagtggggttggcacaggaggttggtgggggactactgcaaatctgagatcaaggagcagccagcagcaagcaagggcacaggcagcagcagagaggagcaaagatgccccatgggtaacactctgatttcttgcatgtcccctagtgccagccccaaacaggacaggcataggaagtcggtggagccctactgtgagtttcagatccatgagcggtgctggtacaagaggttggcggagctctactgggggtctgagatttatgaggaacaggaggcaatgatcaaagtggagccctattatgagtttgagatctatgagcatgcagcattgaacaaaggcacaggcagtggtggagaggagtggaggtgccccattggtaacatgctgaactcttgcatcttccccaatgccagccctgtgtggggctgctgcacagggctggtggagcccgattgtagggctgagatctatgagcaggtggcagcaagcaaaaatgcaggcagtggcagagaagagtggaagctggtctggcacaggagatcagtggagccctacccacaggtctgagat

SEQ ID NO: 472008 - DNA, 1980 bp, Homo sapiens
tcttccacaatggttgaactaatttgcactcccaccaacagtgtaaaagtgttcctatttctccacatcctctccagcatctgttgtttcctgaccttttaacgatcaccattctaactgctataagatggtatctcattgtggttttgatttgcatttctctgatggccagtgatgatgagattttttttcatgtgtcttttggctgcataaatgtcttcttttgagaagtgtccatatcctttgcccactttttgatggggattttttcttgtaaatttgtttaagtttttgtagattctggatgttagccctttgtcagatggatagattgcaaaaattttctcccattctgtaggttgcctgttctctctgatgatagtttcttttgctgtgcagaagctctttagtttaatcagatcccatttgtcaattttggcttttttttgccattgcttttggtgttttatcatgaagtctttgcccatgcctatgctgaatggtattgcccaggttttcttctagggtttttatggttttaggtcttatgtttaggtctttaatccaccttgagttaagttttgtataaggtgtaagaaagggatccagtttcagttttctgcatatggctagccagttttcccaacaccatttattaaatagggaatcttttccccattgctggtttttgtcaggtttgtcaaagatcagatgattgtagatgtgtggcattatttctgaggtctctgttctgttcctttggtctatatctctgttttggtaccagtaccatgctgttttggttactgtagccttgtagtattgtttgaagtcaggtagcatgatgcctccagcttcaatctttttgcctaggattgtcttggctacatgggctctttttggttccatatgaaatttaaagtagttttttctaattctgtgaagaatgtcaatggtatcttgatggggataacattgaatccataaattacttggggcagtatagcaattttcatgatatttattcttcctatccatgagcgtggaatgtttttctatttgtgtcctcccttatttccttgagcagtggtttgtcgttctccttgaagaggtccttcacatcccttttctgctctgatcttagttatttcttgtcttctgctaacttttgaattcatttgctattgattctctagttcttttaattgtgatgttaggagatgccctgcccagagaggaggaatctagagaggcagtctgtctacagcagctttgccgagctgcagtgggctctgcccagttcaaacttccctgcggctttgtttacactgtgatgggaaaactgcctactcaagcctcagtaatggcagacgcccctccccccaccaagctccagcatcccaggtcaacttcagactgctgtgctggcaatgagaatttcaagccagtggatcttagcttgctgggctctgtggcgggggtggggggatctgctgagctagaccacttggctccctggcttcagccccctttccaggggagtgaacagctctgtctcgctggcattccagctcacattcaggttccagtccggtatatccacatgatgactgaacactaccactctgctatctcacagggacattaaacctaattcatctacaatgaactccttctcttctgatccagctttccctccagcatcacctatctctctacatctggaaacaccattcctgttttcctccatcatgtgctaagctttctgaatggcttgaagcttcatgaaaaggcctgtgtcttatccagtgcccatagtacacaggtttcttttcaagtgcacagcaaaagtgttctctcctaaactctagctggttgctaacaaatcatgtattgacctaagtgttcttctcctccagcccaagcagttgatctttttctataggcttgctgttgaaaggaataaaacccaactgtatt

SEQ ID NO: 472009 - DNA, 951 bp, Homo sapiens
gccctgtcgctgcgctcctgctcctcctcgcgtttctcctgccgccctagtccagcagtggccatgagggagatcgtggcagtgcgggtaaccatatcggtgccaaggttggtggccggggctctgagggcccagcgcgggcctgccgggtggcccgagaagatgttggcagcggctggggctttctgggaggtgatctctgatgaacatgccatcgactctgctggcacctgccacggggacagggacctgcagctggagcgcatcaacatgtactacaacgaggccagcggtggcaggtacgtgccccgccctgtgcttgtggatgtggagccgggcaccatcggctctgtgtgctcagcgccattcgggaggatcttcaggccggacgacttcatcttcggtgagctgcgggccttcctgcactggtacacaggcgagggcatggacgtgatggagttcaccgaggccaagagcaacatgaacgacctgctgtctgagtatcagcagtaccaggacgccacagccgaggaggaggaggcctctcagggagcctggacttcaaggcctgcctcactgaagctgtcaaataagatggatgtgagctgggtgctcgggagcacacccaggacagtgctcttctacctggctcttgtagaactcatccatggcctgtatgataccctcttggtaactcacaccctcacacaagtggattgggaggatgaagccagcatagcctggggttgggcatatgtttaggtcctaccccagatccccttggccttcccctaggcctacccacctgcctcagatgcgtcagggaaggcagtgaggcagcctggcatttgcttatcttgccttttaagtgttgagtcctctgtgaagtgggcactgcgtccttactagctggcctctgccagctgtttgttcctccagtttctgcccttc

SEQ ID NO: 472010 - DNA, 828 bp, Homo sapiens
ctctgcagagggtggtgtaggattcctcctctctgggcagggcatctctgcgaaaaaggcagcagcccatcagggacttatagataaaacccccatctccctgggacagagcacctgggggaaggggcggctatgggcacagcttcagcagacttaaacgtccctgcctgatggctccgaagagagcagcgtacctcccagcacagcgttcaagctctgctaaggatcaaactgcctccttaagtgctcctctgggacgaagcttccagaggaaagaacagtcagcaatctttgctgttctgcagcctcctttacccaggcaaacagggcctggagtggacctccagcaaattccagcataccagcaacagagggcactgactattagaaggaaaactaacaaacagaaaggagagcatgtccactcagagaccacattcgaaggtcaccaacatcaaagaccaaaggtagataaatccatgaagatggggagaaaccagggcaaaaaggctgaaaattccaaaaaccagaacaccccttctcatccgaaggatcaaaactcctcaccagcaagggaacaaaactggactgagaatgagtttgacaaattgacagaagtaggcttcagaagttgggtaatcacaaactccttcgagctaaaggagcatgttctaacccaatgcaaggaagctaagaaccttgaaaaaagattagacaaattgctaactagaataaacagtttggagaagaatataaatgacctgatggagctgaaaaacacagcaagagaactttgtgaagcatacacaagttatcaatagccaaatc

SEQ ID NO: 472011 - DNA, 867 bp, Homo sapiens
gcgtttcattcattttctcaactttcctgaggattgtggcctccgggctcagtgtgtataatggcccctgcttttgctagaatgtctctccctaacaaaggagtgggcctttcaggcataattagaaaggcatgtgaaaagagtaaagttacccagtcacaacttagtgactgggagaagtatctagtgactgcatgtcctaggaccccttggatagtgacagatctggaggacagttgtctgggacaggagagtaagactgagaaggccgtgccagtgtccaggagacagttaacctccaggccttcaatggttaagcatacctggggctctgtgagggtgatggcatgggccggcgcttgccccgggaaccctcattcctgctgctggatcatctggttagtggcttctgactcagaggaccttcataccctggggtgcggtgggccttccagtgattcccttgacataaggggcatggacaagggggtggcttatttttattcggacaatctttttaatatgtccttgcagaccgcactggaagcaagccctattaggcattcaatttgcccagcctttcccttttccagagccaccaaagtccacttgcctgagggccatgactaaagtgatggccttttttttttttaatcccattcgtcccattccaccttttttctcctgatctctattataaaaaactgagtttgccaagttcactagggtttctaagttttgctccgggtctaaggcaaacttttgaagtttttttctaatgtctgcagctgactgagtgataaacttatcctttaagattagttggccttcaatagagtcaggtgacagagaggtatgcttcctcaa

SEQ ID NO: 472012 - DNA, 1356 bp, Homo sapiens
agattttggttatgttgactaccaatgtggctgcctttttatgaaggtaccctcttaggagggcacccatgtgacctcttggctggtgacctgaggagaaatatgccattacaggagttggtgtcctttgaggatgtggctgtgggcttcacctgggaagagtggcaggacttggatgatgctcaaaggactctgtacagggacatgatgctggagacctacagcagcttggtgtccttgggtctgctggagtttgctgggggtccactccagaccctttttgcctgtgtatcaccagcggaagctgcacaacagcaaagattgctgcttgctccttcctctggaagcttcatcccagagaggcacctgccagatgccagctggaactctcctgatcacaagattcaaattggactacagtgttttgaatatagtggacggaggaatgccttcaacgtggaggctatattaacacataagagtgcttctatgggaaagacctcttgtaaatctaataaatgtgggaaagcctgtaatgagtcagctactattgctcaagagctaactcaggtagggaggaaaacttttgaacgtcatgtatgtgggaaaatattcagtaagaagcataaagtcactgaacataagaaaatacactcaggaaagaaaccttataaatatagtgaatatgagaaagccttcattagccaatcatgtgttacaaaacatcagagaacacatacagaagagaaaccctatccatgtgccatatgtgagaaatccttctgtcagaaatcaaatctaagcgtttatcagagaatccacacagagggaaaatcctattttgctaaaaacattttggcagcagggaaaaaaccctatgaacataatgaatgtggaaaaaagtttcatcacaagtcatacctcagggtgcatcagggttttcatataggcaagaaaccctatgaatgtaacgaatgtgggaaaacctatgagaaaggaatcctcactagccatcagagaaatcacacgggggaaaaaccctatgaatgtaatcaatgtggaaaaccctttggctggaagtcaagccttaggtcgcatcagagtattcacagagggcagaaaacctatggatgtaatgtatgtagtaaaagcttccaccagaagtcagacctcactaaacatgaaagaattcacactggggaaaatccctatgaatgtaatgagtgtggaaaatcctttggctggaagtcaaggctcagccaacatcagagatctcacatagggtagtaaaacctatgaaagtaatgaatgtaggaaaatattttgcctaaggatatttctgaactggtgaggcat

SEQ ID NO: 472013 - DNA, 636 bp, Homo sapiens
tgaggggcgctgggaatagccgctcatgtcggctgacggagcggtgtggggccgcatgcgaagctgcctccgcgccttccccgagcggctggccgcctgcggggccgaatactcctccattcctcagattccagcccccaccccagcctggaacgcccacagtgcttttatcacagctcttaactccacttggttccccaaagctatgagcccacataccacctcccagggctacaacactttgggtttctcagacactgtcaacactaagcagcatgaactgcaggacacacaggacagctggagaggggcagatgtcagttacttgacagcagggcccgtgctgggctccatgcccggcttcgccagcgtctggcgccgggagcgcagggaggcagcaggcaatggagagcaccgggtggagccgactttcaaggaggaaggggcaggaaagagggtgaaatattgcaaagcagcccaggatacaaaggtgtcaaaggttttatccacagaaactgctggtgatctttggtgagggcagaagccagcctactgggttgacaggacagatgaggggtgtaagacgttgctgagcagcctgcgtctgtgccacagaaaggagatgcagcaaaagct

SEQ ID NO: 472014 - DNA, 626 bp, Homo sapiens
ggattgggaggcgagtatggtaacagggttcaggtccctcagctgcatgtctgttggagtttgctggaggtccacttcagaccctgtttgcctgggtatcaccagtggaggctacagaacagcaaatattgcagaacagcaaatattgctgcctgatccttcctctggaagctttgtcccagaggggcacctgccagagcttgagcgctgtgctgtgagatccgctgctctcttcagagctggcaggcaggaacgtttaagtctgctgaagctgcgcttacagccgccccttctcccaggtgctctgtcccagggagatgggagttttatctataagctcctgactggggctgctgcctctctttcagagatgccctgcccggagaggaggaatctagagaggcagtctggctacagcagctttgctgagctgtggtgggttctgcccattttgaacttcccagcggctttgtttacactaaagccatatgacagggaactgtgggggcctctaggagctgacagtggcccttactgacagccagcaagagagcagggacctctgtcctacaaacgcaaggaactaactctgctgacaattatatgagctgagaaggagaacttgg

SEQ ID NO: 472015 - DNA, 821 bp, Homo sapiens
tgcttacctagctgatcgggacatggggtgtcagtacccaagcctcagtcagctaaagcagctgcatctgattcatatcctaatgtggaccaccaatcttgagccccttggagctctgctagagaaagctgctgctactatcgagaccctcgtcttagaggactgtcggatccaggactcccaactcatggtcatcctacctgccctgagccgctgctcccagctcaccaccttctactttcatggaaatgagacctccatgaatgctctgaaagttctgttgcatcacacaggtgaactgagcaagttaggcctggagacatatcctgcccctctggagagtcttaacaacaggggtcatgtcagttgggagatcctcgccccaattcaggctgagctgatgcgtacactcagggaagtaaggcagcccaagaggatcttcttggtcctgccccctgcccttcctgtggctcatggccatctgagaaactggagctgcatcttcgcttctagggaaggcctgaagcaggatcaaagcccacagcataagggctattctgacactgttgataccacctattccagcacaccaccttccaaggtcaaaagcaactgctcccctccatttcccagctgtcctgcctgggaaaaacaggattgtaacagaacaggaagtattaagtaggaaaacactagaagttagaattgtaaaatgtagtaacacactagatgcctgaagactccttaagcaggcctgatggaaagctgggaaggaggagggacaattgtgaaagagaccaaaagaccaggtgcttgaaaaa

SEQ ID NO: 472016 - DNA, 699 bp, Homo sapiens
ctctctctctctctctctctctctctctctctgtctctctctctctctctctcaagcagctcagctagttgctgctgcactggtggagttaagagacaggaaaaagcccaggctgagttgggggcagggagaaaaagagagggagagcgagagcagagagccgcctcctgtgtcctagtaaaatggcagaagagagaaagagactgcttcttctgattgaccttggctgctgcaatggtgttgaacatgagcttacgctggccttggttaatgggcagagagtttcaggtaatatgagggacaaagcaaagagacaagtgcttgtgaatccaggggttccagcccttcaccacttccagaccaggaaagatctcgcaaccctcacgaggtgctgtggctggggcccttgtggagcagacctacaggatgaggatgtcccaggggcacgagggggaaagtggtcaaggaccagctcccttccccacttcctacaacctaatcagcccgccctgccccagccaatccatcagatttcccagtctcttcttccagccctttcctggctccgaagctccagctgggtctatcccactccccactaggatctctgccatggagtcccacagcttcctcaactcattatctcctcacctcctttacttcctatagttcctctcactgataacagcctcacaagag

SEQ ID NO: 472017 - DNA, 521 bp, Homo sapiens
tgagagatcctggataccttggtgatatggtttggctgtgtccctatccacatctcatcttgaattgtaactcttacaattcccacgtgtcacaggaggatcctgaagctgttcttgcccagcctcttggaggtttaccctaccattcacagatttccattacatactggagtgatattaaaaataacagtaagcagtatgacacggaactcaaccaaccagaagttttgctagttcaaataggacaatatagagacaactatacatatatctggaagtcttcctctctttctccctcctcttggttactctatgccaaaatccaagctcccttgaactatgcttacaagaccaaggttcatggttcagggactacatccagagaaaaatcccacgactggaccatggttgacagaatagggggaaaaaagaaggctttctccccacaaaagacaactgtccctgaaaggtcagcgacgttccctttagaagcaagttgcctgctgtgatgcttctcttgg

SEQ ID NO: 472018 - DNA, 818 bp, Homo sapiens
tgtgggctccaagtagatgcagcagatccacatgtccctctgagggaaagccatggtgccaatgggcaagaacaccatgatgtgcaaggccatccaagggcacctggaaaacaacccagctctggaaaaactgttgcctcatatccagggaaatgtgggctttgcgttcaccaaggaagacctcactaagttcagggacatgctgctgaatagtaaggtgccagctgccacccatgctggtgccattgccccatgtgaagtcactgtcccaggccagaacaccggtctggagcctaagaagacctcctttttccaggctttaagcatcaccactgaaatcctgagtgatgtgcagctgatcaagactggtgacaaagtgggagccagtgaagccacactgctgaacatgctgaatgaacatctctcccttctcctttgggatgattatccagcagctattggttacccaactgttgcatcagtacctcattctaccatcaatgggtacaagcaagtcctggctttgtctgtggaaactgattgcaccttcccacttgctgaaaaggtcaaggccttcttggccgatccatctgcctttgtggctgctgcccctggggccactgccaccactgctgctcctgctgcagctccagccaaggctgaagccaagaagagttggaggagttggatgagaatatgggatttggcctatttgactaatcaccaaaaggcaaccaactcagccagctttatttgcaaaacaaagaaatgaaggcttacttctttcaaaaaaaaatgtttattctagtgttattcat

SEQ ID NO: 472019 - DNA, 1293 bp, Homo sapiens
agcagtggtggtgatgatgagaatgaatcaaggtgttggtggtggtggtgatggtagtagaagtggtggtggtgaaggtggtggatgatggtggtggtggtgataatggtggtggaggtggtagaggtgttggtggtggtggtgatgaagtggtggtggtgaaggtggtggatgatggtggtggtggtgataatggtggtggaggtggtagaggtgttggtggtggtggtgatgtggaggtggtagaggtgttggtggtggtggtgatggtggtagaagtggtggtggtgaaggtggtggatgatggtggtggtggtgataattgtagtggaggtggtagaggtgttggtggtggtggtgatgaggtgttggtggtggtggtgatggtggtagaagtggtggtggtgaaggtggtggatgatggtggtggtggtgataatggtggtggaggtggtagaggtgttggtggtggtggtgatggtggtagaaatggtggtggtggaggtagtggtaatgcaggtgaggatagtggtggtggtgggtggtggtgggtgatggtggtggaggtgggtgatggtggtggtagtggaggtgatggtggtggaggtgggggtcgtggtggtggaggttatgaaggtagaggtggtggtagtggtggtggtggaggtggtggggtagctgtggcgcagcacgttgacatggcagtgatgacaatggtagtgatggtgcaaaaggtagtggatgtgatagtggtggtagcaatggagatgggggaggtggtgaaagtggcagcgacggtgggaataagtgaagatcaaagtggcagtccttgtgattgtgatggcgatggcgatactggtgaaggtgatgaagttggtgcagctggtggaggtggtggtggtgatggtggtctgatacctggatactgagaccaaagcttcttccccatttttgctgccgccatttgtcagaaaaagtggagaaaagttacatggaaagtagactaagatgaggacagtaaatagaatgtcactacccaagctatggggcctataggacctcatgtgctccttcccagccacagcagctttttctagatctcagccctccatgtctactccatttggggtttgccatgatgacaatttcctgtgtgcatcggaaagcaagaaaagtggaaagagagtaagacaagtgcaccaaggcagtatcctggagtctctcttcgcccaccctggataagccgtggccagacctgtcagagctggccctactaattgctacttccatgtc

SEQ ID NO: 472020 - DNA, 2264 bp, Homo sapiens
tggggttgggtctgtaacttggatcctctggagtggatttgttgattgggtctgtggtgatgggcctggagcctgaatctgtgggggccagcctgagacctgagtccacaggggctgacctggcactggaatgggccttgaatctgaatctccaagggctggccaaatctgagatgggcctggtgcatggagcaggcctggactttgagtcctctggagcctggaaccacaaggaccagcctcgagcctggggccagcctggtactagggccagcatagagcctgggtctgtggaggcagatctggagcctaggattgtgggtaatgccctggtgcttagagccacaggaactggcctggagcctggggacttaggggtcaacctgggacctaggtacacaggggaagtcctgaagcttgggtgtgttggggtcagtccaccactgtggtctagtgggacatgcctgtaccatggtccttctggaacaagcctggtcgttggttctactggagcatagggccataggagctggcctggagggtgaggccatgaggactggcctatcattgggcatatctggagcctgtgtccatggatggcctcctggtgtttgaggcaaggaatgccaacctggtgctggggtgggcctaaagcctggggtcacaggtactggctgagtgccagcaagtcctttctggtataaagaccactgtccttttggtttgagtactgtggtttctacagaatttaccttctgtctctgaggcatgtctttgctggtgaatttacttttgttttttctgcacacctaatttaatattttgtttgatctgcatgtctggtttaaaatttttgtgaacactcttatcttaatttggttatgtgcatctgtaaatgatttggctttttttcccttgcttgtttctaaaaattttctaagagcaaaaataaacattctaaatgttggatacagaattattaactaaacgccactagagccgtcaccaccactaaaacactgatctaaactcctggtgttctttgatggtacttgtgggattttctttgctctctagaaattcatgagaaatggaatgggattttcaaatattaagacatgccaggttttctgggactccagctggctacatattactggctcagagtaaaatggccattattcaaaatttctttaaaaaaaaaattaaaccctgcagctatagagttaacatgtagagacttttaaattctctatgtctctaggttttttgttttgttttgttttgttttgttttctgcctacttggaatctgctgacttttctgctggagttgagagaaaactttctgcttatgacattccagacaagatttttaaagtgctctttagaagctttcagatgaatagctttacaaattataacagcttcatggtaactaacaatctagatctgttttgaaatgtaaatttataacagggtgatggtcccaatgtgactgacattgtcagccgtaattctggttgttctcttaaaatgctgtatgggatagaaataactaaatttcttttttaattttgaacttccgtcagatttttaaccatggctagttcaagtttttgttatccacatttattgctttgatttttctctaaaagcattttcaattgactacattttaaaattgcttttcatggaaaagactctaacaggtagtcttgaacacggatttctgataactttaagatcaatgaactaaataaaatgttttcaaaactcaaatgaagaaactgatgggtttatgaaactgctaaataagataaagcagaacaaaattaattgcatacgattgaataactgatgaagataatgtttttataacttttacttgaaatgttactgattccttacttacatgttttgttttacagatttcagaaaattttccttttaagctattcacatgttataaaaatttggtaaagtatattttgtgaacaaaggtgaacatattcgctttttctccctacttaattcctccaaaatttagaaactattcttactatgtttttagcaatacggttatttacataagttcaataagaatctgttctgtatttataacaggatacaattggaaacattgattatattaccaaggctttgactaaaatatcatctttgggaatgtgcatgaaatgcctggcttcaaaggtttatagccttacagtgaatgagtaaaaattgtcacttcctagcaggccc

SEQ ID NO: 472021 - DNA, 1753 bp, Homo sapiens
ccaggggaagctttgtaggggcgtcctttcaataggccatagagcacttccaggagccacggtgagagggacagggcagagggagccacgggaatgttccgagacagccagctgttctgtttggggtccttctgggtggtgttggccagctgcatctctggactcgtgcagcagttgggggagcgggacagagagacagagagagagttctgcagcattcacaagaggttaaaactggaaagctggagaaagcagtggaggtcactccaggaagactccctggccaaagaggactgtaggattctgacttacagtcagggctgtttccgttacagttggccccagtcagagacccaggatgaaactctggccctgagcgcggagaataggttttctgtttcccaagcttccacacggtggcgccaccgagcacccacctcgccagagttgcgaggcggttccacgtggctgggccgtccttgccggttctcgcccttatttaggttgtgtgtcccacttcgggcagcagtcttgcagctttttaaaaaagagatcttcaccaaaagctcctgaagggcagagggcttttcttatttaatttgcattcttctctctgcaatgcctaccagagggcgctgcacaaaatcatgtattggggatgcaattgttaatcgagttggtagaaacaggaataaattaaaataattaaatttttagtaatggtgggttacgtaaatcttgatgcctatacacatggaatccctgtgatgatacgaaatggacatttggtctttgtccctgttcctgacaccaagcgtctgaaatccttggaatctcccgaatgacaggggagagggagcatcttttgttattcataacaacccccttcctgccatactgagtgtgtgctaatgaggtgactcttggtggacccctaaatagcttcaggatggggctggttgccagaggaagcaaccatgtgattacagggctggagctttcagccccaggctgggcctccagggagcggctggggaaggacttcaatcaccagtggccaattatttaatcaaccatgcctaaatgaagtgactgccatagaaaccccaaacgatggggctcagagagctgtcgggctgctgagtgggtggggtgccagaagggtgggcgcctggggtgggccttgaagctccgtgctgcccctcatacatggccctgcgtgtctcttccacgtggcttttcctgagttgcattctttgtagtaaaccagtaatcatgagtaaagtgcctccctgagtcccgtgaactcttgtagcagattatctaacctgaggaggggatttgtaggaacctccaattttagccagttagtcagaagtatgggcggtcaggtgctgcgactggcatctgaagtgggggcagtgttgtggggctgagccttcaccttgtggggtctgtgctaactctgggtagttaggatcagaacggaattgcatgataccccgacagtgttcagacagttggagaattggttggtgtggggatttttaaaaaaggaaatataacccccacacatttggcatcagaagtgttgtgagtcagaatggttcaggaattccatacaatgtagctatctagaatcaagcactcagaaaatatttaagaactggggaaatgttttaaaaatagtcctaattgaaaaagcagatgataaagcagccgggaaaaggcaaagccgtgccacagggtggac

SEQ ID NO: 472022 - DNA, 3313 bp, Homo sapiens
gcctaatacctggcagctgctggcatcacgctcgctgcagctgcccaaatcatggctgcagacccaggcctcctgctctatggatcaggaaggagccccgccctcctgagtggggctgcagctgcccaaactgcggctgtggatctgagcctgtgctcttggtgggggtcccgggagcaggcaggatctgccctcctgggtgcagctacagctacccgaccagcagctgcagacctgggcttcccgctccacagagcagacagaagccagagacaaacaggagccccgccccttacgagttggccggggcgggagctcccctggctgctctcccaggcacaggacctgggcatctctgtagcctgcaccctctggtcctggggagacgacctccacccccacacatcatccctgcagactcaggggtgtctgctcccactgcctggcctctctccactcctgctgccggctcagatcttggagcagggttggggctgagcctcgagtccgtgaatggcaacgggagggagacagagtcctgggcggaatggggcgcgtccctggtaaggccccgccttcaggccagaggcttccagtcccaccgaccagaccggagtgaggactcatggtgcctcttccaggcctgcccatggccgcccatggaccatttggcatgcatttcttcccctccaaggtccataaaagccccgggcttagctagagcaagagaggagggagagaacggagagaagaaggcacaggaagaccagctgcagagaggagctaccctctctgctgagagcttcagagacctgcagagacatccggactaccagctgcagacaggagcaaccctctccagggcctcctctctgctgagagcagcagaccgaaggcggggactcgggcgctgttggcagctggcgacgcggggcgaagccgcggctggcggcgcctggccagtcccgcatccgccgcggtgggtgtgcccgcaggggtgcgccggggccagggccgagaccgtcggccagagggcgcctggagggtgtgcgcgccgcggacgaccagggtgcgccagccccggggtgcgcgcctgggacgcggacagtgcacccggaggttgcgtgcgctccgaagccggggtgtgcgcctagctgccccggccccgtgcaccgcgggccgcctcgcgcaggacttccgcagctcgccaaggtaagggactctgcgaccccagtcccccgcagtgcgtctgctggggtgttcaacacccgccctgcgcgacccgagtgttggccccggcgctcgaccactctcctcttgcctctgccacccgcctcgcccagtccccagcgccgcgtccccggctccctttaaagcagtggctgcggcagcttgggccgacctggcgcccccgcctcccagcctggggtctgcgacagaaaaggagcggggctgctcgggctgcccaaaggtgggcgccgctccctttccagcccagattggctctccgcgccccaattctgggggtggagaacactggtgaggagggggaggccgtgctgtccttgcgactcaggtggtgcagcccccgcccagcttttccgagctaggcgctgcggtctgggatgcagcctgcgggactgggcgttctttgccgcgggctcccactgctacctggaatcgagctcttagtctctctcctgtcgcaaaagtctccccgtagtgccaaccctggcactcctcggcccctggctgaactttccagggctccctttgggccgcgaccttgggcggaggcaatggggcagctccgagtgctctagacgccgccgagggcgctttgcccagcccgcatgcctcctgtgggctcctttcccttctgcctctccggtaaggtcaaatctgtgactgggtactttgaccccgcagactggccagaaatgggagttggaaagtcgagcccatggccgctacgctgggtctgaacctaactcttgccctgggcatccttcggggctgccaaactcaagtcttagttcctaagcgccctggagtgcaagcctttagggcaaagagggagtattttccaggagagggaggaggaccccctgaggcctgggcaaagtcctatctaccaaatagggccagaggaggatcagatgcagccagtcatgaaggtggagccctcacaaatgggatagtgctcttagaagagagagctctgtcaacccttctgtcatgtgaggacacgccagatgccaacagtctgcaagctgaaagagggaccccaccagaacccagccatgctggcacgctgatggcattctccgagcctccagaacgattacaatattccctttcatttggatatcacttcgtctttagcaaagcacttgtactcccattatctcattgaaccctctggcaagtctatagacttaggacagtagtggtagccccatcctggattaaactttactgtcccatttctctgaccctgtcttgggactgctggatccattaaatccatgccctttgacttcatctgctacttggcatcctccatgtgtgtcagctgcctctcatcccagtatcctcactgactattgcaaacctcatctacacttcccaaactttgaaagccttctcttcccacctccagaaactctagcagactggccctttgggtaaaagccatgaactcttaagccagagcttttggcttcaaatctcagattctcctactgctaacctggtcttctcattgtaaaatatgaaataaaataataaaagcatctagctcctaaggtagtggtaatgagtaaattcaacatgtgttgcatcttttatttagcacagtgcctggagtaaatgtcgactcctatgccagctcctctttcttgcatctagaagtccatccttctccctcggcttcttcctccagacctgcaaacatgctcgcctttcccagagctcaccttgtccctccctggagctactgtccctttctctcctgaattgcactggaaaacagccaaagcgtagcccatctgctgcttcaaccatcttgtcaacccttgacgtctgcctcctgctcttttgaaactaagcccgagcctcacatggtcttcaagttccacagcatctgacatcatagaacagtcttctcaaaactgaccccctttgtgtttctgagctgtaccccatcctggctcttccttcttacctgttccccatgcatgactgtcttcaggggtgctcctcagactcctctgcttgctcttgcttctcaccaccccccacccccaaccac

SEQ ID NO: 472023 - DNA, 757 bp, Homo sapiens
ccaggtggctggatctcagctgcatgggctttgaggagcgagtggactcagtgggccacaaagtcttttgctcccctgaactgggctacagtccagagggcttggaaaccacaatttggagtaaatgtttcctaggaattcagctccacttcctccctcctgggtcacttcagcgaaagcctctcaagggtaggcacaaatactccacaggggggcacccctgcacccaccctctttgggcagctcccatccgagcagcatcatccctggtccagaattcagcagatgcctctgcaggcatcagctgggtgccacagctcgagttgcaggtgcagacatgctttcctttacaaatctcatgtactggtcctcagtgtgatattggaggacatggaattgatggtttctttaaaaagaatgtggccagcgtccccagtttaaatgtggaataatggagtttttattgtggtaaagtgtgccagagaactgctcatacttctgttggtgatctttgcttgcagcctctggctgcagggaaagtataacgcataacaataaaaatagttgccaacatcaattaagtattgactctgtcctggcctctctctggccccttcattgggaattccaatattggctccatttgtccatggctttttcatcactgaatgacctcaatctgcataataatggagggataacagccaagaaagctctgccagaagtgtcctttgtaggaaattacttagaaggctcc

SEQ ID NO: 472024 - DNA, 3353 bp, Homo sapiens
tcctcgcctgccgcattcagaaccagcccatccttgctgttagggtccttcactgagcgcctactctgggctgtgttctctagtgcattcgtgctaataatgacaacaattcttgtcctctgttggagtcaacaggtggatgctgcaaggagatcctggaaccttggtgtaatggagaacttcctcatcatgatggccccccaggccaaagaccagtcctctcagggggatgaagagaaagaccctccgaagagccacccttattctgtggagaccccatatggctttcatttagacctggacttcctcaagtatgtggatgacatcgagaagggaaacactatcaaaagaattcctatccacagaagggccaagcaggccaaatttagcactctgccccgaaacttcagccttcctgacagtggggctcgcccccctgcagccccgcccctccaaaactggtctcccgtggtgccaagggaggcatcacttgggacacaggagcaaaaccagtcaccaccgcttggtaatgccccccaggcctcaacaagcaggagtgaggtgagctaccacaggaaggctctgttggcagaggccaccagacagttggaagctgctgagccagaggatgccgagctcacttttgggagtggacggccccagctcttgagagcatccagcatgcctgccacgctgctgcacagcagggcttctgaggagccaggcctgagcctggggccccctgcccctcctgccctccctccccttcagggtgaaggcagtgtctgtgatggcacctttgaacctgcagaaggattggcaggtttccacagctccagcccacgagcatcaactcggattccagagctggtccaggagggagctgagcctccagagggtgtggtgaaggttccaaatcacctccctctcccaggccctcctttctcattccagaatgtgcttgtagttctagaggacaaggaagatgaacacaatgccagagaagcagaggtgttgttcacccctggctcccctacgccaagcccgccacctctgccatcacccatccctgagaatgagctcctcctggaagaaatcgagctcaacatcagcgagattccacccccgccacctgtagaggtggacatgagaagcattggcatcagggtaactgaggaaagcctgggccttgccagggtggatccaggcagcatctccagcctgaaacagcaggtctcggccctggagggagagttgtctggaagaaccgaggaactggcacaggtcagaactgctctccagcagcaggaagaggaaatcaaagctagggagcaaagaattcgagagctggagttcactgtagcccaactggaaggacagtttcaccaagagaacgccaaagacactcagggccagacggacgtgatggtgaacactgaccctgtccatggactcttgaccagggagtcgtgtgataagggcattgaagtcaaccttctaggcagcatggagtctgaaagctgggggcaccgaggagaggagaatggcctcctatgggggccagatggtcataaacaagggaatcagagcccagcagaacgtgtgcttctgccccagctgtcactgccacagggacccgagcaggtccttacctcctctgtacatagcttcctctccactgaactcaggattgaagaagcaggcactgaacaggaaggaggccctcagggaggaaccaggggagcaggaggctttctgtggggcagcgacagaaagactcccccagcagggagggaggagaccagttccaatctcccagggaaggagcacccgggaaggccaccaagctcgccaacggatgccactattgggcagtatgtgaagaagatccaggagctcctgcaggagcagtggaactgcctggagcatgggtacccggagctggccagcgccatcaagcagccagcctccaagctcagcagcatccagagccagctgctgagctccctcaacctgctgctgtcggcctactcggcccaggctcacccacccaaggagccaccggcctcctcctcctccccgccagtggagatctccccatcgaccagccttaaatccataatgaaaaagaaagactatggcttccgtgcaggaggtaatgggaccaaaaagaaccttcagtttgttggggttaacggtgggtatgagaccacctcaagtgaggagaccagcggtgaggacagcaccccagaggacttgtctgacagcgaggcagagaagaagtgtgacggcccagatcacaagcatgtcaaagatgcccatctcacctgcgaggctgggcagggcatccctgagggcacctgccatgctgcccaggaaagtgggcctggggaagaagtcccccactccaaggccgagagtcaagagtggttccgcgtctccagccggaagtcgtctagccccgccgtggtggcctcctacctccacgaggtccagcctcactccccacacttcctgaaactgcttgtcaacttggccgatcacaacgggaacacggcccttcactacagcgtgtcccactccaacttctccatcgtgaagctgctgctggagacagctcccatttaaatgagaacatgcagtatttggttttccgttcttgagttacttcacttagaataatggcctccagttccatccaagttgctgcaaaagacattgttttgttcttttttctggctgagtagtattccgtggaatgtatgtatgtgtgtctgtgcatatacgtatatataacattttattatatgtatatatatttattgactacacatgaggtccatactggctactaccagggatgcaaagccacgctggcctcactcaccaaggtcattccctcctgggatttttgtatttgccttctacctggactcttccccctgaggctcttcttgtgactggctccttctcgtcattcaagtcacagccccaatgtcacctcctcaaaagtcttcctggtgcctctgtctaaagtggctgcccctacctctctctaggggagaaccctctttctttcttgagacactctttgcttttcatttctacccaacagaatgttaattcactcaaaaggggctcctgtctgtcttatctgtttccctaacacctagaccagttcctggttcctagtaggtgttgagtgaaaacgtctgttaaatgaatgagcgatggatgactctcgggagctaggttaaattccagtaaacttccaagtcttcaaaattctgctaagcagctttgagtctcttcagctgaacgggaaaggcaacgtacataatgacagcctgaag

SEQ ID NO: 472025 - DNA, 4853 bp, Homo sapiens
gtttgtagggagcagctgcagatgacggccgattaaaacgaggggatcagattttagctgttaatggcgagaccctggaaggtgttactcatgagcaagcagtcgccattctaaaacaccagagagggactgtaaccttaactgtgctgtcatgagcctcgggcctgatcacaagatagatgttgttgtttagaatatccacaggcagatgaagttctgagtgggtatgaaaagcaccctcaactaaaatgcaccttcattcttatttcttgccctctctgctcaggagaaatggctgaggtttcatgtgaatttcccaaatcaacaatcatctcctaatgtttcccagttcctgtcacctgttggcgaggttgatttctaaaacttaaatgagtctacctgttttgcatttaatttcagtgttccgatttctttttttttttttttttttttgagacggagtctcactctgtcacccaggctggagtgcaatggcgcaatcttggctcactgcaacctcggcctcccaggttggagcgattctcctgcctcagcctcccgagtagctgggattacaggcatgcatcaccacactgggtttatttttgtttttttagtagagatggagcttccccatgtgggccaggctggtcttgaacttctgacctcaggtgatctgcctgccttggcctcccaaagtgctgggattccaggcgtgagccactgcgcccagcccagtattctgattttaaccaactggttctgattatatttaccaaaactggagttaacttctctttccttatactcttctctccctatcccctactcacaccgaggcttaacagcaacctcagatctcatccaatggacagaaacaaatgttaagcaacttgtcatctcactcatgatttacttatgctaattgtctcttcaagtaagcaagaaaacattagcagtgtaattaatttaccagtgatccccaagatgaaataccagattctcctatgggaaattactgtgctgtcttctgtatgacttatggtcaaataagtctcaaattcatttctctggatagatctttatatgctagtcattggtgattttgatgagtcaatttacagactgtaatcttctaaaaattctgaaagactaattgttttctgtgccatataaatgcataccactgagcaaatgaaccttattctcagcaggaacaactagcatacatgttctgaattctaacagtgctaaattacattcaagtccaggaagatcacctggaattaatggcatttcagttggcaggcatcattcccacccctcggtcttaggaaaaggaggtagaagccccagaaccacacggcagagatcagcaagttttgtctcaagtcagacaaggtctaggtggccttggccttatgcaaagtgggtgacatatttgattatatttccctttacctccatagtagtcaggccagcagcatggactgcaagaacctaagggagcaacatacttagctgcaaagtgagcaaatgaattgagcctaggaatatgtgatgaaaatgcatggctgatgtttcctgatctccaaggagactcccatttgctgaagttttgcatgctaagaaatcaactacagcagaaaatacaagaatacctttaagttgattattggcaatcttattcatatattagcaagaaaaagggagagatgcttactggtggatgctatagagtcctctgtttttaaaagtaccatggccgggtgcagtggctcacgcctgtaatcccagcactttgggaggccagggcaggcgaatcatgaggtcaggagttcgagaccagcctggccaatatggtgaaaccctgtctctactaaaaatacaaaaattagctgggtgcagtggcaggcgcctgtaatcccagctactccggaggttgaagcaggaaaattgcttgaacctgggaggtggaggttgcagtgagccaagttcgtgccactccactccagcctgggtgacagagcaagactctgtctcgaaaaagaaaaaaaaccatgaaggatgagtactagagtcagtaatagaagtagttcagcattatttaactacaacacaatgctgcaaatatttcacagtaattatcaaaatttaatgggctctaatttaaaatgttatttaataagtatagattttaattgagaattatctttgagtagatgtaatcacaaagtgcattaactcttgttggaatattttatggctattccaaagtatagagtgcctaaattttgtgttgaaaatgtctttcatgacggtattaagttttctgaaattacacatggcttttaaaatttctaatgtatccaagatgtgcaatgttgttaggatctcattcttcagtgcatgaaaagctactaccctcagaacattttgtgttaattgtacctgcaagaacacctcaggcaagccaagaagaaatgaaacccaaataaaacttgaaaatgcaccttaaaaatatatatacatataatagttttgaaatgggattctgctttattttgatggaatggccattaaatacacattttgagataatacattgttgtggtgtttctttatacattatccttttaggtcgtgctagtaaaagtatattgatgaaggaattatgatgctttatacttcttactgcactaaattgatagaactagtacttgtcataatcggttctgtctccgctcacatgactaatacgtaattgcctttccaaaaagatatttttgcctcagaacttactgacaagctgagaggctatgaagatggaaatttgtgaaagaagtagtgctcttatatttggcctcatcatttgggccatttcagtatagtaatgatatcactaatcggaattagcatgagagggaagtaagccaggaagaataaaactgctgaatgtttgtatgtgtaagatatttccaaagattctaaataaatgtagttgcctacagagcaaatggagttttattatatatgaaaaagtgtactttctggatctaattgtgctttttcttcagcattttcttccctaatagaaaaaaaaaaaaagtccaacttttcacaaggttttttggtgtcctgttaaaatctggaatccatgtggctcaggatccatgccgccatgcccagccaacctctaatgtttctttcctggccctttcatgcatgtgcaggtgagtatttgacaaagaggcgatctccatggctctgtcaacctacagctccctcctttccagacactacatgttctagccaacttggctggcctccctgaacgtgaatctctttctcctctactcgtggactctgtgtgagtttccccttcctgagtgtgacatggatactgcctccagggataaaactgggacagttgtagaatttaccttgttttccttcttgcagggatcaaaatcctatgctgcctgttatctgatgtctaaaaatgtttcatatattataattgaacaaatgtaccatcgggttttataccgagacattcagttcccagggaaaaggcaggagacagtggccttcctctatctcaactataagaggctttcctcttttactaatccacctcagcacagaccctttacgagtgtcgggctgggggatggtcagatctttctcatcccacgaggccatatttcagactatcacatggggagaaaccttggacaatacccaaccttccagggcagaggtctctgcggctttccgcagtgcattgtgcccctggctagaaatgaagtcagtccaggcttgggccacatcctcccaaactcactctcttccttccaactttccactgtagcactgcagctgattgtctctggaaccatccagaccaatggagaaaaacatgttcatttagctgagtcctcacaataagataccaaattccaacgtgactctagtatagtttcacatgacagagagcaggccctgaaagaaatccaaagtattttaccccaaaatatattcttctgacatattttaaaatggccctggtgggcaaatctacattctagtggggaaatctacattctgtagagaatcaccttccctttccaggtcttttcctgatccagagagattaactagagtctggcaccttttaaggcttgataagagacatttaccatctgttctacataataagaaccttggtttccacaaccccttatcttaacccagatactcctttctattgattcctagcctttagataataactctttcaaccaaatgccaatcagaaaatctttgtatccacctatcccatctttctgaaccaaaccaatgcataccttacgtgtctagattgatgcttatgtctccctaaaacgtgtaaaaccaacctgtaacccaacaccttgggcacatgttctcaggacctcttgagattttgccttgggccttggtcactcatacttggctcagaataaatctcttcaaattgtttacaaggtttgttttccctgacttatgagagcacagcatccacacattgtgcaaaatgccttgttcttcaagactcagttccctattacaacttccaagaaacttttccccagacatcctctgcaagttttgctaatgcaacttcctctgccattccatgaaacctgttgcttgcttatttttaccttttcaattaacatgttgtgttaaaattacctgtttacagaatctatctttcccaggagatgctgtaattgcccaatggattcaccttgcccactgctgttggggtgatcagacccaacaccaggtcatggggacgacgaagt

SEQ ID NO: 472026 - DNA, 676 bp, Homo sapiens
ccatttccttaggaggattagtttcggtggttgcatgaaggatgttaaatttacacggggtgctgtcgttaacttggcatctgtgtccagcggtgctgtcagagtcaatctggatggatgcctatcaactgacagtgctgttaactgcaggggaaatgactccatcctggtttaccagggaaaagagcagagtgtttacgagggtggtctccagccttttacagaatacctgtatcgagtgatagcctcgcatgaaggaggttcagtatatagtgattggagtcgaggacgtacaacaggagcagctccacaaagtgtgccaactccctcaagagtccgcagcttaaatggatacagcattgaggtgacctgggatgaacctgttgtcagaggtgtaattgagaagtacattctgaaagcctatagtgaggacagcacccgtccaccccgcatgccctctgccagtgctgaatttgtcaatacaagcaacctcacagccctgttaacatgcaaagctgcagcccagagagacaggactggcgtttcccctcaaactgaggactgctcagaaactgacttcataatttgatttgaaattatttcaagaatgaatggattcaagacttcgcacatatacgaattattttttccgtaaggtgtttaaacatgtaaactt

SEQ ID NO: 472027 - DNA, 1685 bp, Homo sapiens
tcatcagttaaggcaggaacaggccattttcacttctttcatggtggaatgtcagcagttaaggcaggaaccggccatctggatgtaaggatgaagctgaagcataagaaagagcaatccaagtacaaagagagagaaaatagatttcagtcagaaggagcagcacctgcaaaggcccagaagtgtgaacttgttgtgttagaagaacagaataatggaggacaaggaattcagacagatgagaacaatgagagagagaaagatttagcagtatttacaccccaccagtttctactaagtgcatgcacacatgtgggctgtacaaacagttcctgggtcctactgtacacagcacagctgccaccagaacacgtggattccccagttctgactgtcctggattctagaactatacacatacagagaggtgaagagagcaaacggggaggattcccaaagaatgccgtagtgagagtgacattgtattttcaatgactttctgtttttaaaagccattagttcttccttggcgaaggagagaggtggaaagttcatgtacatattgtgtcaaaacgcttttgatttaataagtttatcttaaaagaggccacttggaactctgtattttttaatatactatttataaatatttcaacatgctgtttttaaacaatgcatagattaaacatacatatatttatacatatttagctggaggcaagttttgtgcatttctaagcaatatatatgtttttgtacagtttagtgaattaagctagtcagttacgtttcactaaaataaaatctcattatgaagaatttgtaatagttttgggtagaaattgctttattcatttagtggaaatatctttaaggttcatataacatagtaccattgtttcacactgatggaagcttacttgacattaaatttcattcctctttgagacaaatatcaagaagacttttaatatagaaactcttttaagaaactcattactgaaaattgaaatgggctcttttagcacagccaaaaagaatgaaagaaaaaagtcacagttttattagtttgtcttatgtttactatgatattaattattccagccatctcattttaattaaacttttggcaaatgcactagatatatttgaggtaatggagagaattctaataatcagagtgaattattatctctgctattgaagttattcctgtactattacaaattttccaagaaaaaataaatggatgcctatttgataccatattaagcaatcaacaatcttgttatgcttcttacttcacaaagtaccctagttcatagatgacaatgaaaatgttaatgatttattttaattggattgctgtgacatgctgttacatgatttgcatagtagagcacttcctatcatcccaattggttaatacaactagaactacaattgtctattttccacattacaaagctctttgaatgttttgtgtatttgcgtatgttttgtatatttgcaagcagttttaaaatgtactcatcaagcaagaagaatttgggagattttggagatttgtattgacacttccatggtattccaaagtcttgtgtttaattagagtgggatttttagaactttaattgtggtacaatggttagacatttaaaaggcagttttattttttttaaaac

SEQ ID NO: 472028 - DNA, 1380 bp, Homo sapiens
ttcttgtttatataattagttaactcagctatcgtgcttacggatttgctccttggagtttacattccttcagagtccaagcatgcacggccaaaggttgtgctctgggcccactgctgcaaatggtagttctggctacaaaattggctcagcggtgtctcctgatgttctggcaactttaaataagggggacctgcattatcaacctgcatcctgcacagacagtagctacgtggaaaatcgaactctagaagctcctcctgaaggaacagtaaatgtgtttgtcaaaacacagggatcccggaaagcccacgtgaggtgggaagcaccttttcgccctaatggactcttaacacactcagtccttttcactgggatattctatgtagacccagccacagatgttggtttctttattttcctgaaaataacctatacggataagctactgcccgacggttctcagaatgtggttcccagagcagcagcaacagccacatctgatgaacgcttagaaatgtacgttgtagagcttctgccccagcctagtgaatcagaaactctagaggctaaggtctaacagtctgtgtttaagcaaaccctttaggtgacacatgctgaagaactagtatatactcttcttcccttgctaaaaagtggttcaaacctaaaacatcgtgtatgcaaagagttgaactataattttgcagtccatcttaaacaagccatttttgtgactgttttagatttctgaactatcttagtaattctgctgtgtgttctgataaatttactgaatgtggattaggctacatggggttccttgaaagtattttcaaaaactatctgattcaataagttaggtgctatggtagcatgatgtttattttaagcaaactctaccataaaaagagcaggtatatattttaatagaaactttggatctgtattaagtgctgttgtttatcatcttccaggagtggccttactatttttgtaggaggaagtttgaacctttatttttaaatgagtagcaaatatgcaatatcgtggattcagtcagacatgttattagcatgttagtctgttgcttaggcttgaaaacgtttctttgtttctgaattttctatgagtctttgtaatacttaataacatcctccaagtgtaaaaacaggtgaagaaagaaaaaaacaggcttttctaaatttgaaaagggtggttatttgtgtactgcactggcaagcaaatgcgagtcaagtgcgtgtcagagtctaagctgatcccctcaaagattggtgtgtcccttttttatgcaatcagggctttcatgtattctgctgtaaagcacttgtaagattatgaggtgaaggagtgatgatc

SEQ ID NO: 472029 - DNA, 806 bp, Homo sapiens
cgcaccgctgcactccaggctgggtgacagagtttacaacctatgaatatatgctcttcgtacacaacagtgtgggttttacaccgagccgagaagtgactgtgacaacgttagctggtcttccagagagaggagccaatctcactgcgagtgtccttaaccacacagccatcgacgtgaggtgggctaaaccaactgttcaagacctacaaggtgaagttgaatattacacacttttttggagttctgctacctcaaacgactctctaaaaatcttgccagatgtaaactctcatgtcattggccacctaaagccaaacacagagtattggatctttatctctgtcttcaatggagtccacagcatcaacagtgcaggacttcatgcaaccacttgcgatggggagcctcagggcatgcttcctccagaggttgtcatcatcaacagtacagctgttgaagtctgcacaatatatgcctgcgtgaaaagcaatggaacccaaattaccactgtggaagacactccaagtgatataccaacacccacaattcgtggcatcacttcaaggaaatattactcatttgatggccatgagttctgattatcacattctgtttaaggagaccttaatagaatagtgtcagaatatagaatgtaaacagaaagacagaatatatagaaaagagaatattgggcttattattatggctctgctatcactattttcatttccttacctccctcttcttcccaaactcctcctaacttctttacctcttgtagctcccatagaaacagctcggtc

SEQ ID NO: 472030 - DNA, 900 bp, Homo sapiens
ctgctgagcgcccaatttgtgagcagcagaaaccaacactgagccctcgatacggcaccattccttgggggttatcagccagccacctggttgcaggtttattatattgcacctcttctatcatggaaagggcagagaaggctgtgtatgctctgaatcagcatccaatatatggtactgtttctcccttagccaggattcacaactccaggaatcaaggggtggaagtggaagtggcaccactcaccatcacctctaaagatccactagcaaaatttttgcttcctgttcctgcgaccttacattctggtggcctagaggtcttatttccagagggaggaagcctgccaccaggagacacaacaatgattccattaaactggaagatgagattgtcactcagacactttgggctcctcccacctttaagtcaacaggataagaagggagttatagtgttggctggagtgattgacccggactctcaagatgaaatcagtctactgctccacaacggaggtaaggaaagatgaggaacccacagatacggagagctgactgtatatctacacacgaagtttccaattattacatctcataatatgtgttctccatatttcctagtcttaatttatgtttgttgaaaaataattttgtttaatctcaaaatagaataacattaatgattcaataggatttagaatttttgttgaacttggagacatacacgaagtaacatgaaacttttttaatgactaatttgtccccattctctctttcaagacatctgttatttgcatattattattaagcttgaatattttctaatgggaaatgaggtggtgtaactttagaaagtatttttctttaaacaatctccaagctaaatgaatgttatat

SEQ ID NO: 472031 - DNA, 1376 bp, Homo sapiens
ccagcaagtaaagaaggatggtcaagcaataagtctacagctcccagtgtgggcgacgcagaagacaggtgatttctgcatttctaactaaggtaccgggttcatctcactggggcttgttggatagtgggtgcaggacagtgggtgcagcacactgagcatgagctgaagcagggagaggcattgcctcacctgggaagtgcaaggggtcagggaattccgtttcctagccaagggaagctgtgacagacagcatgcggaaaatcgggtcactcccaccctaatactacgcttttccaacggtcttagcaaatggcacacaaggagattatatcctgtgcctggctcagagggtcccacgcccaccgagcctcactcattgctagcacagcagtctgagatcaaactgcaaggtggccgcgaggctgggggtggggcacccaccattgctgaggcttgagtaaacaaagcggcatggaagctcaaactgggtggaggccaccacagctcaaggaggcctgcctgcctatgtagactccacctcttggggcagggcatagctgaacaaaaggcagcagaaacctctgcagacttaaatgtccctgtctgacagctttgaagagagtagtggttctctcagcaaggagtttgagatctgagaatggacagactgcctcctcaagtgggtccctgacccccaagtagcctaactgggaggcatcccacagtaggggcagactgacccctcctatggccgggtacccctctgagatgaagctttcagaggaccgatcaggcagcaacatttgctgttcagcaatattaaatgttctgcagcctctgctgctgatacccaggcaaacagggtctggagtggacctccagcaaactccaacagagctgcagctgagggtcctgactgttagaaggaaaactaacaaacagaacgacatccacaccaaaaccccatctgacataggcatcggcaaggacttcatgtctaaaacaccaaaagcaattgcaacaaaagccaaaattgacaaatgggatctaattaaactaaagagcttctgcacagcaaaagaaactaccatcagagtgaacaggcaacctagagaatgggagaaaatttttgcgatctactcatctgacaaacggctaatatccagaatctacaaagaactcagacaaatttacaagaaaaaaacaaacaaccccatcaaaaaggtaatcaaaacaaggcctgttggagaagacaacgattgagaagacacttaagcaaaataagaaagcaagtcacgtggagatctgagaaagacagcttatggttgaaaaaaacagaaatcttttttggacctttcatttgtaactgcaag

SEQ ID NO: 472032 - DNA, 731 bp, Homo sapiens
ttctcttaaagttctggagcccagaatcttgaacaaagttttatggggctggaattaagataccagcagaactttggcaggggactccattgtggtgtctcagagggagatgaggaacttactgggaactggagtaaaggtcactcttgctatgctgtagcaaagagagtggtggcattttgcccctgctctagagatctgttgcattttgaacttgaaagagacgatgtagggtatctagaagaagacatttataaggagaaaagcattcaagaggtggcttggctgcttctaaaaccctgtgattatttgcataaacaaagaaatgacctgaaactagaactcacatataaaagggaagcagagcacggaaaaatgcctccaaggcatttcagagacctttgcagcagtcccttctatcacaggtcagaaggcctaggagggaataatggtttcatgggccaggcccagggccttgttgctctgtgcagcctcaggacatggggccctgcatcccagccactccacccttagctgtggctaaaaggcaccaaggatcttaaatacttcccagtcctatgtctcacaattctttcttccccctatgcttagcattacaaattttgcccatatatttatgtattagtattcagcagagagcagcacctcattatgctgatttctgggccgttttttactatttatgtccagacttttcacaagcttggaaa

SEQ ID NO: 472033 - DNA, 1162 bp, Homo sapiens
ctccgtgtcttcctcttgctcctatgtaagacagggaatgacacaaagctggtcacatgcaatggggggattcccaagccagtggccacgagaaggcactttcaaaatcatttgaaatccccatgcccagcagcttccagatggtcattactggaagattctttcctgtgtttagatgcagcccagccccctgctgcttcataaaggccacatctggtgggaggccgcagaccctgggcatccagaaggaggcctgccccagccagactcagcacactgtgcagggtgcagagacgaaggagcaagacaaggccctgcccaccaggaacttacagtgtcctcagagtgaccagacacttttccagctggttgggacctgggcagtgcagatagttggtggcctgtccgaggcccacagtcaggagccatatggtattgtcatgggcagcaccacagcccatgtgtcccccaccccaaattaatatgttcaagtcctaacccccaatacttcagaatgtgactgtatttggagcccttggcaaccaccattctactttatgtctctgtgaatttgactaagtatcccatataggcaaaatcatacagtatttgtccttttccaatcagtttatttcacttagcccaagtcctcaaaatttatctgtaggtcagttggcctagcaacatggttgaaaattctgttatttctccatgaacttccctttggatccttgtcaaaaataaattttccacatttgtagtgtaagtcctgcaatactattcatcttttcatagttgatttggctattctagatcccttgaatttccatatgaattttgggatcaccttgtcaatttctacaagaaaagtctgttaggattttgattgagagtgcactgactaatgagcaaatgagaattgacattgtaacaatattgggccttctgattcataagcatgacacatcccttgatttactttggttttccttgatttctccgagcctcattttaaagtttttaatgtacaatatctgttttttggtcaattttatccctaaatatttcacatttttggatattattgtaaatttttttttaaaatttcagtgtccaattattcattgctagtatgtagaagtacaattattatgactatttc

SEQ ID NO: 472034 - DNA, 720 bp, Homo sapiens
atcaaaggaatgcagctataaacagggtgcttacagaggagctgccagtcctgtgggaaagctcagacaacctttaggacctcgcctggaagatgaggctgagtgactcgccgaaatgcacagagcctctgagtgtggacagctgagagccagacacaggctgtccaactccagagcccaagagaaagaaacctctatgttgctgagcaagtgggaagtatgcccagcacacaggctcccttcctggagaggagagactagagttgtgagaggagttccaggtagtgagggtgtgaacctgccttgctatcgggatgctctccttggctgcttagatgtgggtgtacctttttccacagtttcacacctatttcctagggtctaccttttcaaagctttaaagcatttggcccaaggccacggccagaattctagaacaaggaacaggtatactacattctccagaaaaattaaaatgtttaagaaagaactgagtgtggagggcatgtaagaatgcaactgcaacattccagggccaatggcatgaaaagcatcatcacaccaaagcattgtcacaccaaagcatcgtcacaccaaagcatcgtcacaacaaagcatcgccgtcatgtcgaattattggttgtgcttaactttggttaatcactgtttgctcctccctacctttactgccccgtgctagattcatcatctgctgttctc

SEQ ID NO: 472035 - DNA, 804 bp, Homo sapiens
gcagcagatctatctaacgagatgtgtaataaacttttcctcaatctgcaggtggatgtgcttcctaagaagtaccgccttgccctgttccaggaagtcaatccagacttcatttctcattttgccacaggcggcggccagatggacgcattgggcattggtcactgtgccgttggcggctggggcatctccaggacgtctacactggggttcggaggcaaggccttagaagaacgagccttgccagctctgggcttccagagcaggggttttgcaggagagtcagaggttttccagtgccagggggccctgaaagcaacagccacctgcagaggcggcccaaggagaggcagtggtcaaggccccccgacaggtctgaaatgccactcaggaccacagctggggcccaagcccaagccactgtctctgcctgaccactctgcagggacagccccgccaagccctggaacatcgacctgcctgcccctctggctcttccaacagcccctgacaatcaatgacactgaatcctgtcaatagggcagggccaggggtctaaggcggagaaataatcacagtcttgttgctgccaacattgcagggacagattttcattaacccagtgggcctctcccggagcctctccacgtgatctccacccacaggcctctaactcttcatccctccttgtccccagctccctgcttgcaagagtggaactgtcaagccccatggctttaatcccaatattgtctatgctgtgggcttgcagcttggttccaaggagttgttttttttttaatg

SEQ ID NO: 472036 - DNA, 2921 bp, Homo sapiens
gactgtgctccttcgaggagccacctggggaagaagtgggaggcagagagaatccaggagcttacttagcttccgtgctgtgcatttctttaaatcacaggattcttgcaattttctgagctgtcggttccccacttggcgggattttgggctctgaggtgggaattctgcctgggaagccctgcagaggggaaatgaaccgggagcagccctgggggcttggctctctgaggaggtggcctgtgaacaaaaagaccagcagcaggggtgggtgtgagccctgtgggtctgtggagggagagcatctgaggtagacgcgatggagcagggcagtgagtttgaggaactcgctggagcaggttctggggtctgagatggaaaaagaacttttttttttttaaacccacttttgggaggtggaagaagaggactttctttccaaggcaagggctgtgggaagggggaaggagggagaagaagtggcctgtgcccgggctgcccacgatctgaggctgaatcaggaaggctgctgtttgggtccgtggtccttgcattgaattagtgtcgcggggctgccacaacaaatcaccccagactatgcggcttcaacagcaaagattcccatctcacagttctggaggccagaagtccgaagtcaaggtgtcagggccagaatcctcgccaacatagtgctccaggcggctgctaccaatcctggtgagaaaaccccactcaatgtggcttacgcggaaaaggaagcacattggttcctgcagcggaactaggggtgcacctggcttccagtgcccagttctctctgcactggctggcagcttctgtgttggcttcaaacaggctctcctcctggggtggcaccgtgcagctcagcctcccgtccttccaggtccgggtccggtagctgccactgaaacccacggtccactgcagtcaaggggctgcaacggcactatgggccagctcgagtcagctgtgacctccggctcagggtggagccttttcccagcacgagggcggagcatgcaggagggcagcagctcagcaagctcctgggccctccctggttccgctgatgctcgctgcgtggctgagccacctgctaagccacactggctcctgtgctcattctcccaggtacagtgtgttccgggtcaccgggtgcctaaacacaaagtgtacttatccatcggcctgctgcctgctgcttgcttcaagggccgcccagaagcccaccctgtttctccccacctgctctggagcaggacgttgcctgctctcacctggaaaatccggggacagcagagccctgagaccgtcgaggccagagatcctgtccctgtgtccgagagcttcatggtcccctcccatcccctgctgctgaagccccagttgggctgtgtgctcagatagaagtagggtgagccccccaccctctgccccacctgtctccccacggttgagtttgctgccctggttcccctgcctatctacagccaagctaataaaatcctgcagtttccatagattgtagggtcccgccgagccctccggctgctttagtttccagttggttttgcaaggagggggaaaaggcaaatgcctatcactccacctttggaaggagacgatgaatagtaactcctttatctctgaaggagatcttttcatgcttgaaattccctgatcttgtcccagatctgcctgcagggattcaagatggcatcccccaccccatgcggatttgctgacatcctcagatttgtgtcaggcacaaggaccaggtccctgggggaggctgcttttcccaccctcagtgctgactaatagaatttcaatatttggtcttaaaaccacggattcttaaaaactgctggagaaagaaatctcagcaagataagaaagttaaaaaacatctccactctccctgcagctacaggaaaacacattctggtctacatcaaaaaatccatccttgtaaatattattttgaacaagagttttggagacttcagaacagttgcaatgatcaatggtaaataccttttactccttaaaaaactccataattctgtttgattgtcttacttaataattgattactctggtaatagtatttaaatggacattcctgttttctgaaaggtatacatacttgcagttctatagagtagccttatctcaggatattgcattcccaacggattctatagttattctacaaggaaggagggctgggaatggtcacctggtctacactggttcatcagattaccccatccatctgtcacagtgaaatgttcaggtttagatatgtgacccaagcagaaccatttgaatttttcctggtgttggtctatggatttggggaaggaattttctgggaggatacatggactctcgataccaaaccggctcgaatttgtaagattcttcctgagcctctgttccatgccaggcattgtaataaaactgggggtcaaacatgagcaaggaccctgccctcaaaaatagctatgttgctaaatctcatttgcttttatggagcctttgctctgtgccaagtgcctcccaaccttgccatattgaatccttaccggaacactgagttaggtgcatctttggtcctttctgatggatgaagtaacgtgcggggacagagccaattaccaggtcatgaacaacacagggcagaggaagtacagcgctgtgtgttcatataccgggacgacgaacccagacttgggcaccaatgaaggcttcctggaggaagctgcgtcctgaaggagaaggggaggctatggaggtgtagcaggtgcaggaggagtgtttaggcagcgatggagccacagctcggcacaactgaggaactgaaaagttggttctgctgaggcctgaggtgcaac

SEQ ID NO: 472037 - DNA, 1653 bp, Homo sapiens
ctctgtagcgtaaccagatcaaccctgaaggcgctcgggcaggcagagtggagtgactggggacagcccgggaggaagctcttctctcctccccatgcaaaccagtgcggggacagagccaattaccaggtcatgaacaacacagggcagaggaagtacagcgctgtgtgttcatataccgggacgacgaacccagacttgggcaccaatgaaggcttcctggaggaagctgcctgggagtcagttgacctatacaaggaccagcgcaacctggctccaggccacacgttggctgaatgctcatctgtgaaatgggaactccactcacaggagcatgagggttacatcagaggtgtacatgtgccacggagccctcgccaccctgggggagatgacagtgacatagggcctggctcctccaccctggacctgcctgccccaaacccccacaacacgctgaaaagacagaggccaggggaaggaagaagagctgtaccacaaaaggagatgggcgagcctgcaggaggaaccaacgctgccaacaccttgcttttggacttccagcctccggaactgtgagaataaacttctgttgtggaagtcacacagtgcgtggagctttttcgtggcagccccgggacacggacacgaactctagaggagagcctctggcacagtcagtgccgcctgctaggctcactcattgcttgtttgatgtctgtcttcactttgcacggtgggccaaggtctgacagtccctcaacaaacactcgctaagtggaggacacaatggtgtacatctgtcttgcatccccaggcccccagttaatatttacagaaggccaggagggctggcctggaaaccccctttgatgtctttcccaccctcagggattcattccagctcaatctgagtccacactcatgaagcctggtggcaatgtctgtctccagggaaagagctcagtgcccagcacaatactcagcacaccaaaggcatcctcaaaatgccccctctgtggagccagttggaccccttaaagagagaagcatctcttgaaccccacctcccctagggtgccctgtgacctgttccaggagggtcggtcaccctccagcccactcacctctccctctggcaccagccccagcctttgcgccacgttcaggctgggcagcgcacaaggtcacttcaacttgagaaaagcggtagagacagcagtgcttaaaatgctcgtattaacagcagcagtctgcaatcctatgtcattttaatagcaaccttctgccgtgagcaggcggccggcatggcagctcctccccacaggggccatcccccaaaacatccactcagagtcaggtgggaaagacaggggcttagatccatgaggaaagctgtgctgagccccagagcccccagagagggcctttgaggggccccttgaggctggggtcaggggtaggacatgcagaagcccaagccgggtccttctgtcttctctggccaagaccaaaaggcccagggagggccacagggccattcagcactggccgccgtaaagctgaaggggagggttgcgggggggcggggttagggggtgagaggtccccaccctggatccactgtgctcttcctgtatgattcccgagggc

SEQ ID NO: 472038 - DNA, 592 bp, Homo sapiens
ccctctccaacctcttcttctcccacctgggtatggcaactgcatgcttccagtcgcccaggccaaaaaaggctggactcaccgcccgcttttatgccatgttccatttctcttctgcccatcagctgggcctccccacggcccgatctccacggttgttttatggaagtgcctaccccatgctctgcttcaacactcgataccgactcatcagatgcttgtctggattcctgaagttgcctcccgacccttctcctgctcctccgaccttcctccccgcagctggacaggacacagcagccggggacctcttggtaaaacacacatcggctcacgacttccctctgctcgaaacctcctgcgcattcccatctccgagtgaaagttccagccgtgctatggcctctgtaggagacgtggtggcttcaaacaacagaatgtatcctctcccagttttggagcccagaggtccaaaatcaaggtgtcagtgaggtaggttagataggtagtgtggtcacagcccccgttagaggggaacaaacttgccaaagagatggagagaacaaactgcccaacagtgcatcagctgtat

SEQ ID NO: 472039 - DNA, 761 bp, Homo sapiens
agccccttctgatcagtcttgctttttgatgtccttgacagaggaactggcttctctggccggagagctggtcttttaccacctggagaaacttggacccctgggagagctcactgacagcaatggggctttggggcagagacacaagacggggagcgggcttcaccagaccctccgtgaatatcttggagatgagaagtctgagcaactgcttccctcaccatactacagaatgacttttccagggactctggtgtccgccacctactgcagaatgtactcttccatcagcaaggtctatgacaacatcaaggacattgcccgcttccgcagttctgttcctgcatacagatatttgttggcccatcccggtgtccagccaagagcaccgagtcagggcagcatgaagaaggtgggctggggaaccacactgtctgggttctaatccctgcatttccacttcccagctgtgtgaccctgggagctttcctttcccttcctgtgccttgggtacctcacttatctgcaaaacaagcatcatccacctcgcagggttatcgtaagcatccagtgaagtatcacacacaacatgctcagaacagagctgcctatattgtaggtcactgtgcgtactttagtgatttttgtcatgagacaattactactctttttgtttgttgatcaaagtatttattgcatagacctttccaagcagtgctgtttcattgggaaaactgccagggtttagattcctgctctga

SEQ ID NO: 472040 - DNA, 3136 bp, Homo sapiens
gcgtgagctcccctaggaggccgggagatcccttgaggcaagagctctctcctgctcctcttgctgtgcccttctcgcagtgcactcatagcctggcatgcgtgggcagtgatgaacttcgaagctgtgctacactacaaacatcagaaccaagcccgcgatgagaagaagaaactgcgtcatgccagcggggccaacatcaccaacgccaccactgccgccaccacggccgccactgccaccaccactgccagcaccgagggcagcaacagtgagagcgaggccgagagcaccgagaacagccccaccccatcgccgctgcagaagaaggtcactgagaatgcgccagggccgctggcaggcccagagatccgggtgttcagagcctcagctccacctcctccctccatcctgttcaggaagccactgtcagcccaagataataacagttatgatacagatctgtccaaaaccctcctgatgtacacggtgcctgccgtccagggcttcttccgttccatctccttgtcacgaggcaacaacctccaggatacactcagagttctcaccttatggtttgattatggtcactggccagatgtcaatgaggccttagtggagggggtgaaagccatccagattgatacctggctacaggccctcatctacccactgacagtggcttctaagtctaccacgacagcccggcacaatgcagccaacaagattctgaagaacatgtgtgagcacagcaacaccctggtccagcaggccatgatggtgagcgaggagctgatccgagtggccatcctctggcatgagatgtggcatgaaggcctggaagaggcatctcgtttgtactttggggaaaggaacgtgaaaggcatgtttgaggtgctggagcccttgcatgctatgatggaacggggcccccagactctgaaggaaacatcctttaatcaggcctatggtcgagatttaatggaggcccaagagtggtgcaggaagtacatgaaatcagggaatgtcaaggacctcacccaagcctgggacctctattatcatgtgttccgacgaatctcaaagcagctgcctcagctcacatccttagagctgcaatatgtttccccaaaacttctgatgtgccgggaccttgaattggctgtgccaggaacatatgaccccaaccagccaatcattcgcattcagtccatagcaccgtctttgcaagtcatcacatccaagcagaggccccggaaattgacacttatgggcagcaacggacatgagtttgttttccttctaaaaggccatgaagatctgcgccaggatgagcgtgtgatgcagctcttcggcctggttaacacccttctggccaatgacccaacatctcttcggaaaaacctcagcatccagagatacgctgtcatccctttatcgaccaactcgggcctcattggctgggttccccactgtgacacactgcacgccctcatccgggactacagggagaagaagaagatccttctcaacatcgagcatcgcatcatgttgcggatggctccggactatgaccacttgactctgatgcagaaggtggaggtgtttgagcatgccgtcaataatacagctggggacgacctggccaagctgctgtggctgaaaagccccagctccgaggtaggccactgggccctgcagacctgcgctctcctggaacccccactcgcaataggatggccctcccatctgttcatgtgcacacagcggctcttctttgctgtgattggctgtagagcacacccatccaacctgatgctggaccgtctgagtgggaagatcctgcacattgactttggggactgctttgaggttgctatgacccgagagaagtttccagagaagattccatttagactaacaagaatgttgaccaatgctatggaggttacaggcctggatggcaactacagaatcacatgccacacagtgatggaggtgctgcgagagcacaaggacagtgtcatggccgtgctggaagcctttgtctatgaccccttgctgaactggaggctgatggacacaaataccaaaggcaacaagcgatcccgaacgaggacggattcctactctgctggccagtcagtcgagtgtttgtagagtggggtgggcttcagtcggtgggtgcatcccgcaggacgttacagaggctctcccccttgtgcagagtgtttctagagtggggtgggcttcagtcagtgggtgcatcccgtgggaggctgcagaggctctcccccttgtccagagtgtttctagaatgggatgggctttgttattgacagtaggaggcataacttaaagtggtaatggctactgaacatgaaggaagtaaatctagttttctcgtggttcttgacagtgatagttttgcaaagcaacaccctacatagttcatactttgggaattactgttagggtgtaaaaaagtatatcttttctacaaatgtttacagagcacttacaactagttaataaactaagccaaataatgtctaggggtgcaaaaagaaaatgtgagggtaggtagggcaggcgttaaaggaatagagtgcgtagagaattagatgctaacaccaacagtggctttttggtgtttgaattttctgttaattgatttcttttcccatagaaattttggacggtgtggaacttggagagccagcccataagaaaacggggaccacagtgccagaatctattcattctttcagtcgggacttctctcatgatgacactttggatgttccaacgcaagttgagctgctcatcaaacaagcgacatcccatgaaaacctctgccagtgctatattggctggtgccctttctggtaactggaggcccagatgtgcccatcacgttttttctgaggcttttgtactttagtaaatgcttccactaaactgaaaccatggtgagaaagtttgactttgttaaatattttgaaatgtaaatgaaaagaactactgtatattaaaagttggtttgaaccaactttctagctgctgttgaagaatatattgtcagaaacacaaggcttgatttggttcccaggacagtgaaacatagtaataccac

SEQ ID NO: 472041 - DNA, 1448 bp, Homo sapiens
gactgctcaaagggatgggagcccctaatcaccagatgttgttaacagagcgctcgaaagtgccaccctaatcgcaggcttcccaacctaatcgcaggcttcccaacctaatcgcaggtgccccaccctaaacgcaggcttcccaacctaatcgcaggcgccccaccccaatcgcaggctccccacactataatcagacgccccgcccgccgcttcgacctggcgcatgcgtggtgcgcacgcgtcccgtctcctcggccgacaagctctcgcgagacgagccgtgcaggctgaaaaaatggcgccacccagtacccgggagcccagggtcctgtcggcgaccagcgcaaccaaatccgacggagagatggtgctgccaggcttcccggacgccgacagctttgtgaaggtgagttcgcggggcctcgggggtaccaggagtcgcccgcggccgccggaagccgactgggccctctgggcagccaatgcccgcccgccgtagtggagcccgagcgagggtcgcggggcccctgtccgcgctgggcgcagactctcctgcaccctccggggatggggcctcggaaacggacactgaggggcgtcccgcttgcgagcctaagtccatggaggcccaaatgtggaaagccgtctcgcatcctgggaaaggcttccttgccacccagacgtccctagcccttgcgacgtcgcgctcgccacgccctagccacccgaccagctctccgcaggggctcggcttcttcgcgctccccacacttgcctggagttgtctcctcccgcggccatttgctcttgggtccgtggtggcagtcaccaaggcatctgggggcctaccacagtttggcgatgagtatgatttttaccgaagttttcctggcttccaagcattttgcgaaacacagggagacaggttgcttcagtgcatgagcagagtaatgcagtaccatgggtgtcgcagcaacattaaggatcgaagtaaagtgactgagctggaagacaagtttgatttactagttgatgccaatgatgtaattctggagagagtgggtattttactggatgaagcctcaggtgtaaacaagaatcaacagcctgtcctccctgccggcttgcaggtccccaaaacggtagtgtccagctggaaccgtaaggcagcagaatatggcaaaaaagcaaaatctgaaactttccggctgcttcatgcaaaaaatatcatccgacctcagctcaagtttcgagagaagattgacaattccaacacaccatttcttcctaaaatcttcatcaaacccaatgctcagaaacctctccctcaagagccagagtctgtctgggcattcatgcctttagccccagctctgcaatgtgaggccacaagctaagtgctggagaaacaaaggccatgaaaggcagccctgccctcctgggct

SEQ ID NO: 472042 - DNA, 1955 bp, Homo sapiens
aaattcagtgacgacgtctggtaatgattgagagtgactgctgactggaggattattattgtttccgtcttcaaaccacagctcgcagagccagcgaccacatgatgagaaacagccatgcttcttagattttggcaagggtggctaatgtaaaaacggcccatctccaaaacatgatggatgccacataccccatggtttccaggatgaagccagacactgtctcttccatagtacctggagcaaggagaaactttcaaaaacatctgcaccctataaggttgaagatgggttggcaagaggaggacgtgcttgtgggaatcatacttgtagactgtgttattgtccagcctctcagtgggatcagaaagaggttggtttgtctggcaattgccagaacagtgcctatccgtgacctcttgtctgagcatctgccagagaaagctgtgatctctccagggaaagccagagcagactgcgaggcacctgcggaaaaacgcagcatatgcgcataccctagacacagacgtcatggtgttccgcaccagcgacttaacattcaccagatagttactgaatttttactctgtgcctagtagtcttctaggctctgggaatgcattaggttgtcctgaggcttatgaagccacctgtgatatgtaactttaacaagcatgacaatttgtttactggacattagaaacttctaggccccatgaccgccattctagaagtggccgatccatgaccactccaggccccatgaccgccattctagaagtggccgatccatgaccactccaggccccatgaccgccattctagaagtggccgatccatgaccactccaggccccatgaccgccattctagaagtggccgatccatgaccactccaggccccatgaccgccattctagaagtggccgatccatgaccactccaggccccatgaccgccattctagaagtgggcgatccatgaccactccaggccccatgaccgccattctagaagtggccgatccatgaccactccaggccccatgaccgccattctagaagtgggcgatccatgaccactccaggccccatgaccgccattctagaagtggccgatccatgaccactccaggccccatgaccgccattctagaagtggccgatccatggctactccaggccccatgactgccattctagaaccatgctgattttactacatggctcctttgttgaaatgttttggaagaacatggtgtggtagtcaggcttcaacctgatcccaatgattcctgcatcccgaggttcacacccttgggcactcccctcccacactgcatcacagttggtgtgtgtgaccaatagaatatgatagaaatgacggcaggccgtttctgaggttcagttgtaagttggtgtgtgtggccaatagaatatgatagaaatgacggcaggccgtttctgaggttcagttgtaagttggtgtgtgtggccaatagaatatgatagaaatgacggcaggccgtttctgaggttcagttgtaagttggtgtgtgtggccaatagaatatgatagaaatgacggcaggccgtttctgaggttcagttgtaagttggtgtgtgtggccaatagaatatgatagaaatgacggcaggccgtttctgaggttcagttgtaagttggtgtgtgtggccaatagaatatgatagaaatgacggcaggccgtttctgaggttcagttgtaagttggtgtgtgtggccaatagaatatgatagaaatgacggcaggccgtttctgaggttcagttgtaagttggtgtgtgtggccaatagaatatgatagaaatgacggcaggccgtttctgaggttcagttgtaagttggtgtgtgtggccaatagaatatgatagaaatgacggcaggccgtttctggggttcagttgtaaaacacat

SEQ ID NO: 472043 - DNA, 677 bp, Homo sapiens
cagcccagatacgcaggtgatttagccaaggctacatgaagcttcgaaatcagcagaggtcagtgtatgtggagattgctggtaataagtctggaaacagagcagaaggttgcaggttggaacctggcttccctggaagccaacactcaggtggagctgggcatgcaggatgtttactggaaatccacacccgtagaaaccaggaggatgcaggattgtaccaaggaaaaagtcaaactgccacacaggccaacaaagccttggccagccccacagggaagcgctggagcataaatggcccatcctcgtgtcctgtgttggacttgatggctgggcctttataccctcactgctatcagtctttggatgtgaaccaccttgggaagggcaggcccttggccttctgcagcattctgtggctttcttcagtggaagcaaatcctgaagaagctgtcagctggaagccaattgcccacagctggggcaacaagtcctcccttgaagcaagatctagaaggcacatctccatgtcccctccacatggccccaggattgctgaatttggggacatgtaatgatgactgagagatcatatagtctacataaaacagctcatcatcctagaatgagaaagagagaaaccagccaataaagaagggcagtgtgtataggtactt

SEQ ID NO: 472044 - DNA, 665 bp, Homo sapiens
agctgacccgaaggcttctcctctttcctcttttgtgggggtgctggctgcaataggaaggggcagcgtggctcagatgtgggcaatggtgaccacactgtgggcctgccaccattgaaggtggagcctgtctctgctggagcagccaaggcaggctcaggatgcaagctgtcagtggttctacccttcaggggtctggagggcagtggcccccttcccatagctccactgagcagtgccccagtgggaactgtgtgcgggctccaacttcacatttccccttggcatcatctagtatctctagccacggcccaagctgtacctggggccctttgagccttggctgtagttggagcagctgggatgtggggagcagtgtcctgaggctgagcagggctacacaaccatttaaccagtctctaagaagttccaaattttccctcatcttcctgtcttcttctgaactcccaaactcttccaacctgtgccccttacgcaattccaaagctgcttccacatctttggttatctttaaggcaatgcccctcttctcattcccagttttctgtgttagttcattctttcagtgctctaaagtcgtacctgaggctgggtgatttataaagaaaagaggtgtaattggcttatggttctgcaggctgtat

SEQ ID NO: 472045 - DNA, 712 bp, Homo sapiens
ccaggccctcctccttgaagctgggatttactgaggcttctgtttcccagggagctgcatggtggctttgtgggtgctggggaaaagccaccaccagctcaaagagatgggatttatcaaccagcgccagccccagggccgggcctgcaccctcccatggcccagaaccagctgccaccatctggtccatccatatttctctgaggacagagctggcgagggaccagcccaggaaggcaggagacagagcgtctggagccagaagcctaaagacaggttaatccacatcctgtggctacagacaggcccaggggataatttggagaaaggggacaggcaagtatacagccaaggggcctggactccccatgtggagccacagactggaggttccgtccctccttgcatggctgtggctgctgagcccccactgggcaacaagaggctccagagcaaagggccagtcctgccccagcagagggagcttaaagggtaccagggctgggaatgtggggaagggcagacccatggcacctggcttcaagtcaacgccaagcaaatacctatgaacctggagccagggtccctgggggcccaggtcagtgatctgcagagccatctggctgatgccttggcctgtgctgggaaggggagggttaaggcttgagcagcccttcctggttagtgtttaacttgcagtttctgaaggcca

SEQ ID NO: 472046 - DNA, 663 bp, Homo sapiens
gacagcataaggtcaaccaggctgcagcttttctcaccctgaagagccatgcccgcagggcaatttgccccccacccccgcctggctgctctggccttagctgtgcatttgcctcttgggtgtagttgctcatttgtgtcaataacaggcttgacttccaagcctcctgccgctgccttccgggccccacctaccacttcccagggctattttgggcaggacccagtaaagacctggctcgatggtgagatgctgcctggagatgcaggttggagggaggggtcctcagagccctacttggccctgcctttccaggtggtctcacctgtgtccctgcagaatggtgagctcaccccaggaaaggagtgcatcactgagtggtggccgaaccacttccaaatacttctagaatccccacttctggctccactagagctccactgccgctctgccctgagcttccgtcagctctcctggaccctgacaacccaggggctactctcctgcttgccctctgatccctgtgcacggggttgaagggtgtcttcccagattcgtgcccacccagaaccttaccataatatttattttttaattgattaaacttggtgattactatttttaaactacagatctccttctttttttttttaatactttaag

SEQ ID NO: 472047 - DNA, 886 bp, Homo sapiens
tgtttttcagaggccaccccctagtgggctcagagttcctaaaccccatgccttcccaagagtaatttatttagccttgcagacaagctaatttacagaggagcaaatgtcatgggtgcatcctggactccttgtttctgttcttggaagactggtctcagagagcgatgacaataacggtgatgaagatgataatggtgatgtcagtgatgatggtgatggaagtgatggtgactatgatgatgataaggacggtcattatgacaaaagtattgatggtgatggtgatgatgatgatgatgatgatggggatgatgataatgtgatgaagattatagtgatgatggtgatgatggtgatggtggtgatggtggtgacgattgggatggtgatgatgatggtgtccgatgatggggatggtgatgatgataatgttgggatgaagattatgatggtgatggtgatgttggtgatgataatttatcattacatgcgaggaagtgccaaatcctctggtagttgcccaggatgcataaatggaaagtacaagcccgatcacaaggacttaaagcctagtgaaaagcaagaaaacctaatgtccacaaaatctattgcaataaatgcatgacagagaaagacagcttgtgccacatagatggccatgaatgtgaagataagttgtgagattgggatatgtgttggaagcaaaaccagcgatgtgtgttgacgaattggatataaggcagggtttttcaactttggaactactactatttggggctggatcatcctttgttttgcgaagtggtcttttgcactgtggaatgtttagcagcattcctggcctcggcaagctagatgacagtagcattacctccccagttac

SEQ ID NO: 472048 - DNA, 867 bp, Homo sapiens
cccaaaggatcacagcagtgtgcaaaagccaaaccagagggccagagctggaagtgagaggtggggggtaatcaaccagatgagaagatcaagttctgcagccattgttgaaatcaaaatagtcatcatcactgtcactatcatcattctccctatgtgccaggtactgtcctatgagctgggcatgagctccctcatggaggctttccaatgccccacaggctggacaggaagcatggtgccagtgtctacttctgatgaggcatcagggagcttacaatcatggcagaaggtgaagggggagaaggtatatcatggcgagacaaggaacaagagagagaagcctgagcaacagagcaacctgtttcaaaaacaaaaagaagaagaagaaagaagaagaaggaggagaagaagaaggagaaggaggaggaggaggaggaggaggaagatatactatatgatctatactgagtattacacctaaacaccatgttggttgtctttgtgcgggttgatgagaagtttgagctccatccccaatctttacagcatttttcaaatttccttaaatgactgtatattgataaatgaatcaatatacattgattgtccaaagcacaacattggacaatcacaatgtttgtccaaagcacaatgttgtggaaacaggataggtcattgttgcacaattttccctcttgacttcttctttctcctgtcttttctcccgaaccctctgatggggttggaaacaatgtcacacattaaagtaataatattttggaatcaatgttctaacccttccacccccaattctcctaacaatttgtggtcagtttctcttctccccacattctctcttctctg

SEQ ID NO: 472049 - DNA, 3204 bp, Homo sapiens
gccatctcacctaaccttgtattcagcttagcagcagtgtgtgctttgggtagaagctcacacagggggatctccaagagctgatgaagcaatcaatcatttggcttccagagttctcttccagtgctggggagaatcggcaatcccccctttccctgcagaaagaacatggtgctctgagttcctgggccatcgttctccctggaggggctgctgaagccacaatgctctgttcagtcttctcaagaattggcaagaaagagccttgtgcattgaaggccactgaggtcatgtcctcctgggtctgcagggctttcctcaggagacaggacttttccaaagccttggacccattctccaagacaaactcaaaggattccacagtcatgtccacggcaccttggaaacttctagggcagcacagccccctggaatgctccagggtgatgggaacattctatgcctctattgcccagtgcggaagctaccagccacatgtggctatgagcacttgcagtatggccagtgtggctgaaacactgactttccaatggtatttaattcggaatcctggattcagggcactcagtgtctctgctcttgaggtcaaaagccaagaacccaattcagaggacactctgctgtgatgtctcccagggctgctcctgctggtgggagcctcacccccctgggaccagccccagaaccccaataccttcacacagccctttccctccatgggtgtcgctggccctaaaactactgccacgtgtggctcctgagtcttttcatgggggtcagaacatttccgccatgtagctgcctctccagagccagggacagcctgtcctctgattgggggtcaccatgggccacccctggagctcgtctttgtgttgccagcaccaggcggcaccttccactgtactctgggcttttgggtccctccacaaagcgacatcttgattctaccctctcccgtgcctcctgctaagagcgtcagcctttcagattgggtgggattgttggggatggtggaggcttaaggcagcgaagaaacatgggccttaaatgggagtttggaggggctaagaaggacttagaggccctggagaccccagattccagctctgcctacttgaccatggggcaaacccatccactgggtctactaagagcccctccctcccggcactgtggggagagctgaggagttgatctgtaaaagccctcagccctgctgtgtttggaaaaaactctccccagatctgagtgccacatttatcttttatttttccacaggtgatcagagtggtggaacttccttcttcatttcccctgcccctaagtctacactagagtaaccccttgaagattcctcacaaataaacacctgcccaaccttgacagtgaggttcacccttgtgtttgttggttatcccacctgggaagggacccttccctcctgtggcggggggcaaaatggaactcagtttgcctcctctttgggggaagggagtggataagaggatcatggaagtacatgtgaattaattaaattaaattaaattcagattttaattaaatttaattcacattttaaactaattaaattaagtcacattaaagtcaaattttattcagccaaatttctcttagaataaactcaatcttttttgaggctcctaaggagcccccagtggacagatgtgtggctgtcagcagctgatcagaagagtcctcttgtaacacaattggggagaatagatttactgcctttgtaaacatttctgattcctccatgaactcccacaaccaataaaaagcaataaaaagtgaaatgacacacaaattgcatccccaaagggctgtaaaggcccaagatgttgctgcatgcaatgatcagatgagattctttgcctttaaacaaataaccctcattaacaaagagagatattcaaatgaggaggagacagggccttggggggcctgggcagggcaaggaaagaatgttctttccctgaatcttaacacagctggcacctctcatctttcccctcctcagacaggactggcctgcccacccccacctaaggcacgtactttgtgtcacaacagcctttttaagtttacctgtgtctcatctaataatcatctcactattgttttaacttgtattcctggatgcctggggatgctgcccagccatgcatgtgtttattggctgcctggaactcctccaccgtggcttgcctgttgacagtctttgcccgttttaatgttgggttgtctttttcttatgatttgtagaatttcttcatgcattatgaaaagtattactatatcttataatcaccagtctcctcccctaatagttatttcttttatttatgatgccttttgtctgtggtcaccagccatacagaagttatagttagatacagtcaactgtgataaccttttcccatgtgatttctgctttggtcttgtttaagaaatcctttctgatgtggtatgctgaaggtggcctatcatttcttccgatgtggtatgctgaaggtttattttccatgtttggtttcaaattcacttagggcttatttctgtacatgaggtaagcatctattgtattttctttccatatggctggacatttgtccctgcacaatttattgaatggtcccacagatttgtaatgccttccatatcagttaggataaagatctactgtgagaaacacaaagccccaagataaatggctgaaactagatagaagtgtatttctcgctcatgtgtgaatctggggcagcctttcttgggccagtctgctggctctgccaggaatccaagctccttaattcctagggcatgactggaaccttcatggtccaagatgaagttctcaccaacccctgagtttccaggtagcatcatggagagaaagagggaaggagggtcaaggacaggtatcagctgtatgtattctaagccaccgtccagcatttctacttcttcttttagccagactttttttttttgcaaaggatttggaaattctaagtagcccattctcagacttagagtggacatccagcagtctctaccacatcttccgtatcttatgccaaagttatatatatgcaaatatatatttctggatttttaattctgttctgcatatctagttgcctattcaaatacgat

SEQ ID NO: 472050 - DNA, 1301 bp, Homo sapiens
ctggcatgtgaagtgtgggcagcctctgggactgagcccttcacctgtggggtctgatgctacctccaggaagtgaagtatgggtagcggtgagagtaagagcctgactggttttgcttctctgtttgcttctctgtggcctcatacagagtccctggaaaagaacctgagttatctccagggccttcagacttttgctcagatcctcaatttggatgaaaagagaaaaagaagagcagtttccagtgtgacgcatctgcagtcccatggggagaggctgctggcttgctccaaaagggacctgctgggtgcggggtggaacattctggtgggttctcaatttgctgcatcccacggcgtgccccctcatgtcttcctaatggaaaacagccgtgggatgtgtcttcatgacattgggatggccacacagaagcaggtcaccaggaatggcagtgcctctgaatcctggtgcaattggaccagagagtcagtatctcccaaatgtatgggaaagtccccatcccaagaacagatcaagaaagtcttttctgacttttgccatggacaaaacaggcctaggagggcaagagagtgctgagaagggcctgggtgggcagagcattccacagaaccaagggaacactctttgtgcacaaagaacctctgtaacgtttccttgctgctttttttcccccttcaaaatgaatttgtcctgttttaggaaaaggcacttaagaggacacttgggcttcttcctcctcttggctcctgtgggtaatgctgctgtgaacacgggtgtgcaggcagctcttcaagactctgctttccactcttttggtatacaccccgaagtgggattgctggatcgttggataattctacctttaattttttgaggagctgtcatactattttccatagcctctgcaccattttacaattctcaccaacagcacatagagttctgatttctccacatcctcaccaacacctgttattacctgtttttttttttttccatagtagccaccctcctccccctgcatttgccaataaagttttattgggacatactgggacacaaccacacccattcatgtacatattgcctatggctgctttcccgctatagtggcagagctgtgtcattgtacaagaccacttggcccacaaagcctaaaatatcgatcagcttgtcctctacagaataaatctgccagcccctgacacacacacacagattcctcagtagaattcctggatttgcagtggcttctaagatcccccagtgtaactgagag

SEQ ID NO: 472051 - DNA, 1216 bp, Homo sapiens
tttggttgattgttgatgcctctgatggtccttaagcaccatcagctgctacagtgaggaactgtgaagacacagtgcctaccttccccccacttcctcatggacagtgtgtcaactttcttcactgccctgtggatgcagtgccaacctcctctactgccccatgagtacagtgtcaacctttcccattgccccatggacagtgctaaccttctcctactgccccgtggacatagtgccaatcccctttcactgccccatggacacagtgccaccctcctctactgccaaggggacacagtgtcaactttccccactgccccctggacacagagcagcagagaacggagctgcctgaccacccacagaggggctgcaggggagaagggagtggcatggctaggtgtcctccctcggctggccgggggcagtaagcagggctggacagactgtacctgtctcccctggctggaggaagggaaaggccggcggctgcctttcctagtctgctgaatacactcgccagccatcgcccttccctgtctgagtttctggaggttccagcaatccttggcgatcctccacgtgtgtcggcatctctcccatctctgccccatcatcacatcatgctgtttgtgtctctcctcctctttgtacaaggacagcagtcacattggactagggcccacgctaatccaggatgagctcatcttcacttgagtatatttgcaaagatcctatttctaaatcaagtcacaggcccaggtactgagggttaggacttgaacatgccatttgtgggacacaatccaagtcctaacaactgccaggtggcctcatcagcacttgggagcaaggactcaccttgtccatcagggagtgctgggcagactcaagtcacacccttgctgtctgcagtgccagagggcgccggaagtggggaatccatccatcgtccattactggccctggaggcacagtgcctttcctgtgtgtgcccttcccattaggctaacaggagtagtcagcagcgggaggaggagggtccactctcccctctactgagtagatgagaatgatgtataataaacacatgaattatgaatacgtaaatgatgcttctgaagttttaggaaagagattccttccttttacaagtagagctgcacagatcttactgcactcattggtttgggaagactctggttatagactc

SEQ ID NO: 472052 - DNA, 807 bp, Homo sapiens
gtgacctgaaggaccagcaggagttggccgtatggaggagggcgggcggcacaggatgaacttcctaagcagtgagaagggcgcatacaaaggtcccgtgacagttctggcaggtagatacctggaggtgtcagatctctgtgctccaagaggtacctggaaacccatgctccttccagcttgctgccaggcactcttgatgtgcggtgtggacctggtgggcctgctggaagctggccaagtctgcagtctagctggccggaaggggaaggaggaagccaagggccagcagtttccttgggaggaaggaggggaacctgctcacataccttctcctcatgtcccgccagctacgacccagctgccctctgctgtagaggaggcagggactgtggccacatgcccggctaggacgaggggaatcctaagggaaagggggggcaggagaagccagtggctgcacagtcactgaaggtgtgaggcaggggaaaaatagaggggagtggggtgggggcagagaagtaacccctggatcattggaaatggtcacactgatggccctttggagagaagggtttgggggtgaggaatgggccccgaaagtatgcagggagagggttgaaggggccatggcagtcgtgcagggagggagatgctaactcagctcatcacaaggacagaagtggcagctctgggagccttggtggggagcccacatgactcagtgcataaacagaggagggttgtctaggatgatgctggtcctctggctggggctccctgggaggagcccaggccccgtgaggc

SEQ ID NO: 472053 - DNA, 1174 bp, Homo sapiens
gagcaggaatacccaggtccacccagagctgcactgcttttaccatgctgaccttttgcattagtgtgataatatcaattttgtatagggtcctaatcaaaatgttccaagtctggctcctaatccaacaaatggcatcatctggggccgcggttactgtgctgaaggacagtgacaatcctgagctcggacctgcacctgctgagtctgaggtgcctttgagaagtttaagggacatgcgaagaggcacaggaagcagctgcccctctgtttctggcaccgccatgaccccgctccccggtagctgcacttggcgattagttcctcagtttatgtttgctcacatcaaattcaaagggcagggccattgttttgagttcataaaggtcaagagcaacaacttccaaatcagaacgaattcatcttgtcattaccaaggccaagatggtgaagggcccttacagcaagctgacaactttccaggatgtgcacatacgtgtaagtatgtgagtgtatgggcatatgcaagtgagtgtgtgtgtttgtgagtgtgagtgtacgtggaagtatgtgcatgtatatgaatgtgtgtgcatgtttctgtgtatatgagtgtgtatatgtgtgagggtatatgaatgtgtatgtgtgttcctgtgtaaataagtgtgtatattatataaatgtgtatgcataggagtgagtgtatgtgtgagtggtgtgtatattgtgaatgtgtatatatgtatatgtgtctatgtgagtgcatgtttgtgtgagtgtgagcatgtgagcatgtataagcaagtgtgtgtgtgcatgtgaaagtgtatacatttatgtgtctgtgtatgtgagtgcatgtttgagtacgtgagcatgtatgagtacgtgtgtgcatgtgaatgtgtgtttggatgtgcacgtatgtgcaactgtgcacacactggcatcgcccacatcaggacagcccctccaccgcctcatgttctcacgccttttctggcctgcacaggaaacacctgctccatggtacttcttgggacatcaactgcaaaagacggaaggtgaaaagtggttctgagcaacaggtgcaaacccggcattctgacagtggagaaattcttccgcctccaggacgacctcactcttcgctttttcattttgcattgtc

SEQ ID NO: 472054 - DNA, 1170 bp, Homo sapiens
gcaaggaactcaactcacatggtccttaggaagcctcctctccttcacccaatccttggaaccatgtgtttgggtacacagactgaaccgtggatttcaggtgtagattatgagtcaggcctgatcaaagcacatgcctacatcaaccacaataacccgggacaatggaccatggaatctaccaagacttgtgaaatagcaggcaatggttttaacatggagtcaccaaaccatgaaagtattggggaaaccaaggctcccagtgtggtggagatagaagtcagcccagccctctccgaggttcacctgctcctgaagaaggaaaatgtccacgaacatcagctgatgaaagatgtcttaatcagaaatcatgagcctccagaactgactgaccatgcgcgtttgactaagatcattcacagaacggtgcatgggtgccagctgtctgccttttccctgaatttccacagcatcccagacacagttgtttgggaccagagtctgatcagtccctgcagcccaatctgcaatagaatcctggggctgccacacgttggcatcaaccctgtggcttcaaacaacagaaattcaccctcccgcagctgtcgggctggagctctgaaatccaggtgtctgcagggcctcattctgccgatggctctcacggtggttcttcccggcctcttccagcttccggtggttaccagcagccctcagcatcttgcttgtcatcaacacgatgcatccctcccattcagtggctgactcctccctgtgtctttacatcgctgcctctgtccaaacttctccttttttgtaaggacaccagtcatgttggattagggcccaccccaaagattagggcccatcctaaggaccccatttttcatttgattacctctgtaaagaccttatttccaaatagggtcacattctgacatgctgggggttaagattccaacttatctttttgagggacacagctcagctcacaaccccttccactcccacaaagctctgttccactcagcaacacaggggtggctggagagcaatcagaactgcagtcagacatctggcagcccccagcttctggcactgacctgtcctgtggggtagacaccaggcgctgactctacgtctccatcgcgcatacctgtctccttcctc

SEQ ID NO: 472055 - DNA, 1105 bp, Homo sapiens
tgggtctctgctggggcattttccttgtcatgcctctgcctggtctcattctgaggctgactctcctttcaccagtgctaatgactatcgaccccctgggccagtgctcttctcttcccctgcccatcctgtgggagagactgagctctggtctgtctcacccctcccagaaggtggtgagaggtccctcgagtggagccaacataggccatgtgccctcctgtgcatggatccctggggccagggccacagccatgggaaatgctgatcagctgaaaccaggaaggcccccaggctcctcgagagagaatgaagtgggggtccccaaaggagatgatcggtacaccatgacagccgccttgactaccaaggtcagaatcttctcagcagagcctggtgctcctgggcattcctgggctgccaggggcccgaggaatggacagggacccccggccacccagatcctgtcccagaaatcgtaccgagagcagaccaggcggccctgccagccggcacctgccccgcctccacaccccacacctggctgcgcgggagccactcagaggctgttttgattggctcatttcagcggagctcattatttttacagggaacaatttctaaccattttccttgtctctcagggcggttgctactagctgagttactcgggccgttataaatacattatcagacacattcaacaagcgatcgcagtggacatgccgaccacccttgaacttgcgacaggccccgctgaggctagaggcaccagccccactgccaggcctgatttctttcctggtactcctatcacagctcggtgtgtgctgaatttcttgccccagcctcggtttgtactggcttgattcacaaatgtgattgaaaaccaagggcctattcctggaattcagtgacttcctctatgaagtatcagatgttgtcattcgaaactggcttcaatgactgtttactgagtttttcttctgctagtggtgctggcacatgaacagttaactgcttgactttacagacacgcacagggaagcttagctgccaagtgtgagctgagagtagaagagcagcatttgatctaaatgaaaaa

SEQ ID NO: 472056 - DNA, 1084 bp, Homo sapiens
ccggcccctagggcaccccttctgtccacctctctaaagatcagtgcagaagtttactctgtgaatgactctcctctatctgctgtcaaaaactaccacctacttgatggctttaaacggcagaaatttattctcccacagttctggagtgctaatgactatcgaccccctgggccagtgctcttctcttcccctgcccatcctgtgggagagactgagctctggtctgtctcacccctcccagaaggtggtgagaggtccctcgagtggagccaacataggccatgtgccctcctgtgcatggatccctggggccagggccacagccatgggaaatgctgatcagctgaaaccaggaaggcccccaggctcctcgagagagaatgaagtgggggatcggtacaccatgacagccgccttgactaccaaggccctggtgtgtgatgttccccaccctgtgtccaagtgttctccaaatgaggacaatttatagagggaagcaggcactgaaaataaatgaatatatatttatttatttatttatatataagatacatattatatattaaatatatatttcataaaatatattatatatttaactattatataattaaatatgtaacatatacatattatataatatgtacagcatatatatttattgtataaatttattaaaaaatatatgaagttgaccgtaaccattttaattaagacaattttctctctgcaggttcaggggtacctgatacctttacaagagaaaattcattaaataagttgtctatcttggagttgtttctctgtaagtttctcttgaatgtttcttaaattttagatacagcaaacttgtacatcttttatttttgtcccattttggtacagtttataaatgtgtttgattaaaaatagggcttcattaaaagatgccttccatacgttgagatattctgaagcaaaattacataatttcaaaattaaatcttatatgctgtcaggacactcattgttgaatttatctcatccctccctcacttgtaaggggtatatttaatgtcttcctgtttgcaagctttgtctt

SEQ ID NO: 472057 - DNA, 4847 bp, Homo sapiens
tgcagcccacagccccatgacccatggcccacagcccacagcacacaggacacagcacacaggacacagcccacagcccacagcacacaggacacagcacacagcacacaggacacagcccacagcccacagcccacagcccacaggacacagcacacaggacacagcccacagcccacagcacacagcacacagcacacagcacacaggacacagcacacagcccacagcccacaggacacagcccacagcccacagcccacagcccacagcacacagcacacagcacacagcacacagcacacagcccacagcacacagcacacagcacacagcacacagcacacagcacacagcacacagcacacagcacacagcacacagcacacagcacacagcacacagcacacagcacacagcacacagcacacagcacacagcacacagcacacagcacacacacaggacacagcccatagcctacagcccacagcacacagcacacaggacacagcccacagcccacagcccacaggacacagcacataggacacagcccacagcccacagcacacagcacacagcacacagcacacagcccacagcccacaggacacagcccacagcccacagcccacagcccacaggacacagcccacagcccacagcccacagcacacagcacacagcacacagcacacaggacacagcacacagcacacaggacacagcacacagcacacagcccacagcccacaggacacagcccacagcccacaggacacagcacacaggacacagcccacagcccacagcacacagcacacagcacacaggacacagcccacagcccacagcacacagcacacagcacacaggacacagcacacagcccacagcccacagcacacagcacacaggacacagcacacagcacacagcctacggcccacagcagggggaacaattacaatagaaagagacctaggtatagaaccgggatcaactccaaacacgccacaggcagtggagattcacagcccaggagcagggcggggtccacggatggaaagtgactaggaggaaacatcaggggctgggggattcaggctcgagtcacctaacaggattcttgctgaagctctcctcccacacggatgctgtcccagctaggaacctgtgaaccacaaagaacaaccagcaacttccgatgccgtccacgggtacccgggaccctgggatatgctcaggccttggggatgcccagcccctcgccgcctactcacagcaggacttgagtgccgctacattcaggcagcattggacctaatcgaaacaggaaagtcgggaaacttctcaggagaggtgacactcacaggagtcctgaaggactggggcaagttggccaagggacatgagtacaaggaggagctctccaagatgaagtgctggccgacgcaggggcctaaggatgcaaagccagggtttgagcccaagccacctgccggaacctgtggcttagccatgctgctctgctgccggtgcgcctgtgactttcgatcctacagcccttcagaagacggtgaccatgggagggggctgcagagagtctcagaagcttggacacccgaggaaaagaacctggcctcatacttccaagtagtttgaaaagagatgagtgtcttactagccttctcaggtaacactgggtatcttgtttgacatcacactgaaatttgacaagttggggtttctttgataagtagtggttgattaatgatgggttgtaagtggaattccatacccatgcattttgtactctattacattacaatgcgctggtttatcttactttgagtggacattttacccatgcatgatttatttaaaaggctttattgaaatgtaattcatatgctatacaattcagccacttaaagtatataattcaatagtgtaaagtgtgcatttcaatttaacttggtggattttggtgtatctgcagtgtgtgcaaccatcaccaatgtcaattttggaacataccatcacctcagaaagaaactgtgccctttagctatcactcttctatcctccttccacccccccacttaagcagccacttatccattctcagtctctttagaacatcctattctggacatttcctatcaatgaacaacacgtggcctttcctgtttggttcttacactcagcaccatgttttcaaaggttgtccgtacactcagtgccatgtaaataacattttgattaaaaataacatttgcaagttaaaaagaaattatatgaggcggctggattcttctctctgttttttcattcaatctgctgcaatatgttttcaaaggtcttccgtgttgtgccaagtgtcagcgttcccctcctgtttccggccacagaatatgatgccactgtctggataaatcaccttgcatgtatccatcatccactgatgggcatttgggtgtgtccactgtttgactgttgcgcataatgctgctattaacatgtgtgtacatgtgtggactttcactcctcattcttaacaccctgggtggggttacagagcccaggggggctctgtctaatgctgaaagccattggtgtggcagtacctggtggatagggtcagtgtgttctggacagaactgtggcctccaaagactcatatgccaaagccccaaacctccactgaacatatttggagacagggccctaaaggaggtaattaaggttaaatgaggccataagaatgtggtcctagtcctataggactgttttcttatgagcagaggaagagacataagggttgcacacacacacagggggatgttggggacacacgaggacacagccagaagacagccacctgcaagccaagaagagaggcccaaggagaatccaaccctgacagcaccttgttttggattttcaggctccagaactgggagaagatgaatttctgtcgtgtaccacccctagtctatgatcttctcttatggcagccctaggaattgaagatcgtcactgcagaactgactgtagaatttattgtccaagctagggtgctttgagtgcaaaggggccgctgtgaacccaaggaccacagctccaggcagaccagaacatatgggtcaccctgctggccaagagcccccctccctctggggaactcacttctcctagattggcaatcaccttcctaaacactacacaaagaaagctacctgccccctcttcccatctcaagccagggttaattaatatctccgatgtcccaatcccagaacacttaataactttctcatctgtatctttgggacttgatatttgatcagaggcatctgggcatggagaaaacccaatctcagcagaccctcatcccaagtccaggtttcaaagggatgcttgtctggtctatgtttgctgaaattcagtggaacaaaatggaaaataatatgagagtagagacttcatttgttggattcagccatcacagaataaattttggctaaatgaattgaagaatgactgaatctaaactgccaattgctctattcaaagagaaggtaagccaaatatgtgtgggttattatttttctaccaagtttcttagaggcacaggcatctctgtatcccgcatagcatttagcaataccttgtgtacagtcagtcttctctaaattcctactgaacaagttatgactatcatgaacatgtgtggctgtggcacacactttcctacattctgattctactaactgtcttctgggacccagacactaccatttcgcagtaatacatgggatcattttgctcctacaggcaaggaagtctagggaatgtagtttgcaggtttctaacccctgagaacaggagagaatttggaagggtggtgatggtgccgagaaccacagaaaatagccagtgacttcggagattttcaatgaacaattgtgcatttatatcttatgtatctgtctagattatgaacggcttgtgagggcagggaccaagggtgtttaatttaccgaagcatacttgggacctaggatcatgtgcaataaatgcttgctacataaagcttaagttaatagacacttgatggctgtcctcaggtctcagatgtacaccaatttcaatcagtttcactgatagtgggcctcataccaacaatggtgactgttcgagagtgcccaataggacgggttttcatagttcatcctcagcctggcccccaaggcatggttcttcccctcccattctctagatgtgaaaatcacggtcagggaggtgatgtcaatggtctaagatcatgcagctggtaggtggtggaggtagaacttgaaattatttgtttaattccccaaaaaaaaaaacaaaaaaaacaaccaaaacccagaaacaaaaacaaaacaacaaaattgtgttcttctgagtaacatgcttcttcttgcttgatacaagtgtctatactgatttcacggacctgtgtgtcctggggggcggggtgggatggcagggagggatgtgtcctggggggaggcgtgggatggcagggagggacgtgtcctggggggggtgtgggatggcagggaaggatgtgtcctgagaaggggggtgggatgacagggagggacgtgtccttgtgggggaatgggatgggatggcagggagggacgtgtcctgggaaggggggtgggatggcaaggagggatgtgtcctgtgtggtggcagggagggacgtctcctgggcgagggtgggggaatggcagggagggacgtgtcctggcagtgctccttcccagtgcagaccctggattgctatc

SEQ ID NO: 472058 - DNA, 1238 bp, Homo sapiens
tttccaacatgaagaaaagataaatgcatcaccaccatcatcaccaccaccatcatcaccaccaccactgccatcatcatcaccaccactgtgccatcatcatcaccaccactgtcattatcaccaccaccatcatcaccaacaccactgccatcgtcatcaccaccactgtcattatcaccaccaccatcaccaacatcaccaccaccattatcaccaccatcaacaccaccacccccatcatcatcatcactactaccatcattaccagcaccaccaccactatcaccaccaccaccacaatcaccatcaccactatcatcaacatcatcactaccaccatcaccaacaccaccatcattatcaccaccaccaccatcaccaacatcaccaccatcatcatcaccaccatcaccaagaccatcatcatcaccatcaccaccaacatcaccaccatcaccaacaccaccatcaccaccaccaccaccatcatcaccaccaccaccatcatcatcaccaccaccgccatcatcatcgccaccaccatgaccaccaccatcacaaccatcaccaccatcacaaccaccatcatcactatcgctatcaccaccatcaccattaccaccaccattactacaaccatgaccatcaccaccatcaccaccaccatcacaacgatcaccatcacagccaccatcatcaccaccaccaccaccaccatcaccatcaaaccatcggcattattatttttttagaattttgttgggattcagtatctgccaagatacccattcttaaaacatgaaaaagcagctgaccctcctgtggccccctttttgggcagtcattgcaggacctcatccccaagcagcagctctggtggcatacaggcaacccaccaccaaggtagaggtgcgctgatgtgcaatgtttgcttttgttttatttgatggaacatggctaattgctaagaaggtgacatgctgcccactgaccacccaatgttcattctcctcttcttccttactaacaaaactgcggtggtggtggtgaggagagggagggggtataacaaatgtgccaagccaagagtttatatttgcaagcctctcttatacctagagttgatcgtgacacagctctggccaatgatgtgtaagcagaagttgcttgatgtgacttctggcaaagctcttaaggagaggactgacctgtttccacatatctttttcctttcc

SEQ ID NO: 472059 - DNA, 1687 bp, Homo sapiens
caaagagaagacctgttactgcctgatgacaacatggctgctccaccttttgcatctcatctgcatcccagccaggactaaggacacggaaaggaaaaagatatgtggaaacaggtcagtcctctccttaagagctttgccagaagtcacatcaagcaacttctgcttacacatcattggccagagctgtgtcacgatcaactctagttttgttagtaaggaagaagaggagaatgaacattgggtggtcagtgggcagcatgtcaccttcttagcaattagccatgttccatcaaataaaacaaaagcaaacattgcacatcagcgcactgtcaaagcatgttccagaagcttcttcaagtccaaggacagcagctcagacagggaactgctggaggaagtggcttttctgctcaattaccctctaccttggtgtaatggtggtggtaatggtgatggtggtgatagcgatagtgatgatggtggttgtgatggtggtgatggttgtgatggtggtggtcatggtggtggcgatgatgatggcggtggtggtgatgatgatggtggtggtggtgatgatggtggtggtggtggtgatggtggtgttggtgatggtggtgatgttggtggtgatggtgatgatgatggtcttggtgatggtggtgatgatgatggtggtgatgttggtgatggtggtggtggtgataatgatggtggtgttggtgatggtggtagtgatgatgttgatgatagtggtgatggtgattgtggtggtggtggtgatagtggtggtggtgctggtaatgatggtagtagtgatgatgatgatgggggtggtggtgttgatggtggtgataatggtggtggtgatgttggtgatggtggtggtgataatgacagtggtggtgatgacgatggcagtggtgttggtgatgatggtggtggtgataatgacagtggtggtgatgatgatggcacagtggtggtgatgatgatggcagtggtggtggtgatgatggtggtggtgatgatggtggtgatgctggtggtgatgaggaggagggtggtgatgatggagatgatgatgatgattttttattggtatataatatttgtacatagtttgaaggtatgtgtgatattttgattcatgtatataatgcataatgatcaaatcagggtaattaggatatccattcccttgaccatttatcttttcttcatgttggaaacttcccaatgcttttcttctagctatttaaaaatgtacaataaattattgttgactatagtcaccatactgtactattaaacatgcgtattaaccaacctcttgaggacttttattgaacgaccacagctctaccttctagatagaagcacaaccctgaaagatgcattatctagccatcttagaattagaggtgaaccccatcactcctacagcccagtgttatttacaagtccccgcctctggtgtccacctcattgatcaaggatctatgttgagctttggaggcagaagaagggatgcaaactcagcatgcttcatgggaaacatgcttcttctttctcacaaattctgacattatcaagtttaggggcctgagaaaaacaagacatacattatcttctcgagttgttggtgcccgtgagtgtagaagattgtatgacggtgcagtgtccc

SEQ ID NO: 472060 - DNA, 1019 bp, Homo sapiens
cggtcacaggcactgagctctgccaccgacattgataatgaaaggaaatgccaagtctcagttagggttaaataaagatgccagttttcccccatacgagttgaaagaccctttgaattctatccaagtaccctgggaatctctggacaaagaaaatagtagaaggaagtgttttctgacaaccgagatgggaacaagccctgcagaagtctccaggcgaagtcagagccttaagactacagctgctgccccggatgttcatgctgtggaaagttcttccggtcaccctgctaattctggccctttctccccgctgggggaagtccacagcctggaaccctggggaacccctgcggtctcctcacctagtcccctcccctattttcccaacaaaggagccagcaggcccctgcaggaggtcctctttgaagctctctgaggccatttatctaatggccttcacagacttgactatttttaaaacccatccaaagccaaattgagctgccattgttcatttttctcccaaggaggagaggtgtgtgtattcactcatcttgttgactgagccctgagtagaggaggtgagagtatgtactcatcttgttgactgagccctgagtacaggagttggaagtatgtactcatcttgttgactgagccctgagtacaggagttggaagtatgtactcatcttgttgactgagccctcagtacaggaggtgtgagtatgtactcatcttgctgactgagccctgagtagaggtgagagtatgtactcatcttgttgactgagccctgagtaaagggggtgagagctgcactcatcttgttgactgagtcctgagtatgggaggtgagagtatgtattcatcttgttggctgaactctgagtacaggaggtgggagtatgtactcatcttgttgactgagccctgagtatgagaggtgagagctgcactcatcttgttgactgaaccctgattagaggaggtgagagtgtgtactcatcttgttga

SEQ ID NO: 472061 - DNA, 1238 bp, Homo sapiens
gttttccccaaactgatgttactagcaaatgtgctggtggtgaagacagcggtcatttgtgagcgcttgcagtgcggcaggcaccgtgctgcttgttcgcggggatggtctccttttactctgctcctggcatcttccatgccagctgggcggatggctgtggctgcccatacgaagcctgcatttcctatgcgttctcacgtgtgttgagagcagaaccaaaactggataaatgcgttcatctgggggacaaagattcctcaggatcgttacattggactggaaaaaggtgtggcttaacacttgcggttgcaatatcctctgtggattttatgaaaacatactgcaatgcaatcatcatagaactcatcaaccctgaggaagacctcgacacaaaggggtcagctgttggggtctttccattggcaaactccctcgctattcttgtattgttcatggactcagaagcacgtctccagcctgctcaatgccagattccagagtcgcagagattcaaagacataacatgccacagtcatggctacgtctgagcagccccttcctgatttgccgaccaggactcctgtggttgacatcattatgaggttgttatggtggtattactggttaatattatcaccactgtaattgctgttcatgtttaggcaatatctgtgtttccaagtacatccaggatgccccccctttcccagataaccacatttacttattttaattattgacagggaagttaattgaaatatgggacttccacagaccccagagtcttccaatgctctgatcccagacaatttaaataattctgccaataaaaattcaacgagatgctatcaaacattttatgagtccgaacagacaggtcccactgtgtctaaacatctctttttggaactctcgttgagaggaaacaagcaagtgtgaatgcccagcaggatttgttctcgagtccccttttcttagagtgcaaaactcctgaatctcccattccttctcctattttttttttccattattttatttacttgaaaatatcctgctaagtgacttctaagagcagctctgttccacatggtatggagctgggcctctttctcatgaatgccttatttaccagctcgctaaggtcttaggaaaattggcatcttggccctgagaaaacaggaggttgttgcaatccagctgccagctgctcgacctcgggggtgggggagtaatta

SEQ ID NO: 472062 - DNA, 635 bp, Homo sapiens
tttaggtagaaagaccttagcttagcatgagactgaccacctgtgcccatgggcacccaggagctggtgtctgtggaggaccgagtgcttgacctggggagtctgacactaaccctgggtggttggcatcagaattgcatggcagtgcacccagctggggtggaaatagaacagactgcaagaatgaaggaagacatagctgcggacataaaaccagccgagggcctttgcttatctcaggggctgcggccattccacgtggagatttgcattctgcagagaagagtgcctctctgccatttgttggcttcctctgctgacttcgtcctgcaggctgcagactttatttcttccctgctaggcccgctacctgaggattctctgaaacatggtgcaggggactcagaagaaagacgcatgctgtggcccaaagagaaacttggtcttcgggattttctccagagagcataccaccctctctgaaggttttccatgatggtagatcgtcacgttggttttacggaagtcgtccaagccatccaggccaatttcagggagggaagtgacaggtccccttgagggagatggcacctggcttacttgtgggatttgtaagtggattcaaattgcagctt

SEQ ID NO: 472063 - DNA, 1037 bp, Homo sapiens
catctagtgccctccctgattgcctctgggctggcacagggctgccgtcatgagccaggaccatgggaatcattgttctgggcattagtgtacttattgtggctagtggtgagtgggaagacattgctgggttaatagctgtaattgttgactcatggacaatcaatcgccccagcaagtccacagtcctgagtgactgcaaagagcagcaagtgccacattgctaccacaatcggcaatatccaccaaaaccctatgagctgcttatagccatccctttggagcttggcctcatctccttcactgctgtcataaacactgggccttgggcaggtgggtcatggagcggaactgcagaacccattggtgtgggctgggccaggtcacttgttcacccacttgacctcatagtcctgtcctgtgatggcatctgtctggctggctccactctgtgcttcccggatccctaggatagatgctgagatgggtcccagacccccgagactgagcacggccccatcattctcagtttccaaatctctttcctagacaaggatccaacattttcttgcctttcacctgcaggaaattaggaccattcataacttaagaaatcaggctgttaccgccccactcccaaaacacctccctgagtcctgtgcaggctcaatgaggtctttgagagagagggcactgaaaatgcagtgagtcaacttcagaagaaaaatggagagctcaccagagatgcattttcatgagaaggaatattcaaggaagaaagacttctggaatccgtagaaccatgcccgaggtctactagaaagctctgtgaatcacaaacacagtcaaatagttttatgactgatctaatgcttttgacaggttgctccacagagctgctggactcacgagctattgataactgtacttccagaagctaaattcaccagttacacacatttgatagggaacatacttttctctttcttgcttttatattctttttctctcctcccctgcctaaattttgtgtgctc

SEQ ID NO: 472064 - DNA, 2123 bp, Homo sapiens
ttgggttgcaagaaagccccctaaagacaggacctgttacagctggcaggtattctgggatgtggggatggaaagaacacttttctgcagtagcccatgttggggctgtgtggccgtggccatggagggcagacgcagcctctccacgaggccacccacactccagtgacggtcacaccagaagcatccctggaggtcagagcagggcaggggaggcggtgtacccttccatcctcacaaggctttgggccaagtgaaaccccctccctcggaggccccccttctgggactacaccttccacctgaatcttgtgccagcaacagaacttcttcctgcctttccagggggcagtaactaggtttgcatctgatggtggtcagtaaaagagataaaggacgcagggccactgtttggaaaacaacccatggaaggaccccccacccaaccccattgattcacctacctctccagccacccaccctccttccctcataataatctcctcccagatgaaggagctttcagagagccaaaagggaaggtggaagacacagtctcttttggtggacacggggaagcaagatgaaaaaaaccacaggacctagtaaggtaccgtcaagatccacccagccacctcccctcccaccagaagtgattgaagcccctcttcctggctcttagagaaccgcaggggacccggagcagacagcaggcctttctgatgcttaaagttttagcatttaggacaatgccctgtgcttatcctctgtacacccctagcttcctggccatctttggagttcattcattcattcattcactcactcattcaacaaatctccactgaacatcaacagtgtcactggcactgctccgaaagcaggggataaactgatgagcaaaacagaccaaactgcacctccaaggaccttttagccaggggaggagagtctggcagttggaaagcgtgtccacagtccccagggaaccaggaaccacgtcctggggagcagggagcttgtggaagaactgaagctcagtaaacaggtgactgaggtgggggcaccacggggtcagagtctgcagggcagtcaccgctggacatggttgaggaataacggaggagactccaggcatgagcgagtaggggtacttgtgacacaggtggttcaaaatcagcatggagcggggactcagagcaagggtgtgagccgtcagactgggccctccaggggtgacttcgttccctatctcctttcgcgtctgagccctccccacaaaactggttctgcttggcaccctgccctgtgcctgaagctaagcctcaaagtggcctcctgggctggagccagggctaactgcggcagtgacaccacgctgatttgcttcattgaagatgaacatttatgataccagcacctcctacaaccttttcttcattgttctgtgtaacatggaccattttctctccaacgttgcccttcttgagagaagggtgataaatacgttgaagcccaattgtctttattattcacaaggtgaaagtcctttcctggtaccactgtcaggctctccacctccaaacatcaatcactctccatccccaccctgcccgtcttccaggtcattagtgaagggctgtgtctcctcactcagcctcagagtcaaaactcggcactgcagcgtgctggtgtctggccccgcgaaagtggtcttcctcagcacccagagctaccagatgttagcattgcctcgaaaacaggtgcacactggacctctcagggtggagcccagtctgatgactctgaagcccgtgagtgtgactgccacactgctccctgccccacggtcctgccctctcccttacaaacacacccaagagtttcccaaggggagactagacccttctgattccattcagtacaacagaaatttaatgagcacctgcagtgtcttggagatgctgcttggcaccagggccacactcagaggggagcctgtccagaatagatgactgctgtgcaatgagacagatgccaagacagaggctcacctggatatgatggggtcaccaaggtgacagtggcacctgctcacccctgcccagcttctgggatgggag

SEQ ID NO: 472065 - DNA, 832 bp, Homo sapiens
ccctattttcaaatgcggtctcattctcaggcactgggagttgggacttcaacatatcttttttggagggacagttctaccatgacagtcatttggggaggaattgggcccatccagctctcagatgtcaccgagaacaggggtcatgtcactgatggttttgggttctttgtgactgcagataccctggcctatctggatagatgcactgattttatgtattttccagaagaggtatataaagaagtccccgttctaatcctggaaacctgtgaatgtgacctttcatggcaaaagggcctttgtggatgggaccaagctgaggatctcgatggggaggccatcccggctgatccagggcgaacgatctgagattttaagtgaaaaagcaaacatgttttaaaaataatggaaatggtggtgcggacctgggcagtatcctgttgggggtcgtattagaatcgtcagcaattctaacaggtgcaagatgtaattagatgcccgatgtttgatcgttccatttcattccatcaaaactgcattatgaactgagggacgattagtgacaactgacagaaatggtgtggaggcatggcctcagcccctggcgggagtctggccccacgcatctgtcaccagttttgttatcaagtttgtactactcttatacaataagttgggcagttttccttcctcttacatatatttctgtaatagtttcattatgttttttgagagcttggcattacccatccttcagtttgttaaaaattgcctataaactatttctcattggtgctttctgagggaggaagggatgcttctgacaatc

SEQ ID NO: 472066 - DNA, 664 bp, Homo sapiens
ccttgcctttcaaactggggcaggggtgagagtgacagtaaggagaggaaggactgggagggagttaatggtagctctgctggtgttccttgtatatgaaagaatgttttgcctctcataggtgggcttgtgtcctttactgtttctttcacacacccttgctcacaatcactctcctggaagaaggacctccccttgcctcttcaaatcttaccaatccattggccaggacccaacccaggtctcttcctatgaatccaactactcagaaagccttagcaattggcttacctgaagggcctacccttaagccagtttcaggagtggtggaaatatggaacgcaaaacagaaatggcaagaaatgtggttgagtaggatgtgggtgggaaaccagattataaacacctttgaatgccagattaaggagtttgggcttgctcctggggacaggggagtccaaaagaagattaagccattgacacataaactgaaccatagagatgaagaattgcttatctcaaattgttttaaggtacaaaccagtctcttctactgaacgatgcatacattttctgagggcaaaattcctgcctaatattttcttggtgtcctcttttttttcttttctttttaaaaatagagatagggtcttgctgtgttgct

SEQ ID NO: 472067 - DNA, 533 bp, Homo sapiens
gtgatactctcccgtggactgtgatgcagatgattctgttcaactagaggccaataagaggagtggagaggaatggagcacttagggccaaattctgaagaatgccgacatttaaagacagaaagaggtggaaaagagacatatgaggaagccaggaaaggaaagtggggaaggagggacagcactggcctctgcagctgggctgaagtgggaattgtaggtgctacacctgggtacagaggtacacacatgaagatgtgctgcccagatcttcctccagagaagcacttgctgtgcagctgtggggaatgtagtcagcagacaacctttagctgtcagctccttcagagtctgcctcaactgcagagagctgccttgtccgagatcatagcctttccactgcctcctgtatctggtgacctggatattgaaagagctggcctcttcagcccaatgctgggcactctgcccaaggaaacttgctccaaagctttctgccaggttggctgaggctttgttgggcctcatcttcc

SEQ ID NO: 472068 - DNA, 921 bp, Homo sapiens
ggacctgcgcaaacaccagcgcaacatgcacagcaacaataagcccttcccgtgctccgagtgcggcctgaccttcaacaagccgctgtcgctgctgcgccaccagcgcacgcacctgggcgccaagcccttccgctgccccgcctgcgaccgggagttcgctgtggccagccgcatggtggagcaccagcgcgtgcactcgggcgagcggcccttcccctgccccacctgcggcaagtgcttcaccaagtcctccaatctgtccgagcaccagacgctgcacaccggccagaggcctttcaagtgcgctgactgcggcgtggccttcgcgcagccctcgcgcctcgtgcgccaccagcgcatccacactggcgagaggccctttccttgcacgcagtgtggccaggcctttgcccgctcttcgaccctgaagcggcaccaacagatccactccggggagaagggattcctctgtgccgagtgcggcagggccttccgcattgcctctgagttggcccagcacatacgaatgcacaacggagagaggccctaccagtgtgaggactgcggccaggccttcaccaggtccaatcacctccaacgacaccgagccaagcacggcacctgcaagaaggagcccatcccttcctcctctgacgagtgaagatagcatcgtcgacctcactacttggaaccttcccagaagtggtccctatgatgaactcccccaaagcaacgccgtttttggaggaactcaaacccagtccaacatcccatcatttcacttgactgcagaaatggctttacccttaggatatatctttatgagtcttggctttgaagtggagaagggctttatcttagagaaggtggtttatgtcatattccagttattctagaagttcaggacagccttagcat

SEQ ID NO: 472069 - DNA, 1775 bp, Homo sapiens
ggggtttgagcagcagggcaccgaggaaggtttctgctgagaggtccactgctatgttcacggcggccagtcggagtgaccagccaccccctaaatctttaatctcacgggcttccttttgtgggctggtgtgtggccatgggggccgccccactggagctctccaccagtcaggcacagtctgccagtgcagaagctatgatgtagatccccacagcacccaaggctgctctgcaagcaggtacagccaggttgtggacctggaagaggccagcaggccaaggggtgctcaggttggactgactcagtctgataggcaagactgccttgcagagtccaggtccgacagttcctctaaggctaatgtttcctatgggagcaagctgagccttgaaggatggctgtgcctggccatgctctgctacaaatgctcccgcaacaaaccctctgggccccacatcagctggcttgtttcccctacttctctaagcagctttccctgccaactcaagtgttggtaatgggcaaaagttctcctcctgctgggtttccagagggctgtggtgagaacaggttactccttgccagttcaactcacctgttcccctggagtcattgtgtgccaggaatgagtcccagtgttcagtagccctgtgcaggcttcctagcttccacctgcttcagaccagcttctgcactgtccctccgtccactcttggtgcctttcctctgaagttgatctagtttcaaaacatttttttcaccccctccccaaagaacttcattcttattaagaagtcacttcccatttctccccttttcacagttcctgaagaaccaatctgcttctgtctctatggatttacctatatttcatataaatgaaatgatactctatgtggccttttgcttctggctttttcacttaatgtttttgagggtttattcctgttgcagcctgtatgatgactattcttttttatggctgaataatctttcattgtcagtctctcctacactctgtttattcctctgtccactgatagacctttggaatatttccagcttttgtgaataaccctgctatgaacattggtgtacaaataactgttttaatacttttgggtatatacctaggagtagaattgctggatcatatattaattctatgtttacctttttggggaaccacaacactgctattcacagtgtctggactattttatgttcccaccagcgatgtacaaagattctagtttctccatatcttcaacaatccctgttattttctgattatattcatccttgtaggtgtgaagtggaatttgcatttccctaatgactaatgatgtggagtagcttttaatgtgtttattagccatttattggtatatgttctttggagaaatgtctactcatgtcttttgcccatttttaaattgggttgcttgacttttggttgaattgtaacagttctttacgctctggatactagatccttatcatatacatatatatgagaagataataagagaaaatatatttactcttattctgtaggttgtcttctcactttatctataatgtgccttgatgcccgaatgctttttacttttgatgaagcccagtttatcttatttttctttcattgctaatgcttttgtgtcatatctaagattccattgacaaatacaagataataaatatttgttcttatgttttcttctatgagttcagggttcagttttaaattttccagtaaagatttgcactgg

SEQ ID NO: 472070 - DNA, 768 bp, Homo sapiens
atttggcgtacagattattttgtcacccaggcacgaaccaccatgcccagcctccattcttcttcttcttctccttctccttctccttctccttctccttctccttctccttctccttctccttcttcttcttcttcttcttcttcttcttcttcttcttcttcttcttcttcctcttcttcttcttcttcctcttcttcttcttcttcctcctcttcctcttcctcttcctcttcttcttcttcttcttcttcttcctcctcctcctccacctcctccacctcctcctcctcctccccccttctcctcctcctcctcctctcctccttctccttctccttcttcttcttctttttctcttcgtcctcctctctggcacaatactggcttatacttagtccaagaccaatgtacacctggtggcagttacttaagtttcagacatgctataaaacacagcaagcatcactacttgcattattcattctctatttaccatgcattggcttaaatttgtattgcttatcctgtcacatccatttctgtggccgaacaccggagagtcccttgcaaaccactggtgtaagcccaagagtccaaaagttaaagaacttggagcctgatgttcgagggcagaaagcattcagcacgggagaaagatgaagactggaagactcagcaagtgggcttctctcaccttctgtctgctttattttagcagtgctggaattgattagcatcaatggtctttacaatttggtatgcttt

SEQ ID NO: 472071 - DNA, 559 bp, Homo sapiens
agccagtctactctctctggattgttcatccactacctcgatattctgctttgaaaacagtgagcaagcaaatgcagccgtcacagcccaacaaaggaaaggcgacccaaggccagaccctctgggatgaaattctgggattcccccatcaggcaaataaattattaatagatcagataatgctgatcaaggatagggaaatcgagagtgggtggtggatgagacaactgacaaatgtcatttggagcttgggaccagttctcaagtgcaagtcaccagtttcttggtgtgtctctactccagagctttctcagaagataaaggagcctgctcagccagcacacaaccatggcctggaaatgtggagacagttacagcttccaggggcagttctcaaccaatgggatcagaagccagtgaacaaatgccccagtgttccatctttcacttgggcaattccgagagatccaaaagaatcaaaccccaggtacttactgctacaaatggtgacattgcatccttatacttttccttcttccctgtctcactctccctgacc

SEQ ID NO: 472072 - DNA, 597 bp, Homo sapiens
ctgaggtgatctcagatggagatgagggacttgttgaaaactaaagcaaaggacttggtgccctgcatcccagctgctccagttgtggctgaaagaggtcaacatagaactcaggctgtggcttcagagggtgcaagccccaagtcttggcagcttccacatagtgtggagcctgtgggtgcacagaaagtcaagaatgggggtttgggaacctccatccagatttcagaagatgtatggagatgcctggatgccggacaggagtttgctgcaaggggcagtgcagaaggaaaatgtggaattggagtccccacacctagtggagctgtgagaagagggctaccatcctccagaccccagaatggtagatccacctacagcttgcactgtgtgcctggaaaagcagcagatactcaatgtcagcctgtgaaagcagccgggaaggaggctgtaccctgcaaagccacaggggcagagctgcccagagaccatgggaacccacctcttgtatcagcatgacctggatctcattttattactgtatgaatacagtatataatacacataacatacaaaatatgtgttaatcagctgcct

SEQ ID NO: 472073 - DNA, 792 bp, Homo sapiens
cgtctggagagaaagggctacagaagctacatgagtaaaaccttccactctcatagctccagccacccagtacgtggcattctgttatggtatccccagcagattcatacagacccctaccatgacctgaaccccctcctcatctctgttgttgaaagtgaaaacatgagcatacatatctatggaacatggaggggaagccatgaaaacaatcaatacttccagcaaaatggaaagtgtttaaaatcattcacattagcaaaaagggaaaaagaagaagttaacttccgctcatcaccagctgaaatgatcgtacaggatcctgcaaaatatctgggtagctccaacataaataatcttctgtcctctggggaaaattcttttttcactctatggcttcagaaaaactgttggcatagggaggacatgggagaagaagatcatggggaagaagatggctccacaggcttttctccatggattttagaaacaccctctaaagctcctcctttgagaactgttagaagcctggaagatgagggaaaggacaacaccattgacgtcaagggccagccagttttaaaggcagcatcagaagatgtcgtggttcttggctgataaactacacttgctcattggaaatagagacaaaggcctgaatcaaaactacccccctttatttatctgtcaaggagttaatgagaaacaaacacttaaaagcattatagagccttctttatttcagagaatcttaaaggggaaagggacttcagagcttatctattgcattgg

SEQ ID NO: 472074 - DNA, 1838 bp, Homo sapiens
tttttatcacaaaataagtgccctcaagtatttttatgtggctccccagccagatgtgggatctgtgactgctttgaccaatgggatacagcagaagtgacgctatgccagtttcaggcatagccgtttactggcctggaagtatctgtcttctacttattggactgttcacttttggcgttctctcacttaggacccagccattgtatttcttctttacagcaacactcagaagagttgatattcagtgttgcaattcctctttaattctcactcctccaatctgcttttcttctccaccaaacaaccaaactgctttcatcaaggttgctgatgacgtccatgtttctgaattcaatggctacttctcagttgtgaaaggactcgtaaattcagtcactgtagcacagtctaacctctttgaggaactggagagaatgagaggtatcagaagacgacatgtgagcaagttttgccctaactcaaaacgaaataaaaatatggattagggaaactttacaccaaataccaacccctacacttttttgtttcccatttgtttgatatatttttctccatatctttactttgagcccatgggtgtcactgtatgtttgatgaatctcttgaagatagcatataggtgagccttccttctttattcatcttgccactctgtgccttttagcctatttatgttcaaggttaagactgatatgtgcagatttgatcctgtcatcattaactggttgttatgcacagtccattgtgtagtcgctttatagtatcaatggtctatgtgtttctgtggtgggcagtaacagtctttgtttccatgtatagtacccccttaaggatctcttataagacaggtctggtggcaatgaattcccttagcatttgcttgtctaaaaaagattttattttccctttgtttatgaagcttagtttggttgaatataaaattcttggtcaaaatttcttttctttaaaaatggtgaatatgggccctgaatctcttctggcttggaggatttctgctgaaaagtctgctgttagcctgatgggggttccctttgtaggtgacctgcctcttcctccagctgcctttaatattttttctttcatgttgaccttggagaaactgatgattatgtttcttggggacagttgtcttggatagtatctcatagtggttctttgaatttcctgaatttgaacgtcaatttctctggcaaggttggggaaattttcatggacaatatcgtcaaatgttttccaagttgcttactctctctccctctctttcaggggtgccaataagtcataggtttagtctctttatattattagcccatatttcttggaagttttagtcattctttattattctttttctttatttttgtttgaattagttgattcaaatctttgagtcaaagtctttgacttctgagattcttttcttttctgagcttggtttttctgctgttaatattttcaattgtattataaaattattgtagtgagcttttcagctctatgggatcggtttagttttttcttaaaatggctattttgtctttcagctcttgtatcattttttagattctttagattccttggattgggtttgactttctcctaagtctcgatgatctttgttgctatccagattctgaattctctgtctgtcatttcagccatttcagcctgctaagaattattgctggggagctagtgtggttgtttggaggtaagaagacactccggcttttagatgtaccacagttcttgtgctagttctttctcatctatgtgggttgatattcctttga

SEQ ID NO: 472075 - DNA, 2721 bp, Homo sapiens
tgagagtcaccatgatagggagtcatcgaaaggagtgtgtcatctctctcaggtttacatacaacatcttcagtgacgggttcctggagtactctggtttgaatcgtcagtttctcttccgccgcctggatcctttcactctctacacactgaccctggaggcctgcaccagagcaggttgtgcacactcggcgcctcagcctctgtggacagatgaagcccctccagactctcagctggctcctactgtccactctgtgaagtccaccagtgttgagctgagctggtctgagcctgttaacccaaatggaaaaataattcgctatgaagtgattcgcagatgcttcgagggaaaagcttggggaaatcagacaatccaggccgacgagaaaattgttttcacagaatataacactgaaaggaatacatttatgtataatgacacaggtttgcaaccatggacgcagtgtgaatataaaatctacacttggaattcagctgggcatacctgtagctcttggaatgtggtgaggacattgcaagcacctccagaaggtctctctccacctgtgatatcctatgtttctatgaatccccaaaaactgctgatttcctggatcccaccagaacagtctaatggtattatccagtcctataggcttcaaaggaatgaaatgctctatccttttagctttgatcctgtgactttcaattacactgatgaagagcttcttcctttttccacctatagctatgcactccaagcctgcacgagtggaggatgctccaccagcaaacccaccagcatcacaactctggaggctgctccatcagaagtcagccctccagatctttgggccgtcagtgccactcaaatgaatgtatgttggtcaccgcccacagtgcaaaatggaaagattactaaatatttagttagatatgataataaagagtcccttgctggccagggcctgtgcctgctggtttcccacctgcagccttactctcagtataacttctcccttgtagcctgcacgaatggaggttgcacagctagtgtgtcaaaatctgcctggacaatggaggccctgccagagaacatggactctccaacattgcaagtcacaggctcagaatcaatagaaatcacctggaaacctccaagaaacccaaatggccagatcagaagttatgaacttaggagggatggaaccattgtatatacaggcttggaaacacgctatcgtgattttactctcaccccaggtgtggagtatagctacacagtaactgccagcaacagccaagggggtattttgagtcctcttgtcaaagatcgaaccagcccctcagcaccctcagggatggaacctccaaaattgcaggccaggggtcctcaggagatcttagtgaactgggaccctccagtgagaacaaatggtgatatcatcaattataccctcttcatcctgctgcaggagcccatgcagaatggcagtctgctgctttctaacagaccaacactgcccccaaacaagaggatggaaagaagggctgtggaggagacacagaaggggatcctcactgttgctgccagtggcagctgcctgaagactgccagaggtactgtggaggccttccctgcaccagcccccaccataggctaccaaatcgttggcgatgagttagaagtgggagggagaaaggccaacatcttctactccttctctcactacttctggatatttgagcacattaacctctttgggcctttcctcataatataaattaggcctgctatgatggaatatcatagactgggtggctttaaataacaaatatttatttcccacaattctagaggcgggaaagtacaaggtcaaggcacctgcagattcagtgtctggtgagggccaccttctggcttacagataatggtcttctccttatatccacatataccaggtagaagaacactagtccccttcatgagggctccaccctatgcaacctaataacctcccaaaggcctccataccatcatattcaagattagccttcaacatatgtatttgaaggggacaaaaacagtcagttcatagcactcatctataaaaggaagcaccctccagctctgtattctatgggcagagtagtggtaagctacaggtatataatttttagaaagtctaatcaaactttatcttctcttgattggtttttgtaatctacagtttgtaaaaccctacaaaataaattctcacccaaagcaacagaattttctaatggtatttagctttaagttgtgttgatgcaagtgaatgtatgaaatcagcttcagataataaatggatatatggttattcatcaccaagatggacacatggaaatataattagttgtgtctctcattgaaacctaacatatttattcactaatatattttttaaagtatagctatattataacatatgaatgtaaataaataataaacttatttagttagctacaaataagtctcatttatgttcctgagaaaacccacactatcaaaaagttgtcatgactatttcactacaagtaacagaaagccaatgtaaactaagttaaacagaagggaattgtttctgctctcgcatctgggaagggcattgaaggaatcccttgaaaccaaagaaaagatatgaacaccaggtcctggaaacctgggatgcaggactc

SEQ ID NO: 472076 - DNA, 1069 bp, Homo sapiens
agcagcagagctaaaaatccaggactgctatccgaaggcatggccacccagcagactctccatggccttcaagccttcactaactactctattggagtagaggcctgcacctgcttcaactgttgcagcaaaggaccgacagctgaactgagaacccatcctgccccaccctcaggactgtcctctccacaaatcgggacgctggcctcaaggacggcctccttccggtggagtccccccatgttccccaatggtgtcattcacagctatgaactccaattccacgtggcttgccctcctgactcagccctcccctgtactcccagccaaatagaaacaaagtacacggggctggggcagaaagccagccttgggggtctccagccctacaccacatacaagctgagagtggtggcacacaacgaggtgggcagtacggcttccgagtggatcagtttcaccacccaaaaagaattgcctcagtaccgagccccattttcggtggacagcaatttgtctgtggtgtgtgtgaactggagtgacaccttcctcctgaacggccaactgaaggagtacgtgttaaccgacggagggcgacgcgtgtacagcggcttggacaccaccctctacataccgagaacggcggacaaaaccttctttttccaggtcatctgcacgactgacgaaggaagtgttaagacgccgttgatccaatatgatacctctactggacttggcttggtcctaacaactcctgggaaaaagaagggatcgcggagcaaaagcacagagttctacagcgagctgtggttcatagtgttaatggcgatgctgggcttgatcttgttggccatttttctgtccctgatactacaaagaaaaatccacaaagagccatatatcagagaaagacctcccttggtacctcttcagaagaggatgtctccattgaatgtttacccaccgggggaaaaccatatgtttgcactaaggttctatattagctagtggctaccctaggcagtactaaaattaagcacagaagcctggtcaagctgcttacacttca

SEQ ID NO: 472077 - DNA, 851 bp, Homo sapiens
gcagaaaagatgagctctccaggaactcgccctttcctcctgccctctattgacaaaaatcttaatttgtgtccatttaaacatacgaactgggtgactgctgaagtattctgcaccaatttaatcaatgaaatggttgcaatattctcacactttactctcctaagagtgaaaagtcatggagctggagacatgtttctatcttgcactaaaaatcaccattccaaacaaatgatcagacaaaggtttggggagttaattatctatcagtttgacccatctagatatatttcttatgaacaagatttggagctgactaataaccagtcttgggagaaaccttgggacttttctccagagaatgaagattgtatttctggtgttctacaagctctacctaaagattctacctgcgtaacatggataaaaaaggagacacagcactgctaatgatttcattttccggtaatcaattacagctatttactccattcaccgtttccagaccatacttaccacctggttatttttagatggcatgaaaaaattactccaataaatgggatatgggagatgatgctgagcagcagagcgtttgcactatatgtgaccataaatcaagatgatatgttactaaaacagctgtctggatatgatggaaagcagattgtggccacctgcccaaaagttggctgtggctagaaaccagtttggaaagacagcaaatctctaattgaatagttaactgaataatgaccctaacggagtaccattcccttcaataatgctgctcatcagttatcgttagtgttagtgtattttatgtgtggccaaagacaattcatcttcca

SEQ ID NO: 472078 - DNA, 516 bp, Homo sapiens
ggaacgccacatgactatagggatgctcagaaaaacctggcagggactgagcacatcttggaagaaggttcgaccatcctcctttggctcggagaagtttgtcattactgatcgaccttctgctgcaggtctgttggagtttgccggaggtccactccagaccctgtttgcctgggtatcaccagccaaggctgcagaacagcaaatattgcagaacagtaaatgttggtgcctaattctacctctggaagcttcgtctcagaggggtaccgagctgtatgaggtgtcagttggcccctactgggaagtgcctcccagtaaggctcttggcttcatccttgaatctctcattatcttacactccatatctaatccaggagcaggtcttgtcagccatattctcaaagtagacccagaatgtgactaactgtcaccagctctgctaccactactctgatcacattatggttacattttactgaatttaacatagaagcctcttatttggttctgctg

SEQ ID NO: 472079 - DNA, 863 bp, Homo sapiens
gcattgtaccttggaaggtgcactcacacacaccgacacactctcactgggaccatgcaggaacactgattcacctaacgggcacagcttcgggatgtgggaggaaaccggagtacccggagaaaacccacacaaatgtggagagaatgtacaaactctgcacaggcagagtcctcctccgggaatccagttcttttctcatcaaccttataatcaaatgacattgaacgaagtgatacaatttgaggacatgctgtatatttattacttatttgtttatagcctgacagaagagcagtttcctcaaaaaccagaagacactgtacaccgagaagatgactttaatagaagtgggaaagagggcaatttgtcttatttcctacctgatcaattaataataaccatttatcctctgggtgccttctatgagccaggtggcattttcctgctgccatatgcccatcagtctataccaagcttcagtattagtcacttatcgagttactgactgaagctacctgcatttgaacagaacacatccacaaataaagtattttaatagtgaaaagataataatagtttcctggcaataataacaagcacatgggggctatttcatctatgagagagtgtgtatgtgtgtatactgtgtgtatgttagtgcttcagagatgcttgatttcctaacagaagatggattttttggtggaaaattttccttttcaaagttaattacttcagtcatgtttgaattttgtataaattgagtaatcagaaaaataaatactaaaactcaggaggactgtcaactttgcctaagtaaaggcttgtctgatagatccataaattaagaaacaaaatac

SEQ ID NO: 472080 - DNA, 609 bp, Homo sapiens
gaaaagagtcagcgaagggggataaggatggggctgttttatacgattggggtagtgggctccatccatttcgaacttcctggtggctttgtttacactgtgagggtaaaaccacctactcaagcctcagcaatggcagaagcccctcccacaaccaagctccagcatctcaggtcaatctcagactcctgctgtgctggcagcaagaatttcaagccagtggatcttagtttgccaggctctgtgaggcttgccctccgcggactgcacccactgtccaaccagtccgagtgtgatgaaccaggttggaccagctccatccgatgggcaagaccaccctacagaggtcagaaccaaaatctcctatgggagcaagttgagcctagggaaatggctatccctggctgtgctccactacagatgctcctgcaccaaaccctctaccactacagatgctcccgcaccaaaccctctaggctccatatcatcttgcttactgccactactacctctctaagcagctgtccttgcaaacttcagtgtccttggtgattgatctcctcctgctgggatttcagaggctcatgattattctagtgtggaagctgc

SEQ ID NO: 472081 - DNA, 524 bp, Homo sapiens
attggatactataatcgataaagcagtgtgacaatggacttaacacagaaaataggtaccagagaaatgggatatttccatgggacattgctaaagatacctgaaaacgtggaagcgactttggaactgggtaacaggcagacagacttgttgaatggttgtgaccaaaatgttgatagtgatacagacagtgaagtggctgaggaggtctcagatgaagcctgtgaaaagagctatggggctgtatgctgcagagtcacaggagtgggggtgcccacagcattgagaacccactctttgcaccagtgtgacttggatgacaggtctgatattgatgaaatccctcagcttttgtctgggatcttttctttatccttgacctttgggagtttgattattaagtcccttgagtcagtcttctttgggctaaagtcttggtgttgtataaccttcttgtatttgagtattgacatctttctctaggtttgggaagttctctgttattattcctttgaataagcttt

SEQ ID NO: 472082 - DNA, 1311 bp, Homo sapiens
ccgtcgtagcaaatggcacaccaggagattatatcccacacttggctcggagggtcccacgcccacagaaccttgctcacttctagcacagaagtccgagattgaactgccaggtggcagtgaggctgggggaggggcatacaccattgctgaggcttgcctaggtaaacaaagtcactaggaagctcaaactgggtggagcccactgcagctcaaggaggcctgcctgcctctgtagactccacctctcgggcagggcatagctgaataaaaggcagcagaaacttctgcagacttaaacgttcctgtctgagagctttgaagagagcagtggttctcccagcacagagtttgagatctgagaacagacagactgcctcctcaagtgggtccctgacccccgagtagcctaactggaagaaacctcccagtaggggctgactgacacctcacagagctgggtgcccctctgaaacgaagcttccagaggaaggatcaggcagtaacatttgctgttctgcaatatttgctgttctgcagccttggctggtgatactcaggcaaacagggtctggagtggacctccagcaaactccaagagacctgcagctgagattcctgactgtcagaaggaaaacaaacagaaaggaataacatcaacaaaaaggacattcacaccaaaaccccatatgtaggtcaccatcatcaaagaccaaaagtagataagaccacaaagatgggaagaaaccaaagcagaaaagctgaaaattctaaaaatcagagtgcctcttctcctccaaaggatcgcagctcctcttcagcaatggaacatagctggacggagaatgactttgacaagttgacagaagtaggcttcagaagatctgtaataacaaacttatccgagctaaaggaggatgttcgagcccatcacaaggaagctaaagaccttgaaaaaagattagatgaatggctaactagaataaacagtgtagagaagtccttaaatgagctgatggagctgaaaaccatggcacgagaattacgtgacacatgcacaagcttcagtagcagattcgatcaagtggaggaaaagataccagtgattgaagatcaaatgaatgaaatgaaacaagcaaacgctgagagattttgtctccaccaggcctgccttaaaagagctccagaaggaagcactaaacatggaaaggagcaaccggtaccagccactggaaaaacatgccaaattgtaaagaccatcgatgctaggaagaaactgaatcaactaatgagcaaaataacaagctaaca

SEQ ID NO: 472083 - DNA, 558 bp, Homo sapiens
agcgctagcggtggtgaatccatatgggttgttgcagcaacctccattcttgtgttctcagaagaaagaatttgactgaaggacataaggcagaaggagagactgaggcaaattttggaacaggaaaaaaggaagagggatcgggaaagggaaacaacactgagtggtcactgagccacagcaggaatggagaccaccctgcctgcctgaggaagggacccattagtgtctggcagcccaggtcctgctttttggagaatcgctgttgttcattgcctttcaaagccaaatcagaggaggacattgggaagaatacctttttcgatggctacggaaatttagtagcccacttcctattggtgtatgagggatggcaggaaaaccagaatttctttgagtttcctcaaaacagcaattttgaatgctctgtttgaaagttcacatatctctgtttctccagattggtccctggtgccttatttagttcatttggtgagatcgtgttttcctagatggtcttgatacttgtaaatgttcatttgtgtctgtagtgaagag

SEQ ID NO: 472084 - DNA, 832 bp, Homo sapiens
tgatgggtgcagcaaaccaacatggcacatgtatacctatgtaacaggcctgcacaccaaccacagaatcagacagtttgcatcatcttggtgcaatgtctgctgactcctggcctcctaatgagtaatataatcatccaggtgatgacctacctgtgccccagtgtcaagtttcctggtgacattccagagatcagagagtttcatcctaactccactgcacccacaactctcaggccacccactgggctttcctctgggcccctgactctcctctccagcctcagtctctcctccactccgcccccacctagccctctggccacaggagccacaagccattctcagaagcggctgtgcagtccccgctttgatgctattgttccctgctctccctttctcccttgcctacctggcaagcggcacttatttcaaaaggtcctctgggaagcctttgctaaccctccctcccccgcccaccaggtagaaatggccactcctcctttgtgttctcagctgtcctttgagtcacagtgtctgtgacggtttactttccacgttgttgtgcttttctccaacaaaaatcgtaagctcctcgagagctaggactgtgtctcaattatacctgccttcctagtaccgagcacatctgactcgtctcagtgacttgagttcagtgagggagcaaatgaagcttgtacaagcatagagaactcttgctgttcatggtggcggtgaggatgggaggatctgccttgtgatggtccttgtaacagacatttgatcccgagcaatatcttctagacctctcggcattcatggacactttatc

SEQ ID NO: 472085 - DNA, 843 bp, Homo sapiens
tcagagaagtgaaggactttcagctgcagtcacagctgccaagtgacggagctcggcttcaatcctggttctatgcaatgctagagtccacactgtccatctctgctctgatgaaggcagattcctgcccacaagtgaaggctggggaggcctcaggaaacttacaatcatggcggaaagggaagcaaacacttccttcacttggtggcagcaaggagatgtgcagagcgaagccggcgaaagccccttataaagccatcaaatctcgtgagaactcgctcactaccacgagaacagcatggagtgctgcttccccagttggctccttgtccacaggtccacagcgatggcacagcagcagctccaggtcctggaggacagcccggctgggctctctgcctcctgacttctcctcttggttgtctgaactccttcgcttcctgacatctcccccagccctgccctttcagctcttctttatctaccctgtccgctctttcctgtggattctgatcctcagacgatggggcctggagtgtggctggggaggccttcatggtggtctgggatttggctggagtattcacagcagccagccaggtgcagatagcatcttttgccctgggagaagtagcctcttctactgtaccatgctgaaagagtgtctgttcttcctcacttcaaatgatgttgaaaaggccctttctgttgccttagcctcaggagacaccaggctcctggaaggaactgacaaggaaagcaacctcgaaggcaatgcttcccgctgaccgagtgctttctgcccatgacttcactgatgcctcttaacagccagtcaccatt

SEQ ID NO: 472086 - DNA, 892 bp, Homo sapiens
ccacagctatgtgcatcagttggcgtatcagttccgtccgtccctggtgcatcagctccatccacccctggtgcattagctccatccacccctggtgcatcagctccatccaccccaggagcatcagcgtcgtccaccccaggtgcatcagctccatccaccccctggggcatcagctccatcaacacctggtgcatcagcgccatccaccactggtgcatcagctatgtccacccctgctgaatcagctccatccaacgctggtgcatcagctctgtctacccctggtgcatcagctctgtctacccctggtgcaccagctccatccacccctggagcatcagctccatccactgctggtgcatcagctccatccacccctggtacatcagctctgtccaacgctggtgcatcagctccatccacccccggtacaccagctccatccaacactggtgcatcagctccgtccacccctggtgcacaagctccgtccacccctggtgcatcagctccatccgcccctagtgcgtctcctctgtccacccctggtgcaccagctccatccacccctggtgcatccgttccgtccacccctggtacaccagctccatccagcttcgctgcatcgctatgggccttgaaatgtgccagtgaaatgtgtgaatattcacagtaagtgggggaaaataaaggccataaatagcctcatgacatttcaagttgtgttttaccagacttatgagttaatagaaaacacggcctttggagcttcttggatttcaggatcgcaggaaacaaggctagaaaatcaagcagccccagaggtcatattcatcagcaaaattctcccagtgggacctggtagcacattgaaaacttgggccacttc

SEQ ID NO: 472087 - DNA, 1420 bp, Homo sapiens
acctctcctgcttcaagccctgtgggcattatccccagtgcaggggctctgtggggagaaaactctgatgattattgcctgcgtgggaatctacctggtgccaaagaggcgggacaggctactgactgactggctaacagaccagcaggggactgacagcagagtgagcctgcagttgatacgttcacactctgagcctggccaggtgtcctatacacaatggcagcctgctgtggacacagcaacccagggaccaacaggctctcttgggccacgaccgatggagcggctgccctccaccagcagagggcagagggccacagtgctacagccttctgggtactcacattcgaccttcagcaacagagcatttcttaccaccacccccgttccccggctggaagtcccggagcagcaggtgttcacaacagcatcattgccaccacccccgcccccctcgaactctctggccatgttcagtctttttacctcacagaaccttggctttttcaactcaagaggaggataatgtctacctccatttaaaaaggtgaaggggatatgttttgcaaattctaaagttgtagatgaatcaatcatccccagaactacttaccacaataataaaagatgttgaggggaaaggggagggactggaaggagaaacttttggggcaatggaaatgtcctgtatcaacatatagagatgatggtagaagagtatatatttagtgcaagtcattgaaatgtacacctaagatctatgaatttcactgtatgcaaagtttctcctttgaaaattttccctttcaaaaacagctatacaaggcattattggtacaaatggggaaagctgaatatatctacattggataatattattgtattagtgctaaattcttggatgtcaaattcttggatgttccagagagtgtttcgcatgtgattaagatcgggatgggcagactaagtgaagcagattgcccccttaacgggggtgggactcatacaatcaatcaaaggccaggagagaattaagaggcctaataggaaacaaatgctttcctgggtatccatccagctttccttccatcttgggaatttcagcctccataatctcagaagcaaattcacatatgtatacacacacatatacatttcataggtatgtggctaagagtgtatttttaaaagttcagccatgagatgattggtgaagccagccaatgaataagggtgtgttctgttatatgactcggtcttcttttgtacacgattgaagttctgcatttgaagtaggaggacaggagagagcaagaccacctaggatgataacagctgaatttctcaacagacacttcaaagccctaggggttaacttagagagtcaaaaatcccacccataaccctgtccctaaac

SEQ ID NO: 472088 - DNA, 806 bp, Homo sapiens
gcgagcatgttttcttagccaggggaaatgagcaccatgcaaacaacgaagacggctgcgtgtgataaggggctgggctgctccagtgtggcctggaggggaaagagggactggtcactgctggctgccttaggtggagagaagacatcaggcctcagaatgtctgagctggagggggccttgggaaacactgccaccgccgggagccccgtactatcagccatggtcaaccccactgtgttcattgatggtgagtccttgggccacgtctccttcaagctgtctgcagacaagtttccaaagacagcagaaaactttcgtgctatgagcactggagagaaaggatttggttataagggttcctgctttcacagaattattccagggtttatgtgtcggggtggtgacttcacgcaccataatggcactggtggcaagtccgtccaccaggagaaatttgatgatgagaacttcatcctaaaacatacaggtcctggcatcttgtccacggcaaatgctggacccaacacaaattgttcctggtttttcatctccattgcgaagactgagagtttggatggccagcacgtggtctttggcaatatgaaagaaggcatgaatgttgtggaggccatggagccctttgggttcaggaatggcaagaccagcaagaagatcaccattgctgactgtggacaactccaacaaatttgacttgtgttttatcttaaacaccagaccattccttctgtagctcaggagagcaccccaccaccccttttgctctccatattctagaatctttg

SEQ ID NO: 472089 - DNA, 3192 bp, Homo sapiens
agatagcatcaagaagggacccctggggaaaaggcagtctttaagcgtcacaccagtctgaagaagtgcatgcagttatgacggccatcttacagagtgagaaagtgaggttcagcgctaacgcctcgtccaagagggagaatctgttccgtgcctctcaacgtctggtgtttgctggcaatcctgggtgctccttggctcgtgtcagcgtcatgccgtctccctccatcgtcacatggcgtcccccattctgcttccggggaggcccagccaaagacaaaatatctgcggaatacatgaatgcaggaatgaatgattcctggcagaggaggaagctgaaattcacagagatgacagccattgctcaggggacacaaaagagagaaaaccacttgaatggtcccccaggccggctggctataaatgtcttcatagaagggcccagcctggactttggtgcccagcaattacggcctccgtacaccccgcccagatgaccagcctgaggcacctctttggtcttctccctgcccaggcaggcaaccactggtctgctttctgttactaaagattagtttgcattttctagaatttcatataaaagcaaccatacagtatttactgatggttttttcactctgcctaattatattgctatgtatctacgcagtctcatatgttagagcgtgttccttcttattgctccattgcatgaatataccataatttgttcatcaatcaccagctgaaggacatttggttgattccagtttggggctattacaaataagtctgctatgaatatttgtgtacaagtctttgtatgaatagatgggacacatgcttttttttcctcatgggttatgtggaatttcatagatttagattttacatttagatctatgatccattttgagctcatttttaaaatatagtataaagtatagataggtctttctttctttgtttttgcaagtagatattcaattgtttcagcaccattccataaaaaaactgttctttctccactgaattgcatttgcatctttgtcaaacatcagttgtccatacacatgtgtatctatttctggatttccttttgtattccattgatctatgtgtctatcattaagcccatgccacacagtgttggttactgtagctttatgctaagtcttgatatcagggagtgttaagtcctcccacttcacggtttttcagggttgctttgactattctaggtcctttgcatttcatgcaactcttagaatcagcttatcagtcttacacaaaagactgggattttgattggattacattgactctatgggttaatctggggagagctgacatcttaacaatgttgagtcttctaactcatgaacatagtatacctctccattcatttaggttttcttgcacttcggcaatgtttcataattttcagtgtgcacgttttgcacatcatttttcagcgtttgcactgtgtttcagtgttttcatgtcttttgatgctgatgtgaatgttgtttttaaaattttcagtttctgtattgttcattgataatacacagaaatagaattgaattttgaatgttaatcttgtatcctgcaatcttgctaaactcagtaataaattacagtgcaaattagtttttctacgcacaagattatgtcatctgcaacagatttacttctttcattctaatcggaatgccatttatttatttatttatttatttttccctcattgctctcgtgaggacttccagtacagtgttgaatagaagtggtgagagcagacatccttgtcttattcctgatcctagtttgttaacagagtgaattacattgattaattttcaatgttaagccaaatttgcattcctggaataaatcctacctggttatgatgtatcatccttttgatatgttattggatccaatttgataaaattttgttatgaatttttacatctatgtttatgaggggtattagttgtagtgttctttcttgtaattttctgatttaggtatacgggtgacgctggcttcatagtatgagtaggggagtattccctcctcttcagttttctggaaaagattgtgcagaatcgatattattctttcttaaatatttggtagaattcaccagtgaagcctgaggtttcctttgagagaagttttctaggtataattcaatttctttaatagatatggatttacatctatttcttatttatttctttttgagtgaccattggtagctaacatctttcaaggaatttgtctatttttttaactcatggaattattagcccaaagttattcatatttttcctttattgtctctttagtatccatagaatttgtagtaatgccacctctcattcttggtattgtaatttgtatcttccctcttttttgactagtgtgactagacgcttatcaattttattgatcttctcaataaccagcttttgggtttactgatttttctcaggtttttctgctttctatttcatttatttcctctctgagttttattatttcctttcttctgcttcctttggttttattctgctcccgtttctctagtttctttaggtggaagctgaggtccaggatttgggaacttttttccttttctaataacatattagtgctgcaaatttccacctaagaactgctctatcagcatgccacaaattttgatatgttgtgtgtttaatttcattccattaaaatattttctaatttcccttttaatttcttccttgatccttgagttatttagaagtgtgttattacatttccaagtgtttgggtgatttttctggagatctttctcttattgatttccaatttaattccatcatggtcagtgaacattctttgtatgacttgaatcattttaaatttattgagactatattgagactatagtctatcttgcaaccatttcatgtatacttgaaaagaatatgtattttgctgttttgagtggtgtgttctatgaatatcaattagatcaagttggttgataattctgttcagactttctgtatgctcactgatttttttccactagtcctatcaattcttgaaagaggagtatagaaatctctgattataactgtggatttgtctgtttctccttggaattctatcagtttctgtttcttctacttt

SEQ ID NO: 472090 - DNA, 963 bp, Homo sapiens
aagctgtggggcaggaggggcctgtccttgaaggtctactcaaatgccacctcccctggggggccccaggaccacctgtagattgtgctcccccagaggggttccttggggacaatgtagcccacagccttgctctccagtgagggggccctcagttggtgttgcctgggggtctggccgtggggtttggaggctggtgggtcaaccctgctggtgggttgagctggaccaggaagtgctgctcagggaggacccactggacttcccgcaggcccggtccttggcctccaccccacactggccactgggaaatcagggacaagacctcttccctggcaccttcatcctgcatgtttcttcccgcttgctttccgcccgggattaccgccggggctgggcttctgcacgtggctgttgcttgggcccccacgtgggctgcttgaaaaacatctctctgaaagcagagaaagtgtgagccgtcaagaaggagcgtgtggaaggagagaggtcctcggaggaggggaaatttacagcattcatttggcccattctaaggacaccgtgaggcctgcatgaaatgccttccggagcttgggaatttcgtggtggggtaaactgcttatcttttcagtactgtttttgtttaaaagcctcaaatcattttgtgcaacacttgcagagaattaaaaaaaaaaaagactcaaatctctgggtcaccagagtccctcattttaataaatgattttctgttatgcttgataatggcattaatagaataagaagggagaaatagaagaccaaaactggtgaccaaggattacacctggctggtctacagtgtccccagttcatgtcattatcattggatttgctttttaaattcagaataggtgttgggttggagggtgggctctttgtcttcattgctgtgatgtttggaaaataaaacaactgtggaaaata

SEQ ID NO: 472091 - DNA, 634 bp, Homo sapiens
ccctcaggactcctcgggcctgaacgtctttgggaggaactctagcatgtccagggcagggcgggggtgcctgggaaagcggagtggcaggcagcctcagttccacatgcccctctcactctcactgccctgtaaagatactgattttcattctgcccagtgcagaaaccctccaggtgtgagacgtagaggaaagagcaccaggccggggtcacaaaaaccagacaaattctactctcaaggagcttgtactcttgatggagagatagtgaatacactaacagtaaataagctgcagtctcctcccagggcgggctcagtgaccactccagagcggccctggacgttgctgccctctgacaacctggaagccatcagttctctctcctgcaaactgcagaacttgggcaatttgggcagccaaagacctcttcccacggattgtagccaactttaatcctgcctgcccagcccatgctcctgcttctgatggcagcacccttagagaggccccctccccactctcaagttgtgagttgggtggggtttaccttgagtgcacctgtggcccaagcctggccaatgagagcaccacattcctctcgtcttgtctcagggtttgtttgggggtgag

SEQ ID NO: 472092 - DNA, 602 bp, Homo sapiens
aaagatcgaatgtcaggctgaacataggtgctggtgataggagtatgaaatcctggggacccttggacaccctgattcctcatctgaccacgtgctctggtggacagtctggccaggagccggtcgccgtctctgctgctggacagctcttctgcctcaccagtgtttgccctgtgttcagtccacctctgctcatgatgcagacggtgctgagtgagcgggccccttctgctctcctggccaacgttaagtgccttcagactgaaaagaaccgtccagagaggcttttccggctagagattaatgtcactgaaaaatgtgggtcccgagcgattaatgcggccttctttgccacacattatgaggaaactcatcagggtctctccccaccccggcatggggcttctcatccttgggaaaaagagacagtgctcataaatccagggaaagttaagatggccgtgagagaatctggagtgtttgacctgcttccttggaggagacggtggtctttgatgcctgggtcctgggccttgtgccatcaaggaaatgggtgaaggagatgctggcaagaatgaagacctgttgggggcagcggttaa

SEQ ID NO: 472093 - DNA, 770 bp, Homo sapiens
attatcaatggcaaatgcaggctcctcctgtggaaagaaattctgcttcctggagctggtggtctcttctcccaccagttcaaagaagcttctctcgcactgtggagctgccctccctgccccacaaggtgaacccttgctgaagcaggacagcaagcaggtccaggtggacctccaggacctgggctatgagacttgtgccaaagcaagaatgaggctgaacaggaggaaaccaccagtaccggtaagagcacaggagtgtgaggagcacaacagcctcaaggaaatggtcctgatggaggggctgtgctctaagcaggggtgccggggctcaacgctggctagttcctccgagaggaagcccttggagaaccagctagggaagcaggaagagttctgggtatatggaaagtcagaaaacatctcagtcctacgaaaggacatcaaagatctgaaggcccagctgcagaatgccaacaaggtcattcaaaacctcaagatccgggtctggtccctcttggttacaagtgattatttgtctagtctggaaagaccctggaagctgggagctgttggcaccctggaggggtcttcacctcatagtgtcactgatgaggatgaggtgtggctgtctgatggcactggggctttctactctccaggacttcaggccaaaaaggacctggagagtctcatccagagagtatcccagctggaggtccagctcccaaaaaaatcaactagaagggaagctggctgaggagctgaga

SEQ ID NO: 472094 - DNA, 1556 bp, Homo sapiens
tacaagaagcatggcccccgcatctgctcctaatgagggcctgaggctgcttccacttgcagcagaaggtgaaaaggaaccagggtgtgcagagatcatatggcgagagaggaagcaaaagagagcaaggaaagaacttaaagtataataaatatatatatatggcggtgcgagggccactgcacagccagcagagccgtggtgaggacggcagtgcctgcacgcagctctccgcctcccctgcccgccagcccaggcggccccagcagcagcgaccagaggagcccccgcagccgcgcaacggccaggtggacgcctctatctacagcctcggaaaaaccttcgtgaacatcacgccagctaaggttggtgtcctggttggcaaagactggtcaagctttttcgtgaataggctgacactgcggggccagaaatgtactgtggtcctggactcactgctgcaggatggggaactgaccgtgcatcttcaaacgaagagcatcggtggagcccccaccttcaatgtcactgtcaccatgattgccaagacactgggcctgctgatgagcaaagaagctgtccatggcagtttcatcaacaagaaatgttatgaaatggcctcccatcttcagcgttcccagtactgacctcctttgttccttcccctcaaccgttccccacagctttgcccccctttccttctcatacacacatataccattttaattttgggggacattaccccacacccctattgctgccaaaaccacatgggctgggggccagggatagatggacagacaccttcctctacccatagccctcctgtgtgttcttggaaaacgttttggagggattttttatgaataaaaaagattctactaaaataaataactacatatgtggtcatattgtttgaatctgtattcttttactttgatatatttatgaatacttacaccagtactaccattttaaattactgtagcttttaaatcaggtttgaagtctagcagagtaagtcctccaacttactgcttcttcaagaccgacttgcctattctaggttcttggattttcaaatatattttgaaattagcttttacatttctctaaaatctcctactagaaatattaatcagaattctgttgaggtaatatgctaacaaaattgaatcttccaatcaatgaacatgatatatatttctctatttagtcttctttaatttttctcaccaattgcttttacgggccttgtacccgcttcattgcatgtattcttaagcatgtaatgattctgactattaatctcgattatgttttactgaatttcattttctagctgctaattgctagtatggagaaattaagatgatgaaatcaatgttataaaggcatcatttaggtacaacagactgcaccactttaaaatgtgtaattcaatgcatgtttacaaatgtatacactaatggaactactgccacaaccaagatagaggaatttccctacgccccaaagtttcttgtacccctttgcagttcatcagtctttcagcc

SEQ ID NO: 472095 - DNA, 498 bp, Homo sapiens
cggaagggtgttggtgtgatgatgcaacagtatttgctcccctctcctcctttcttgcgggagaccttccttcctgttctggactggactgctggctctctaggcctgccagacagcggtcatcctgggaatgtccctcaccctcacgcttttcccggtgcgcatgggtggggctttttggctggtggatttcatgggaaggagattgggggcaagccagctttttctttggagacctctccaaatgacagtaactataggcctttcctctgtggccagtttttccagaggagggtcctccagtctccttcctgtgggagagggttgtggctaagcctggctgggtccctcactccatccatcaactttaacttcatccttatcttcagtctgttgcctgacttccatgcttcattgtgtctagagtcctcaagttcaggacctctgtggtttaacttctccagagaattactcacctcctgagagcactgaagagag

SEQ ID NO: 472096 - DNA, 798 bp, Homo sapiens
gaatctgtaccggaagattgtgatgtgcaacaaaaagtggattttatatgacaaccatcgaccaccagctcagtggatggaacaagaagaagctccaaagcagttcccaaagccacacttgcaccaaaaaatgggcatggtcactgtttggtggtctgctgccggtcggatccactacagctttgtgaatcctgatgaaatcattacatctaagacgtatgctcagcaagtccatgagatgcatcgaaaactgcaatacctgcagctggcattggtcaacagaaaagacccaattcttctccatgacaatgcccaaccacatgtcacacaaccaacacttcaaaaggtgaacaaattgggctatgaagttttgcctcatctgccatattcacctgacctctcgccaaccaactaccacttcttcaagcatctcaacaactttttgcagggaaaatgtttctacaatgagcaagatgcaaaaaatgctatctaagagtttgtagaatcttgaagcatggatttttatgctacaggaataaacaaacttatttttcattggcaaaaatatgttgattgtaatggtttctattttcattaataaagatgtgtttgagcctagttataatgatttaacattcacagcctgaaagcataattacttttgcaccaactttttttttatggcagtgtattttcttttatcacatatttagaattatctaatcatacattgttggagctggctgataacttagagatttcctagtttgccttcctcatttaaaaaataaagaagtt

SEQ ID NO: 472097 - DNA, 622 bp, Homo sapiens
ccagatcacgtctcaggccaccatggacccggccccccagcgcagttacctgcttcagcatgtttgttctctggtggaagtgggatcaggagaccctgggctaggacgctgtctttgccgccaacatgctgagtgcctttggacaagtcctctgatgcctttgggtctgtttcctgtgggacctggtagtagcactaacctggctccaccacaggcaggagcccgaggtgtggcttccaacccagacggctgcgtggctgccgtgacaaagtaccgcaaactgggtggcctaaaacaacagaagtttattctttcacagttctggaggccagaaacccaatatcaagatgtcagcagggccacattcctgtcaatggctctaggggagaacccactgcgtgcctcttccagcttctcgtggttaccacatcactccaatctctgcctctgtcttcacctcaccttcttctctgtgtgtgagctctgcgtgtctacacaagggcaattgacattggatttagagcccactcagataatccaggaggatctcctcatctcaagatctcttacttagctacatctgcaaaggccgttttttcaagtaagatcatattcacaggtt

SEQ ID NO: 472098 - DNA, 800 bp, Homo sapiens
gcctccaggtagacggtgttatactagagatgtaactgagagagccaaataggcaggccaagctccttgaggctagacctagactgctgctgggctttgcaaaacccaactggggatgggtcctgggctgctctctgtggttctgaagcaccatctcccgccagtgtggctgctcccccttaatctgcatctctggtgtctcctatacagcctctgccagaaattcaaaagcagagagggcttttattttctatcttccaaaataaatttcaaatttggcaaacatgtcctcctggctctccccagcacccccactctcagtggagttgtccacgggtccaatgggcatcgtggcggtggtggtggcaggagccacaataggctcctggttcctcttgaaaatgttcctcatggtggcagaggaaacagctggggacgagaggtgaagagggcaggccttgaccccaaaactggtcttgaagtgaaaaaccaaggtccactggacttcgcctctggggacaaagagatggatgccatttatcagttgagcctagctcctccattctacccttgccgctggattggcagtcctcctcccctttctgcagacagctccccacagccggtccacgaagtgttcattgaaccttatctgaggcacctggaagtggccctggcaccgtagagggacccaaggttcatggtggatgcaggccttctctccagactgaccgtccagaaatggtcctgtagcaaagtaaagctgcttggtgtcaaataaaccagccaggaatgaagac

SEQ ID NO: 472099 - DNA, 576 bp, Homo sapiens
ccacagcacactgctgggccccggtggaagatgacagcacaccactgccccctccctgcccccaccctctctcctcagcaagccccaccccacctgggcctgctgcttttgaagcaccccaaattcactgtccctagggcttctccccgaggccgcactgggaaacctgcaggcatcctgcaggctgccccttcctgcaggacagcctcctttccctgcaagccccccgctggggaggctccttgtcctctcaagctggtggctctgtccttccctatcaagatccagcggctggagctggagcctggcgtcatcctggcccaagctgcccaggcgggacgaccagagaactcagaggtggggatgcagtgggacgccacgttcagcacgcaggttgctcactcactggaccagtggctcttggaaccttttgagaatttcacaaaagttcctttctctcaaaaagaacaatagctagtgttaattgtcctcttagtatgttccaagatctatgttaaatttatatacctatcccatctaaccctcatcatggccctatgagaagggtgctatatt

SEQ ID NO: 472100 - DNA, 1262 bp, Homo sapiens
ggaatgtcacctctgttaatggggaagcgacacctgtgcacagccggaaccacctctctgtcttcattaggcagtccgcggcctggctgccggctgccctcgctgggtgacagatgatggggatgaggagtgagagcagcagcctcctgctgtccaggattcattcccagacaatgaccccaaatgcctgtccctgctccccccaccccccaacatcaaaatagccgagaaaaatgcccttctcgggtcattggagatggaggtgggttggggccacctgtggaggcacctcaagggctctttctcaaagataactgtcatggcatcactcccctgctccaagctttttggtaacaggattggcaaaatgttgacaactgttgaagcagggcccttggctgtctggccctctgccagtcttccagcctcacccgttgccagtcacccaattgccttccatactcgggatcctcaggaaacatccacacttctccttagtaccaggaaccgttataatgctctggaacagttgtttgtttccatttcacgaatccctgctggtacagagtctcctttaagccatgggaattcaacactcctggattctaaggacagaaatggatatgtgaaagccagggcccagctagtaagtgacacaaatggaggcagtgatacaaaaatccaggatacaaccagaggcagtatgaccccggagcctgttctcctaaccactctgaaattgcctcttaaggttccctggggcttcctgagctcctggttggtgactctgaggcctccaggatggcaacccatcatcagcttcagagggccccagaccggaaggatcctggaacctgaagggacctgggggcctaaacaccctcagggaaatcctggagctctctgcaagctagttcaaccgtatccatccatttagctaaagcacatccttcgctgaagccagcctggtctcatccccacttctacccccaagccttgttcatgatatgcctttgcctacgatgcccatccttctgcttcctgccaatccagaccttacttgttcttcccactctgagttccacctcctccaggaagctttccctgaacaacaccacccccaaccaggggagatttttctctgtttctgaccttctttggcatttatggctaccactctattggtatttgattatgaactttcacttcttacctttgctcatgagtgtttctggttggtttctccatttagaatgtaatcc

SEQ ID NO: 472101 - DNA, 508 bp, Homo sapiens
gggagacagctcccacccaggtcaccagcagcctccacagtagttactcagtgaacatcatgcccaacataggtgtggcaattgagggattccaaggaattggcaaagaagtgaaatgccattcagaaagcaaggcgaatgcatctacatgtaaaactcaggataccaggcacacagatgaggtcccacccccacacactgtctccctgttctcacgaccagctgtgggtggtcccccttatctttctaagcatttccgctatctgctccccacataccatccccctaatctgggaaaggttttgtcagtcctttatgccactgtaactacaggattcaaagcttatggggctaagggcttggaaaaaatcaaagacaaacttttggagatgggtcttgcatattcctgtgggctgactgaacaccgtggctcggggaagtctgggttccttcacactttgactgtcagaaaatgaagatcacaagctctgggaggtgtaaccttgtc

SEQ ID NO: 472102 - DNA, 575 bp, Homo sapiens
tagatagccagcttgcctgggatgaaaacaggcaagaaaaatgattacagagatcaaagcccaaggctggcagtaccagtaactaacacctgtgtacagcatgacacccttttcagaagaaaccagtgtaaatcactgctgcctctcatgaatacagactggtcctcacaagactctgagggtcccaggacagggactggcttgcttgaagtcacactgctgctgtgtcttcagcagccccatgaccacattttggaagacggcccctgtgttctgattgctctctgtgaggcgtacgaaatggaagagattggcaccgtcagagagaagtgcagaggcactgcagatttttgtagtgccctgaggtctcgtccagaaactgtggtgtggagaactgctccccctgctgactcactgggtgccaggcctttgcttcaagaactaccttagtgtcagattgaagaagtctggaatttcacaaccgacttagaaagtgtgaaaacagaaatagtaagcattattccccgcacccaaagtttgaacctgttttgtagaagggaggaagcggctctaac

SEQ ID NO: 472103 - DNA, 635 bp, Homo sapiens
taaagaatattaataaaagtaatgataataataatctttgcactgctgctaggtgcctgtttgagtatgtctcatccaaaatgcttgagagcaggaacgttttggattttggaatatttgcattatatgtattcactgattgaccatcccaaatctaaaaatttgaaatccagcatgctccaaaatctgaaactttttgagtgccaacatgacgctcacaggaaatgctccctggagcattttgggctttggattttcagatttgggatgcttaatctctatcatactgatgaagctaccttccacaggtgtcttgggaaagtagtttctaaactgtgggccatggaacccctggaatttgtgggaatagctcagggaccaataggtgaaaatgggaagagaaatgggcaggcctcaggcattcatcaccttgaccccaggaagttccactttcctctgtttcgatcagtgcctagtagagagtctggcacaaaacaggcactcaataaatgaattaatgttttagacatttcagttccttctatgagcctgtaaaatcaaaaccaagttatttattctcaagaacaatggttgtgcaggcattgggcaaacattctcattctaaaagggagaaa

SEQ ID NO: 472104 - DNA, 785 bp, Homo sapiens
gggcggtgcaagatgtggtttgttaaacagatgcttgaaggcagcatgctcattggaaaggagaagggaaagagactgagagatctgattcagggaagtcagctaaggaactatattccaaatgaggagaaagaaataaaagattttattcctagtgagggaagcacagatgcagataaaaagacagaaaagctgcagctaagcaggccttgccaggaaaaagaagcctataaggagcagaacctggaaaacaacaggcaaagcaaaactgcaggtccagagcagcgtgaagcaaggataagaccactaagtgaagatgctatcatctgtccagaggccagctcaactggttggagagctgagctagacggaaggcagcagggaagcctccctgaattagcaccagcatggaaggctaggctaacatgaggggtgggtggaaatgattattcatttacacagtcagttagagttagttttgtccatgagggacagaaaattcaaataactgtggcttaaataaggaagaagctcatgtttctgtcccgtaaaagcccaggaatatcatgtgcctaaaccagaggttactttagggaggacacgtgttccacatggccagtgaatgcatttattttacctgcctggtcccagtcagtatttaaggtgatatttctacaaacatctgatagtctccagaatgtattcattcactcattcattcatccattcatgtattcatttttattcattcatgtattcctcaattcagtaaatgtttataaagt

SEQ ID NO: 472105 - DNA, 1535 bp, Homo sapiens
acatgagggcagacaccgcactccctctctctcacagatgcatgagcctcagctgcagcgttctgacttgcagggtgggctggagtgccaaatattttgatctcacatgtacacaggctgatttcttcccatgcctgtgacttgagtgctggaatttcttctactttcttcttcttctttgtttttctttctttttcttctctttcctcctcctcctcctcttccttcttcttcttctcctcctcctaatcctctctttttctttctcttcttctttctcttctctttctctcctcctccttcttctccttctctcctcctcctccttctccttctctcctcctcctccttcttctcccctcttcctccttcttgtctttctctcctcctccttctactccttctcgtcgtcctcctcctccttctccttcttcttcttttcttcttcttcctttccttctcctcctcctcctcctaatcctctccttttctttctgttcttctttctcttctccttttctcctcctcctcctcttcctcttcttcctcctcctcttcctcctcctcctctacctcctcctcttcctcctcctcctcttcctcctcctccctcctcttcctcttcctcctcctcttcctcctcctcctcctccttcttcttcttcttcttctcctcctccttcttcttcttcttctcctcttcctcctccttcttttcttcctcttcttttcttctcttcctcctcctcctgctccttcttctcctgctcttccttcttgttcttactgtgaaggcttttttaattgttttaatttgggacagacatggccgtgggcgcttctgtggggcaagcctcactgagtctcggatacctgctcacctggatgaattgtccagggtgtggagggagaggacccagagcccgtgcccttcagatgcccccacggctggagaagctccaccctgccccacccatgccacttctgcagttccttttgttcttgcttccaagtcacaagaggctacaacaatccaaaatgatcaatcagaaaagtgaaaaggatgattccttgggaaaatacggtagtggaggtgctctgatgcagattcagccaaaatgctgtgggagtgaatgtgttgggacaattggttctgatggagatctacaggaaaaaggctcacggaaggatgtggtggaggatggattggactgggaggaggagacaggctccaaggatgtccataggctaacaaaagagcacaggctgcagagagggagtgatggctgtgggaataaagggaatgggaaggaggttcacgtggtccacacccctgccctgactgcagatgcttgaaccctcttaaaaaactatgtgggctttgggaattcagtgaatgactcaaccagaattcaagaatatcttggcttctgattgcactccttcatcaaagggggcgtgcactcccttctggttctcagatgcctccatctgttagacatgtctcctctcaattaaataaaacttgcccctcc

SEQ ID NO: 472106 - DNA, 835 bp, Homo sapiens
aggtaggcactgttattattgccactgttattattgctactttgctgatgaggaaatggagagacagctagtatcagatgttgaaaagtagactgctacatggtactgcctcctgcacagcaggaggaagtctccagtgcaggaaggattgagatccagccaacaaacacttgctgggtagcctactgtgctctgagcaccctgctggctgctctcttccctggtagcccatgtggtcctcacgtttgcttggcaaagcaggtgtcattactgctgctttactgctggggaaatacaagctcagaaaggagaaataattcatccacggtcacacgctccatctccacagctaccgagcccttctgccctccccctgctgggtgggcccagacagcagctgtctctttaacaaacatctcagccattatacccaaaagcctggaagctaccagagaaggcctggagttcgtggacagtgctcaggagcacggcagcagggcaactcctaggctgcccgcagaagcgagctatccccccagtgaatctcaaagcatcactttcctaatctgtacaatgggaataataacagtaccaccctatggggttgctatgggaacaaaataagaccacatatgaaaagctccagtccaatggctggtatatattataatataagctcaaaaccttacagactctacatcaatactcttaacagtgagaatgggtggagagtgggtttaggtccattttagaatttgtctttttctatgtttgacaagttcccaggttgagtattatgttactttataattaagaaaaaaaaaacccaataact

SEQ ID NO: 472107 - DNA, 969 bp, Homo sapiens
gtctccaggacatacatgggctcctagttctagacatggccacccccatcttggttcaggtccccccagcttcagggcccatgtcagtgaaaatgtcccaattccaaaccgtccacccactccttcagcagagagagctggatggtggagttctcagagaacaggtccatctggagcaagccaaggagcagcaggaggagctgggcagtggtaaaattaaagatgtggaaaacctgaagcttcccagccccacttgcctgcagatgaaggcagggccacctacagcagggcctctggtagccctctcaggcctctgtccatggcccagagaaggattcgaggagggctcccaagtcagagaggacccatggtctgccttccatcctccaggggctgttggagggagggagaggatcttcctgtgtctgagggcggccgtcagtgttggcagcaagtgctcctgttggcacaggggaaatataagctgcatctgccacttaaaaagcatttctgagaagtgcagaggcggcaagagtgtgcagaattgtcagcgtgtggggattagcaggccggcacatttcctcctgcaggcagccctgctccgcggctctcagagacataaggcatttcaggaaaagcatcgtccaggcacggagcagccgttaaaaggaaacccagggaaggccatgggaaaagagtggctgctctctaggaatgataggctccgcacaaaaggagcagggtccctgaggaaccagagtgaccagtgcccagcccgggctggggcctgccatcaggggccaactgctctactggcatttcaagaaccccagagaaattctgcagttaccaccacaccagtctgtgaggttggtactgccatgatcccccttctacagctggggaaactgaggcttgaatgaaaagaaatcattaagagtatggttagaacttgagccctggaccaca

SEQ ID NO: 472108 - DNA, 829 bp, Homo sapiens
taatttgtgacgccagctctaggaaatgaactcaagccctctactagtcctgacctcagaaccagctaggggacaaccagataagagtgacgtcccagaagcaagcagagatgtctggggctcaggccttgggcttctctctccaccctctctccctaggtgagctcatcaaggacaaagcagcaaatcccactggtgtgaccttgaaactatatccaaaaaccaaccccttccccactgtgactgctcctgtcccagccccagcaaccgtcatctgcctggacggctggcatggcttccggcttccacacacctccacccgctgtccaccacccacggcagccagagggagcctgctaaagcgacccccatgccagtccagggcagagctgccaggcaggctggaggcttgtagcacaggcaaggaagaccagtccagcaatcagctgagtaccaccggtgacttcagtcaatgtggcatggagcagaagaaccactcagctgagccctgcctgaattcctcacccacagcatagtgagatataataaaatggcccttgtttttttttttaattatactttaagtcttagggtacatgtacacaacgtgcaggtttgttacatatgtatacatgtgccatgttgatgtgctgcaccaattaactcgtcgtttagcattaggtatatctcctaatgctatccctcccccttccccccaccccacaacaggccccagtgtgtgatgttccccttcccgtgtccatgtgttctcattgttcaattcccacctatgagtgagaatatgcagtgtttggttttttgtccttgc

SEQ ID NO: 472109 - DNA, 697 bp, Homo sapiens
ctcttacctgtgtcactagagcgttcaccccgtcacagcagggagcctccgggatctgctccagggtgtctttctctgattgttaaatatttggaatgtcactgccagtctggatgaatggggccatgagctgggttgttacatggcatatccaggtcaggaggaggagaggagaagcgaggaggacccgaagcaccagggccctgctctctgcgtgttaacttccacttatctcatcaatgcacagactgttggaatggaagactgtcaaatggagacggaacatctggtccttggagtgataaaggggctgtgggtcctgcttctgctgcggcccccttggaatatcagcaagggcctgaaaggaggctggtgcctcacggcggtggagggagatgaggcggtgtggccatgtgcagaaggggctctaggggaaggtgagaaaactgaagcagcatcagggctggggtttgaacccaaggtgtttgaacttggacatgtaagcctcaagtcttctcagggcactgtggcctttggtgggatctgggcagcgtaccacaacatcccctatgttgctgggtaaatgtaaattctctccccatctcctgtgaggcaggctggggtagttgtaaagagaagttccaaaaggtgtcacaactagtgacactttaagagctcaaggaggtctcctccaaac

SEQ ID NO: 472110 - DNA, 756 bp, Homo sapiens
gagcgcagcgatgcctgtggccagttgggggcagcagagggcagcagagcaggaatcacgaggtgctggcaaagagggcgggtggtgctgcagctgcagtgagaggccctgggtggaacgcgtggccactgggtctgctctgccccagatctccaggccacactttctggactggcctggattagacagcaaagacttaatcatcaagtctcctggattcctcttccttaatatcactcaaatacaccctggcacaggtcccatcctgtgccagtcatcacctctgacattctggaagacagccgagtcaggtacccagggcaaggacagggcttctatctggggcaccctggaggactttgtggaagaagcctacctgctggttgggcccggaggagggtcaggatttcaacaagcagagacagaggcatttcatgccagggctcagctgggcaaggtggccccacactttatggtggtggaaggagttgtgataggggagagtgaacagggtcaaacgctccagattgataagatactgcccactgagacattgaatctgatgacgtaggtacaatatttaccatcattttacacacaaggaagctgaaatacagagtaataactattttgctcaagattatatagttatgttgggacaattgattattcacgtgcaaaagaacaaatttggacccttacctcccaccatataaaaaagtgaattcaaaatgcaaagacctaactgtaagagct

SEQ ID NO: 472111 - DNA, 2968 bp, Homo sapiens
cacccccacctctgcgggctccagggcaattgctaggttcttctcactttggcgatgtgcatttgttgtggacagttcgaaagaggatctggagctcgagatggaagtctgtgcaggggaggtggacttcgaatggcctgtgctgcagttggtaattgaagctgtggtgcggacacggtgtggacaccgtttcagaggtatggtgggagaccaagcaggggggagggcccaggacagcaccatcagggatgctggtattgagaggcggggcatgaagaggaggtcatgctggagtctgaaagggagcagtcagaggagaggacttcaaggggagagtggtcaccagggccacctactcgtcaaccctcaaaggaagcctttgccattcttgtttcacaggtgtaacggcaaaataacttgcagtagaattgggagtcaaatctggctctatcagattccaaaggccgactcttggctatgcttacacttctacctacagaggctggtcacccacaggacatccatgttcagttctcaatccaggggtgcccttggggaggagggcttaaggaggcctgtcccactaggatgagctctgcattagttatactgctcttaaccgtgtgcctggggaggtcccaaccattctcccctcaaccttactctcaagttaactccatatgacctgtcttctacctcagattctctgcttagcccccacgattcccaaagtgactggagtctaccataaataccaacttaataattgctaataattccatggcacaacctacattctagcttctctctatacattagtcttccagcaacccttgagatagacagcattatctttgttttatagatggggaacctgaggcattgagcatttaagtactttgcccaagctcacacagctggcagatggcagagctgggattcaaacctaggcagcttgtgctcttcactgctctaagcccttcctcttggctcatggccatctcttcttcagatcctatttccttctgtgaatctagtgagtactcaacaacataaggctaggcagtgcctgccactcgtggatgatgggaatgagggtggtgatggtggggacacttaggatggcaccctgcctgttgtctctgaagatcacgcctctctctgattccccttatggtgcagctgcagactttgatggtggggacggatttgcctggagccatcagcacttggaaccttgtgtttcaaggatgttaaagggggcagtttcaacaacttgttgtcagacagacttggttcaagtctatgggaacttagacacatgacttaaaactatccatgcctctagttactcttcagtaaaatggccacgacaagagcagccccattccccctgcacacaggatgggggagaaggaggtgattataaatggcaaagctttgtgcgttcgtacacttaacccaagccctactcccaggccccatggagcagttgggagtgcgtgtggttattccattaggaagaccagagtttgaatcttggcttttgttactccgtctctgcctcccttggcctcagttacctaatttatcaagtgggggtaataatagtatctaccccatggtatacagaagcaactgctttttttcaaaccaccactgtgtacacaccctttgtcttttgggaaagaggcataatttttctccagggtggattgttctttgtttagcaacatgccttgatggccttgatggctgtttttagagggaaaattacctccccttctccaagagcatggactcagcaggcttggcaagatagcaaccctgcctgctccactgggacagatgctgctggtgcccttgtgcccctgccctccatgctcagcccctgcgaggttctgaacccctccaaatgagagccttctcagggcctgcctgagatgcaggttggacctgccagggagtcactgccactgggagcagccttcagccaatagcagacggaagttggaggctaaacacagcttctttgaccctcaggtgggccgactctgaggtgtgttccacacctcagtgaaatgtcccagtgaaatgtcccagtgaaatggagcccctgttgcccacagtgatggctcatcagcactctgtattggctcacttcccttccccttcccataccccttccccttcccacgccccttccccttcccatactccttccccttcccatattccttccccttccttccccttcccacacccctttcccttcccatactccttccccttcccataccccttccctttcccacaccccttccccttcccacacccctttcccttctcacatcccttccccttcccacaccctttccccttcccatacccgttccccttcacacacctcttcacctccccacaccccttcccctctccacaccccttccccttcacacacctcttccccttcccacaccccttccccttgccacaccccttccccttcccataccccttccccttcccacgcccctttcccttcccatactccttccccttcccatttcccttccccttcccacaccccttccccttcccatactccttccccttcccatttcccttccccttcccacaccccttccccttcccatactccttccccttcccatttcccttccccttcccacaccccttccccttgccatactccttccccttcccacatcctttccccttcccataccccttcccatatcccttcctttatgaagaaacataagtctcttcagggcttgtcggggctcctgccgtcccctcccctcctccctctcctcccctcccctcccttcccctcccctttttctccttccttttccctttctcttccctcccttcccctctcttcccctttttctcttcctttcctttccctccccttcccttctgtcttccctgttccttt

SEQ ID NO: 472112 - DNA, 948 bp, Homo sapiens
agggaggtgactggtctccagcatggtgtgtggcttgctctttctgctgtccgccacggcaagagccagcccaggggcagtcgtggaaaacctccttggcgttgagttgctggaggatggattgcaggaggtgagtctgcaggcagaaatccaggagtcctccctgtacctctcctccctctggctcctcagaatcctcctggagatgcagttcccctatgctgggcctgggctctgggatctcaccatttcccttttccctgctgctcagccagggcccctactctggcccctgggcccaggagaaggaaggctctttaggttccagatggcttctttgcctctgatccctcgtagtcactggaaactctttggccgccaagaaccctccacaaccaaccatgaagcatcatccctgatgactacctcatgctcccctccagcccgggatcaacagctgcccttcacagccgtcagatgtgggccgataggaggtgacactgagctgaaaggtgtctgctatcaagacttgaacagaaagggcctctacacgttggagattttttttctggcagctgcctctgaagacagcagctatggaggcttttgttctattgacaggaggcgaagcagctacaagctccttaatcacctcttcacaaacatggggaagcctcattaatcccagtgagcagatgatctattgttcccagctcaggtctctggaaaactggcctttctctgcagatgcagaatccacccccacccaactgggcaggaacattctgtccccttttctcatgtagatgaactgctaacactctgtccccttctctcgtgtagatgaaccactaacattctgtccccttctctcgtgtagatgaaccactaacattctgtccccttctctcatgtagatgaaccactaacattctgtccccttctctc

SEQ ID NO: 472113 - DNA, 662 bp, Homo sapiens
ggtttgagttaatgctccttagaaggagccgatgggtccctccggggcctttcgggagattacagatcgcattcaaaccaatccaccctggagaggaagggggagagggaaggcgagtgcactaaatcagccatctgagcccaggaagccaggaaacctggagagggctggaggcagcaccagaacagtggaaccttcagcccatggaaactggcaaatttgcagactggtacattttttaagaacctgctgggagaccctaacaggagaagcagagaccaatgttctgagactagtgtttgtggcttctcttcgtaaagagaaggcaggctattctctacctcctgattccctgacttttgagtccctagaactcaggccatatgacagagaccagttgggtgctccaaatacccacatgctactgcttattctcagccttccttgcagttaggttggggccatgtgactggttctagctgatgagatgagtgcagaactgatttcaggtcccattttaagatatccagacactaagtgctctggtgagagcccagtcctggctggcatctttactgcagccttgtgacacttctggtccacagaccccatgagagaataaatgtgtgttgttttaagctgctgagtttgtagtgatatgg

SEQ ID NO: 472114 - DNA, 723 bp, Homo sapiens
ggcgagcgggagccagataggagctgatgggggtgggctgggcctgtgggctaagactgcagctcctgtccttaagcccccaccttgtcccatggtctgagagcagaacgtgggtgggggtggggaagccggagaggaacagatgggaactgtcagcaactcgttagggttacagatggggtgctgggggcctggcctgctggtgcgggctagatggcagtgctcctcctcactgctgtcattccagggcagctctcaacttccctgggaggctagggatagatttgatatagggtgggaacttacagcacccccagatcacaagggagaggggactgaagaccatctttggtctgcaggtgctctggggaggaaacagtggggcctcagtttcctcaactgtggtgtgggagaaaaggatggacatctccgagttcattgtgagagtccagagagatggcagacagtagacactcagaacacgctggctctgccctgtccccagctttatctcgtggccagggactcagatcacataaccaacagtcaggcccaactcacttgtcaccttcatctgctgcagacggatgatagggtggataatccgtattttgtagtggtcttggctgaggcttgtctgctgggaaccagtattttggattatcctgctacccaaacttaacggtattagtttaaccagaaggctttttctgtcagtacaca

SEQ ID NO: 472115 - DNA, 518 bp, Homo sapiens
tacaaggggttgagggaagcagggaatgaagagttactgttccatagagacatccagtggtcacattgtgcactgtcctgcagagtgtcccatgtggctgggaatccaggccctcagtccaacagtccacaaggaaatgaatgcagccaacaaccagaagtgcctctccattgcttctgaatcatcagagatgctctctacatgcacaaaattaatactaagcatttattctgtggagaaacataattgccaggctgctaaaaggaaagcttgtaagggctcacagataaaacaacttcactcaaacaagaaggctgaagcccttgatgactatttggtccaccagctaattgacccatatcctatgcctgtgatatgcataaagccacaggatgtcaatcagcaaagtcagtggaaagctgggaaattatacgttaggactacgtgaagtatgtgtggaaacagatgatgataagtcctgccgttgagcacagacgaagaatcgtctttaggaggag

SEQ ID NO: 472116 - DNA, 665 bp, Homo sapiens
atctgcaagttccaaagacctatgaaagaagcatggtttccttgggtcccacaattactcactgcttttcttggctgggagtcactgtcagcattttggtcaataccattcaacaaatctctaggaagttccaaattttcccacattttcctgtcttcttctgagctctccaaactgttccaacctctgcctgttacctgcttccaaagtcgcttccatatttttgggtatctttacagcagtgccctaatcctgaaggcttatgccattaaagatgccattgttgttatagaaaaagctttgaaggccatcaagcacacaacaagaaattcctgctggagaaaactgtgtccagatgttgttcatgacttcacaggatttacgacagagacaattaaggaaaccgtgaaagatactgtagatatagcaaaagaaaataagtatgtagatgttgataggtagaaaagtttaggttaagaagcaaatgtaaaaagaaaaaaactctgacaaatatgttctaggaagttaccccagagagtggtacaactctatagttttatctattacctcaaaataatggaaacttctaaatatggttatggctgttaagattattaaattaacaccattataagtaatttcactttctttctatgattttgcaa

SEQ ID NO: 472117 - DNA, 677 bp, Homo sapiens
tgtataactgcggatggaaggaatgaacaactccagacgcaccgcattaagagctgtaacactcaccgcgaagcatctggagactcacatcatgaacttttgctcaaagaacaggaacataccaggaaaaccaagagaatccaatgaccctttaaaggaactggatccctgctgcaggctccctgagatgctgaaaaactgtgagttggcttgctttctcagcaaggaggctcatggtctggggcaagttctcagccctggtcaccagctgcctggcaatagattcagtgctgttgggtggggcactaggggagtgagactggcctttagggctgtgggctacatgggaacaggaagatcaattattgaactaatcaaggaatcaccagggaaaggtgaagtccaacttaaagaaatcaaaatcacgatacaggatatgaaaggaaaattcttcagtgaaatagatagcataaataaaaaataatcacaacttctggaaatcaaggacacacttgagaaatgtgaaatgcactgagaagtctcagtaatagaatcgaacaagcagaagaaagaaattctgagttcaaagacaaggcttttgaattaactcaatccatcaaagacacagaaaaaaagaatttttaaaaattaacaaagcctgcactaagcttgggact

SEQ ID NO: 472118 - DNA, 871 bp, Homo sapiens
cagagtgcctgctggctgcctgcttttcctttgtctttttcgataatgctaatttggttactcttacatcaatgggggatgcagaaaagactccctctgaagggctgctgggtggagaattcagctggccaggaattctgaagttaaaacccactcactacgtggtctttagtaagttcaggatgaccatggctttgctcgtccttgtctccatagcccccagggctggtcgttggacaatcattcattttctatctgggattaagcccagcccagccgggactgagagtgttccccacccagcttccctgcacttgtgtacgctcagccatggcctaaaatgcggagttctcatttcgaggctcaggactgatttctcccgccctcaatgtggggaggtcctgagtccactcattctttcaagtcctgcccagccaccttctccatggagaaggaatctcctgctcggaatttctacatcccttctcctgttcctttatgatgagccgtaatcctttcacattacaaaatcaaaatgcagaagcatgtaaggtaaagggtgatgttttccccattcttcttctccagtgtcctcctctccccagcacctccttgtgtaagcaatgttttgttttgtttgcatcttccaatgtctttctttgtgttcacactaacatattcatttatatattcatacataaaggggttttctactaatatttaaatgtgctctcattgcacatacacaattacctttcttaacttaataatatattatgggcattcctccatgccaattcacatatatctttcgtttaaatggcttcataatgttctatacatttattcaaatctttccctgttgtcttcc

SEQ ID NO: 472119 - DNA, 622 bp, Homo sapiens
tgtgcaggaggagaagccaaggtaagtagacacgttccagccacaactcgctgcctgtccctccccagccagtgcaccaagagcctcctacatgctcggctctgcccgcgctgctccctgggcctgcagtgcccggcccggcaaagcgggtcctccttcagggacaccagggcctggtcctgtcagaggcagcaccctgggaaaccttgagcaaagcttcccttcaagcagaggaaaggaacatgagagtccaggaggcctcagccacagcgcaaagatggaagtgatgaccgggagccactgcagacacagggaagattccatcctgctcaccctgagacagccatgcctgcatcctgaagtgaataccaataccctcactagatgtacacactgcaaaatacaccaacatacaggcacagctgcagagacactcacgacaggcatggacagatttacatacaggtacaagacacatagaggcactggaaagaacaaacatgctcatagacgtagatgacacttgcacagatgctaacagaaagcacagactcatgtctgcagatactgacagaggtcatcagacacacaccagtgtggacctacctgcatggacagtgca

SEQ ID NO: 472120 - DNA, 664 bp, Homo sapiens
ggttgccactcagctgcccgtgtggccaaagtgcacacacacttgcataaacacataaaggtgttcacacactgcaaacttgaatacttacacgcaaacatgtccacccgtttccacaccacacatgtaagcaatcacgcacgatgcatctgcatgtgcaaacagctcacggccacaggacttcactggcgtctaccctccttcagagattagagatcagtgattgtggttccttgcatcatctttgtttctgggaacatggagctgtggagggaatgtggactttagaaaattataaaggcatggattttagcccaagcaccttttgtatgatctcatttgttaagtggaaactgctgtctggcaagaaaactttccctgtactttttggaggaaaactaagagctctagaaattgaggtgaagtggaaaaaggaggtggttccaggggggtttctgcatcttcagatcagaccaatgttgcagtatgacgtgatatttgaaatcataaaagaaaagattgataaatttgactatatgaaaattaaacatttaagtaccttaaagaacattataagaaaattttaaaagaggggtatatacatatgtatgtgtatatatatatatatatatatatatatatatatatatatatatgacaacag

SEQ ID NO: 472121 - DNA, 1114 bp, Homo sapiens
cagctctgagcaagagcaagagccggagcagacctggaccctgcattaccactgctccgtggcctggaatgggatattgtccccatccttgggccttccctggagctgggctggcctggagaggagggagtgctccatccacacagaagctggtagagctgacccaagcagctcatggacagaccaagcccatggccaggcaccctccagcctctgtgggtcacctgccttctccccttgtcatcacagtccctccggaagctatccacgcctccgaggaggtagagagcagaatggtgaaagacaggggctctgggaccagacacctgggcaaaaatcctgtctccacttcttatcagttttgtgactttaggccaactacctacatttctgtgcccccatttcctgatgaggaaagtggtacccagagtgacttgtccacggcagcaagatttgttaatgacagaagctgggataaagcccactttttctgactcccagagcccactcagatgtcctggatatggacctgggacatggactcccaggtccatggcaccccctgctggggcaaacactgtgttcagtgcttgggtatttgcccaaggcaggggaggttccaggactcaggactgggccagggagagaagctggggaccaagggtgatggggttcattggctagaagctgcccctccctccactaccccactatcagggtgtgttttgaaaacagagagactcgtttttatctatctctgtgctcaacacagggctcttatctttctctgtgctcaacttaaatctcatgaggctcaaggaagttgtgtaatttgcctgggatcatcaagaccgtcaggaagcccttctgattgatccactccaagcctccatgtactgcgcagttccatgtagcgcctaagaatgtgggccctggcagctgcccagacattcatcctggctgcaccacctattacccttgagacttttggcaagatacttaagccttccaaacttcagtttcctcatcggtaaatgaagataataatagtgccttctttgtagaattgctgtgaggagtagataagagatgatatatgtaaacacttagaaga

SEQ ID NO: 472122 - DNA, 1085 bp, Homo sapiens
agtgtggtggtggtgatggtggtgatgctggtgatagtgatggtgatggtgctggtggtgatggtgatgatgctagtggtggtgatgttggtgatggtgatgctggggatggtgatggtgatggtgatagtgatgctggtgatggtgatagtgatagtgctggaggtgatggtgctggtgctggtggtggtgctggtggtgacggtgatggtgatggtggtggtgatactgatgatggtgatggtgttggtgctggtggtgatggtgctggtggtggtgatgctggtgatggtgatggtggggatggtgatggtgctggtggtagtggtgctggtgatagtgatggtgctggtggtgatggtgctgttgctggtggtgctgctgctggtaatggtgatggtcatggtggtggtgatactgatgatggtgatggtggtgatggtgatggtgctggtggtggtgatgctggtggtagtgatggtgatggtactggtggtgatagtgatggtgatggtgctgggtggtgatggtgatggtgctggtggtggtgatgctggtgatggtgatggtactggttgtgatagtgatggtgatggtgctggtggtaatggtgatggtgctgctgctggtgatggtgatggtggtggtgatgctggtgatagtgatggtactgctggtgatggtgatggtggtggtgatactgatgatggtgatggtggtaatggtaatggtgctgctggtggtgatgctggtgatggtgatggtactggtggttatggtgatggtgatggtggtggtgatactgatcatggtgatggtgattgtgctgctggtggtgatgctggtgatggtgatggtactggtggtgatggtgatggcgtggagttgatggtgatactgctggtgcatgtgctggtgatagtgctgctggtgatagtgatgatgttggtggtgatggcactgctgctgatactgatggtgatggtgatggtgcttgtggcggtgatgttggtgatagtgatgatgacggtgatggtaatggtgatgatgatggtgatggtgatgctgtggtgttgatggtgata

SEQ ID NO: 472123 - DNA, 761 bp, Homo sapiens
agcagagctcttagctcagtcccgtgggctctgatgcttgttactagtgttaaccatggtaacgatgagtacccgctgaagcagccccagtccttgcaaatcccttccaacttgaccttctgtgattctgaggctgcttggacttcccatcctgaccttatgtggctcttcgtgtctcaggggctccagctacagctggaggtggccccggaccccgtggctgggctgctgtggaagttcaactcttcacaccaggatgagaagttcctgtgggaagaagactgggaggaagagaaaagacagaaacggagcatgggtttgcagagtggctgggtctgcactcggcttcactacacagccgctgtgtggccctggacaagtcgcttcacctctctgggcgcccccgcttctccatctgacaaatgcggctgtaatttacccttcatggcattgtccagtgggatcatctgagcaaatgtgctttgtaaatggacaggtgctccatgctgccgctttcagaggtctgattctgctgtcaccctctctgaattttccccttctgtaaggggggcagagaggctgtcatctcaaaccccatttgagctgccagagatgttctgattccttgtggacatggcctcagaagcttctgaggcagaaatcctataaccagccctttcctcctctggttcttctctgtgaccagctttgatgccagctcatctccctgggggagggttaattactcgcaggcactatcc

SEQ ID NO: 472124 - DNA, 1158 bp, Homo sapiens
ccatgcacactgacccaaacgctgttttggcccagaattttccagcttgagcagcccaaacgctgtgtgtgatgataataataaggacctttagattgtgctggggattaaatgagataatacatgcttctggcagggagcagggcaccagccagtgacctgtggtcaggtcccagctcctccttccccttcctgctcctgacatggatgcccactctgcctagccatgccctggaaagacacccatcctatcttggctaggcagaatgtcagctctgtcttttttgaatttgtcctccaaggatttgcagaagatgggaacaggggaggccttctgaatatagtgactcttctcccagctcccagaagcacatctggcttggcagcatctttgggccacccaaagccagggtcccttggcccaggcagcatttgggtcagtgtgagggccttcacaattgaagaagaagatggataccatctgtctcaaagccgggcacctggaaatcactcctcatacctccttcttcaccctccgtggctagtcagtcaccaaggcctagaaagatccctccagaatagcacttggagtgacccaatctgtttccctggctggagagcccagtggctctcccctgaatgtctacaatgacatctaactgcatctcttacctcctttcttgtccttttagaatccactctccaagtagcagcttgcagagtatttaaaaaacactcatctgatcgtcccccaattctttgttggcttcccttttttaagaaaaatgttcaaaatcctataaagaaggacctgtttttaccttattttgcagagggggttcagtccaacttcagtggctttgcatatgcctttcctgccccctggaattctcttccctcctctcatgatctccctgccctcacctaacttccctggggtaacttctgctcattcttcaggttcccgttgccttgctcactgatggaggccttcctggctgtgtctgggatctatgctctcatagcatcctctgtctttcttcaacacacttatttttgtaaccatcatccctcctgtgaccatcgttttaacctctcctgggggagtggtaccataaaggcaagctcgggctgctataacaaaatactgtaaactgc

SEQ ID NO: 472125 - DNA, 853 bp, Homo sapiens
tttgcatctgatggcttctctattctctaagtcttaagggatgtggcagcccatggagctggatgctggggctttgtcttgggacagagggattggaaatggcctaaagggtggatttgccagggttgtggtgaggatcacatggatggtgtctgtgaaacacagcacgctgcccagcactgagtcagctctgttagtgacctgggctgcaggctcgtcagtgcagtccccaaacattcccagtccccctccttctgggtatatggaagacagcttctctggctgccttggggtcgagtggagccacggactgcttccagccgatgagttgggaagtgacccgggcatcatgcttgcctgtgggagactctccaggggctttgttcccctttgccccaatgactggggcagtatgggtcctggaggaggacacagaacagaccccagaggatctatcctggtcttgttaaataaatgagaagggaggaaatcaaggggctgctgtccacacccacacaggagcccctgcctcacccctgccacacccctaccttgcccctgctttgcccctgccttgccccctgcctcgcccctgcctcacccctgcctcaaccctgccatactccccgtaagccagcagattctgttgttgctgtaggtgggctgtactggaaggacagggtgggctggagagaggaggaggtccctctggcgtttcaaattcagtagacccagaacagaattcctcctcccgctggctcctgcttctggcttcctcgctcagtggggaccccaggaatccttcccgtggcccagcagagaaccctggatgccatcctgtgcttctccattt

SEQ ID NO: 472126 - DNA, 652 bp, Homo sapiens
ggcaacaacaatgctaataggaattcttcttcccaagtttccaagtggcatcttccaaacccaatttgggtttggaaacgggagagaaataagtaggcccaagcttagccgcttcccctactcctcccccggccccgtgggcgatgccaaggcagctggagttccgggagttgggggcatctctgccatagctgctgactttggcaaaaaagaaatcctcctccttaataccctctccctccagaatgacagggggtttgaaagtttaaaacgtagggctgtatttgaatgtttggtcttgataggcgatagggaccagcatggaaaatcatctttatcaccccaatatggaaggcaagtgtcagaccgtcttccctgctgtacagagccagatagcaccgagctgggccggcgcagcgggcataataagaagtggaaattgctcccaaggaaagtttctgaggaattaacttctgatgggtgaagggggcagtgtgggggtgggcaggtggggaggggtaagggagccgaaggaggaagccccatgactggcagagggctggtagtgcattgactgtggtgaagtgtggaactgagactaacgcaaatgtaggaagtagaggaatagataaaaatgtgaatgcaggcatcc

SEQ ID NO: 472127 - DNA, 1451 bp, Homo sapiens
gcagtggcgttagattcccatagaagcatgaaccctactgtgacctgtgcattgattggaaataaaagaacgggatggacatatggctctgtgcctctctccagtaacagtccgtttaaggtggcatttgaagctgatttggatggaaatgaggacatctttattgctcttgatgacatctcttttaccccagagtgtgtgactggagaagaagaagaggagaaaacacacagagagtaccatgtaatgaagggggcagagattggagtaactcatctacaagccagggaatgcccaacatggtcagctaaaaagaagctaagagaaaggagtggagcagcttctccccagagtcttcagagagagcagggctctagcaatactttgaattcagacttctggcctccacaactatggaagcataaatgtctgaacaatcattaaacttttcccatgctcagccacccctttccccctaaaaaagaaaaaattttccttacgcttactactcattggacctgatttttctcattcatgaaatgattattgtcaggatttaggaatatgcctttcctaagagttgcattaaccacttcacgcaaatgaggaatcattttgagaaacctaagaataattcttaagtgacctaatatgtcacttaatattctccattgaaacatgctgcatctgaaactcccttaaataaatacaataaataatgaggtgctacaacatgttcaaaccctgagaaaactccagtttgggagattaacattatgggcacttattccccacccaccctgactaggttttgttgttattgaattgaaagaaaatagaccttcggagagtgaatgcatattgtaaagaaaagaaatgtcatcatagggcatcctttttgtcttgacttgataaatataagttattggcaaatagcaaggtgccaaacaaaataaagaataaaattcttaagaaagtcaaggggaatagtacaaattctgcttcactgctgaaaaataatagctctcacttcgttaatgaatagagactcccattcttctctggtatctctaggcttgaatagcaagtccaagtaactattttcagatgtaatctcttaagcataaattatttaaaggcagagatctttgtcagttgtgttcaatggtgtattctatatgcctggatgagttcctgttatgcagtaagcattcaataatcttgctagcggtctatcaattttgttgatcctttcaaaaaaccagctcctggattcattgattttttgaagggttttttgtgtctctatttcctccagttctgctctgattttggttatttcttgccttctgttagcttttgaatgtgtttgctcttgcttttctagttcttttaattgtgatgttaggatgtcaattttggatcttttctgctttctcttgtgggcattt

SEQ ID NO: 472128 - DNA, 1863 bp, Homo sapiens
gccgaggcagatgctccaccttccctgtacccttctcactgaccggactgtggatgtgatggcgggagctggagcaggaaacaggaactggggggacagcaccctactgcatgggagcagcaaggaaacaggaaatggggacagcatcctactgcatgggggcgcagggaaacaggaactgggggcacagcatcctactgcatgggggcagcaaggaaacaggaactgggggcacagcatcctactgcatgggggcagcaaggaaacaggaactgggggcacagcatcctactgcatgggggcagcagggaaacatgaactgggggacagcatcctactgcatgggggcagcaaggaaacaggaaatgggtacagcatcctactgcatgggggcagcagggaaatgggaactgggcagacagcatcctactgcatgggggcagcagggaaacaggaactgggggggacagcatcctactgcatgggggcagcagggaaacgagaactggggggacagcatcctactgcacagaaagaggagaaccccaggggatgtgtgggtggtggcagcttttcagagaacaagcagttctctgaaggggaggagctgagatacatgctccaggaactgtccggcagcagtgggaaggagctgagatacgtgttccaggaactgtccggcggtttcttacagacccagagcagccccatacctcggtcaccaggactgctggctggtctcaaaaggggatcaaagtgggagaccttcgggcaggtctccataactgaccctaccaaaggcctggttggtgcagccttagaagtcaatccttcagcagctgatggggagtgggaggacagtggtcgcctgtcagcttccctgctgtcttatgtgcacatggcaggggtgccgtacagcctggaggcctggacaaatggaattcaagggctggggaaagagtgggctgaggccttaccggtcacacctacaggctgccgagcctgccaggcagcttcaattgcagggttcggctcccagagagaatggctgctgttctattctaccttggtccctgggatggaaacctgattggattgaatcctaggatatgtcattttccctctgctagctgctggtcccagcgtctcccatacctgatggtgtgaggctggaccagagccggtatctatgccaggagagtctggggcttggcctgtttctggggcactggggcactggggcagggaataggtcttggctgctaggtgagctactcctcaatgcacccaggagctttccagatccatagccctgaagagagaagagagaagatctcacggactgttgatctttcacctttccctctctgctgtccccaacctgtcatctgtgccacagaactgaggacctagttggagagacagacaggtgagatagatggctgagagagggaccaaactgccccacccccagccagcccttaagaacctccttttaaaattgctttgcatcatatttctctccctgctcagccccactggctccagcagctctggcctcctcatccatcatgctggctgcagggcacgagcgtatgtcttgcagagaaacctttctgccctaggcctccaaggggaagggctcagctgtcagagaagagggccgtttccaaaggggtcaaagcgctggaccctccaggattgatgggctatgaattatggatgtcgcatccgccagtcccaaggctccagagccagagagggtatccctgccttccttctttgttggcgtcttctctctggcatccctttagcgttcgctcatttcatattaggtgccttcctgtactgatgttacttgtc

SEQ ID NO: 472129 - DNA, 555 bp, Homo sapiens
aaatccacaattatagctgaagattgtaatgcctgtctctcaatgattgatgtaacaaataaacagaaaatagcaagttatcgaaacttagagtggttttgggaacaccctgagctttcagctggtgtcagaggttctgcagctggggccccagaaattaaactgaggatcactcaggcagctgtgttgagaacagactatggaggtgcaagggtggaagctagaagacctgttactattccagcaatgcaggcaagaaatgatggtggtagcagggaaaacagtgaaaattggttagatttcagatatactctgaagagaaacccacaggaagaaatgggtatggtgtttgagagaaagaaaggagttgaagctgacttcaaggttctctctaagtctttgcaatcttacgtgtaccgaacacttacagcaatctcaattcaggctaaccacatttctaatgctttatagcgatatttttctcacctcaaaccttcagttccatacccaccctaccagaagttcagggatagtcaaagtggctttctgagatca

SEQ ID NO: 472130 - DNA, 543 bp, Homo sapiens
ttcatgtttaattgtttgttgcccgctagctttctggtgtaaagggtgacactactcagagcagtgcccaagagtccaagaggaatcagtgccatgctactggcccattgcattgggtcggcagagggagtggcacccaggaaagcagcaagctgggtggccacagtggagcccctccctgaagtggcctactgcaggtcctggccaagggccctcccatgccaaagtcaagacatgttaaacactctgaagtctaaagctcaaagctacacaccttacataactcaatgcccctttgtgtgtacattttgccatccaaaatttaactccctatttacttaccagggttcacagcccaacatttcaggtgctgaggtttttgaggttacacatctgaaatgcaagcctccgtactatagaggcaacgtttgcctctggatatcttccttcacggatgataactatcagaagattctactttctacaggcaaaccagcttcctggaggaagagattaggttacccaggcccattttcttaaact

SEQ ID NO: 472131 - DNA, 621 bp, Homo sapiens
cagtgggaggggttacgattgccagtatggaactgccttttaaatttattttgttattagacaacgcccctggccacccagaaccccatgaattcaacaccgaagactacggtgtggagacaggtctgtatgggaacaaagtgaaagcagagaaaccagttgaggctgttgcacgggcaacaaaagtgaaaacagacaaatgggattgtaacaaactggaaagctcctgcacagccaaggaaacaatcaacagagtgaagagacaacttgtggaatgggagaaaatatttgcaaaccatacatctaataaggggcaccagacaccggatgccacccctggcatgaaaactggatgttactgttgttggaataaagtgtttcctggcttctttctttgcattactatttcctcagtcaacaccttgggtggacatgtccacttgaccaagccaaggtcacatgccttctcccttgctgcaagaggtgctggggcaatacaggaagggaatttctagagggggagggagctggaaagctgtgaatattttttaactacacctttgttttctcagctatgtaatgtgtttattatcgtaaaaattatgtattgctaggttctac

SEQ ID NO: 472132 - DNA, 639 bp, Homo sapiens
gtcccgtgcgcccgcactcctcagcccttgggtggcgccgtggagcagggggcggcactcctcggggaggctcaggccgtgcaggagcccacggcgggtggagggggatggggaagttcaggcatggtgggctgcaggtccgagccctgctggggaggcagctaaggcccggcgagaaatcgagcacagcgccggtggccagcactgctgggggacccagctcacccttcgcagctgctggcccgggtgctaagctcctcagtgctcggggccggcggggcggccggccgctccgagtgcagggcccgccaagcccacgcccacccggaactctagctggcctgcaagcgctgcacgcagccccagttcccacccgtgcctcaccctccacacctccccacaagccgagggaaccggctccggcctcggccagcccagagaagggctcccacgaaggcaccgagagcgagcgagggctgcgagggcttgccagcacgctgtcacctctcactatgatcaattgagaacagcttccttagcacattttaagtgctcaatagccacttatggttagtgacaactatattaaacagcataggcataggtcctttatgaagagttacagaatacctcatttcc

SEQ ID NO: 472133 - DNA, 933 bp, Homo sapiens
tcagtctcagcctggagccagctgatgttctggttcatttcagagatttttgtctttgtgcgacacatcatcttcatgcttcccagccagtgtctgcagttcctcgtacttgatctgcctggcccagctgtggttggcaatctcgtactggtccttgacctcagtggtgatgctgtctgtgtccgtggagtggctgttgtccatggacaggaccacagatgtgtccaagatctaggactgcagctcctggatctcctcttcatacagctgcctgatgaaattgatctcgtcaatcagcccttccatgcaagactccagctctacattcttcatgtaagctttgtccgtaaacttcttgatgaagacaaatgcattgtccatctctgtacacttattgatctcatcctcatgcttattcttgaagtcctccagcagcccctccatgttgccaagctctgcctccagcttcagctgctcctggcccagaatgtacagctgctgctgaaggttgttgatgtagctctcgagcatgttgtccatgttgctctgtgccgtcttctgctgctactggaggctacacttgctctgcagcatcttgttctgctgctccaggagctgtatcgtgtcagtgatggaggcaaacttattgttaagagtcttgatctgctctttctcctgggtacacatggcctggatttgagtatcccaaatccaaaatctgacatgctccaaaatctgaagtttttttgagagccgacatgacactcaaaggaaatgctcattggagaattttggattttggattttcagatttggcatgattaatgggcagttattgagattcacatcatgtgcctgaatattgggttgggaagtcccatattttctcttatgaattttaaaaattttatcaaaattttggactagaaataa

SEQ ID NO: 472134 - DNA, 706 bp, Homo sapiens
cctgtattcaccacagctagagatggccgaagaaatatatgtggaagaggtagagcatctggaaactttaaaaggggctaactctggtggtgccaattgcaagtcccaggttatgacctgtgattctgatgtaccaggtataaatctgggttcccacaatcccccttctcagatgatgaaaaggatccagccatgcaaagaacattcaggtagagagaagaacaagcaccaaggctctgggctggggagtatgttcatggagacccaaggaaacatgtctggctccagagaagtgaaaagggggaataaaggaaacttccagtacggctccaacactttgttagcaaatgaggtacccaggtcctgctgggcaggaacagatactgaggactcatcattggtttgtgaaaatacacaagaaatattaccatccaggaatgctcacctgagctttggtgtccggagtttttattggggcctcatcataaagacatgattgattgcccatatggttgaattcagtctccaggttggcttctaccagcgtggtatgaagtttacatttaaaaaaagttttcacagaaatctaacacatgcctaaaaagattttacaatgtagttctagatgcaagtctaggcaatatcaagaactgatggatctcatgactcaagacagagcattttaggtatcagttacttcttagga

SEQ ID NO: 472135 - DNA, 663 bp, Homo sapiens
tcctccacttctagagcctcctccactttcttcttgttttgttttttcctcatagtgcctgctagctttctggtgtaaagggtgacactactcagagcagtgcccaagagtccaagaggaatcagtgccatgctactggcccattgcattgggtcggcagagggagtggcacccaggaaagcagcaagctgggtggccacagtggagcccctccctgaagtggcctactgcaggtcctggccaagggccctcccgggaggcctgacccaggccaggccaataattccttgcccacaattttcaaactgggaccgcgaagagagtcagcctctctctgattacctgcacaatcagccggcaattgtgtctgtctataattgtgtctccttatttccatatggaggaagccaggaagctttaatggtacatgaggaaaagagaagaaaagacaagggctatagaaagtctgtctttccaattgttccttggggccagctgcatttctgcccttcctatgatttggttcatcaattcttccttgacccaagctggttaaacagtttctgtctcttgtagccaagaggtctgcccattacaaagaaaaatttgcagtgcactgtcatacagcatgtatgaaccgagccagggtaaggccccaggaaa

SEQ ID NO: 472136 - DNA, 577 bp, Homo sapiens
gccatttgaatcctctgataaatgaagtcagcctctaccttgaggtactttttgggatcagactacggtgtggagacaggtctgtatgggaacaaagtgaaagcagagaaaccagttgaggctgttgcacgggcaacaaaagtgaaaacagacaaatgggattgtaacaaactggaaagctcctgcacagccaaggaaacaatcaacagagtgaagagacaacttgtggaatgggagaaaatatttgcaaaccatacatctaataaggggcaccagacaccggatgccacccctggcatgaaaactggatgttactgttgttggaataaagtgtttcctggcttctttctttgcattactatttcctcagtcaacaccttgggtggacatgtccacttgaccaagccaaggtcacatgccttctcccttgctgcaagaggtgctggggcaatacaggaagggaatttctagagggggagggagctggaaagctgtgaatattttttaactacacctttgttttctcagctatgtaatgtgtttattatcgtaaaaattatgtattgctaggttctac

SEQ ID NO: 472137 - DNA, 627 bp, Homo sapiens
aaggttattatgtgtgtgggtatgtatgtggctatgtatgtgtatgtttgtgtttggtgtatagctactattttcagtgggaggggttacgattgccagacaacgcccctggccacccagaaccccatgaattcaacaccgaaggtatcaaagtggtctacctactcccaagcacaagattcagcctttagactggggggtcataaggaccttcaaggctcattaacacagttctctatggaaaggattgccaatgctatggaggaaaaccctgatggagagaacatcgtgcaagtctggaaggattacaccactgaagatgccattgttgttataggaaaagctgtgaaagccatcatgcctgaaacaatcaattcctgctacagaaaacttatatattatattcttgcatagtttaatacatttgttatatgctataatatatgattgtgttctgcctgtttctaaagtttatttaaatggtgtcatattataaatattctgaaaattgctttttctattcaagattattttttaatatttatccatattggtatatgtaactctagcatattcatcttaactattgactttttttattgaacgtgcttgaatttatattcatct

SEQ ID NO: 472138 - DNA, 945 bp, Homo sapiens
agctggcttacaaattatgccaagtgtctcccagcagaaaccactgctcaccacatcacctgggcctgaacaggaggcccagagtgaatgggccttcaatgtgcggctcttaaggcatcaccagaggcatcgctggtgctcaggaagccccaggtgctcaggagggagtcccaaaggcttcttggagaaacagggacttcatcgaggccctgaggaaggcggagggcagttggataggcagagacagaaagaagggcaagaaaaagccatgcagaggctccacttatggattagtgctccaggttccatgcagaccaggtgtctgcagatctcctgcctagaggcagcgcttgggttaacctgtggtgttcctcttaagatgatgggatggggacctcaactgggtgaggcccccatgggggcagcgcctgggacactccgaagttctttcctgaacaccaggtgaccttaggagaaaagagattaagtgggatctgatcagcagccagcagcattagattctcataggagtgtgaaacctattgtgaactgtgcatgcgagggatctagggtgcatactccttacgagaatctattgcctgacgatctgaagtggaatagtttcatcctgaaaccacccccacccacccacccctacttttcttccccaccccacccctgtccatggaaaaatagtcttccaagaaactggtccttggtgccaaaaaggttggggaccgctgtactagagaaatggtcacaaggaccctgctgggagagggggagcaggagacagggccccagacacacggcccatcatgacctcttgttgcaccaaggagacactgaggcataggcggtggagccaaggcggcaggtgggggtagaggtgcagtgcccctttatggggagaggggctagggcactgccccagctgtcctatcc

SEQ ID NO: 472139 - DNA, 763 bp, Homo sapiens
gccagatgattctcacgctctgtagtttgagaatcattggctggaacgaagagggctgactagtgacaagaaactggtctggaggagtatgcggacatggccagtcttctcacagcagggggctgtgtccagcagcctgcagggaccctgcaccactccactctgtctgctggccttggaccctcgacgtggcagcctgccttatctgggataagctcgtcctcatcgcagaatcctgatccagctgcctcacgagcagctgctgcagggagggagggcggtggagagctaatcccctctgctttggcccaacaccgaggcagagccatcccccagaaccagatcctactacgggaagagcctgacagccatctggctcttcttcccatcactgccagactcccttgtaccatggcactcccacctcatggtcgagtgacctgtcctgagacttgctctaagtgtggtcagaggacctgcagcatcaacatctcctgggagcttgctggaaatgcagagccttaggcctgccctagacctgctgaatcagaatgtgcactttagcaagattcctagggttgacatggtgataccagcccctttaggcactcggtacgtatttaagtgactgactgacagtgctccacacagagggaacagcaaatatgcaaagaagggcctgattcaagatgtcctgccctacaaatccccacaatcgacagaattatagaatgttggggctagagtggagtttaggagccac

SEQ ID NO: 472140 - DNA, 1008 bp, Homo sapiens
aggagatagttcctgatcttcccagttttcagagggtgcagttgcccagcagaacccagcccgatccccacgccctcctctcctatgcaggcagctcgcagctctgcatcttgtgggctaaggaagcaggtcccacaggcacgtgtcccctccttctcagactggaagaaagttgggtccttcaatgcccaagtcactgttcccgtggaaagacactgatgtttgtacagatgtgcatctctgttgctgcgtggcagcatttttatctcctgtctctgcagagccccttccctgggactgaggagccacagaaggctttgggatctactaatgaagaggtgaccggatcgtcagagggtgcagacatgcttagcaagctggtggtgcgactcagggctagctgcccctggtcacgctccccctgtgcatccgcggcagcaggaaacatttgtcctcaggaaacagcccctcgaagagcgtccggacgccgggacccagcctggatggcagagggggcgttaactcgtcccacaggtgccactgacccaacacgattttttttctggtgtatctttctgggagatgtatctttctgggagatgttggaactgggcccagagaaaagcatacgagaccacaatccccaagacactgcttggtggggtaccccacatgtctgcttcaagtgccacaggtacagcaaggaaagcctgcaggatccctccacatcagaggtaaggaagaacccagaatctggaattggatgccaggagcttgagttctgggcctgatatgaccacctgggggccctttggctaacaccccacttctctgagcctcagttttctcatcagcaaaatgagggcatggatccctatttcagtgtgttattgtaggggtagaatgaggtaacatgtgaaagacctgcgaaggcagaatgctgtggccctgacaagcagaagctttgcaggcaggcagatctggttgggatccgattctctttggacc

SEQ ID NO: 472141 - DNA, 1114 bp, Homo sapiens
ccaggtactgccaggctccaggcactggggaatgcagtccctgctgtcagggagtttgtcacacagctgggaaaccagtcccccaccatgatgagatcacagacaaaggggaccacagatgcctactgtgggcagaagccagccagaaaccagctgactcaggaccctgggacagtcagcctacaggaatcagccagccagctcccccacacagagaagagctggggaatgtctttggagaggctacaggaggctactgtgtatacgggatccctcagcatccgctgccatagccctgagggctggacccaaggcctggcattgtgcagctcagcccatcttctgactgtccaggtgtctgagtggggccaaccatggcggctctacaccctctggggcttggcccatttggcattggatcttgttttcatcttggtaaaccaaatcctggagatggaatacagctgctatctcagcagctggttccagcttgtgatgtgcctgtgtccagcagagcccacggcagccttatgaaagccctcctgagtctgtttctagaatctcctctgaatccataagaaaccgcccagagcttagcccatcagccctgctgacaggctgggccagtccagatgctccaccaaggcctggattctggctctttcactcagttcactcatctgcccctgagtcatccagagaaaggggtttggggagagtccggagcagacagcaaagcagggaatcaaggaagctcttgaccaactggcaggcagcccaagtcctggcatcccacgggagaggagaagggcccctgcctttccaaaccaaaggctcacatgagtgaaggatgggcctgaaatcctcactctggaagcaactgaccaaggtcctcccacccagccccaaccccatgcacaactaataagacaaatgcttcctgtcttgagttccccattcgggtagttttcgcaggggcctgatcttctccccagtctcccaagctttgggcaggtcattgggccctcatccctgaagtcaggcactgggctggatctattctggttttagggttctgaacgtgtgatgactcatcttctgctgaagggttttt

SEQ ID NO: 472142 - DNA, 1386 bp, Homo sapiens
aggactacagggaagcctgtgagcacactgctggaggcctggagcctctgagatgagcgaggatcggaggacacagagcacctcctcaccctgggctgggtgggaaatgggccaaaggcgagggacagcaagggacagggaggacagatgctctggttaaaatgttctgaccttttcgaaatgggtatattcagtgcattcccaaacgcaatcgcggcccctttaacagggccactgcaggaggagctgtcctatcagcaccacggccgccgcccagtgtgcccccaaccccggcagctgctgcgggcgcctcaagggcaggaagggcggtggagagcggggccaggaacttgcgactggccagttctccagaccggggagagagggaccgccgccgaatactggtgctcgccttcctttcccctcgcccccatcctgggagatcagagggagctggacagtagcccacacttccagccttgcagaccatgaatgggatggccaatgtgaatcccgccagccgccctcactacgcctccgccatcccggtgcctcgtgcctcttcccagaccaggattcctacaccgggcgcttctccccagctgcggccacgccaggccggcctggccctgagcccacagagagcagcctcccccagactgggaaaggctgcaggtccttctagaaactcctctcctagggccttccgggggagaggctctcccaagtttgctggggcggtgagggagtcagctgaggatggggaaggccccttcagctccccatggaatagtcccaggacaaccccgaaagcagccctctccagccgggctggatccggaagaattggcgagagacaaggcacccagggaaagaagaaaaaagcccaggaagggactccagtctgccagacccggggcagaagcccttctcggacgagctttcacggagaaactcaaataccaggggctccggaaggtcggaagcctccaagctgcccaggaaaagaccaaagagatataaactacaaaagttctgggacccccaggtctttggagcctgatgagggggcagcttcgtgggcttcctctccagtctgcagcccagtgcagggcaagcgcccctctccctctccgggggccattagcttctcctcagtccatcagcagagtcagccagtcacagccacggtggcccccttccagtacagctcagactgctccatacagctttagaggttgttatccagggagctgtggagcagttacaagtttcagctatgggaggcggaactatttgctaaacttccaccactgctgctccctacttctctggccaatccaggaatcactcgaggaaccattctgcacatactggttttatcaa

SEQ ID NO: 472143 - DNA, 1200 bp, Homo sapiens
tcaagccctggttttgtaatggacatccaatactggtgattgtcttttagggaggtactgggggacttggttccattcatgactttaggttccaaaatgaaagataagccatggggcagggccagcttctcttcattatactgtccttagggcccagggtggtgcctgatgtgaagcagatgttccagctcatctcaaccacgagaaatcttgcccaggacctctgctatgagaagcagggcctccccaaaacaaagccagaggatcccagcattaagttctcttcactcacccagctcttccttctctccctaccagacccagagtcccagagaaagaggacagtgcagaatgtcctggatctccggcagaacctggaagagaccatgtccagcctgcgagggtcccaggtgactcacagctccctggagatgacctgctacgacagcgatgatgccaacccacgcagcgtgtccagcctctccaaccgctcgtcccctctgtcatggcgctatggccagtccagtccgcggctgcaggctggtgacgcgccctctgtgggtgggagctgccgctcggaggggacgcccgcctggtacatgcacggcgaacgggcccactactcccacaccatgcccatgcgcagccccagcaagctcagccatatctcccgcctggagctggtcgaatccctggactcggatgaggtggacctcaagtccggctacatgagcgacagtgacctcatgggcaagaccatgacggaggatgatgacatcactaccggtcaaaggaaggatggaagccccgcggctcctccggcgcccagcggtgcttttgctttggtgtccggatcccagcccgcggcctgcctgcctgtcagtcccgtggacaccgcactgccgggcagcgccccggccgcactcagccagccagccagcccgagtcgaggctgcaggctgcagctccgagcagaggaaggagggaaggggaaggcggggagcaaacaggaggaggggagcgagtgtgcgcacggggagggaggtgggggagagatagtgtgtctatttctggctcgggagggggagggttcgtggttccagataggaaatgacaagcagtgaagaactggttaaaggaatggtacttgtaatgaagtcacaagccatcacttctacagtcctcatccttactcattgg

SEQ ID NO: 472144 - DNA, 920 bp, Homo sapiens
ctatttcctctctggcctgtccgtggcagagtatgtctatttcctctctggcctgtccgtggcagagtatgtctatttcctctctggcctgtctgtggcagaatgctggctatttcctccgtggcctgtccatgcagtgtgtgtctgtttcctctgtggcctatatgtggcagaatgtgtctatttcctccatggcctgtctgtggcagagtgctggctatttcctctctggcctgtccgtggcagagtatgtctatttcctctctggcctgtccgtggcagagtatgtctatttcctctctggcctgtctgtggcagagtgctggctatttcctccatggcctgtccgtggcagagtgctggctgtttcctccatggcctgtctgtggcagtgtgtgtctgtttcctctgtggctcgtctgtggcagaatgtgtctatttcctctgtggcctgtctgtggcagagcgctggctatttcctccgtggcctgtccgtggcagtgtgtgtgtctgtttcctccttggcctgtccgtggcagagtgctggctatttcctccgtggcctgtccgtggcagtgtgtgtgtctgtttcctccgtggcctgtccatggcagagtgctgggctccaggagagcagaaatggggctgattccttctctaagaaggagaaactgaagcccacaaaggctgagcggcttgctcctgggcatcggaagaagcggggactggaatccaggggtctctgcatccagccttgcacttcccttccagatacatgggggccaggaaggttcttccgaggccagaagctttacaggtttcagagctgggacaaagcccagtgaggagaaagggctccctcgaggaagcattggacaggagcagtgactgccagtgaggcctggactggctggcagccc

SEQ ID NO: 472145 - DNA, 940 bp, Homo sapiens
ggcagcaagagggcagcttgaggggaaatgggggctctctgagggcagggcctgttccttgcgtttgaatttctgcattgagcttagctgaggatgcagagggatggggagtgggcagagttctacatgtgggcctaacatgcaccccaagggcttcagtcgtccccactggcatcgccatcagtctatgtgcgtccacagggcagtcgagcttgagcgtctgttgggcgcatctccaccaccatcaccaaaacatcaccatcatctctaccagcattaccgagacaccaccagcatctctaccaccatcatcaaagaaagcattaccacatcatctctgtcatcatcaccaaaacatcaccatcatcactgccatcatcaacaaaaaatcaccatcatctctaccaccatcaccatcatctctaccaccatcaccatcactgccaccatcactgctgctgccacagttaccaccacatctgcctgctcaggacactctagttgctcctccatctttcctgagctcaaaatttatatgaatctcatgtccagccacgcttaggccattggtcatgcattttccctagaaaacccatccaaggacccgatgctgtttctcagcacaccgcccatggctctgctcaacagaggagttaggaaaaggaagcaagctgcaggagtgaccccaacacagctaatgaagatgctgagaggagcgaggtcttgttccaaagaagagaaatggaagaaaaatggaaggaagaagcaaaagcagaaagatgaatggagcatagataggtgtctgaccccaaatataagaaaggggatcctgggaaatgcaggctagcttcatctgtaagcatccagagagcaaattcagactcatgggtagaaattctcagaagacagaatcaaagctcaacagaagaaatatctttct

SEQ ID NO: 472146 - DNA, 487 bp, Homo sapiens
tgtgtcaggtaaagaaaacgggcagcatggaacagtacaatatgatacaaagggatctaatcccctcactattatcagtgaacctggacaagtcatttattctaataatactaaaagctctattttattggaccagggcatgcaataagcattcaacttttagggtacatgtgcacattgtgcaggttagttacatatgtatacatgtgccatgctggtgcgctgcatccactaactcatcatctagcattaggtatatctcacaatgctatccctcccccttgcccccaccccacaacactccccagagtgtgatattccccttcctgtgtccatgtgatctcattgttcaattcccacctatgagtgagaatatgcggtgtttggttttttgttctggcgatagtttactgagaatgatgatttccaatttcatccatgtccctacaaaggaggtgaactcatcattttttatggctgcatagta

SEQ ID NO: 472147 - DNA, 873 bp, Homo sapiens
ttcagtagatctgctgtacagacctcttaggctctaagaaggtggctgcacttggatctcttacaaagcatcatattttcaatgaggagaccattgaagtgatgtcacgtggctgttcatctgacctgagggaagaatgaaaagaaagcccctgcccctccaatggagcctgaagtccccgagatgtctcaaagcaaaactgaacatatgaaaactccagaagaggagctgcagccagaaagctctcctgctgaaacttcagcctgcaaagatcctctgaaacctttaaagatcaggccagtctcccagcccttcgtgaatccagctgtgaagaacaaggctgaggaatgtgagacgtggatagacaggttcaggaagctggaaaatgccctctacctgtgtgatctgagtaacacaggagttctggagaaggaacgagccagacgcctcattcacaactacaatctcatttacaacctgtccctgagccctcagaaaatcgaccaggccttgcgcagattccgttcgggagaaaatatgctcttggagccagcactgcggtacttaaaggagctatgataacaagcccatattgtgagaacagatgtttcccttatctccctttttacccagacacatgtttctccccagcctaagtgtagtggcggaggcattgtcagagtggaggccgatgcagctattgtagatgcttttgatttggacttagtttctggctatgatgctcactcataagcagttcaaagtgatcagaggaaacctagttttatcttttgatgtggcaagaacccagctacttagaatctccttctgttttaataaaacttattattaatattacatgtttgatttttt

SEQ ID NO: 472148 - DNA, 942 bp, Homo sapiens
gtattcaggatctcacccaggactttgcaacctgagagagtgatgcaaagcctgagggttgttttcacattaacagtatctctgatgatacccatcttccttgccttctgcacagaagaacatttatttccagacttgaactttgtgctggcagtaacggaaactccccagatgaggcttgagtgggcttatggggcctctgggcagcctctctctcctacctgtccacggggctttcgctgggcaggttggtggcggaaggggctggaagcaatggttcaggatggctttttgcctctacttcctctttccctcctcaaagatactcagtgtccatccctgtgtgaagcaatctccgctgagagaatgcacccaagcagcgatgagggcaggggagctgcggggtctccatgtgcccctatattcttccgctagtgtactgtagcattgttgcagccacatacgcgaagcccatggggagcccctcggcagggaggctttgatgatttcttcagacacacggagcagactgacaaattgactttcaagtgaaagcacatagtaagcactacacgactcttggcaaacgtcattaattttatatggattaattcattgtcctttttctacctgcctcatccatctactgacttcagatgcagtctccaaatcagatttactttctgtaagaaagccaaacttcatatttcaattcaaataaacttgttagttcacttccctttgaaaatttcacttccaaattccaatagtaaggtttgttatatgggtaaacttgtgtcatgggggtttgttgtacacattagggcatcacctaggtattaagcccagtgcccattagttatttttcccgatcgtctccctcctcctatcctccatcctctgataggccccagtgtgtggtgttcccctctgtgtccatgc

SEQ ID NO: 472149 - DNA, 566 bp, Homo sapiens
ggtttatcacatccaggaaaagtgctcataagaaagaacaaaatgtacaggtttgttacaaaggtctgctggagtgtgctgggggtacactccagaccctgtttgcctgtgtatcaccagcagaggctgcagaacagcaaagattgctgtctgctccttcctctggaagcttcatcccagaggggcacccactggatgccagccagagctctcctgtatgaggtgtctgtctacttcttctcagagcttgagcgctgtgctggaagatccactgctcttttcagggccatcaggcaggaaagtttaagtctgcagaagccacgctcacagccgccccttcccccaggtgctctgacccagggagatgggagttttatctataagcccctgactggggatgctgcctttctttcagagatgccctgcccaaagaggaatctagagaggcagtctggctacagtggctttgcagtgctgcagtgggctcagcccagtcagaacttcctggcggctttgtttacactatgaggggaagactgcctactcaagcctcagtaatggtggac

SEQ ID NO: 472150 - DNA, 476 bp, Homo sapiens
ctagtttgtctttgggacgccagccaatctcatcatgacctcaaaaatggaggcttcctttccaactcacaaggctaaagaaggagaatgtgatgtcccagcatgtttagggtcctcttggtcatctttaaagcggtgtcactacatcacgtgggggagggctgagcttgcctactttttcttcttaagggaggaagaagccggagaggggactaggatgcctgaaaacgatgggagactgcatcaacctcagcctctgacttctcttcccccgtttcgtgctccatccagcccactgagagtctcaggtaggcgtgggcttgagcagaggtgggttcagatctgtggaaacagattaaagctcaacaggttaaagctcaacagatcaagtcaagtccaggtgcccgcagaaaatccactgctacaagccctggtttctaccacacccctctcctgactccgaagctttcgttggc

SEQ ID NO: 472151 - DNA, 594 bp, Homo sapiens
tgagttgaaccatgtacctcagttggaaatgcagaaatcacttgccttctgcatcaatctcactgggagctgcagactggagctgttcctattcggccatcttggcagcaatgatagagttggataattcttatttctctctgttatcagcgatcgcatcattttcactgaaacctggtactttttcatccttctgtgtaggcacagatttaaaagtcccatttgctaccaatcacatactttacaagtctaacttcactatgggctctaggcattctgcaagtacacttagaggttcctgccactctcttgactttgtctttgcctccaatggattggatgaggcctactacccacactggggagagaaatctgctttactcagtctgccaactcaaatgttaatgtcatccagaaacaccctcatagacacacccagaatcatgtttatctgggcatcccatggccaagtcaagttgacacaaaaattaaacattaacaatgagcaaggagcctagtggctaaaaatgcagcctcaaatccaatgtgccctacttactgtgaccttagaagcacatgagagagggtcaggtc

SEQ ID NO: 472152 - DNA, 694 bp, Homo sapiens
taggctcacactcttagagatgattgctcttgcggggagccagccagggggactccaaccagccggagcgacacggatcctgagagtgctcccgggtaggcatttgccccggtgggacacctcaccagagcagtgtgtggcacgcccctgtggaggatcaacgcagtggctgaacaccgggaaggaactggcgcttggagtctggatatctgaaacttgcataagcggctggcagaggcaaggaaagaccagcagagagaaagagaggaaagagacagagagaaaaagaggcaaagagagagaggaagagacagagagacaaagaaggagtcaagaaaagagagaggcagagagagaggcagaaagagaggaagagacagaggcaaaaggaaagtcaaagagagagagagagagagagaaagtcaaagaaagaaagaaaaagagaaagagaaatatacaagtagttaagaaaaaaacagtataccctattcctttaaaagccaagcggcagctgctttgctaacgggaaaaaaaagggccatctatactaattctaagttaatttagactaaacgaggtcttattaatagcaaaggataactgaaatcccaaacttacaaggttttcaacaaaagtaaagtttgctaaagttaacagtgtaacatgtattacagtaacttctaatcttgtggcc

SEQ ID NO: 472153 - DNA, 718 bp, Homo sapiens
tgcagtgagcggagatcctcaagcctggaccttctgggccatcatggtccagggcccaaagcctttggtcttgtggggctttcagctgggaggagatggagtgcagcgtaggcgtttgggttcacttttggcttcaacttcaggagagccgaggcaccaaccactgtgcggatgcacaagcaagcatgcaagctctgcttggcaaggcttcctcccgcggctttctcagcataactgcaggagtgagggtggcatcacggggctgtgtgatttgtttattttcttatttggggcttttgcaaattccaatctgtccttccagcccacaccagcccacctgctttgcataacctgtgaaactgcacacaacaccttcttgccatatataagacaaactgtggggctacaaaagaccccagatggctgctgtcccttaaggatctatgaccaagaggctcctcactacgctgctaagtgacatcctcaaacctgcaaaaccctctctgatcctcctctccccagggaggttgcttgtcctttttcccttatggtggtggccctgctgctgtatctggaaggtctcctgatgatcttttctattgtctcttaaattttacccactcttcaaatcccttaaaagacccacctttccaatgtccatacagaattcactcttctctgaatttctatagcatctattatctgtgcttgtttcagc

SEQ ID NO: 472154 - DNA, 899 bp, Homo sapiens
agtggttaccctgaaggactgatggtggagctgcctgccagtcccggtgctgtgcgctcgcactcctcagccgttggggggtcgatgggactgggcgccgtggagcagggggcggcactcgtcggggaggctcgggcggcacaggagcccacggagagggtgggaggctcaggcatggcgggctgcaggtcccgagccctgccccgtgggaaggcagctaaggcctggcgagaaatcgagcacagcggcggtgggccggcactgctgggggacccagtacaccccccgcagccgctggcccgggtgctaagcccctcactgcccggggccggcagggccggccggctgctccgagtgcggggccggccggctgctccgagtgcagggcccgccaagcccacgcccacccagaactccagctggcccgcaagctccgcacgcagccccggttcctgctcgcgcctctccctccacacctccccgcaagctgagggagtgagctccggccttggccagcccagaaaggggctcccacaatgcagcggtgggctgaagggctcttcaagtgccgccaaagtgggagctcaggcagaggaggcgccaagagcaagtgagggctgtgaggactgccagcacgctgtcacctctcagtgtgagcttccactccttagagcaagcacccacatctctctgttgtaaggctacttttaagcagtgatgacccacttttcctgctagtgcagacagcaggaagtgcctggaaatttatttaatataagtggccatcactctcccgacccagggtgcctcatcttaagggctgatggacaggaggaataattaccccagctccctggccccggaccagaacatggtctccaaagactgaaagactgagc

SEQ ID NO: 472155 - DNA, 462 bp, Homo sapiens
cacttccctgctgcagccggcatgatggcagcagccactgccatcaaaaggattcagtgtctgatggagagcagagatggagagaagggaattctgaccgcagaaaatcataacccaaagagagcaggtagaaaccagggagtgtccagcactgagcagagaagaaagcggttcttcacactggtgcaaggatctgttgccctgaggttcatgcctctatggtggagacaaagccccaggctcctaatcacctctgatcataaaaccattgccccttgttctaactctgcagtcaccaaacaatcttaccatgtaacttttacaatgtttattcattgtaaactctacaacaaggtatatgaggccacacacacagatccaaatgcagcctccttgaccattcttagctctttaatccctacccataattaactgcagcggagatgaaggaggctaaatctt

SEQ ID NO: 472156 - DNA, 698 bp, Homo sapiens
ggggatgcgatggcttggcttgggctcagaggcctgacacagtgctgtttgttacataagtaaatgtgcggtttgatgtgtggtttgatgtacagattatttcaccagccaggtattaggcctagtgatatgattttcatactcattaattttgggccaaaattcatactacctatgtggtctagaaaaacaacaaggaacatatttagttttaagagtcctgtattgcttgagcatctaagatacattgtagaagcaaatgcaaatagcttctgggaaaatccacattcaaccaagaccctgggagacttcaaaattccaaggaatataaggtcattaacaacattacttacacagggacatgatcccttgactgacagtcagcaggaacaatggatgacagtatcagaaccacagagactggaaaacttggtcaaattgctaaggaaggcagaggagaaaaggggaaaaggtttggttcaagaaggcagtactgaacttcagcagtcctgtaacttcccactccaaaactcctaacagaggagatcctccttttttcttgtggtttaaaccagtttgattggattttatactgatagctagcaatatctcaacagagagggagaaaaaggaattgaattgaggtgaaggctggcaagatggctgaataggaatagctctgatcttcagctcccatc

SEQ ID NO: 472157 - DNA, 824 bp, Homo sapiens
ggaagccatgactgccacctggccacttggggctcctcatgtgcataacccatcgagcacataaagtggctaagcttgttggtatattgaaccctaattcctatgaggtgctggtattgctgctacacaatgggggggatgaaggaatttgtttggaactcagagaagccatggagtttattcaaacctctagatcaggagctgtcaaacttgttcttgaagggccaggtctgctggagtttgctggaggtccgctccagaccctgtttgcctgggtattaccagcagaggctgcagaacagcaaagattgctgcctggtccttactatggaagctttgtcccagaggggcacctgccagatgccagctggagctctcctcgctgtgctgggagatccactgctgtcttcagagctggcaggcaggaacatttacgtctgctgaagctgtgcccacagctgccccatcccccaggtgctctgtcccagggagatgggagttttatctataagcccctgattggggctgctgcctttctttcagagatgtccagcccagtgaaaaggaatctagagagacagtctggccccaggtgctttgccatgctgcagtgagttctgcacagtctgaacttcccagtagtttccttaatactgtttggtccttggtgccttatttagttcatttggtgaggtaatgttttcctggatggtgttgatgtttatagatgttctttggtgtctaggcattgaaaagttaggtatttattgtagtcttctcagtctgggcttgttttagctgtccttattgggtaggcattccag

SEQ ID NO: 472158 - DNA, 904 bp, Homo sapiens
tacaagatattggtaccggcagagtgggggagaaccgtctactcaagcctcagcaatggcagactcccttcccccaaccaagctcaaatgtcccaggttgacttcagactgctgtgctggcagtgagaatttcaagccagtggctcctagcttgctgtgctctgtgggggttggatccactgagcaagatcacttggctccctggcttcagccccctttccggaggagtgaatggttctgtctcactggcatttcaggcatgactggggtacggaaaacaaacaaacaaacaaaacaaaacaaaactctcctgcagctagctcggtgtctgcccaagcagctgcccagttttgtgcttgaagcccagggctctggtgacataggcacccgagataactcctggtctttgggtagtaaagaccatgggaaaatcatagtatctgggctgaatagcaccgtacctcacggcacagtccctcatggtttccctttgctagggtatggagttccccaaccccttgcactttctggagatcttcacggcagcctctaccatcaaaggcctggaggcctaggaggaaaaaatgatttcatgggctgggcccaggacctggctgctctgtgcagcctcaggacttggtgccctgtgtcccagcagctccagcttcagcagtggctaaatgtggttaagatacagcttgggccattgcttcagagggtgcaagccccaaaccttggtggcttgcacatggtgttaggccttcaggtgtgcagaagaaaaggattgagctttgagagcctctgcctgattttagaggatgtatggaagtgcctggaagtccaggcagacgtctgctacaagggtggagccctcatggagaccatctactaggccaatgcaaac

SEQ ID NO: 472159 - DNA, 887 bp, Homo sapiens
cttcttgataaaagtcattctcattggtggcttgctgcagctgctgtgagggatggggttgttattctcaggccaatggatttatgtttccagggagattatggctgcctctgctgcatcatgcaagtcaccaggcaagttccccagtgaaggtgcatgtttgggggcagaagaactccattgcaaactttgggcactcacagttcttcaggtgtctcttggagcatgcagtggcaacccacttccttcaaaggcaattctcaatcagataatctcagaatgcttgttaaaacacagatctgtgggctttgatccagatcaactgatttataattacttgtataagtgtgctatgaattactgcgttcctcagctctcagaatgtgcctctagccaagagaagcctcatcagagtcttcttggggactggtctgagcagtgtaggagtccaaggaccaccctcatagtccctagaggaggcagtgggcaccatgagtcacatttaccatgcatttctccactataatgccctgaatgcacacagccaagaaggacttaacagaggattggcaattctattaataaatgtacctggatagaaggatcaatagatctagggtctttgttatataaaattaagcaagttattcagtcattagagcctcattttgctcatataaaagagtagtagtgacgagagggctgctgatttttccccaacttaaaatgaaagaaaaagcactgagaaattttgaaaagcatgtcagtattaggaaatgcacactttcatggtattgactcattgttaatgtatcatttatactgaaatgaggaagttgggttttacagttggaatcaggaactagtttacatcctttgcagggttt

SEQ ID NO: 472160 - DNA, 492 bp, Homo sapiens
ggctccgccagaggggaggagtagatttcctgaatctactctcagaaacagcacatggtggtagaaaatgcctggtgcttagttggcagctgttaccagctctgctgccatctgtccatgactgtcatcaataaccacagcaatgacaatgaccccaaaagcttctcagaaaacgtgatgtttgagctgagcagagagggatttgtggaaataagtgaggcaaaaaggtcctgcatacagcatggaaaacagttaataaagatctcaactgttgtgaaggtcgctttccagaagccagaggagatagtcttgtttctctccagtaagtgcactaggaacagagcttttgaagtcaactctgtgggtgtacagcatttcaaagctgcaaaaacagcaaagaggaggacaggagggacattttacccaagagaagttcagagttccaatattgttcctcatggctattgactgatttaagggttatcagggcat

SEQ ID NO: 472161 - DNA, 667 bp, Homo sapiens
cacagacacaacagaaagtcatggaagagtgagaaagaaagttactgcacgcaaatgtacacattgtgatgggccccagagatacaaatccagtaggccctggtcctgcccccaggttcctgtggtgtacaggggagagggagctgagtgacccgagcaagtttgatgtcctgctgggggcctgggcctactccaaatcacgcacatctgtcatgaaccgccgatcagcaggagtctcctgggactataaaaatgaaaaagaaatgtctttggataagtctaaagggaaggctcagaagaaatattttagcaaagacctaaatgaagtgatggggaagccatgtgaatacctggggaagagcacgccagcccatgggaagagaagcacaaagtctctgagacaagtatgggctggcgtgtcagagccacagaaggaatccagtgatggggagaaaaagtcagcagcccatgagagcagcgcacagagctaactctcctagggagcagccagtattcattcattcactcaaccaaggtttgttaagctccactatgtgcacacaacggtgctgggtccatgggagaaagaagtgaggaagacagaggagtagtcaggaagacaagtaaagatccacagaggaggtaaacgcacgatgttatgaggacc

SEQ ID NO: 472162 - DNA, 675 bp, Homo sapiens
ctacaagaatttcacctctagctgcacaatgccaagcatccccagttcttccttgcgatgggttcgaacatcctcctttagctcagagaagtttgttattgccgaccttctgaagcctacttctgtcagctcatcaaagtcattctccgtccagctttgttccattgctggtggggagctgcgatcctttggaggagaagagtcaggtcctttagctgcaggtctgttggagtttgctggaggtccactccagaccctgtttgcctgggtatcaccagcggaggctgcggaacagcaaatattgctgcctgatccttcctctggaagcttcatcccagaggggtacctgcctgagctctgctcctggatgaatgcaggagttgaagctgactctgcttccctgcccgtgcttctagagccttttgtgggctcctgtgttagcagtgccaatgccccagagaaatcaatcacaagacctgaatttgagtcctcctgtttctttatgtggtcctgggaggtggcaactctaaactttgggacaaaggacaatctccaactaccgctgaccttggactgctaagtttcaagggcaagatacatagaaaatgaacctgaacaaatggtttcttttcattatcagctgtgatttgaacctaatttctctgtagagctctt

SEQ ID NO: 472163 - DNA, 593 bp, Homo sapiens
cagttcccctggggctaaagtctcctatggaacccttcctgccaattcaagtgtccatggtggttgaggggtctcctcctggtggggttccagaggcctatggcaagaatgtgttgctccttgcaagttcaactcacccatgccctcagagccactggggtcaaggaaagagtccgggtgcacgactcgctaccaaaaacgtaaagaaagccctcttcggtgtgattgtttttcattatgggaagctcattcagataacgtggaagttgaacctgatgaaaagggaacttgaatgtcatgaaacacaggaagaatatgtccaagtgattttccagcaaatctttggggggctgagagccatagcccccacaccagtaaacacaggcaaaaatatatattgacaattagaaagacgtttttaattttattttatcaacaattttaaaaccaattacttttttaaagattaagttacatgaactaaaaaaattaggttaattactatgtttttgtgtgagtgcccatctatttaaaccaatcagattaacatttcttaagggatttttggcctaccacactgaattttattatgt

SEQ ID NO: 472164 - DNA, 697 bp, Homo sapiens
gagttttggagtgttttgttatgatgaattattgagtcaactgacatggatttgtgtcctggttcccatgattacttgctatgtgaccttagaaaggacgatacctaccacatatgcagcctatgggtacatactagacatctctgtgaatggggtcaacaaagtgcttggttcacggaatgccctgagtaaaaacatgcaaggtgaacaaggcccgatcgttattccttctctgtttgaggctggaaacaatggaaaatcaacagtcatcccagtctggttcttacaggttcaagaagaagaggaatactctgaggcaattactgtggtgttactcactctccatcccctcatgaacaccccagcagttgctcctgagacacaacctcggaagccagggagaaagaaccgaaattctcccattactgtatttcctgtgggagtctatgtgggagatttttgtttcacaccatgtatttgtgacatatggataaacaatggcaacataaaagatcttacagaaatcttcaatattggtttcctcagaacacacattcttaatgggggacaatgttgccgccacggaggtgaaagttggttattaggaaggttaaaaaaaatcttaaatataaaaatgttttgtggcccctcatcatacgtaaacagatataaggcatatatgtggtattaaaatttc

SEQ ID NO: 472165 - DNA, 734 bp, Homo sapiens
ggaggcattttccccattggaacctcgctgagtggattggattggagcaagatgtgctggcaagaaagggccccccaaaaacccaatgaccccaaagatggaaagagtctctccccgagaagcactgcttggagttgggggaggggtgatacaagcactcccttggccaccacagctggtgtctcacgtgcaccccaagtccactggctccaagcccagcatagcaccaggacttgtccaaggccgttttgccgttcaaattcattcaggaccccagggcactttagtcggaggagccctggggtcttgaacaaagtagtggagctagctggaactgagattcctactgctgcaatggaggatttccctctggctagggctagtctggctgttccctccaagggcactggtcaagtactgccctgtgttgtgttccgctgtgacagggcagcattgaattcctacgcaaagtcccacagtcacttcactttccctcccccatgcatacagattctctctccaaacactgctggggggctggcgaaggtggtgattgcaatgcaagaatgtctttcttaccctcttcagtgcctctttccctaatatgatgttaaaactaggtactgtgattgctcatttgatctttggttcttatgaaggtgctttcttgcgtggatagttattcaatttggtgctcctgtgggagaggggcgatcactggaggattctattaa

SEQ ID NO: 472166 - DNA, 675 bp, Homo sapiens
tgcagcctttggatatggtgccctgagtctcagctgcttcagctctaaccatggttaaaaggtgccaatgtacagttcatgccattgcttcagcaggtgcaagccccaagttttggtggcttacacgtggtgttgggcctccaggtgcacagaagtcaacaactggggggcagaaccctcaagagaacctctgctggcacagtgtggaaggaaaatgtggggctggagtccccagagtcctaactggggcactgcctagtggagctgtgaaaagagtgccagcatcctccagaccccagaatggtagatccactgacaacttgtatcatgtgcctggaaaagctgcagatgctcaatgccagcccatgaaagcagccacgagtggagccatacctgccaaagccaaaggggcagagcttccccaggctgtgggagcccacctattgcatcagcatgacctggatcttatattttcttcccatgggccacgactctgggagtactaacaatcccagatcacttactaccatcagatatttagatgattcaaaggtagtcttatgtctctctgggagtcgttcctaattcatgatttcccatagggtataaatcttaactcagctgcttttgaaattgacaaatgtcttacgagggtacatgtgcacaacgtgcagg

SEQ ID NO: 472167 - DNA, 561 bp, Homo sapiens
ccaggtacctcagttggaaatgcagaaatcacccatcttctgcatcagtcatgctgggagctgtagactggagctggctgctgcaattcgctggggattcacttccagccctattcatctgattcacttccatgcctggaaatgtcactcagggaggctggagagtagcaaagatggatgcctcctgcttctgagacctctgacctcaaggagcatcaacctgatgtcagtaggatgctcctgtgtagggtgtctgacaaaccgtgttggagggtctcacccagtttggtggcaccaggagcagaacccatttaacaaagcactttgtgccttggtggagatgatatgtttcgctgaggtgaaacccactcatctgggcttcctggattcctcagaactaccaggaggagaggctaagtctgctggttcacagagactgcgaccacccctcccctaggcctagggagatcctaattctgtccctgagcctctggctggagttattggagatcctgcagggaagccccactcactgaggaaggatgggtcagggttagagct

SEQ ID NO: 472168 - DNA, 945 bp, Homo sapiens
gagtttgaaaggcattgtctgatttcagaagccttttcctgtaaacactgggtggcatctcatactatccctgactgtggtgggggcgctgctggagggtggggtccaggggtgaatggtcatgcagggggaggggagacttacagtagacttacactatctccgaggagttgtcaaggaggttttaatcggccgctcccagccatctgtacagctcttaagatcggcaaacaaatgttctgaagaagctgaagatgttcattacagagctgtatatgcccttaaaggaaacttgaaaggagagatgcaccgatactctgggtgggccagcatcagctgccattcaaacaccgtgactgcaggggtgtcaggctggcacaccacagtggatgctgccctaaggaggtgtcttgtggggcatgacttgcacgttttagaatgcagcttgtcttcctaccctctactccattgtcccagccatgaaatgccaaacacatgtggtgcattaggcttttctcctccatttgtttttctggatgaattcaaatcttggactcagtttgagcggagttggactgccctctaatatcacgaagaggcaagttcctctgcaattgcagcacttagggtagctttgtataaattttgacttgttcacaaaacaacatgatagaaaaacactgactaaagttcagcctgcaggctaagtatatatcccaattggtagccattaaaactcaatacctatgtttttactaactccactgggatctgcttaatattacacaactccatatcaaatgtaactaagaccacaactactgtctaccttaactggcagttatattacattgtttagccctcatttcatattacctttattcttaaaaattgattaatggcactttaaaattttggagtgtgtttttcttgctcatcccttat

SEQ ID NO: 472169 - DNA, 493 bp, Homo sapiens
ttgttacgtaagacgctgatactgggccttgtattgcttttaaagtttcctctgctcagcatcatttcatgccaaagtgctgctatgggctgctttgtgtgcacaaaattgctttttccacctcggaaatgcagctttccctagggggaggcctacaacaggacgaccattctgagccagcccctgtagaccccaacacctattcttttctctggttaattacagcagcatctgagaaattccatgcaaaagaagactacaaccagtgtttcagatataccacaagatcaaatttgggcactggtggtccacctcagaagactcttgagtcatatattcagtttctcttgctaatatatgactcgtcttcaccatctcctcaaaacaagagcaaagccaagatagaggaaggtaaaaggaggaggaaaggaaaccaaggcagggagatgttctaagtaggtttgcatttagttacccctcatttcacttaagg

SEQ ID NO: 472170 - DNA, 1116 bp, Homo sapiens
tttctgaggggcaggccatagatggccaaccggacgtgcaagattgaaggctgtcacgctctggcaggatgtggaatggagacccctgcacagctgaaggggcgcagcaggacggcaggagtgctggggggcactgaagccttgaaagccatattctgctttcagctgctctactgggcatctgtgcctggagacatcgatgtctacttacaacttaggagagcactgggcagtagagcctgtggggagcagcactggctccacgtctccaatggaacctcacaaggactcgcagagctcagcttgcccaggactgagacaacccccacggctcaagaagtgctcagagtccatgagtgtatcacggaatatggtggggagaagaatggtcctaccctggactctctgaggtggaggaagatggccataagttccccagagtggcagaactttggttttccggcccatccagataaatccaggataatctctccatctcaagatcctcaactcaatgacgcctgcaatgtctcttttgctatattagggtcatttatggattctggagactggaatgcgagcatagttggctgttattcagcctgccacagatgagatgataaaaggaagaggaggaggagagagatttagggctcaataataaaactaaatttggctttaaaaaaggtaaaacctttttttacacatctgagccatacgtataatttttgtatttctacatatatcaaataataaatataaaagatacaaaaggattaggattagtagggtgaaaacaaaataatacaacatagttaagatgaatcaaaaagtgggtacactatatgccataaatgtcttctcagttatgaagtgggcttcagttttggctctgaacttctttgcagctagaataagaagagaacacaattagtcacaggtgtcacatttttagaaggtgaaagaaaaatagttgctctgaagaagatttctagacactgaagttggggagaccatgaggtgcttagtgatgcattagacaaataacacctgtgggaaacaacttgatgggaatttgttaattttttcaagaaatatttatagaatgtgcacatt

SEQ ID NO: 472171 - DNA, 665 bp, Homo sapiens
catggccaatgaagactcccatgcagatagagataaatgattgccctaagagtgactgtatttatgctaggttagagcccatcgtgctcagaggggctctcagtccactctgcggactgctgactgagactttgcagacctgctccccttctccctgctacctgcctgccggaagagttgagtcaacacagcccacctcctgcacccagagctggaccattgtgccttggttcatctccattcgtctatgtggaaatcatgtctgtaattttgaacttgaattcacacctgacatatggacacttcaggttcctgctggggggaatttggatgatgtcatgaagcagagacaggtctaatcaatagaacttactttagaccttcaatctagttgagtctcctgtttttcctcttgatgggtacttctattgtgacttttcaacatttgctcgtacagtgagggcttgagtgaagatagaatcagttaagggaccatttactaagtgatatgtagtttgcaaatattttctaccaataagtaggctgtcttttaattttgttggattttcctttgctgttcagaagctttttagtttgatgcagtaccacttgtttatttttgcttttgttacctaagcttttggtgtgatattcaaaaaattatt

SEQ ID NO: 472172 - DNA, 2088 bp, Homo sapiens
ccagttttcaaagggaatgcttccagtttttgcccattcagtatgatattggctgtggagaaactcctgtttttaaaaccatcagatctcacgagacccattcactatcacaagaacagcaaaggaaagacccacccctatgattcgatcatctcccactgggtccctcccacaacatatgggaattatgggagcattaactcaaaagtccgcagtccaaagtctcatcttagacaaggcaagtcccttccacctataagcctgtacaatcaaaagcaagttagttacttcctagatacagtggggttacaggcactgggtaaatacagccattccaaatgggagaaactggccaaaacaaaggggctacaggccccatgcaagtccgaaatccagcagggcagtcaaattttaaagctccaaaatgatctcctttgactccatgtcatgctggtgtaagaggcctcgaggcctgtgacgggagaggctgctgtgaagacctctgacatgtcctggagacattttccccattgtcttggggattaacattcagctcctttttacttacacaaatttctacagccagcttgaatatctcctcagaaaatgggattttcttttctatcacattgttgggctgcaaattttcctaacttttatgctctgcttcccttataaaactttataaaactgaatgcctttaacagcacccaagtcacctgttgaatgctttgctgcttagaaatttcttctgccagataccctaaatcatctctctcaagttcaaagttccacaaacctctagggcaggggcaaaatgccaccagtctttttgctaaaacataacaagagtcaccttagctccagttcccaacaagttcctcatctcatctgagaccacctcagcctggaccttattgttcatatcactatcaacatttttgtccaagccattcaacaagtctctggggagttccaaactttctcacattttactgtcttctactgagccctccaaactgttccaacctctgctgttgcccaattccaaagtcatttccacatttttggatatcttttcagcagcaccccactctactggtaccaacttactctattagtctgttttcacactgctgataaagacatacccaagactgagcaatttacaaaggaaagaggttcaatggagaactcacagttccacaacattctctgatttgaaccacccactccttctaaaaagtctgcctccccaagagactcacagcagcttgccctggacaagaccaaaaaagacaatggatgtggtccgccttgggagtccccaagggctgtgcaacaaagtcaagtcaccgtccacccttcagctctgagctagaatctcagcagacacatctgggccaggtccacaaggacaaggactgtggctggcttcactaaccacggtagtgcaagcaccacacctgggcagcaggaagccccgcaccaagatttgttgagtgaatgaatgaggtagtgaatgaagcaggaggccataaacgctgagggtgtacacctgcctccctcccgcatctcctacccaccctatgaggagggaggggaggcagcaggagagctgggctacctggggtagagtccaggttctgctacttactaggtaacctgtgcctctgcgtcctccgctgtaaaacggggtctgtggggttgtcctgagaattaaatgagttaacatttgtaaagtacctggcacgcagtaagcgctatatgtgctaaacagataaggaagatacccccgccccccaaccctccactccccagatcactctgtgggcagagaccgttttctcctctgctcttccaagggctccctttgggactttgcaggcagtggttgctagagtctaggtctgcctggatgccctagcccttacacatggcttagcacctcagtactgccaatagctttgataaggagccatcaccctccagctcaacagggaggctagcgcagtgctgagggaggagggaagagctagaatatgatttcatcagggagttgggaaaggcttcacagagacagcagag

SEQ ID NO: 472173 - DNA, 893 bp, Homo sapiens
acaacaacaatatgccaatggttagtcctgcctccaaaatacacctcccttcagattgtatttccatccttctagggccttccgtcttcttcgccaaccccgagtcattgcttctcatccacacaaggtgtctgcagggcagccccggcatggtggaaatgctggcaaattgtgtcctgtcagaggaagggctgagacagtggcccttgcttctccacgacctgcatgaaggactcctcgaaggggctgagtgtgtgggaaaatctaaaaatgcttatggggagggggaggttaagctccccttcttgtccttgtcaagggctctctcccactacttcactgggggtgaaaggcgcatccgcaacaagggcccctggtcagctaactactcctccatgaagccatccctgattcctactccagcccccaaggaagaggagccctgccttcttgtagtggaggatggtgtttaggaaccaaaatctgagcccttagtgtgcttcttgttactgaggtgtcattgcttctaggcctgttgagtggacagatctaggaaatatatgtgtgcatatgtacactcacaggtgtatacacacatctacaactatttccatatctacctgtgtttatatatcagaaaacattatgtttctctggataactctgattaatatgcatagtcttataatgaattaataaaaaattaaacaggaatgagaaaatgaaataagcatccaatggaagtagttagaaaaaaggcaataaatgtcaagaaagcagaaaggaattaataaatgttaaaacagaaatcaattaattaaaaaacaaaaatattttataattgataaactgatacataataaatatattcaaaataaaattctttgaaaaaa

SEQ ID NO: 472174 - DNA, 606 bp, Homo sapiens
caggacacaattaccacggggttgcccagggtcctggactggaaacatggagtcacttccacccatttgtgtcctcagaggtctggccgctgccactgcacctgcctcagacccagtgtcacctcgccagggcttcagccagcctgaccttccagctgccacccagcagctcagcttagggactcagaaccttctggcccagaccttcatacccaactcccgcccaggggcaaatgcagaagcctctgctggtgcagccaacacggagtgggggcaaggcggagaggaaaagcaacagctcagggtgtgtatgactgatggcctcatgaaaaaaggaaatttggacacaaagccatgcatgcagggagaacaccaaatgaagactagagttacgcagccagaaggcaaggaacaaccagaagataggagggaagcctggaacagatcctttcccagtccctttagaggcagcatgtttctgccaacacttcattttgaacttctggcctccagaactgtgaaacaataaatttctgttgttccaagccacccagtttttgtggtacttttaaacgactacccttggaaaccagtacaaggtggaac

SEQ ID NO: 472175 - DNA, 545 bp, Homo sapiens
tgaaattctacacatgctttatataaaagggtctataagacagggttaattcacttgctggctggatggcaatgaggaccccactggtggaggataaagacaaagacacaaagttatgtaatgtgctgacaagacagttgctggcgagactggctgtgggtctgagcgggacagtgagaaaatgggccaagaagaggagagggaaaacaaaaaaggaaagaaaaatccaacatctcaacaagattggaaaatgggctgtgaaaggaggggcaagacaggaaggaggtaatgttagaaaggggattcatagaggagttaagattcagcagttgcttggctctccttgcaccctaggacctgagtgcccactgggcctcaacgccatgctggcgctgcctgctggctgtactcccattttctccctgaaagacatcagcctgccaaagctgcagcagcataaagcagcccacctctccagcttcacagaagcctgatgagaaggctaatcaggaaatcaagtgcccctccctaggcaggcttagcac

SEQ ID NO: 472176 - DNA, 712 bp, Homo sapiens
cggcgttcaggtctcttcgggttgacgccgctgcaccagccctgcagactctcctggaggtgatgcccccatcacaggctcctgaactgactgtgggtgaggggtggtcccccagaaagtttccccttatcttctggtattccagaagaagcattgtcatcataggaaatgacagctgcatgtgtgttattgccgctgaagaccttccagtgggacaagatgtggaagaggaagacagtgatattgatgatcctaacctgtgcaggcctaggccaagaatatacagttttagctggcaagctgctgcccagcccaaggcaactttttccagattgcttgcatgtgggtgtgaccagttctctagttattcccaacgggaggtgaatggaagttataaatgtcagttttggaccaaggcttttgagaagcagtcatgcttcttttacactctttccccttctgctggcttacatgcagaaaaggaacaggccctgggaatctgattgggtgacaggtagatagatccctgatcaatggtagtctatggctattctgcaatctgtcactcaggtgggctctcactctgtggtatttaaatgaagcaacttggaaataatttgctagctgttaaggaacaggaaaaagtggatgggtggcctgtagatgagtcatgtttagagtgacttatcagtaataaaggtattagtgcttc

SEQ ID NO: 472177 - DNA, 812 bp, Homo sapiens
cgtaaccgggtatgagagtcacttctggaaattctggcttgtatgggtgtgtcaatggggctgatggaaaaggtgaccagtccaaagcatttatcaggggaacttgtgtacagagtgggctgcagcaatccttcccatgaacagcgagaggaaagggatgttctacttagaatatacagttttagctggcaagctgctgcccagcccaaggcaactttttccagattgcttgcatgtgggtgtgaccagttctctagttattcccaacgggaggtgaatggaagttataaatgtcagttttggaccaaggcttttgagaagcagtcatgcttcttttacactctttccccttctgctggcttacatgcagaaaaggaacaggccctgggaatcccaactacccctcaacactcacaaaggcagagactaaatactgatacacaaaaatcttccctgccagcagaaaacagcaaacagcagaaagacagcttttgcccacttccacgttttacatttctgatgagtgcatctaattgacagaacctaagtcatatccagtctcctaactagattccagaaaatgttgtgtttatttatttatttattttacttccagcctctgcagcattggaaagcaccctggaaatgggtggtttgtaaactgctgatttatggccaatgataagcaatgttagtctatgtgtgaagatgtgagacaagcagaaagtgagtgtttgcaggtgtgactttatagctagggaatatagatagcagagcattgtcatagaatcttaaagaaacattgactcaaa

SEQ ID NO: 472178 - DNA, 507 bp, Homo sapiens
aatttggatttctaacaactttccaaagatgccagtgttgctggtctgggtactgcacttgacaactattggcttagagtattgcttctcagattttcaaattatggcacacacagaaaataatttttgtatggaataccagagtaaatggaacccagggctctgccagactgcccaagggctgagggaagaaatatctcagcacatggcagtgtacactagccaaacaggttggggaggtttggctgagagggataaaaggggaaaaggtcaaataccaaaatgtgagtggatcactaggctgtcaaaacaacagaaatggattttgctttcaagaacagggactctctttcatctttgtacctccagcaccaatgaagagggattggaagacatctcagactacatagagtttatggtacatttacactgacttatgataaactgcatagcttttaaactgcgtatgtcctattgtctggtagaggataagaagatctgaatatt

SEQ ID NO: 472179 - DNA, 500 bp, Homo sapiens
tgtggcacctagtaggcacacagcagcgggtacaggcgcagccatgcgagtttgtcccacatcctcggagcatgtcatccttcctggggaggcggagtcctggtcttgcccacaactccgaagacaagtgttgctccatcccctgaatctgccgaaaggagaacacaccagtgactctgtggagagacttgtttcagccaagaggacacatcctcatgcagaggggcagcatctgggcctgctctgcagccatggagacaaacttgctctgtcaagggagcagctgctggccacctgctcaccagtccaggctaagcccttttctgagcaggagtgtaggagcctgatccctagaatacagggctggaggtacagtaaagaaggccaggctgaaggaagatctgtggccttgggaaagagtgagactcctgtccctgagcctgaagggactccgaagaggggttttataggccctaccacgacgtaaatagacacagatc

SEQ ID NO: 472180 - DNA, 631 bp, Homo sapiens
atctcctgtccatatcatctgtatgggtgaagttaatttcttgcagaagaaaggctggatgagaatgatcagctttatcaggagtttttgcaagtaccgcagatttatgttgaatcctagtaagcgccaggaatttgaagactatcttcaccaggaaatgcaaaatagcaaggaaaatttcaccacagcacacaacacatcgggacgttcagctccaccctccacaaatgtccggagtgcagaccaagagaatggagaaataacccttgtaaagcgtcgtatatttggccacaggattatcactgtcaactttgcgatcaatgatctatatttcttttctgaaatggagaaatgcttgttgattgctcactctttactgaacaccggttttgacattggatatacaaaaaacaactatgacgtgctctctatttctaagatcccacaaactaatgaggatggcagaaaagacacaaacaaaagttaggaagtgtctcaggatgataggtgctatgggagaatcaggcataggaagtgtatttagacaacacaactccatgaaaaccgtatgccttttggagagggggtggtcatggggttctgggggccaggagaggttttctgccttccc

SEQ ID NO: 472181 - DNA, 555 bp, Homo sapiens
gaggcctattgactattttctgtatatgtgaaatgggagagttccctgaccccccctctgcagaaggtgcaacaggggtgtggctcatctgttcggctgctgcatgctcaaaccccttatgggaggaggggcacgcagacaggcaggttcaggagccagggcaagtgcttttgggctccggccccacggtagcttctacagagattttactggatgatggaggtggctctcagcagaatggatgcggagctgaaaaagggatggagtggggagatgatcttcccctggagtttggctaccccatggctgatcttctttctgactgtccccagctgaactcctctcaatgttctgatgctccttctctcctctccttctctgccatgccactcttctgctcctctgctcttttgtttgtctgtccatggagcctggggcctaggggtggggcctttgccagggaactgccctcgcctacccagtatttctctgtctactgttgatatcattttccccctctgaagaggcacatctaactgccattagaatatggac

SEQ ID NO: 472182 - DNA, 1101 bp, Homo sapiens
attccatgttgctcctggggagcttgagccatggagatccatggccgacgtggtcctaggaatacctgttggctaccctgttcctgaagacctgagcagcaccatggtggttggtaagaaccagcatcttactaaagatggcaaaaagggagccaagaagaaggtggttgatccattttctaagaaagattgctatgatgtgaaagcacctgctatgtttaatataagaaatattggaaggacactagtcaccaggacccaaggaaccaaaattgtatctgatggcctcaagggtcatatgaaaaaattcaagatgattactgaagatgttcagggcaaaaactgcctgactaacttccatggcatggatcttacccatgacacaatgtgttccatggtcaaaaaatggcagacaatgattgaagctcatgtcgatgtcaagactaatgatggctacttctttaatctgttctgtgttggttttactgaaaaaatgcaacaatcagatatggaaaaccacttatgttcaacaccaacagacagcattggaagagacatagaaaagtcttgccaatctacttatcctccccatgatgtctttgttaggggagtaaaattgctcaagaagcctgagtttgaattgagaagactcatggagtttcatggggaaggtagtagtttgggaaaagctactggggatgagacagttgataaagttaaacgagctgattgatatgaaccaccagtccaaaatgtgtttaaagttcagacttacagtagtagcaaataaaaaaaaagttttggtgcataaaggagtgtttttcaagttaactgaaaaattttctcacatgtacaaaacctaattttccaggaatgttctataattgaagaacctaaaacacactgatgtttttgtagagatcatttcaatgtaatgaagactgcttgagctccaaatgtttgtcagcactgtgctaggcacaattgctgccttgaggaacttatggtcttgtaagtgtgacaaacccataggagataagtacatataacagaatgattgttgacaagacatctattttgtggtattgaatgattctctat

SEQ ID NO: 472183 - DNA, 1796 bp, Homo sapiens
cttgcatttaggaatatgaatggaagtcttggtcaaggctttcaagaagcgggcctagtttggggaaagagaagttgccagcatgtaagaaaagaaatgtgcacaaaatacaagtatttttttttgcaacaaaagaaactatttatttggaatatgcattaccagtacaaattaggagactgtaaaacctacaccgtgttagtatcattagagaacacaaaagttcagttggaatcaaaagggacagaagcctgtgctctcacagaagcagaaaagcttaaactttcaaaaccaaaacagagcagagctttgcaggtttatattctgaataataagaaaaggggagggaacattcattatcaaatgttcatcatcaatactacaaagaacgagacacaagtcgcaagaaacaatggaaaatgttaataaagctgaaagaatcgttgagtatttttttgtttcttttaaagttttttttaaatttgagtttctgtagtttcatcttttttggtatcgaattacaacaagaaaaccatttattgtccctagatggcatgaacccgtttatttcagggacattacttcccctgacttcgcatttacagattggatatgaacaaaatcaacttctcagtctctcacaagactcttagtaagccaggcataacagttcccatctcacagatgaagaaaatgaggcaccaaaatatttgaccacctcccacttaatcaagtgatagagctgccatctttataactggtagggttggctatgaagatggtgagctcaggtgacttttgagaatagctttcatatacatgctattttctcatgtatttttagtacacgctgtgttcccagggaataaaaatcactgtgatgatttcaatgaaaacattaccttccctttccccatgattctcaggtcctcaaatgaagctagcaaaagttcacatgagccacgttcttatacaactctttcctccagagcaataggtcaggaccaagaacatagtgtggtataacattttggaaaattaatacagtgtgcctaatataaaacaaaaaattaaacagaatcaagtccattaaagacattgtaagtactgtatggggctccctgagtgctccagaggtggtgggaacaagagtagtttacactggaaacctggtcttcctcatgatcaggtcctgtgtatgccattctggtaagtgcacgctagtgggcctgcaggtcctggaagccccagacacatactgcttctctgtgtcagtgaccttcacttagagtcactaattccctctctcgggctcaaaaggcatagtgctacagttattaatgtaggtaattgtatatggcatctcgggaaagtgaagatgtgagatggtacatgtgcctacatgtgcatgaacgtgtgtgtctatgaaggcatagttgaggttgaagggtttcacgataagaactttctattccttgctgatgcattcatcaccatgcctaactcaggcccagttttgcaataggttctaaatattgctttctcagtgctgaatggtctccaaagactgtgcctctgaaactgagagctattgctagcagggtaagaaagactgtaggaattctccacctgctgttcccgtgtccttccctgctgcctgacttcctgcccgggaaccaacctagtggagatgaaactgaaaaatgtggcacctttagaatcccagctatgacagtccccagtgaatagctggggctaggaaggaagaggaggaaagtgttccaatcagtactgtc

SEQ ID NO: 472184 - DNA, 623 bp, Homo sapiens
catctccctgctctgcgttggtgtttggacctgaatttcatggcacctcactttaggacacccgagtgaccctgccccatcatggacaggtgggatggggtcttggaggaaacgtcaggtctggagattagcatttcccagagccttgcttggagttctcaagatatctgctgttttgccaaatctgcatcccctgggaacctgtggggagcctcgcctcctgtgacccagacactgtgctcggtgctctgtgtttattatctcatttatcctccaggccagcacattaaggtaatagaagagtggaataaagccgaatgcattactaatttctgtggaaaagcagaaggcctgaccctagctgttttcttctttgcattctggagacacagttgtatgatgaaaagaggcacatcctcctttagggctacacccaataactgctcctcccggccccctgccgtgcacctaactcaccctggacctcacagccccgcagagcctcgttcagccctttctttcaccttaacaacatctagcaaacagtgatagaggaagtaccatgtgccaaatactccactaatggctttatgtacattatctcatttaattctgtgacaacc

SEQ ID NO: 472185 - DNA, 816 bp, Homo sapiens
cacccatcacctacgtatatagagacaaagccctttgagtactctgctcattgccctgtgagttatgaggttttacactctgtccggtgggaacagacacaacttccagccccacacttcagcccggtcatacatagaattgagtagaaaatcaataaatgaagctcagtggaaagcaggacgattgagacaaagatttcagggtgaaataaaatttgaatgttatccaagtattcccagtgtaatcaatgagcccttaatagcagaagaggaagacaaaaaaggaaaccagagagctgcagcagaagaggaagttaagactccaaggaaagagaaggatttaatgcaccatcattggcttgaagagctgaggttgcacaacaaaaatgaacgagtggtaggtgccaacaagggtcatgatgaagacccagtactttctcctgctgaagatcatgaaatgatgatgaacacaatgatgatgaagatgttaatggtgatgctcaacatttattgaccccttaatacctggaacagggccaagctcatgacatactcaagcctcacaataaccttataagggttattaaggaagttgaggaagcggaaggaaagattgcacccatcggtgctcagcattgagtgtgtacccattttcttactccctaactaacatgaatggttttttagcttaaaaaattactactagtttaataagcaaaatatggtatcttgttttaacgcgcggttacttgattaatattgaggtctgacattttaatatctatactgactaattgtacccttcttttgtaaacc

SEQ ID NO: 472186 - DNA, 499 bp, Homo sapiens
aaccagacggcagagcatttggagactcaactcttcagtcgaggatggtgtacctcagggcttggggagaggtactatggagaatgaagttttcgaatctgaccatttgtgatattgatatgcaaatcagatcacattccccttcccatgcccttcaatggcttctctttgctcttgatgctcttgggataaagaccaaacacactatctgtcccacatgctgttccttggtcctcatgacttcccattccagctgcatcttcaaccacactcctccaggctctttaaacctcaacgatgctggtcttttgtcatttccgccaatgttccaatctctccctcaccttggtctaactcaccaccactacccctctgccccaaaatcaccaccacacacacgctgtgttagtctcattaacttctgtacactgtttaggcctctgttcaaaacttacttcctcagggagcctctcccaagccccagtcaactgtgatagaa

SEQ ID NO: 472187 - DNA, 1233 bp, Homo sapiens
gaacaaagcatgatccttaccttcaaggagctcatggcctgctggagagagcggctcataccaaagaagaaggaggaggaggaggaggaggaggagaagaataagaagaggaagaagaagaagaaggagaaggagaaggaggaggagaaggaggaggagaagaataagaagaggaagaagaagaagaaggagaaggaggaggaggaggagaagaataagaagaggaagaagaagaagaaggagaaggagaaggaggaggaggaggagaagaataagaagaggaagaagaagaagaaggagaaggagaaggaggaggaggaggaggagaagaataagaagaggaagaagaaaaaggagaaggagaaggaggaggaggaggagaaggagaaggagaagaataagaagaaggagaatgagaaggaggagaagaaggagaagatgaagagcagcaggaagaggaagaggaaaacaaggggtcaggcaggcattcattttgctgatattatggataccaagtgggatgggttagacattctccctgctaagaaggttttagtttagtgacaaaagccatttaatttctccaggtgttggtgtcttcccttgtcaaatgggaatgattatgctaatcttgaagtattggtcacaccacgccttgtttggacatttttcttagagaagtaaccattcttgtgtgcattatattttgacttttgatacttcttttttatgtatgctatgccacaaattccagtttgtgacatttacaacaaaattttggtgagcgataaaagggccaatgtttgctttttcaaaataaatttacccagaaaagagctggtcagttaaatgttttcttcctgctatttcaaacgctttgtttttgtttctttgcttttgcttgatgttcagcactgtgctaggtactactggggaagcagaaaaatgttttatttttctattttttatttgggatctatatgtaaatacatgctgtaagtctgtgggtgaatttgagagtgtgtccgcgtgtgaaagagtatgtgtaagtatgtgtgtgtgtgcttataagtgtatgtatgcatactgtggaggacaagacgtgtgggtgaatgtgtgaatgtgtgtttgtgtgaaagtgtttgtataagtgtatttgtgtgatatcgactgtgggttagtaagcacagatgtaatatattactgtatctcctatatttccttagaaatata

SEQ ID NO: 472188 - DNA, 578 bp, Homo sapiens
gggtgattcccacccgccgccctttcgctaaggctggggagagggaagcctccgcgtgctgggttagggccaagcccgcgcacatagggtggccgcctggaaggacataaatagattatggcatgtaacagagtaatgctagcaggcctacttaggaatagagtaactctggctcagctgtacactgcattcattaactgtcaggttcaatgtcctttctggactcaaagactccagttgcaagagaaaagtcaagtcgactccgaaagcaactcatttaaagatgggagacataccatcaccctcaaaccaagaggcacagagagctccatccccaggataactatatgccaggaagtaagaggagaaagagacgtattacacaatgagagtggcaagcgaggcatttggatcttccaaatcaaaacatcctatatcccacagaaaattaggaggaagaaggattcacagactccagcagatgtgaggaatcttctttctggcttcggtgagaagaaaagttacactggaagttgatgcttctttgccaaggacatcagaggccaatatgaacagga

SEQ ID NO: 472189 - DNA, 880 bp, Homo sapiens
aataaacctgagagcacaaatttgtatgtaatttaatcttacaggatgtgcagacgtttgcgagcatacctgggcagagcggtgagccccaagtctgtctgcgagggctgtcagcgggtcatcttggacaggtttctgctgcggctcaacgacagcttctggcatgagcagtgcgtgcagtgcgcctcctgcaaagagcccctggagaccacctgcttctaccgggacaagaagctgtactgcaagtatgactacgagaagcccaagagacacgcccagcgagcagaacttcccttcagcgcagtcgtgtacattgcccctcacgggaaggtggtagggcagagatccgcgcgggtgcgcgcagcagtggcccgagtcccgcagaagtgcgcgcaatggctgtcctccacgccttggaatccctcgagcttggtctccctcttttaccggggtgccctgcgggttgccagtgaccccgtgtctccttgctggttctcaccccatgttacccaggtgtccgcgccagcgtcgcgcctgtgccttgcggcttcacgttgccttgtagttcccggtggcagccgctgccgaggagacagctgcctgctgttcgctcacacataaatccctggggagaaataagagctaagtggttgttacaaaggggtgatgggtttgactcccatagctagtcacagaaacattcctgcctcttccagaccacactttctcatcccgagacacctttctgcccctaatctctgtgcatgttttggaatcacagggctggaagtagactctgggggccacctacctgtttccccactgcttgtcacttcctcatccaagcaggcccaacccaggagagctgtccatccctgtt

SEQ ID NO: 472190 - DNA, 497 bp, Homo sapiens
ccagatggaatggggtttgtccctgtctctgcatgggtgcaatgcgggaatgctctccctaactctgacaagtttacaggaagagaatttatttctcagtgcaatgataaatcattaaaggactttaagcatgggagtaatatgatcaaatttgtgatttataaataccgttttggttattttgtggctaatggaatggaggtcttagcagcagaaacagggaaagaagctgtgcactccggagagcaggaaccatttcttcaacttctttcatcctctggaccagcacagtacctggcaaatggtagttcattaaaccatatttatagaacctatcggaaaatacaaatccttaacaaaaaggaccattctactgctccacagcatgtagagctggctcaatgcttaccaccccctgctgttgttaagattgatgacaggtccagataactgcagactgttgacagccatggcttgtgcacatttgatcttacact

SEQ ID NO: 472191 - DNA, 641 bp, Homo sapiens
tatcacattctatcttgcatgatggttatttacaatgtgcatcctttctcccctaccagaatcagatgcatggaagaactacggtgtctgggtcctggaaccacacctattagtgtaggagccaaggaggcctctctttcagaaaacagtattgaacccgccagttataaggggaaatggttcttttcttggtcttcaggagggaccccagttctgcccagggctgtgctgcaggttcccagggccttggtgcccccaaaggagccaggccatgggcaggttgctcgagcccctgtggcagcttgctcaggaaccttctgggctgactggaggggaccaaatggaggtataagccttgaactgggaagagcacctcctctgtcctgtgagactgaagagaaggaaacaaggatcctcatgcacaaacctatgagaatttcaagccctggcactggcttctacctttgcctttctggagctccacttactcattgcccagctgtcatgcaatgatggcataagccaggggtcagcaaactacaacctgtgggccaaatccagcctgctgttttgtaaacaaagttttattggaacacagctttcccatccttttgcatattttctaatgctgccttcacctt

SEQ ID NO: 472192 - DNA, 993 bp, Homo sapiens
gctgccgccatgaacgacaggatgccgctaatgaatgctacatgttcagaggaggaaagagaaatgcaattcgaatgttctatggcacacaatcaagggtgtataataaggccccaggaagagtcaaagagggtaagggaaaagaatcttctgtatgacaacgttatgacattatctcttcctgttcccaaatggggctcctacacctgcggatgggactgtgacaccaccatcactttaggtgttgccatagctgcacacccgtgcagcccccagcccctgtcaaagtggatgcacaccttcctctcacctgtgtcaagacctggtaccaggccacaaaacacatttggcttgggctctgtttcttacagagccttcaataacacagggctttattccactcattgtttattatgggtgtctcatatctgtggctttggctgtggactctggcgaggaggacatggctctttcaaggatacataggaagagttagcctgaaaaagggaggagagaggttgagtgaaggagagagagggcagagaggtagcatgagcaaattacctagggcaggatggggtgtgtttgatgaacacagtgcggatggctgccttctccctgagtcttcacatggtcttctctttctatgtgtctgtgtcctcatctcctcttcttataaggagccagtcatattgcattagggcccacactagtgacctcattttaacttaattaccttttcaaagactctatttccaaatagagtcacattgtgaggaaagaaaatctattaattaagagctcaaatatttaacagagaaaatacagtgaaaggaaacaataatttttttcaataacatgagaaaataaaatcacatgatctaaacatttcctcccagctgtctgcatggtaagtctagtacctttgtggacttaaaggagaagctttaagactggactaagggctgtgctcactgggcaatctgggcaatc

SEQ ID NO: 472193 - DNA, 1679 bp, Homo sapiens
cattttctccccttctgtttgtcaaagatcagatggttgtagatgtgtggtattatttccgagggctcttcagggccttcagctgcaggtctgttggagtttgctggaggtccactccagaccctgtttgcctgggtatcaccagtggaggctgcagaacagcaagtattgcagaatggcaaatgttgctgcctgatccttcctccggaagctttgtcccagaggggcacccggctgtttgaggtgtcaagtgaccctaagagtgactcgtggatctttgccctggctgtgcttctaagcagcagctttgtctacaacagcatgggcaccatcaaccaccaggccctggagcagctgcagtatccttccaggaactacgtgactgagctaacagagctaatcagggcaaaatcgtgccccagacctgatgaagttgaggactccagcgagtttgtgagtttctttccagactttatttggactgttcgagattttaccctggagctgaagttagatggacaccccatcacagaagatgagtacctggagaatgccttgaagctgatttcaggcaagaatccccaaatccaaaattctaacaagcccagggagtggatcaggcatttctttccaaaacagaagtgctttgtctttgaccggccaataaatgacaaaaaactcttactccatgttgaagaagtacgagaagaccaactggatagtaatttccagatgcaatcagaaaatttctgttcttatatcttcacccatgcaaagaccaagaccctgagagagggaatccttgtcactggaaaccggctggggatgctggtggagacctacctggatgccatcaacagtggagcgactccttgtctggagaatgcaatggcagttctggcccagtgtgagaactcagcagccgtgcagagggcagccaaccactacagccagcagatggcccagcaagtgagattccccacagacacactccaggagctgctggacgtgcatgcagtttgtgagagggaagccattgcagtcttcatggagtactccttcaaagataaaagccaggaatttcagaagaagcttgtggacaccatggagaaaaagaaggaagactttgtgctgcagaatgaagaggcatctgccaaatattgtcaggctgagcttaagcggctttcagagctcttgacagaaagtatttcaagaggaactttctttgttccgggggggcacaatatctacttagaagcaaaaaagaagattgaacaggactatacactagtgcccagaaaaggagttaagaatcttatgattttacacaagatggacaaattaatactcattggatatggtgtgattgtggttatcatattggtatacattgataggggtgataatgatggtgatgatgaaatgaatggttcatagacattgagcattcattttgtatagtatgaacattttaacaatattaatttttccagtcaatgtacatggaatatctctccatttattttatgtcttcttcagttaatttcatcagcattttatgattgacagagtacaaatcttttacctctttggttacatttatttctaagcattttataattttgatgctattataaatgtgattttcttattttttcatatagtttgttcttagtgca

SEQ ID NO: 472194 - DNA, 858 bp, Homo sapiens
gtgggaaaagcatggtttcccgggtggggttgcacagtcactcaccgcctcccctggctggggctgcttgcctattcattcccgatgcgagaacctggatatttcagttaaaggtgttgaattcacttgccccttttaattcctctccagaaaaattggaaaaagtccacgctggtctgatgtgtcatctagaagaggttgcagacctggtagtgctggatactagtaactctcgaacaaaagctatactaggggcattgcttatcctttatgttcactgcagagatatagtgataaatttactacttaaaaatatcttcaatgcagaggattttgagtggacaagctttacttatggctatgagtacttgggctgtacctcaagattggttattacgcctctcacagaccgatgctggctgactctcatggaagcactacacttgaatctaggaggctgtcctgccggtccagctggtacaggaaaaactgagactgtcaaagatctagcaaaagtctttgaggaatcgccacactgtctctcacaataatggaactaatttacactcccaccaacagtgtataagtgttccttcttctctacaacctttgtgctctgtttgcatttaaatgtaacacagccttaataaagcttccaaactcacttatagttttaacatgctttggactagagaaaacagtgctagtgatgaatactgtaatgtcttttaggtttgtactggaaggaaaagaaattcgtatcaatatgtcttgtgcggtatttatcaccatgaatcccaggtaggtatctaggcttatgttattaactgcagaggattcataagttcaggcctgaag

SEQ ID NO: 472195 - DNA, 1933 bp, Homo sapiens
tttgctataacaagggagtcagccaccatcacttgtgttttggcagagcctcaaagacaggcagaggagtgggaaaactttatggtggggaataggggaaggcttcagttaatttctcttttgttttttaattactgtggggaaaagcaagagagatcagattgttactgtgtctgtgtagaaagaagtagacataggagactccattttgttatgtactaagaaaaatccttctgccttgagattctgttaatctataaccttacccccaaccccgtgctctctgaaacatgtgctgtgtcaactcagagttgaatggattaacggcggtgcaagatgtgctttgttaaacagatgcttgaaggcagcatgctccttaagagtcatcaccactccctaatctcaagtacccagggacacaaaaactgcggaaggccgcagggacctctgcctaggaaagccaggtcctcgctgggcacctctctgcccaaccctctgcacccagccggcttctcccccaccgacggggagccccgcctggccccatcgcagagacccccagagcggcgggcttttgttggggggttcccgcttgtccctggctcctgccgtctctgtggagcgcggcaccgccttggatccagctccacctcctccccgtgccctccccacgaggcctgggagcgggtcctgcccggctgcgcaagggtgggggtcgcgcagttagctgcctttgggatgcagagcacaggggacccaccgccgccactgctgctcctgcagccgctccagctgctactgcttgcaccttcctgctgcagctcgcgcagtggcaatgtgttcggagtttcctccttccggtgggttcgtggtctcactggctcaggagtgaagctacagaccttcgcgctgtcacagctcataaaggcagcgtggacccaaagagtgacaaacagcaggatttattgcaaagagcaaaagaacaaaccttccacactgtggaagtggacccgagtgggttgccactgctcgctggggcagcctgcttttattctcttatctggccccacccacatcctgctgattggtagagcccagtgtggattcaccacgggggctgcaggtggagctgcctgccagtcccgtgccgtgcgccggcattcctcagcccttgggtggtggatgggactgggcgccgtggagcagggagcggcgctcgtcggggaggctcgggccgtacaggagcccacggaggtcggggaggctcaggcatggcgggccgcaggtcccgagccctgcccggcgggaaggcaactaaggcccggtgagaaattgagcacagcagctgctggcccaggtgctaagcctctcactgcccagggccggcggggcccgcggggccggctggcagctcccagtgcagggcccgacgagcctacgcccacccagaactcgcgctggcccacaagcacagcacgcagccccggttcccgcccgcgcctctgcctccacacctccccgcaagctgagggagccggctccggccttggccagcccagaagggggctcccacagtgcagcggcgggctgaaggactcctcaagtggcgccaaagtgggagcccaggcagaggaggcgccgagagcgagcgagagcgagtgagggctgtgacgattgccagcacgctgtcacccctcagtgtgactggctaagcacataaggaagatagttgatgagtattttttttcaccttaagataactgagtatgtaatgaatattctgatagagatatgtacaagaccttcacatagctattgttcaaatttctacttaagtgtcatttcctcagcttggctttctctgatcactccgtctttccccatccccttccaagtacttatgactgcctgtcattagtatatttattttgtc

SEQ ID NO: 472196 - DNA, 4190 bp, Homo sapiens
ggcacagctgcaggggtagggggctgtcaaggccccaactctggggcagaggcagtggcagggcagccagggttgtgccagagcctgagcaggttgaggtggggtcaggcagggctgggagtcagggcaggggcagcagcagtggacctgctatgcacacatcttcttctccaaggtttgtgtgcagaacatcctgcccatgctgccccagcagcttcagttggcacctgcctcagtccagcctctgggaaccatgcagcagctcccagcggccctgcacccaccaccagcatccgtttcacctgcagttgaagatccgtgaggtgcccagaagatcatgcagtcatcagtcccacggagcagcctgcgaggctgaggctcctcccactggaccgccccccaactggcaccactgctgcccctgcccctactctcagcctcacgtgactctcgggcagaagcagtggtggggcagccagggcagcgtcaagagtctgagccaggtgaggtgcggtcaggacccccacagggctgggagtcagggcaggggcagaacaaaccttggaggggaagatgtgtgcatagtgggcctggagggcggctgtggcctagtggacaggaagaagcagtgggcctggaagagctgcatgatcagggccggcactggtccagggtggatcgggggaccctgggggctcaggatccagcaaggggcggcaggagtaaaggaggaaggaatgacaggtgcaaataccttcccaccaaagcccttgttgccctctggctcctccccagagttgtccccactctcagtcggtcacccactccttgaacttgagatcggtgtcggtggtgctaaagccatcatcagcaatgacatcatcaccccctcctcctcatggatgacctgcctgacggtctatttccctgccgtccaggctgtgtaccccgctgtgggagaaggcttgggccaggctgagccaggttccctgactgtgtgcagccgttctgccccacagaagctgctccttggtatccgagctctggagtgtttgggctgcaactgacaggagttcagaggacaccccaggggcagtggcagtgcccgtctctgatatgctccgctcccacgagcccttgttacactcctgctagcccctggcttgtgggcttggcctctgagctggacttctttcggtccttgttgcaagtgggccaccttcacctggaaggccaggttgtatttctgcatctcattgggccccagggtgtaccaccgctcgctcagcatctggctgacggtccggttatcctggttgggatgaccctggtgcgccccgccagggcctggtgccgcctgctgaagatcatgagcgccactcatgggccaccggatgtggtccttgtctgatttgttggggctgcgtccatccttctcagaagatgagtcctgttccttgcgcagggcactgagggactgggcctgacatcatctgagtggtagaggcaactgggtgtcaggagacatgatggagaggaaagcatcatcatggtcattctctgtctcactgtccagcagggactcccctgaggggcccagggctcctcctccatggtgggaggacagctttgtcagacatagtattagttgctggcagtttttttctttcagcactttgaatgtattattcgattctgtcctgacctgcaaagtttctttaacttttgactatttgattatattgtgacttgattttataatttgggggaagaaaagttttactaaattgtcttttaatggaaactctacaagaaccagaatctttgctttgttcacttatgtatccattcctaggcctagaaaaatgtctgacacatagcggcaattattcattgaataaatggacccagcgatagtacattagctatgctatatgcatacattaaagatgtagattatcgactttcaaaagataattaatgtaacttcttactgcttctgaacatgtttgtgagttatattgctgagggacctttatcttctcattctttcatcttaacccagtgttataaaattgaaatcaccaatattattccatatctaaaattaatatctaccttgtaaaaaatatcactctgctgcatttgagaatagactttttaggtaataatgatgcaatccatagggttttttgggggcacagagggattcatgctaacagaacattttattttctattttcccagagctgtaaaacatgaaattacggtagtataaggcatatttttactctttttataattttttctaaaaaaaaattagtgtttgttccctatataacttttaactttataggtaaatatttgtttctttcagctccagttttatgtgaaatagagttttcagatttatgtagcatggaaagttttaatacgtcagagttactgatttttgccaatcattttctcaattatttcttttttatctttagttgatttttttgtagtgacacattttgtttctagtctcatttccttttgtttatattctatatatatttcatttttggttactatgagaattacatataacatcctagagttataacattttaatttgaatttatttcaacttaagttcaatcacataccaaaattctactgctatatatatagctctactctttttatgttattgatgtgacaaattatatctttattcattgtataccagctaacagatttacaattacattttatgcatttgccttttaaattatgtagaaaataaaaagcagagttacaaaccaaaattacaataggactgtttttatgtttgtttatgtatttacctttaccagagagctttgtatattcatacagcttgcttatttacttacatagttattgcctagagttcatttatttcaacctgaaggacttaacacttcctgaatgtcaaattcagggataaatggatttttttcagttttaaaaaaaaatccggaaatgtcttaatttctccttcatttttgaaggataagttttccagctatatatttctcaattgacaggtttcttcattattttaaatatataatccactgcctactggccttcaaggtttctgccgagaaatcagctgctaatgttatctggatccctatctgtgagagttgctcttctctctgagttttcaacattctcccattatcttttttttgtttgtttttgagacaaataattgtacatattcatgggatacagagtgatattttgatacatgtatacaatgcccaatgatcaaataaggataattagcatatccatcacctcaaatatttgtcatttatttgtattgtgaacagtcaacattctttcttctagttttttaaatttataaacatttaaattttattacagaaatttaaattttttgattctgaaaaagtcatatatgtatgcaacattttttatcatttatttatatatttatgcatctttccttttagttttgacagagattttctattttatcattatttcaaaagaactcttacctgtatttatttatcaagtatatttcccttgttttttcctagtatattaatttatttacttatcttctaaaaatcctccatataatctgtttattttgtttcctttctataatttcttcaataattagttctgttctattttccattaaaatatttaaatcttgtatgaatttttgtcagattagaaatttagggcgtttcttaatttctctatactctagcttttgactttttttttctgacctaagaggtatttagagcacattttagattttttattttgactaatcatttaaaatgtatactaatcttcaatttaaataaaaaactggtctatagtgacaaaaattacaaatgagcctaactaataaattatcagctgtgtttatatgtataagcatgcacagattttggtaaatatgtacatagtatattggtgagcttatttttatcattcttaactcattgtgtagtctaaacgttggggaaaaaataaaatacaataatcagatggtgtgaataagaaaattgttctaatgtttgtaaaccaagcaactgttttaactgctcccctcttcctgattgacttctaaaagggattgatctattgggtcctatcatatatgtcac

SEQ ID NO: 472197 - DNA, 1189 bp, Homo sapiens
gggtggagattaataccagagtttaatgaagcggggtttgatacagctggtgcatacaatgccttattttaaatcaaggcttcgaataagtgaaatagaaaatacactaaccgaaccaaccaaagatggtgagctcatcttttggactcagttaatcagccctcctcccagtgagggctttcatgactgtctcatcctgggagggtcaggggataaggtgactatcccttgtgtgaacttcagccagagcaccagtgcatttgatttcactcatgtgctcgtagagggtcaagcagaagaaaacatggctgccaaagtgtttgcgtccatcggcaagtttggcctggccttagctgttgcaggaggcgtggtgaactctgctttatataatgtggatgctgggcacagagctgtcatctttgaccgattccatggagtacaggacattgtggtaggggaagggactcactgtctcatcccctgggtacagaaaccaattatctttgactgccgttctcgaccacgtaaagtgccagtcatcgccggcagcaaagacttacagaatgtcaacatcacactgcgcatcctcttctgggccgttgctagccagtttctcgcatcttcaccagcatcggagaggactatgatgagcgtgtgctgctgtccatcacgaccggcatcctcaaaagcgatggaagccaaacaggtggctcagcaggaagtagagagggcgagatttgtggtggaaaaggctgagcagcagaaaaaggtggccatcatctctgctgagggcgactccaaggcagctgagctgattgtcaactcactggtcaccgcgggggacggtctaatcgagcaggaagctgtggaagacatcgcgtacctgctctcacgctcttggaacatcacctatctgctggcggggcagtccgtgctcctccagctgccccagtctgtatttcagcaagagatttacattccatagatcctttcactctcattcaatcagaactttttgtaggcatttatgagatggctatttggggtgacagatataatctatggccatagaactgggaaacactgacttgaatcatgtaagctacagacaaatgaataattcattgatttagtcactctttaattaatttatttattcattctactattatggactgagcactgtttt

SEQ ID NO: 472198 - DNA, 571 bp, Homo sapiens
cacccatcagtaaatattgccttaagtgttcctgaacaaattgtgatctagatggagtccagcctttttgaatctggctacaatgctagtgaactgtcccaggttaaaggaatttggatcaacccctggtatcaatttggcaccaggaggaatccaatgtcttctagcttcttgatcctgggattccttgttactccagggggctctacctcacaggacccaactcaatgccatgccagctttctctaccaaggcatccaggagacaaatcagagtttctttcctcaaacaaaactgaagtatgtctggctgtacttggacaaagtgtcccttcacgggatagggaatctgggaaacagtgtgaattctgctagcccctacctgtatcttaatctaagaactctgtttatgtctccactgtgcgttgttcttagtgtttgtctttaccctgattctgtctttccataaggttgcgtttaagaaattggacaattatgaatacatatttctttcatgagccttacagaaggtaagaagtctaaacaccaatttgttattagttggcattcct

SEQ ID NO: 472199 - DNA, 752 bp, Homo sapiens
gagtgccaggtaccacagctgcttctaattggacatcttgccctgcctgaagactgtgtatggcccatgagctaagaagaggttacaatggagaagaaggaaagaagaaaaaaaaaatcaaacaaggaaaaacatggggaggaggaataggaggaaaagaaggggccttcagtccaagaactcgcaaggaactgaatcttgccaacaactacctgagtatgcctgggagcagatccagcccagacaaaccttgtgatgactacagcctcaaggttgatgaaagcattgttagtcagaggacccagctaattcaggtccaaattcctggcccacagaaaatgccaactaataaatggttttttaggccactgaattctggggtaatttgtaaacatcaagatagacactttgtttgctacccccaggccagtgaggtaaaccttgctggattagagagcccaataccagcatgccttcttctgctgctgctgtaagaggagctcttctcctcaccgtttctctaaaactcatctccctggcatctagggagttcctccgcatttggcacagggatgtggcttcctgagagccaagatgtagtgattgttatctcctctggatctagccacccagcaagtctaccaggctctgggctggtactgggggttgtctgcacagagtcgtgtgatgtgaactgtctgtgggtctctcagtcatggataccagccagcacagtatttggggtgtcttcc

SEQ ID NO: 472200 - DNA, 581 bp, Homo sapiens
tatacatgcaagtcacaggggatgcgatggtttgacttgggctcagaggcctgacagtacttagatcagttcctatcacaaaatgggttcacttctaacccagccaaccctccaagtcagcccagcagcaatgctggcagaccttggaaaaatggaacactgggctgttcatgggctaattggagcaagtggagaagaactacaaaagggacccaaagaggggcaatggccctggaacaggggctatggggatgccatgtatgtcaaattgataccatctgatggccatgaatttattgtaaaaagagaacatgcattaatatcaggcatgataaaagccatgttgaacagccctggtcaatttgccgagaatgaaaccaatgaggtcaattttagagagataccttcgtatgtgctatcaaaagtatgcatgtattttacttacaaggttcgctacactaacagctccactgagattcccgaattcccaatcacacctgaaattgcactagaactgctggtggctgtgaacttcctagattgttaaataaaataaattacattttgaaaaaaaggggccc

SEQ ID NO: 472201 - DNA, 1170 bp, Homo sapiens
gccgccgctgccgggctaggcaggtcctgccccgccgggcccgcggcgatgtcgggctacccgcgccgcccgggcgccaccccgctgtcccgagcccggagcctcgccattcccgacgatgacaaatttgaagatcttgaagaggcaaatccattcttctttaaagagtttctgaagaccaagaacctccgcctgtcaaaagaggacccagccagcagaatttatgcaaaggaagcctcgaggcattcactgggacttgaccacaactcctcaccctcccaaaccggggagtatggcctagagtatcagcagccatttttcgaggacccgacaggggccagtgacctcctggataaggaggaggatgaggacaccagatggagtggggcctacctgccgtccgccatcaagcagactcaccccgagagggtccctgccgccacgttgccctgcagcacatacctttcctttttctccaccccgtcggagctggcagggcttcagtctctgccccccgcagactttgcggctcatggagagtctctgggagacaggcacctgcggacgctgcagataagttatgaagcattgaaagatgaaaattctaagctgaggagaaagctgaatgaggttcagagcttctctgaagctcaaacagaaatggtgaggacacttgagcggaaattagaagcaaaaatgatcaaggaggaaagcgactaccacgacttggagtcggtggttcagcaggtggagcagaacctggagctgatgaccaaacgggctgtaaaggcagaaaaccacgtcgtgaaactgaaacaggaaatcaatttgctccaggcgcaggtctccaacttccagcgagagaatgacgccctgcagtgcggccagggcgccagcctgacagtggtgaagcagaacgccgacgtggccttgcagaacctccgggtggtcatgaacagcgcacaggcttccattaagcaactggtttccggagctgagacagtcactcctgtggccccagagggcggtccgtgcggtcatggcccgagtgcgcaggggccaccgcgtggctgctgctgtcctcccccaggacccacggggaccaaggtcacacattctgtgctgtgaagctgtccagatgcgcgtctttggctgggggttctggtggac

SEQ ID NO: 472202 - DNA, 1651 bp, Homo sapiens
tctgcggcaggaggagaccggctcacaggagcagcagcattggaagaggcacccagcagcctcccagctcagacctgatgctggaacctgcagagaagctggagggaaggggcttggggctttcctccctccacttctctctccttaacatgcatggctgcttctggcttcaccagtttgctgctgcctggggcgaggagatgttccgcttccctatggggctcctgcttggctctgtgctcctggtggcttcggccccagccactctggagcctcccggctgcagcaacaaggagcaacaggtcactgtcagccacacctacaagatcgatgtgcccaagtctgccttggttcaggttgacgctgaccctcagcccctcagtgacgatggggcttcgctcttggccctgggggaggccagggaggaacagaacatcatcttcaggcacaacatccgccttcagacgccacagaaggactgcgagttggcaggcagtgtccaggacctcctggcccgggtgaagaagctggaggaagagatggtggagatgaaggaacagtgtagtgcccagcgctgctgccagggagtcactgatctaagccgccactgcagcggccacgggaccttctccctggagacctgcagctgccactgcgaagagggcagggagggccccgcctgcgagcggctggcctgccccggggcgtgcagcggccacgggcgttgcgtggacgggcgctgcctgtgccatgagccctacgtgggtgccgactgcggctacccggcctgccctgagaactgcagcggacacggcgagtgcgtgcgcggcgtgtgccagtgccacgaagacttcatgtcggaggactgcagcgagaagcgctgtcccggcgactgcagcggccacggcttctgtgacacgggcgagtgctactgcgaggagggcttcacaggcctggactgtgcccaggtggtcaccccacagggcctgcagctgctcaagaacacggaggattctctgctggtgagctgggagccctccagccaggtggatcactacctcctcagctactaccccctggggaaggagctctctgggaagcagatccaagtgcccaaggagcagcacagctatgagattcttggtttgctgcctggaaccaagtacatagtcaccctgcgtaacgtcaagaatgaagtttctagcagcccacagcatctacttgccaccacagaccttgctgtgcttggcactgcctgggtgacagatgagactgagaactcccttgacgtggagtgggaaaacccctcaactgaggtggactactacaagctgcgatatggccccatgacaggacaggaggtagctgaggtcactgtgcccaagagcagtgaccccaagagccgatatgacatcactgtcctggaaatagctggttatggtggtgagaataagaggtgagatgttgtgagaattgaattcactatttcagctgcctaacagattgcttatctgcagtatgaaacagttatagttgggcatttataatggagaacatataacttaatttacaaactagacaaggtagactgtacagtctgcctgaatagtggactagggaactgttttaatgggttagaaaatggtaagta

SEQ ID NO: 472203 - DNA, 1161 bp, Homo sapiens
gtcagtgccatcttctactgcaccaactgggagattcacaggtggaaattgtgagtggagaaacctgttcctaatgcctgtgactatgtgctcaagtgtggacaggagctttcggatgttacagcctagtgtgaagacagatgttccctacccaactcttccaaccaatgttgtcactgatcgagtgactgaagacacagcaactgtctcctgggacccagtgcaggctgtcatagacaagtatgtagtgcgctacacttctgctgatggggacaccaaggaaatggcagtgcacaaggatgagagcagcactgtcctgacgggcctgaagccaggagaggcatacaaggtctacgtgtgggctgaaaggggcaaccaggggagcaagaaagctgacaccaatgccctcacagaaattgacagcccagcaaacctggtgactgaccgggtgactgagaataccgccaccatctcctgggacccggtacaggccaccattgacaagtacgtggtgcgctacacctctgctgacgaccaagagaccagagaggttctggtggggaaggagcagagcagcactgtcctgacaggcctgaggccaggtgtggagtacacagtgcatgtctgggcccagaagggggaccgagagagcaagaaggctgacaccaacgccccgacagatattgacagccccaaaaacctggtgactgaccgggtgacagagaatatggccacggtctcctgggacccggtgcaggccgccattgacaagtacgtggtgcgctacacctctgctggtggagagaccagggaggttccggtggggaaggagcagagcagcacagtcctgacaggcctgagaccgggtatggagtacatggtgcacgtgtgggcccagaagggggaccaggagagcaagaaggccgacaccaaggcccagacagatattttagcatatgtcagacaccagcccgtatgattccccaagctttgggctttctcacccttggcactattgctatcttggggtggataattctttgctgcagaggtctatcttgtgcattgtaagatgtttagcagcatccctgatgtctccccctatcccacactgagttgtgacaaccaaaagtgtctccagacattgctgactgcccctgg

SEQ ID NO: 472204 - DNA, 1553 bp, Homo sapiens
gcaagcaccatgtgcagccctggttcccgctcacgcctctccctccacacctccccgcaagctgagggagtgggctccagccttggccagcccagaaaggggctcccacagtgtagtggtgggctgaagggctcctcaaatgctgccaaagtgggagcccaggcagaggaggtgccaagagcaaacattgacagcccccaaaacctggtgaccgaccgggtgacagagaatatggccactgtctcctgggacccggtgcgggccaccattgacaggtatgtggtgcgctacacctctgccaaggacggagagaccagggaggttccggtggggaaggagcagagtagcactgtcctgacgggcctgaggccgggtgtggagtacacggtgcacgtgtgggcccagaagggggcccaggagagcaagaaggctgacaccaaggcccagacagacattgacagcccccaaaacctggtcactgactgggtgacagagaatacagccactgtctcctgggacccggtgcaggccaccattgacaggtatgtggtgcactacacgtctgccaacggagagaccagggaggttccagtggggaaggagcagagcagcactgtcctgacgggcctgaggccgggcatggagtacacggtgcacgtgtgggcccagaaggggaaccaggagagcaagaaggctgacaccaaggcccagacagaaattgacggccccaaaaacctagtgactgactgggtgacggagaatatggccactgtctcctgggacccggttcaggccaccattgacaagtacatggtgcgctacacctctgctgacggagagaccagggaggttccggtggggaaggagcacagcagcactgtcctgacgggcctgagaccaggcatggagtacatggtgcacgtgtgggcccagaagggggcccaggagagcaagaaggctgacaccaaggcccagacagaactcgaccctcccagaaaccttcgtccatctgctgtaacgcagtctggtggcatattgacctggacgcccccctctgctcagatccacggctacattctgacttaccagttcccagatggcacagttaaggagatgcagctgggacgggaagaccagaggtttgcgttgcaaggccttgagcaaggcgccacctaccctgtctcccttgttgcctttaagggtggtcgccggagcagaaatgtatccaccaccctctccacagttggtgcccgtttcccacacccttcggactgcagtcaggttcagcagaacagcaatgccgccagtggtctgtacaccatctacctgcatggcgatgccagccggcccctgcaggtgtactgtgacatggaaacggacggaggtggctggattcccaggatgccggtcatggatgctccatagagtgtttggagccctatttcttctccacccatggaagagaggagttttggtggcttgtagctgtttttagagagatcccaatgttacaggaaaggggtccccatccagatcccaagagaaggttcttg

SEQ ID NO: 472205 - DNA, 1147 bp, Homo sapiens
aaaaatctaatgcctcccttgagatttctgcaaattgcaagggagcttatactatcctctcacctctggccccaattttctgcccttgcagaattcttattctctgttctccataattctgcaccttcttcacccaaccttatcctctcacctaaaagcaatcatttttacaagcgttgcacgttagcagaatttttattgatggttttgttccagccagcaggcaacaggtgcaaggagcacagctgcactgagtgcccctccaggaggaccacagggttgccctgggcagagaacttcccagctcagcagcaccggggcatggccttccagggcagtgaactctgcaagtttgtaggccctctgggcgcagcaactgctcctctgtctcatcaggcagtgtcccctgtgttcctgacctcctgaggagctgctggatggcttagccccttgacactggagggctgaccatgagctaggcaccaccaatcaaatgcacataatcaagactttaaattggaaactagtgatacatcaaagcagaagtcactcgcaatgggaacaactccatccagcttgctgatgcatcagtggcagcagattcaagggtggtttccagcatctactgtcagtgtggcatgaggacaagcttcagtatctgcacccagcaggagcagcactggattttcaccaggccagttctccagcacaatttgcatattgttcctggcttcgtagcccctgagcctggcccctggacctttctggaaattctgtgagccagggccagcttcatagctatgcaacctgtgccatcacacaggaccccaggttcagcacggccctgtgcttggtttaatgctctgctgttgccatcttgcaattcttacagttcttttaacaagaggcctcacctttccattttgcttggatcttgaaaattatgtaaccaatcctgctacgagctagctaatatgctttaggtcagggagttcttaacctcttatgctcatgagcccttggtagtctggtgaaacctataaagcttaggaggaatgtttttaaatgaaatgcacaaaatgaaatacataggaaaccaattatattaaaatatagtttaaaatttaaaaaaacaaatatagcatca

SEQ ID NO: 472206 - DNA, 877 bp, Homo sapiens
ggctctgcaacaggcgcaggctgctgtgcaagctgctgtgccacttgagcgatatgacccagcagatccaatggttcttgagaaagctgtgcatgctctgaatcagcatccaatatatggtactctttctcccatagccaggattcacaggtccaggaatcaaggggtggaagtggcaccactcaccgtcacccctagtgatccattagcaaaatttttgcttcctgttcccatgacattacgttctgctggcctagaggtcttagttccagaggaaggaaccctgccaccaggagacatgacaatgattccattaaactggaagttaaggttgccaactggacactttgggctcctgctacttttaagtcaacaagctaagaagggagttacagtgttggctggggtgattgacccagactatcaagatgaaatcagtctactactccataacagagaagcatccctggaggaggaagaccttgtgagagagcgagcggcaagtgtgcctttacagtccagtgggtaatacaaaaaagtaaacaagcagttattatccaggaagatatatgctgtgatagggagttatccaaggagctgtaggatcacaggagggggtcttggaagtgtcccaatggagctattgaagcatgtgtttgcttcacaaagttcttgtactgtggttttcagctccatcaggtcattgaagctcttctttacactggttattctagttagccatttgtctaacctttttacaaggtttttagctttcttgcaatgggttagaacatgctcctttagcttggagaagtttgttattaccgaccttctgaagcctatttctgtcaactcatcaaactcattctccatccag

SEQ ID NO: 472207 - DNA, 652 bp, Homo sapiens
tgatcaagaaactcccacatttttattttgcaccgggcccccacaaattatccactcaacaattgatggtcatatgagttgtttccactttttggctattctgaataatgctcccatgaacattcatgcacaaggttttttatgtcgagatatgtttttctttctcttggaaacttaccaaggagtggaactggtgggtcatatagcagctaacaatgtttccaaagcagttgcaccattttgcaccaccagcaatgaacaaaggtttcaatttctctacatactcaccaacttttcttattgccctgcgttttttataattgccatagtggtgggtgtaaagtggtatctcattgtagaaatttacatttccctaatgactaatgatgttgagtgtcttttcatgtgttcactgcttgtatatcttccttggagaaatacatattaaattatttgcccattattaattgggttttttttttgctgcactgagatccttaatcctaagagttgcagagggatgaagatccatcgtctgtagcttctttatgctgaacagaggcaatgatattcccatctaatcattagggtctcttgtattcagggtatggaggagctcagtcagaaagcattggtatggtgagggtctttt

SEQ ID NO: 472208 - DNA, 664 bp, Homo sapiens
ctacaacggcactgcgggtacctatggctcctgagcagaccccaaggacagtgggcatgggacaagagcccccagattctaggcgtaagctgcctcaggaagcagcagcacccacagagttccagcattcgctgctggccagggagaagaagggccatgccactgggaaccactggcactggtcccagctctccctgaccagtcacctaaaagcaactttgcaggacttcagtttaaaaaagatgcaatgtgaagatgaagaaggattgttttctttgtctagattagtcactatgggctcttatgcagtgagagcagaatcatctactgtctgggtagaaatctcccatgcaatgacatccaggaaaaccatctttgaattagtgcaaatcatacagatgtcacccctctctgagatgcccctaacaccccaccctgtccatcagcgaaccacatagacggtcaggttttctgtgtagatttttacagcatttctaccaaacagaacaaccatcccatcaagcttggttgcattagtagttttttcagaacataacacccagtctgcttcttgggctttgccaatctgtttcccatgttctattataacacatttcacaaaacctgctttttcaaatattctaatgtttgatacttggcatta

SEQ ID NO: 472209 - DNA, 578 bp, Homo sapiens
gcagtatatcttatactgatatgtatgattattctgtttttcgagtggagaaattgtggctcaacacagttaagcaacttgcgcaaacccatttctttagtaaaagaagaggttgcagtcacattcctgagagagagcactgtctttccacattcccaattcttcttcggtttgcaaagatccgtaaacattaagaatcaggtgacgttcttcttctgcctgaagatcaaagcagcttgctgccttttggcaccaggagctcttttctcccaagggctctttcatctctctggcttccctttttattcctcccttctctccacccttgcctcttctgccattcagtgcttcccacaaccattttacctactggtgcgacatactgtggcaaccctaagccccaggtcaggcatgggaaaaacagaacttggatagatcaaaatgtattgaccaaggtattgaccaaaaggaaggacttcagaactatggctattgatatttgtgttagtctgtttagatgtctatctcctttgcattccagactaatcctgcattggggtgggggtgggtatactaat

SEQ ID NO: 472210 - DNA, 548 bp, Homo sapiens
ccaacaggccccggtgtgtgatgttgccctccctgtgtccatgtgttctcattgttcacctcccacttatgaaggtgcagccaaagaactatctgggcagccacattagctgtcatacttttcaaaatcactggcaggcagccgatagcacagtctgccaaaacctctacttccattttaaccagagcacaggtcttcaaggacgttctctcaactctcatagccacttagaaatggctccagcgcctctgccagtttcctgcctgaatgcaagttcctgctgctttgaaagtttgctaaagggaaacatctgcttctctatgggcttagttcagtttccattaaggcaggcagaaggccagtgtgacagctttctgtatcccaagctcttgtccagcatcctggaaaaattggggcacacatggactcgaaggatgaatgcgaggttttattgagtggtggaggtggctttcagagggatggatgaggagctgcaaagggggaatggagtgggaaggcgatcctccctcagagtcgggctgcccagc

SEQ ID NO: 472211 - DNA, 1905 bp, Homo sapiens
ccgccagtctctttgcattgcaagaatgatctttactgcagtttccaacaatggtcccatgcctttcctggcaaagaaagggaacttggctggcaaagaaagacctacacttacacaatgccaaaataaccagaagatccctggaaagtccaggcagaagtttgctgcagtggcagtgctctcatggaaaacctctgctagggcagtgcagaaggaaaatgtggggtggaagcccccacacagagtccctattggggcaccacctagtggagctgtgagaagatggctaccatcctgcagaccccagaatgatagatccaccaacagtttgcaccatgtgcctggaaaagctgcaaacactaaacaccagcccatgaaagcagacagaagggaggctgtaccctgcaaagccacaggggcagagctgcccaagaccatgggaacccacctcttgcatcagtgtgacccggatgtgagacatggagacaacagagatcattttggagctttaagatttgactgccctgctggattttggactggcatgggcctttcaacattcaaaatggcctgcaaacaataagtttattaaatttattgtccaggcatcaaataagcgtcttgatttgctcacagaagttgaaacagaattgcaagccagtctaaagcttattaactactatttatactaaaaatttcttcttaaaaacattaataatttagtatatggatcacgttgatgtatcaatatttgaagtacattgaatgtcaatgaatgtaaaataatcaagtgagaagtttggaagtataggaaggtatagataaaataaaattggaagaaacattgatgatttattaaagcagggtaatgggtacatagaggtttgttatattattctgtttaatgtgtatgtgtttgaaattattcatataaaaagttatatatactttcctataataaagaaaactgaacaaacactatatagtgcctatttatgtctatatacaaaaatacaaaggtactctttaaaattcatgtatctaagttgctttgttatgtcttagaggaacactttgcctttacattgaaaactcctaatagactgttttgaaacactcaagattatttcaccaaagccaaagctccagtagtcttcttttaacctaacctcctcctttcctcttataatgatgcccacttttcacctgcactcagtaagccacagtaaacaatcatgtagaaaatactgtgcttttctatcatcaatgttttattagtaaaaatgtttacacttcacacaattaaatacagccaccacaagaagcatattaatattctgaataagttgtataaggctcattctgaataagttgcaaggcttgctctgattacaattatatgtgtattggagtatatgaaaagtgaaaagtttgtgtccatttttagattacttaatacatatctttagatatgggcaacttacttaattttctgagacttcatcttttcatttttgcctggctatatatagtgaatgtaaacccatttggcaaaagttttacctacaaaacaaatatagattagatatttgttacctctgattttcctttcacacttcctatctggttctttatgcactcaaatgaggattggattatggtttgctaattgatattagaaacaaaaaaaaaaagcagtgctgatttggagtactctcattaggcttaacatttttctacttgtttggatttgtctcgctgcttaggtagcaagatgccaaacaggtatttttctcgatttgtcattttatctcaggtctcaaaacaagaaaatggatttcaaatatccaatataattattgattgtatgtgttaatttaacttagatacagaatctccagagag

SEQ ID NO: 472212 - DNA, 645 bp, Homo sapiens
ccccatctgtaggtcaccatcatcaaagacaaaggtagataaaaccacaaagatggggagaaaccagagcagaaaagctgaaaattctaaaaaccagagcaccccttctcctccaaaggatcgcatctcctcgccagcaaaggaacaaagaaggatggagaatgactttgacgagttcacagaagtaggcttcagaaagtcggaagctaaaaaccttgaaaaaagattagacaaatggctaactagaataaacagtgtagagaagaccttaaatgacctgatggagctgaaaaccatggcacgagaaatatgtgatgcatgcataagcttcagtagccgattcgatcaagtggaaataagggtatcagtgattgaagatccaattaatgaaatgaagcgagaagagaagtttagagaaaaaagagtaaaaagaaatgaacaaagcctccaagaaatatgtgactatgtgaaaagaccaaatctacgtctgattggtgtacctgaaagtgatggggagaatggaaccaagttggaaaacactcttcaggatattatccaggagaacgtccccaacctaacaaggcaggccaacattcaaattcaggaaatacagagaagagaacaccacaaagatactccttgaga

SEQ ID NO: 472213 - DNA, 626 bp, Homo sapiens
cccctcgcttctgcccttctgctttctgctatttgtcattcaatgcttacattcagaatctatggtgatatggtttggctgtgtccccacccaaatctcatcttgaattgtaactcccacaattctcatatatcatgggaggaaccagaagaagacagaaaaatgtgggaaagtttggaacttcctagagacttgttgaatggctttgaccaaaatgctgataatgatgtgaacaatgaaatccaggcagaggtggtgtcagatggagatgaggaactttttgggaactggagcaaaagttactcttgctatgttttagcaaagatatgggtggcattttgcccctgccctagagatttgtggaactttgaacttgagagtgatgatttaggattccagaacagtagattcaataacagcttgcgccgtgtgcctggaaaagccacagacactcaatgccagcccatgaaagcagccaggatgggtctatcccctgcaaagccacagggacagagctgcccaagaccataagaacccacatcttgcatcagcatgacctggatggcaacttcagcttgctggaggtgtagttaaagcactcagggtctttgctccttccccaatct

SEQ ID NO: 472214 - DNA, 606 bp, Homo sapiens
agtcttccataaactagaaagatgatactacattatccaactaacagggtcgtatggaccgtcaagaaatattctctccctggttctggctgccagtttactgaacaggagagttccctagcctcctcacaggactctagaagaatcaggtcacacacagacttgaaggatggtgaatgtggggttttactgggtggtggagatggctgtcagtgggatggatggggatctggtcaggggatggagtgggaagatgatcttcccccaggatttggctgtccaacagccgattcttccaccatccacagccaagctcctccagactttcagatgctccttctcttcgctccttctctgccatgtggttctgctgttcgttcactcatctgctcatttcctcatctgcttctggagtctgggaaccatcaccggacgttcctagtgggagggggagagccttctaccgccctgctcatgcctgtctaactacctttaacaagatgataggaaacaagttcattatcctgaaaactggcaaatgtatcaaaaagtacctaaggggaaggaagatccccaaagcgggagaagcaacgcctggttgtgtct

SEQ ID NO: 472215 - DNA, 648 bp, Homo sapiens
agggggtcaataaggggctcgattataggatttcaaaatgtggaagcgactttggaactgggtaatggacagagattggaacagtttggagggctcagaagaagacaggaaggtgtggaagggtttggaacttcctagagacttattaaatagttttgaccaaaatgctgatagtaatatggataatgaattgcaggctgaggtggtctcagatggagatgaggaacttgttgggaattggaataaatgtgactcctgctatgctttaccaaagaggctggtgtcattttgcccctgccctggagatctgtggaatgttgaacttgagagagataatttagggtatctggtggaagaaatttctaagaggcaaaacattcaagaggtgacttgggtactcttaaaagcattcagttttatgcattcacaaagatattatttggaattgaaacctttgttgaaaagggaagcagagcataaaagtttagaaaatttgcggcctgataatgcaatagaaaagaaaaccccattttctgaggagaaattcaagctggctgcagaaatttgcataaataacaaggagtcagatgttaatcaccaagacaatggggaaaacgtctccagggcatgtcataagtcttcatagca

SEQ ID NO: 472216 - DNA, 640 bp, Homo sapiens
ttgagggataatgagggaggttgtagaagagagtaaaaagaggccgcttaccagatttgaaattgttacttcaggccatctgggcatatatgtgcaagtcacaggagatgcgatggcttggcttgggctcagaggcctgacaatcctgccttcttatattaataagaaaaataaaacagtgttgaagtcttggggtggtgaaaattttgggggggtgatatggagagagaatggacgatgtttctcagggctgcttcaagcgggattaggggcggcgtgggaacctagagtgggagagattaagctgaaggaagattttgtggggacggacttaccttccactgtgagagttactcgaagctcagcgtctgtgatgatctatggggctttcgaggtgatcgggcagcgtcagtcttcagctgctaagccgagaaggagtcagagagccttgggccagaattccaggggctctgggagtgcctgccagaactgtggggctttcactacctatcactaatgagaaggatttttagatccttataaaatttttttttacattgcaaaatctagcggaatcttgatcatttttaaataacttgataatcaataaaatttatcacaaaataagcaaatttaaaaa

SEQ ID NO: 472217 - DNA, 813 bp, Homo sapiens
tatattaaaatctcttaaaccatgaaccctggaaaattctctctacggcactatgcagacttggaaaaggaagaggggtacacagtcagagtgagactgtttctcctatcggtttcatgtgatttttattccattctgtggaccacagaacagactcaagtttatttgcaattttggaggtttttaccaagagctgtaacagtcactgcgaaggtctgcggcttcactcctcaagtcagggagaccatgaacccaccgggaggaacaaacaactcggacgcgccacctttaagagctgtaacactcactgagagtgtctgcggcttcactcctgaagtcaaggcgagaccacaaacccaccggaaggaagaaactccagacacatctggacatctgaagaaacaaactctggacacaccgtctttaagaactaacactcaccgcgagggtctgtggcttcattcttgaagttagcaagaccaagaacccaccggaaggaaccaattccggacacactaggagacctcagtcactcaggtgtttagagcactgcagagctcaaatcacacagataaatgatggtctctagatgaatgggcacacttaaagagttgcttccttactatatttgaaaatttaaagcactatgagaggggaacaaaacctgaaatagacatttcccttgcgaaaatgagacagaaaaatacaaattatatatattttcaatatataataatactgtcttatcttttatgcttgaagaggattttaaattaatcaagaatctgaaaattatgtttaagctggcatact

SEQ ID NO: 472218 - DNA, 450 bp, Homo sapiens
ttatcaactcaatttcagttccctgaggcctccctggtcatgctttctgtacaggctgtggaaatggaggaattcaagcaggctgcagaaatttgccaaaggatggaggagccaaatgctaatagccaagacaatggggtaaaaaccttaaaggcacttcagagacctttgcatcagtctcttcagtcacaggtccagtggcctaggagggaagaacagtttcatgggttgggcagagggccccactgccctgcacaaccttgggacactgctccctgcatcccagctgttccagctcctgcagtagctaagagggccccagatacatcgcaggccactgctgcagagggttcaagccataagcattggtggcttccatgtgttgttaaacctgcaggtgtgaaaagggcaagagttgaggcttggaagcctctgcctagagcctgaagg

SEQ ID NO: 472219 - DNA, 552 bp, Homo sapiens
gcaagctgaaatcaactgctgttactgaggtgaaaaaaaattatggctgacacaacggtaacaagaacaggaagtacaaacaggctaagatctgtaattacagtcaggccagagattgccttgatgatgtcaagaggcagaacacaatatcccctgacctttcctagaaacattactctgctatgccagcagtcaagttttcttatgtcagtaaagcaaaaagactgggctgggagaaatagaaataacaagactgcttcttgccaacctgcacagcacagcacagtcaagctgcacaaccttcattgtgtcctagaagaaaaaaaattcctttacttggacagattaacatgttcagtaaacaaatctaatgttcaactttgtgtctttggagaacaaaggaattttagtgtaaacaatgtagacattggtttaaccaatcagtgtcctctcacgtgaactgggaggcaaaaccaagacactgttcactcacctgaacattcactgatttattcactgccaacagtctgtgggtgttttaactgtcgtgta

SEQ ID NO: 472220 - DNA, 1009 bp, Homo sapiens
tcaattttctacaggtattgcccttatgatgtcaacatctgggtttttcaaacccacagaaagtttgttgccttttccaaaaccacctgtggccctgcctggagccatcctgtgccaattaaaaaaaacccaaactcagctggcagagagaggagaagcatctggacgtcagcgactacagttggacattggagagaagcggcttgacttcagagggacagctggacagtgtaacttaggagaagaatttggccagagacgttcagatttcaagggaaaattaccttccctcccgtctcctcttcagttccccttcccactgagagccacctccatcagcaataaaatctaccacatttaccatctttcaattcgttcgggtgacttcatttctcccaaaagctggacaagagctcaggtaccaggagtgcggatgaaaaaggctgtcacactgactctttgccctcacaggcagaaggcagccatctcatgcgaaaaggcaaagggtccactgagctattgaacacttaagccgtccacggacagcagagctaaaagaacactcgctctagggcttcaggggtcgcgggcacctccgccacatgctgctgcagggctggcacggagttggctcctgccggggcgcttgccccagctcctgcacttgctcacctgtgcacccctcccgtgaggggtggaacacagcggtccaagtgaatggagttcattcctgcaggcaccagagcggccagctgacttcagcgctcctgtactccagtttccgctttgttcacacactcccttctgcgaggagttgagagctgcgggctcagtaaatggggcacccgcttgatttagaattaaagttaattttttaaaaaaataaagtagaaagtcttagaatccttatgctaatatgaatcagaaatctctgagatgaggatgcaatagcatgcagaattttttaaacgtattgtattcgtttcctagggctgctgtaacaaaatac

SEQ ID NO: 472221 - DNA, 681 bp, Homo sapiens
ccctcaaactatggcaagcatgataatcaccagtgattctttagatatatcccaaaaagtatgcaagatgaagggaatatcacctctatcatacttagaatatccatcttatgaaaaaatgattacttgtccatcattctgtcaccagtaccccacattctctatccttcttaaatacagtggcccaggtacacaagatctgactaaatttgtccctggaccaggaaaacagaaagctctaccctctcaatcccctccactcatctatcagtcatctgtcaaacatccacataaacatccagtgataaacaacagcaagtggaccatgaagattgagaaaaacatccctggaattgcaggccccagcacaaggagtcattacagacatgagactgaaggccccagcacaaggagtcattacagatgtgtgactgaaggttgtggtgctctcaagagaaaggcagtttatggtgcctactgaccctcctacctactcacgtgacagatttgattggtctctcacaaatgacttgaagaaatttgatccagtttttccgtaaaacttactacaaggaaaatatcagctgtatgagttcttcatgacacaatgtactaagagaagatagtacattttaaatattattttttccccaataaggtggattagaagctcttagtgta

SEQ ID NO: 472222 - DNA, 635 bp, Homo sapiens
ctaaagagcctatttgagggtagaaaacggactgataactcttcttctcaaccattgcaaggttcatggctgagacccatatgataaagcacagattaacaagagaaaagcatacacatttatttaataaatttgatgtgacatggaatgcacttcacagcaagacaatatttgaagcagcagaaatggccccgtataatgggctgggtgtggaattaggcagtctcattgcctacactggaatcccggtgtggacagagcagctggtggagacccacgtcattaacttttgctccaagaactaccacgagaacataccaggaaagccaagagaatccacagaccctttgaaggaggtggattgctgctccaagctccgtgaggcagccgaggagctctggtgcgctcctgaaagcgccatctcctggctggaagccaaccaacacaaaaccagcacacttaacaaaaatacaaccaaggggtcttacagagtccacttctcttccctgctacctctactggagcaggttctggtatccacactgagagacctgaagacaggttacatcacaggactcttggcagacagtccccagaaccaccccggagcctggtagctctgctggatggctaga

SEQ ID NO: 472223 - DNA, 887 bp, Homo sapiens
ttctacaaggattggatcaggaaaactcaaggcacagaaatactcacaggccttgtgcagatccttccaattgccaagagtgtggcccagcgacttggtgcctggagtgcagcatcaaaccccaagcatgggacatacttccgggcatggatccctgtgggactgtgtggttcataagcccacgaaacaggccgtgactctagatgattgttgtaggaagatttgtgaggaagaggtgagtaggagaagggatgatggagtgggtatggtgattgaatgtccatcagcccagcttcatgatcttttggagccatttagactcctcaacaggctccatcaatggaaggtctgctgcagccacagctgctactctttccactttgaaggctgctttccatcgcattggctggatcacatcaaaggcactttaaaacatgggagcagctgctgtaacatctgccacaacctgacagtggacctttcccaagaaggctcatcaattttaaagcactttcacagcaaaatgcagaacaaaacgaagaatctgagagcagaggtggctgtactagatatccaataccttaaaaatctgtgcctgcttgttcagctttcgggcggccctgagccttaacaaggcaatggggaggagtctctaaaactaatttggttaagtggctccttagagtttggttcattctatatactcttcctgatgaagggtacatgtgcacaatgtgcaggttagttacatatgtatacatgtgccatgctggtgtgctacacccattaactcgtcatttagcattaggtatatctcctaaagctatccctcccccctccccccaacccacgacagtccccagagtgtgatgttccccttcctgtgt

SEQ ID NO: 472224 - DNA, 702 bp, Homo sapiens
aagaaaaattcttctgccttgggatgctgttaatctataatcttacccccaaccctgtgctctctgaaacatgtgctgtgtccactcaggccaaggttggtctggacctccaggactcaagcagtcctcccccatcagcatcccaaagtgctgggattacaggcatgagccactgcacccagccctttttttcctcctttgggaatgttattcatcttatagaaatagatgtgaacataattaatgccaacattgctttcacttatctcacaggccagaggaagtttctagttgttcattgtggagcagtagaattctactttcccaaagaggtacatagacagactgctggcttcggtactggaacactaaatagtcaagctggctttgaattctcacgctgcccagcaacacatttgttttctcagagtctatttagcccagcacgagatgttatgataccactgagagccaagctgctacccagcaatgcaggatgtttgccacaacttccttaattacttcagttgtgcatatggctgagcatttactgtgtgcaaagaagctatgaggtatgaatcattttgtggctggacctacattttagtcttttttatgagcaagggaagtaggtaaagacatggtagatgagggggaaaaaagtaaattcacttaaaagggaaacttcactcaccaagaggt

SEQ ID NO: 472225 - DNA, 768 bp, Homo sapiens
tgaaggattcacatgctattatagttcttttcgaaggggtcttctgatcacagctgcttccaatgacatcatggattcatccttcacctgccggggacagatctgctggtatcagaagccaggcatggatttagatgccatcaatgatgttatccttctggaagcatgtatctaccacctgctgaagatctattgcatctaccacctgctgaagatctattgccgggagcagccctattacctgaacctgactgtgctcttcctgcagagttcctatcagactgagattaggcagaccctggacctcatcacagccccccagggcaatgtggatcttggcagattcactgaaaagaggcacaaatctattgtcaagtacaagacagctttctactccttctaccttcctgtagctgcagccatgtacatggcaggaattgatggcaagaaggagcacgccaatgccaagaagatcctgctggggatgggagagttccttcaggttcaggatgattaccttgacctctttggggaccccagtgtgaccggcaaagttggcactgacatccaggacaacaaatgcagctggctggtggttcagtgtctgcaacaggccactccgtaacagtaccagatcctgaaggaaaattcaggcagaaggaagccgagaaggtggcctgggtgaaggcactatatgaggagctggatctaccagccgttttcttgcaatatgaggaagacacttacagtcacatcatgggtctcatc

SEQ ID NO: 472226 - DNA, 1366 bp, Homo sapiens
cacagactaaaagttggctgatgtggtctgggaatgggtgggcaccatccaatcggctgcctcacggctagaccaaagcaggcagaagaaggcattccgacttgcactgagcgaacaccagcttctctctttccccagcttgcagatggcctatcatttagaggacttcatcttagagagaagaagaagaggaagaggaagaagaggaggaggaggaagaggaagaagaagaagaagaaagaagaagaggaagaggaagaagaagaagaaagaagaagaggaagaagaagaagaaagaagaagaggaagaagaaagaagaagaaagaagaagaggaagaagaaagaagaagaggaagaagaagaagaagaaagaagaagaggaagaagaagaagaagaagaagaggaagaagaagaagaaaaagaaaagacagtcattaacaaaaccctcctcccttataatattgtggatctcctaagcttgatgctactcagtgcgacacaaactgactgcgtgcacgtcatccatctgggcatgttcaacattaccctttccatggaattggagggcaaggaagatcatgtgaacatgatgtttatgttgcttgctgtgcctgtaagaattccaggcaatgagacagcctggttggcaaaacaaaaaacaaaaacaacaacaacaacaacaaaaaccaaccagtcagttattgatgtttgttcatgttttccttgcagtaactttttgaaaaacaaatgcttgatgctagtgggtaaaaacaaccattacgaattgatgaatcagggagacactgagtatccactacattgtcagcactgggtggatgcttatttaaaatccccctgattgattaactgatgatgcttgtttctatccactagtatcagtaagtgattttatagttccttaatatttttctgataaggaaataaattaaaatttgctgaaatttaatacagatataaaataagatagagtgtcgatatttaacattttatacttccaaattgtcatcaaaactgttgtgaataatatatcactagggagttcaccttttagatttgtgaaatagctaattgatgtataaagtacttcaataggcttcatgttatttatcttatttgctttgtgcattaactgtgctataataggatcaaggttcaactacatttgaatatatttcaaaaattcagttcataaattaacttcaatagctaaaataggagccattatatgtgacattgttaacatttaaatttgagggatggtaccaggatcttttttttttcatgattagggcaaactgctgcactgatcattttaaagtacattttaacattcaggaatcacc

SEQ ID NO: 472227 - DNA, 675 bp, Homo sapiens
agagaagagtaacaactccgaaaataatgactaaagtattgtctaatgtcaatttgtttcctggcactgctgcttctacatcttcctcttcatcatctggcactggtgcttggaatataacagtaaacaaagcagacaaaaatttgaccttcatggaatttacatatttggaaggggaagacagacttatctgcactgaacctccagaaattcatcaattacagttcaggttttcctacccaggtactggttttcatggaggtttctgcctgtgcatttctgctccagatgaagtgacaatttccaagctcctccctgacatgccagatcagaaactgaaagtcctaagcctcatattctgtgcgtgggtatgttcacatcctgcctgctccagtgcccccacctcacactctctttcccttccttgtccccttgtgagatttctagtttaaaataatctaaatataattattccttatgccctgtttttccctcacttttgtatccaaatctcttttcagacaacagaacaattaatgtctgataaggaagacaatgatgatgatcacttcaaaatgaattcaggattgtaatgtaaaattttagtactctctcacagtatggattctaacatggcttctaacccaaactaacattagtagctctaactataaa

SEQ ID NO: 472228 - DNA, 501 bp, Homo sapiens
agtgccacaataaacttgggaatgcagacatctcttcaatatactgattttcttcttttggagagtgacctttgtcttgtgatagtttttgacttaaagcctattttccctgatgtgagtgtagccacccctgctctcttttggttgccacttgtgtgtaatatctttctccacctgttcactttccatctatgtgcatccttaaatctaaaagacagagaacaagaacaagaagaagaggaagaggcggaagagaaagaagaggaagaagaagaagaagaagaagaagaagaaggagaaggagaaggagaaggagaaggagaaggagaagaagaagaagaagaagaagaagaagaagaagaagaagaagaagaagaagaagaaatactaataatgaaacaggagagtgtgtctgtgaaggtgtttttagcatgtgaatcagcagactgagtaaagaagatcctctctcaccaatgtgggcagacatcattcactgggaca

SEQ ID NO: 472229 - DNA, 623 bp, Homo sapiens
ttactactcagaagagaaactgcctgatactggacagcaaggatatttttttctcaaggaaaatgcttcagcttttgcccagtcagtatgatattggctgtgggtttgtcatagatggctctcgttattttgagccctttgaagttaagaacttgctgcattggaggggccaaggtattcccagtcccctggtcacaacactccaatgggtagtggtagccaaaatacttcatcgaggtgatggcagtggaatccatgttcattcacatgtgccagcagccatagcagcatggcagagtggtgcaaaagtaattgtggtttttgccattgaaagtaatggcaaaaaccgccgttacttttccatgaacctatgtgcaatgttaagaagacacttgacacaacagtattgctgtttgattaccagtattgtttctgcaaaatttgtggtgtgtatcacagtgcatgcaaaatggatttccacatacccaaaacaacatagaggcatgtcaaagaagacaggacattttaataaggaatgctgatgtcagtgtacactgaatcattgaagaaattcaaaaagagaagtgtcacatataaaacgaatatgaatgttgtattagtct

SEQ ID NO: 472230 - DNA, 1398 bp, Homo sapiens
catcaacgtgacctggatatgaaggaattaagattccttctacatgaagatcaaggaacttgcccagagcacagaggagatctaccacagccagagtttccacaactttatagggaaactggaaataaagaactttcaacataggatcctggccagcttggctgggagcccctccactgagcataacactgggctgaagatgtggaatggggttgttcttacccactgcttggcagagaagacattccgcttaactgtgctatctgcttgccaaggttaccacatcaggaaggtcagagagcctgttccagggatgtgtgctgaagtttgtagcagttgggtaggcatcagcctttcaacccagacaagagcaggaaaatggagtgctcctgagagttatttttcagaaaaggagcagctctctctgagagttctgaaagtggcttcctctagtctgatgtcacagtctccaaagttatcagaaatctatatttaagaacacctgttcaagtcctatagctgattataaaccacctttcaaaatggattaaaacaagacaaaaatggtctgtggatgacaaaacatcttaggacaaccacagtcaaaaacacgattgacaaagaaatttagttacctctgtggcacacaataatttaacacaacaattataattattactgatgacatatactgaggcatatcagaactatcagagtttttataattttggaacacataccaataacacatttatacaaatacagcccaaagaaaaacaccatttcatatttgacaatgctccatgtatgatttttatgccaaataagccaaatgtcactgccgcacttgtgcactattaatgttataaacccaattcttaaaccctatagacaaatatatttagtcttaatcagtttgaccataaggtaagattcttataaacctttataaccctttacaattttttgttaaagagcagatcataagcaggtttttgctgtaagaaaagcctgttgtacttttattccagtgtgtactttagaaaaaaaactgaataatgtccatttaactttagccaatatgttatgggcagaatttcttttacaaaaattttttttagaaactttccacaacttgcttaaaccttcagctttattctatttaacttaatcctttaaatctctacacttaggcaagaaatccgcattcccaattcccatgctttcttatcttttaccaaaagcacattctactgtccttacatgccttgtgccttgtgtgtaaaactttttttctttttttttttaatagtctcaaacacatgttacactgttaactcttactaaggttttcaccaaaagtaaaggttgctaagttcaggattttaattatgtact

SEQ ID NO: 472231 - DNA, 541 bp, Homo sapiens
agaaaggacaaggaggaggggcgagagagatttcctcccctggaacagtcatgcctcaggtctcagccaaagatctattggaaaggtgctcccctctatggcattttcttgccagtcaagaaggaaacctcaccctggaagacatgccaacgtttttccgtgttgtgattgctatataccattctaaggaagcaaataggacaggcaccactctcaggaaaggcaaatcagcagctgttagtcaatgtggaacaagagtgtgcctacatcagcataaacccaaacattcccacccaaaattgcctaagcagaacgccttactgatggtagatcaggttgttattttcttatggaacttgactttattaacccaggcaaggaatcttgagcagagcaaagaaagtgctactctacatgactctgatgggaaaactttgccgagatttgatgggcaaatttcagaaaaatccttccactcacactgcagctaatcccatatctcccagtacaggatttgcagtactatatttaaggcatctcc

SEQ ID NO: 472232 - DNA, 959 bp, Homo sapiens
cagcagcagcgccgatagagaagggctacctgagggccagttttgtcttttccagaatgccgtacagttgaaatcatacggtatatagactttgcaggtttttatgcggacatgttttttgactcctttgggcaaataccaaggagcaagattgctggatcatatggaaagaggcattaccatatcaaagcctttagccttcttgcatcacgacaaaaattcgaacttggtgtttgaagaacatgaaaaatgaggaggaataaaataatcatgagtctcctggtcattaactgcatgaagttgagctggtcacttaagccattcctaatatgtaacttgagagtatagtattagatattcagtaaattcccttcaaaattcatatttaatgcccccagttgattgaatggtgcccgcccatactgaggacagatcttccccactcagtctgctgacacacagactaatctccttcataaacactctcacagatgtaccagaaataatgctttaccaattctctaagtggtccttaacccagacaaagcacagagaaagggcaaatctccaaggccagggtgataagaaaagtttcacagagtggctggaatttcagctggaccttgaagagaagtttgttattaccaaccttcggaggcctacttctgtcaactcgtcaaagtcattctccatccagctttgttcctttgctggcgaggagctgcaatcctttgtaggagaagaggaacctcagctgcaggtctgttggagtttgctggaggtccactccagaccctgttgtcctgggtatcaccagcagaggctgcagaacagcaatattacagaacagcaaatattgctgcctgatccttcctctggaagcttcatcccagaggggcacctgcctgtatgaggtgtcttttggctcctactgagaggtgtctcccagttaggctaca

SEQ ID NO: 472233 - DNA, 939 bp, Homo sapiens
tggcccacctccaagaaaaggcaggctggcctctgtttaggtgttgtctgtgcttgcattcccaacgttgacatgaggaattatcaatgggttccggacataatcagccacacggcagagtgaattccaggagtgtaaataacaagagctgcctataaatctacctcagaagacaaagggaaaagcaaaactctgcccaggaagaccttactttacaaaccaggtgaccaaatttctaaaacatcattcccgtaatccctgatcaacagaaaggaagctctggaagcatgaatgctcaaccatatttaccagccttcctgtggtcatttgtctgagctccagctagtgaagtatgagtagaacggacatgcaccacttccagacctggcaccggcaaaccccccatggcaaccctccaaccctttcctcaacaactggaccacgctggaaaggactgaggatctagaggaggacagggctgtaatatggaaggagtttggtttctgaaggaccatgtagcaggccacctgcagggcgggaacatctttaataggtttggaatagcaagaaataaactgatggtaccttctggctgtcctcacaaggtagagggcaagtggtctctcttggacctcatttgtaagggcgctaatctcattcatgagggctccaccctccctcacctcccaaagtcccaatctcctaatacaataatcttagaggtgtgtgaatttgggggatatgcaaacatccagatcacagcaggctccctggagggcatgccctgggttagcataagcaaaggcacgaaggtgaaagaccataggactgttgcagaaacttcacatctcagtcctgttggagtatcaagaaatccaaccgaacaggtaagttgaggtcagattacagacctttcatgtcttaatgcttttaggtttt

SEQ ID NO: 472234 - DNA, 881 bp, Homo sapiens
caataactctcccaaacattgagttaagaagcatagtgccagaatgattttttgtgaggaaaatttggagcttcctggagacttgttaaattgttgtgaccaaaatgctgatagtgatatggacaatgaaatccaggctgaggtggtctcagatggagataaggagcttgttaaaaactggaccactccagctccagctgtggctaaaagagccccagatacatctcaggccactgctccagagggtgtaagccccaagccttggtggcttccatgtggcatttggcataagtctactgcaggggtggagccctcatggagaacttctactagggaagtgcaaaggggtaatgtggagttggagcttccacacagagtccccactggggcactgcctattgaagctgtgagaggaaggccactgtcctacagcacccagaatggtagatccactgacagcttgcaccgtgcacctcgaaaagccacaggcactcaatgtcagcccataaaagcagtcaagggggttgtaccctgtaaagccacagtggcagagatgtccaaggccttgggagcccattccttgcatcagtgtagtctgaatggagtgatgcagcaagtaggccctaactagatgctagcccctcaattttggacctcctagcctccagaaccataaaccagtacatttttgtatactataaattatcactttcagagatcagtttaagttgtttgaagagggtagaaggtagaagtgacaggctaaggagaacgtgtgtgatgaggaagttgaaggctttgattttgattggcagaagtaggctgtaattggaaaaaatatttagggtgagtggcagtgttttaaatgtaacttaatatca

SEQ ID NO: 472235 - DNA, 618 bp, Homo sapiens
taattccttctactctcatcaacttaattatgtgcgtcggagccaagcgcacagcatagcagtgttttctgtactgctgggaagcctgcaataagcagccgggaaaatgggcagggtctgtgaagcctctcaggatgatgccagaaggagagggagagatggggcatgtgcagcaggtagcaaagttctccgggaagacagactactggcaaatatctgggaaacaggggtgactggagggatagaaacaggggtgactggagggatagaaacagagagactggagggatggtttttggaactctggaaaactgaggctgccatcaaaaacttcagtccctactacagtcgtcagtactctgtggctttctgcaatcacgtgcgcactgaagtagaacagcaaagagatttaacgtcacagtttttgaagaccaagggaaagactatagacagagaaaagaaacagtacactggccccttcagcatttggagatcagaaaaaggagaaggatccagcaaaatggactaagaagaaacggtctatggagtaggagaaaaatcagaaaagcataatgtcccagaaggcaaataaaaaaggggtttcaaaattaagacctc

SEQ ID NO: 472236 - DNA, 715 bp, Homo sapiens
ccggaatgaaggacatgactgagtaataaggggactgtgtgcttaacagaagacatgactgagagtcttctgggtgatgcggatgaaatcacaggctgagatacagatagaattccaactcttcagtgcctcataccagcttggagccacatgctgctctgtcactcccatcccccagggaccagccttcccaaagggaggcagctggagatacaagactagacatcagtgtgatgttgatactagaaacagaaatttaggagtcattaatgctgaggtaaagatacaaactacaagaatggatgagctcaccaagagccatagtcttgtgagaaaactcaagggccatggcaaagctggcttccacatccatttcccttacaataaaatagagttgttactagggaaggggtccccagccataaactatattttccagctcctctggcatctagaggtgaccatatgtgctttccctattctctttttctcctggatgcagtaagaaagccacctgcaaatgggaaaaccactgtggactaatacatgattgagaaatagacttcttttgtggttgggcctttatcatttttgaatctacttgtgactaaaggtcagcctacaacaagaactcttgaagaatgccaggttgaaggtgaatagtacggcaaagaggatagacaagcaagatattacgttacggaaataagatggg

SEQ ID NO: 472237 - DNA, 1215 bp, Homo sapiens
atttggtttgaattgcttgacatgaccggtcttgggaacttgcccactccatttgagtggaagcgtggcctgatcacccatgggaatccagaccagttccggtacgtagacacttggttacagccagaccagttccggtacatagacacttggttacagccagaccagttccggtacgtagacacttggttacagccagaccagttccggtacgtagacacttggttacagccagaccagttccggtacgtagacacttggttacagccagaccagttccggtacgtagacacttggttacagccagaccagttccggtacgtagacacttggttacagccagaccagttccggtacatagacacttggttacagccagaccagttccggtacatagacacttggttacagccagaccagttccggtacgtagacacttggttacagccagaccagttccggtacgtagacacttggttacagccagaccagttccggtacatagacacttggttacagccagaccagttccggtacatagacacttggttacagccagaccagttccggtacgtagacacttggttacagccagaccagttccggtacgtagacacttggttacagccagaccagttccggtacgtagacacttggttacagccagaccagttccggtacgtagacacttggttacagccagaccagttccggtacgtagacacttggttacagccagaccagttccggtacgtagacacttggttacagccagaccagttccggtacgtagacacttggttacagccagaccagttccggtacgtagacacttggttacagccagaccagttccgggcgtatcccgaaagcactgaggccttcctatcaaaaatccttaacccagtaacccgcggatggcccaaatgcattcaatctgtagcagcaactgttttgctaacaacaacaacaacgacaacaacaaaacacatgtaccacccctaaaatttccggtaaaccagcaccagcctgaagatcacgttctcatcaaagggtgaaaagaagaaaaactcgagccagcctgggaaggaccctaccttgtgctgctaaccaccaagactgctgtttgtacagcaaaaaaaaaaaaaaaaaaaaaaaaggatggactcatcacacccgagtcaagaaagcaccaccccctccagagtcatggcc

SEQ ID NO: 472238 - DNA, 528 bp, Homo sapiens
tgaaaggttactcatagacactatgttctttctcatacaccataagaaccgaacctctccctctatgcagttgcaccatcaatccccattacaacctctaatggctgcttcccttgctggatctctaggattttgggtgcaggactcctctttcagtacaccctctcaccttttcactttatatttccggttctgcctgacactaggtctcttctttttatgtggctcttccacctacatgtgcctacctgccaactggatggacacacgtactctagtcttccttacccccaaaatccagtttgcagatgggaatgaaaaactgcctgtccccctcatgacatcaacacaacaaaaaaaagtcatcccactaatccctttacttgtggaactgccggggcctcgatttacttgctgctgaaaaaggaggactctgtatatttcttaatgaagagtgttgtttttacttaaatcaatctggcctggtatatgataacatcaaaaaactcaaagacagctcaaaaactc

SEQ ID NO: 472239 - DNA, 550 bp, Homo sapiens
ttatcagactgtatagaggtgggaaggccaactgaggaattatgtctgacagaagggaagaaatgactgcagtggccttctcagaccctgtgggaaaagcctctacccacccagtgaaagtgtctacccagaccaagaggtattttagtttcctgactgaggcatggtttatcaataaaccaatagtgaacaggaaagaaggaaatatggggaaatggagtgaatgtcaggtggatcagagagatacagtcatgggggtcaggtgtggtatcaggaataatgtgggaggccggattgaagtctgggccaggaacaatggaactgtgggagattcaacaatgaagttggggagttttaagaggtttagaagcctggttgtcaatacccacaacagttatggagacaagggaaacaggcccttgaaaagcactattcacaacagccaagatatgggatctacctaagtgtccatcaacagatgaatggataaagaaaattcagtcttaaaaaagaaggacatcttgtcagttatgacaacatagttgaaacc

SEQ ID NO: 472240 - DNA, 920 bp, Homo sapiens
ctcatcatagtttcacaaaaggattattttctagtcaaaaagataaccacccaggtagaaatcaagagtgcagcagccatggccagccacattgtgctcaacaatggcaccaagatgcccatcctggggctaggcacctggaattcccctccaggccaggtaactgaggctgtgaaggtggccattaatgttgggtactgccacatcgactgtgcccacgtgtaccagaatgagaatgacgtgggggtggccattcgggagaagctcagggagcaggtggtgaagtcgtaccatgagaagggcctggtgaaaggagcctgccagaagatgctcattgacctgaagctggactacctggacctctaccttattcgctggccaaccagcttcaagcctgggaaggaatttttcccattggatgagccaggtaatggtaatgtggttcccagtaacagtaacattctggacacatgggcgggcatggaagagctggtggatgaagggctggtgaaagctattggcatctccaacttcaaccatctccaggttgagaggatcttaaacaaacctgacttaaagtataactcccccgacaggccctgggccaagcctgaggacccttccctcctggaagatcccaggatcaaggcgatcacagccaaacacaataaaactacagcccaggttctgatctggttccccatgcagaggaacttggtggtgatccccaagtctgtgacaccagaatgcattgctgagaactttaaggtcttcaactttgaactgaacagccaggatatgaccaccttattcagttacaacagaactggaggcatccaaagagcagatgaacaactgcatccattcttggtaacatttatgggaaactgagacttagaaatacttataattttttggaa

SEQ ID NO: 472241 - DNA, 891 bp, Homo sapiens
aaggttcatagtctcgtgggaagcccatagatgtggcccagtggtagcacctggagttgactaggaagtcagcaagcaaagggagggaaggaacgtgagcctcaggccctgtcgctcacccagacgccctctcccggcagaaacgtgcgggtttggtgccccctgctggcccttttctgacaaagacggacacccaaccacggagggcctgggagggccactgcaaagtgagcctctcaatggtcgtggacaacccaaaccacatcctctggcttgcattttgcatctccagccaggctgtgttcagtgctggcctgtggtggaatgaaacaactctcctcctttcccccttgccccttctcccagaggacaaagccagggaggaaggggacaacctgttaccatcagacctcagtgccagggaggcctggtgtgtgctgagccaggacagagataacagagcctctcacgggggcagttccaaggggaacatccatagacttccctcagagcccacgggaagcagactaagaaaaggaaggcctgaagcccagaaaccagcagccaaaggagcttcctctatggtggacagctggggctcgcccctgggagacactgacactgtcgcctgcagctctgaggagggaaggaggttgcaggattgctcctcaggcctggacaccaccccagcatgcactcagacttcaggcgaggggggcacagaggtgccagagactgagcatgggtctcatcgtcaccagcctggcacctcacacttctttttgtttggattaatcttgtagccaagagggagctgtggaggatctcacctggggagtaacatgatcagattgaggtttgcagaaaaaccactctggcagctatttgggg

SEQ ID NO: 472242 - DNA, 687 bp, Homo sapiens
tccccagcactgaggatggacgccaccctcgccctccggtgctcacagtctgcagcgcctgccaggagttctcaaaacccaatgcgtcgggctgccctggcgggaaccccgcatggccaggaactggcctctgcctacggtcggcaagaaaccggatgctcagccctggccttcaaggactggaatcctgccaagggccacaccaaggaaaggaccctccctgggagcccagccttgctcgtgggcttcgggactccagaatgtggctatggttctgtgatggccgccgagctgacggaggctgtagagtttcgactccggtctgggggctccaaggactgtcccgctccatgccctgcccccaccctggatgccaggaaggaagagaaacgccccgagctgcagagaggacagagagagggaaggaagaggaccagcatgttcgcacagggcacacagtggaggctcccgcccaggatggagggcaggtattccagggagcggcccccaaagcgactggagattttccacggctgctgggatgagggctgcgggggcctcctgtgtgctgtgcactaaatgttcttcaagagtcagacgccaggagcagctggaaacgtcaaattttctggttgttggaccagttcctcttattcttctgtgcatttaaaaattatcactgaattc

SEQ ID NO: 472243 - DNA, 1011 bp, Homo sapiens
gaagacagcccagatatcctcagacaagcacctccaggaggagcaggcctgaccactgtgccatcatcaaattcccgcagaccactgacaaattcccgcagaccactgagtcagccatgaagaagagagaagacaacacacttgtgtacattgtggatgttaaagccaacaagcgtcagatcaagcaggctgcgagaaagctcactaatactagtgtggtcaaagtccacaccccgatcaggctgatggagagaagaaggcccagcgctggcaatgctgtctcagcggggtgccagggacacagaccaggtcccgaggtgctccgccgccctcagagggtcgaccagatgcaccaagaagctccggggcttgtgtctgttgggtcatcctggcccaacctatggcggggccctggttccaggagggcacccagagaagagagcttcccctggctggtgcagcatttctctcgtgcactgttgtaccgcaacatggtactgacacctgatttggggtggttcttagagcaaaggcctactcagtgtgaagatgatgaggatgaagacctttatgaagactcagttctgcttaatcaataggaaatatattttctcttccttatgattctcttagtaacattttcttttctctagcttacttcattgagaatacagtatgtaatacatataacatacaaaatataagttaattgactgcttatgttatcagcaaagcttccagtcaacagtaggctattagcagttaagttttggggaagtcaaaagttaaacttggattttcagcaggaggagggttcattacccctcacccccatgttattcaagtttgcactggtccctacacacgatgtcactggctccatctaagcggagtcttattgtgaaaagagccgcacgcaagtgagtgaggtctgtccatcgtcagggcagttactacagtctgtcaatgagaagactcagaatctcatctcattgtgcagacagatgggag

SEQ ID NO: 472244 - DNA, 644 bp, Homo sapiens
ctctctcctcctgttctgacccctgcatgtcgaggcttcagcatgaaggcttcagacattcgctgcgtggcctcccagcttcatcattctttgatgatgggcattgaggcatcagaactcatggatatcacagttcctgtgtggagaggaagcttcagatggtgctcttgcacagacgggactgccattcccattttagtggatctcttaaaagttcgaatggctcctctaatgcctgatgtgaatggaacctttctctctgcttcagtcaagaatctggtgacaaagaagcttcatcctttcaatcttacaatttcaatctcctatctcaagaaagctcatttctatgtattaccagtgcatcctccacatgctcttctgcagttgttccttctgcgggaaatgatctctccttttaaagtacagaaagttcccaaatactccctcatcccttccctgacagcttcccttatcattaatatcttgcattagtgtgttacactaatgttgtaattgaagagccaatattgatacagtatggttaactaaagtccatagtttacattaaggttcgctgattgtgttgtacatttcatgggttttggcaaatatgtaatggcatatatccaccgtcataatatcct

SEQ ID NO: 472245 - DNA, 725 bp, Homo sapiens
acccgaaggaaccagtggaaccctttagggagtctttgatgagcatctgtttagcaaaatcttgattcatggtcccaaagattaaatggctgggcatagcaagtgctcaccaaattctgaacctttgcagtttagcaggctcatgtgacaagttctggtcagtgggctatgagcagacaggacctatgtcacttgtggatgagacagggaagactggctgggttccccatgagctcccttcctgcctgcgttcagaaggcgacctgtggccggcacacagcattggagaagtcgccggtgtgatgagaatgcccaatgtgccccaagcagccagggaatctctgccctacgcagttagcggctggggcttgaccacaatgcataatgagcgggcagcggctgagctgcagatgatgcctgctgctctggagtccacgctactgtccctcttttcccgggtaaagctggaagctgaactgggaaccccggggcaatcatcaagatgcagaatgtaaaaactaaggtacaaaaggaaacagaggttcagtcaaagaaagtgaccttgttaacgttagtgacctgcaactcgaaatccaggttgactaaattcaaaccctatatacctgttagaggcaatagtcactgaggaggacatctcaaagtctgccccccttttccactgaaggtgggatagtagcaacatttttctgattcaggaagggaaa

SEQ ID NO: 472246 - DNA, 697 bp, Homo sapiens
tgccaaaattgatataagctcatcagttaaaaaggtgagtaatgctgacagtaggcttcacctgctccttccccagaagtaactggtgttcagaggtggatctgtgtggagccctgtatggagtgggcatccggtacttcctagctggcctttgccagctgtttggctgccccagtttctgcccttcacagacatggcggccacctgaaaatggccataagagcaacacgttaacttcattcattcattcattaactgttgatgatatgcctagtacgagccccccattgtgttcagtgatggggacacagcaagctatgactgtctctgtctctgtggggcctctccccatggagacaccaccccctactcaggatggaagggaagacaaggagggtgatgttgtgagatggttactgattcctctaaagactcttaatcaggatctatagtttttccagaaagggatttttccgtggatataattttaagataaattggtaataaagattcatgaccaggaaacctatatagtaaagagaaataccatacattaaaagatgagtttatgaaagtcaaaggcaaactgaggttccttgtgtagaaagactttcaataaatctacaaagctcagttgagaacattcctctttggttatgctcttatttatctgttattttagaggttgataggcacc

SEQ ID NO: 472247 - DNA, 1777 bp, Homo sapiens
tttttttttttttttttctgagacggagccttgctctcggcttagcactatcccctcggtgaagactgagttttcagttcatgcgagatctgattgtttaaaagagtgcagcacttcctccaccttgctccctctcttgccactgatgtgcctgcttccccttcaccttctgcctggattgtaagctccctgagaacctcaccagaagcagatgccagcaccacgcttcctatacagcctgccaaaatgagctcctgaatttcacagacaaatccagacccctgtgtggaaagcctgcggtggtgttctccgtcttcccacaggactccctgcagccaggaattctaggggagcacctgacgcgaggtatacgcccagatggcctgaagtaactgaagaatcacaaaagaagtgaaaatgtcctgccccgccttaactgatgacattccaccacaaaggaagtgtcaatggctggtccttgccttaactgatgacattccaccgcaaaagaagtgaaaatggccggtccttgccttaactgatgacattacaccacaaaagaagtgaaaatggccggtccttgccttaagtgatggcattaccttgtgaaagtccttttcctggctcattctggctcaaaatcacccccactgagcaccttgtgacccccactcctgcccgccagggaacaatccccctttgactgtaattttcctttacctacccaaatcttataaaatggccccacccctatctccctttgctgactctctttttggactcagcctgcctgcatccagagctgcgcgaccatgcgagcggtgggcagaaggaaaggctcagcagcagggaggcttgcagacctggagccaacagatgctcccaggaactcgacctgcatagtagcaacgcaatgaggagccaggcccagcatgcagaagctagcctgctggggatgggcaggaggcacatgcaggaaggtttgtgcagcaggcagcagccgccaggcagcggggtggaggaaggagcagtacagaaagaagcagcacagacaaagcacagcgcctaagcaggtgcaaagtggctgccgccctggggcctgcctgctcagctctccagctctccggcctgtggcaaaattttgtgtgctccttatgtacaagcgacatcccagattaaatgaagaaaataaccctacaggacccacagccccagacaatgcaccttccttggacaacacaggccctggacagaatgctgaagaagacaagatccttatctgcagtagcgtgctttatgaaggtggtcgctttgagggtgacagaacattgagtttacataacgtagaaagcttacctgtcccagggattgccagtccaaaccggcactgccgatatacacgtgctgtttgtccacgatccagaaggaggactgcagccggcccttgttgtaagcggtcatgttcattggcgggcacatgtttctctgcctccagccatcctggaatagtaacatccaaaaaagagttgcagatcccagaggaggaacttgggtatggcagaatctgaatatctaaaatgggtagttaccctggcagaagcttattgttatctctaggttaaacactagtttctaggttaaaactagtttcataactagtgttatcaaaatggaatattagattctgaagaggtttaacaatggcgtgttcacatttacacattacacttgcacacgaggaagatgggaggaaatgagcaactttaaggagacaact

SEQ ID NO: 472248 - DNA, 610 bp, Homo sapiens
accacccggcttcactttatcaccaaagccacatgatttcctaagaatccaaggaaactcccaaactcagagtccagataagtttgatgaactatgacctccaggacaaatgcttctcgggcaccatcaggcttaagtccactccccgctctaagttctgtgtgtgtcctggagaaacagcagcactgtaatgaggccaaggctgtggatatcccacacatggacatcgaggtgctgaaaaaattcaaccagaataagaaactggtcaagaagctggccaagaaagtctctgatcaagcagatcccgtaagtcctcgcccaggcctacataaggctggcacgttcccttccctgctgatacacaatgaaaatgaagtggatgaggtgaagtccacaatcaagttccagatgacgaaggtgctgtgtctggctgtgactgttggccatgtaaatgttacagacaataaacttgtgtataacattcacctgactgtcaacttcctggtgtcattactcaagaaaaattggcagaatgtctaggctttatatatcaagcgcaccatgggcaagcccccagtgcctgtattaagacacattcgaataaattcta

SEQ ID NO: 472249 - DNA, 582 bp, Homo sapiens
agagctgaacacttaaaaataattaaaatggaattctccactttggcgctgctgacatttgaggcagtgctttgtgttactgaactggactcagcgggaacgagcgggaacgagcgggaactgactgaactcttgacagctgttcttattctcaatttcttcctgaggggcctggagtcacgcccacaggccaaatcttcacctttgcagccagttgcaaatcaaacaattgctgaagcttcaagccgctgcttcaccatatcctgccttttgaggccaaactactgtacaagccccagagagcctctttctgttgttcaggatgacaaaacctataaggggcttctgagcccccattcagaaagtaataagtgggaaggaaaccctatgtccctcatttgcctgaccatgtatggagctcagtctggcgttccagctgagatgcaatgtcttgtcagttccaataaaagaactctgagcccctacctaaggaacaggggctgaggaggttttgttaaatattttattaaccatgtaaagaagatttaacttacagaaaaatcattttttaaatggaaatag

SEQ ID NO: 472250 - DNA, 1000 bp, Homo sapiens
ttgagaaatcggatggttgccgggttcccagaagaaaccgccacgagggtggggtgcggggtcagtgtgctccacaggacttccgaggacgtgccccccaagctgctccgttcctccaccccctgggatgccacagaacacccgccagcgagtttcttccccagcgcccatgagaggaggctgcgggcggcagccgcaagcgaggaatccagcgcagggaaagtagccccagtggggcccggcgcgtcagccccactcgcgtggcaaaacttgcgggggcccccgcgcggcagcggcgcggtgcctcggcttcgctcctggcaccgcaggtcgcccgttccgcgttcccaaaagcatcaggctcacttagaagctcaggcagcctcgcgaccctcacctacccctcccagcaccgccgctgtctctaccgccgcccagcgcaggcgtagcagagacttaaaaggacacggccgcctctaccgcacaacgggttggagcaggttaggggccgcaggggctgagaaaacgagtaacggaggacagagtgcagtggggacggggaaatccctctcctccccctctttttcaaagcaccagcccttgaccctgcaattcgctgatttccccggccactggaagcgcccctgccaggttaaagaggcgggagacacaccccctctggagccgggagctaccgggcgtttaggactccaggcctcgcccttccgcaccgccccaaagtctgacttgcaggctcgggccgcagacccgcaggcttcagaaggcagccccagctcccccgagaggtggccttaggtcactcgcaaaaacagtaaccaacgtgtcgatggcacttgtattttctaatttaaatttataacacatttcgcagatgggcttccactgaaataagcctttgagaaaaagaaaaacttttttttttcaacaagattaggaaataccaagacatacgaagtaaagccatgccgtccacccagct

SEQ ID NO: 472251 - DNA, 1260 bp, Homo sapiens
gcacctcctctacttctctccggcctctccgtatttctgcttttcacccttcctctctcccgccggaccgaccgaagcagagggagtcgcggacccgggcgtttccaggatgctgggtctgatgcctgcgaggggcaggacgaggcgaaggccattccgctgcccttccagcttcagaatcacccaatgcacgggtttcaaccgtagccggcaagctgcccctctccggttttccgaggctttggagcctgcacaattgttctacaaaaggcggtggctccgcctaacgttagatggacgcttgctctgcgtggtgataccagagcgagagtcgactgttcctgtgtcgcagtcgggtggtgtgcttgcttccaagtctggaggcgggtggttcgagctctttgacttcaacaggaggtgtgtcagtttatcttccaacatatttttccaactcaatgagagagccttttccttcgtgctcttgccagcacagcagtttccatatatcagtctgatgtaccagtgagggggtggtgccctgcctgatttacctaagcaggaggtgcagcagaaagacatggtggacagttcccagagatactctctggcacgtgttccacagctaaacctccaagatgtttagaaagtcttccagtaattgtaattgttttctctggtgatctacctaagcccagagaaaactggctggagagaccctgaactgcttcctgtcaagaggcttatcaaataggaggggaaagaatggctccttctagaaatttgttccttttctcttttctttatgaattgcattctgcttttgttgaatgcaaacgatctacagactgttctccctcctagacaagggtgaattggcatgctaataactacctctgtgttattccttccttgatggtgtttgttttgttttgtttttctgtaaaactcatctcactggagacaaatctctggatcctgcacctcaccatgcttcttatgcagacctggatccttggagttattggctccctttgccttgtttattttgttgactctcttcagcaaaactgaactccaacttttacaccctaaatctggctcttggacatataggtccttttgctttctgactcctcctcaacccagccctgcctttccaacctctccatctgtatctgtgtgcctgtgtctgtctgtctgtctctcataccccaggctgcccccagtattacccactttcttctccccctcttcagtgtt

SEQ ID NO: 472252 - DNA, 1199 bp, Homo sapiens
gcattgtgaggttccatggtgtaatggaaggcaatgccgtgttttactccctaaatggaatggggattctgctgacgttcagaagctctgcgctgcgggcctccgtgtcccttctgctcccgctgtctgagcctcgggatgcacgccgctctcctcatcccctcttcggtgttcggggtcccagaaaccgggttctcacagtggcccggaccacagggaaatcgccgaatcatccattcggggtcaaagagcctggaggatcccctttcagggccagcctcctggcacccagcaatcggaggcccggactcgccccgccagggacccagcgacccagcaagtcctcaccccctctcagggcgaccctaggcctcggggagagctcctacgtctctattgcgggccctaaaagtcgctgtttcactaagctttggaacctgactccgggaaatttcattctttcctcccaagatctcagccggaaagagagatccgcgcgggctgggagcgcgggttctgttcctcggccgccccggctgaactcccgcaggaccacggggaagaggagcctgagcagctctgaggggccagtctctgacggtggggctccccctcgtcccgtcaggaccctgccccaaggagaagacgccttagaacgctaccagagttaaaaatgttttctcctgcgcttcagagcacttgggatgaggttcctgatgggtcttgggagtgaactaagatgtcactccaggcgctcaggaccatcgctctgattttcatattttggggctgagagcggttacgaaggactgaaaaacaccgcagtctttgaggggctcagtttggaggacgagctgggggaggggggcggtgagaagacgccttcttggctccttggagtggactggcagctgcctttgcatttattaaattttttctctattgtagaaagcctgctgtgctcagctccattggcttttctgggcaaccagcaagataaacctagcaggcaattacactaataaaagaaaaacacaaatggcattggttgaatatggtacaatgcatccatttcaagtttgatgacatgtctattactccaaaatgtccttttgtaccctttgtagtcagtcccctcgactccctgaacccagcaatcaatgatgtagtttctgtcactatacaggttagtttcacct

SEQ ID NO: 472253 - DNA, 1160 bp, Homo sapiens
gggcacatcaagaaagttgacaagatgattcaaccacaatgaagtggagtcagaattcacagcccctgagctgggggcgcaatttctcattgatttctagaatgttcttttctgccttctcactggatcaagggctggcagacaacaccatgctgacgtttgtggcagaagaggtggagccagggactggggagaagaaacccaaacacatgatgggagctttgcgttgcaattgcccaggctttgctgaaactcaggcaccctggtctcacctgagggtcaccaccaatgaagattattccttcagcattcactctcagtattcgtgtacccctgtgacaatgccacagacccatctctttcccaatacatctaagcatattcctcactgtttatctcttgtctgtacaacatcatcaaggcaaacagtttcccaacaggttatattttcttaatcgtagtcatgaagtcaccccacctgctctaagttaaaacagaacttaaggcttttccacaagtctaaggtttattcattttacaaatgataaaactgcaagttcacaaagttacatggcttacatgaggtcacacaaagatgagttttcagcactgccaataaaagcaatcacaataattattcagtaattattcatagaatccatataattcgtaaacattcacataattatttagtaattattcattgaccaattcatacaaggcattttgctcaaaactgtgctcatatttggacattgtatcttcatcataatccttaagacaaccactaatctactttttcaatatacagatgcacttgttctgggcacttcttctatatggaataacaaagtgtggcattttgcatctggttcttagcatattgttctcaagtttttttagcctgcattaatactttaacttttttatggccaaataatattccactatatggttatacgacattttgtttattcatcaactgatagtgctttaagatgtttccactttttaactcttatgaataatgctgccatcaacacctttgtacatgtttttgagggaacacctgtttttcattttcttggttgtaaacctaggagtgcaattgctacatcatatgtcactttatgtttaacttattttatgtttaacttttt

SEQ ID NO: 472254 - DNA, 642 bp, Homo sapiens
cttcaggaggccaaggtgggtggattgcttgatatacagaatggtaggctcccttcttcctgtggattttaccttgaaaggggctgtcagaacagaagtttcagggaagggaccagagccctggggactttccttaggtgatggtgatggaagaagaggcaaggcaggaaaggagggctcaggtaagggagactatgcagaactagcaagcaaattgtcaaaaccttcccagcccttctcaactggatttacaacccagatcactagacctctgatgggacagaagagtggccttccattctctcctgataagcaactgcggatatcaagccagtttcagccatgttacagggactgcacacaaaccgacttggtgtccagcagttcaccttttgacataaaaagccaatttccaccttattttaatgctaaaatcccttcccaatgtgaagatggggtgcatgttacatatatgtttaccctttgcacatgagctcaatacccctcagaaatggcgtttctccaaacctgctgaatatgtataactccattgtgtgatacacaccctgtatagtaatttgttaaagccaagagctcctatggaatgaagttagatgggaggggggcattgagtagtaaggt

SEQ ID NO: 472255 - DNA, 867 bp, Homo sapiens
actgttctctaaaggaggcatgcagagtactgtgagtgcctgtcaaagagagaattccacagatgtgaccctgagcctccaaagtttacagtctgatgaccaccactacctggaatgcagatacagataacagagtgaaagctcagtatcagttgatacaacactgggttgtatcaagctcatttcctaccaaggagtcaaggatacccaaacagtccccagaaaagaacaacttatcacagataaggccagaaggagggctgtttgggaaacattcctcctggggaaagaacaccttcccatgggctgtggaaaatgataagggaaagggctggcacatgcatatgtgggcagggagagaaggcccaaggggagcagcacagtggggagcaacccacagccttggggaaggcacggcaggagaagagcatggagaaaggggcaggggagctgtcagagcattgaccatcaccgtggttttcctggttcacaggcttcctgagggctcctcagaaacatgtgttagaaaagaaaagctttccggtctgtccagtctcctccatgaccacagtttctcacccacataccattgtctggcttggaatggatcctggaaggaggactcaagagaaaccatagaaacagacaacaggaagtaagtgtttctccttaaaaaaaactcaccaaaattcttacttgcttacatatgcataaagaaactctggaaacacgcataagaaagcataacagtccttatttctggacagggagaaagtggaaactgagctgatgggagacatagatgagggaaacgtttcaggctgtgcatctttgtatttttctggttttaaaaccatgtgaatgtat

SEQ ID NO: 472256 - DNA, 1108 bp, Homo sapiens
ctctcccctgagcacttgacaatgcacataagtctgatgaccaccactacctggaatgcagatacagataacagagtgaaagctcagtatcagttgatacaacactgggttgtatcaagctcatttcctaccaaggagtcaaggatacccaaacagtccccagaaaagaacaacttatcacagataaggccagaaggagggctgtttgggaaacattcctcctggggaaagaacaccttcccatgggctgtggaaaatgataagggaaagggctggcacatgcatatgtgggcagggagagaaggcccaaggggagcagcacagtggggagcaacccacagccttggggaaggcacggcaggagaagagcatggagaaaggggcaggggagctgtcagagcattgaccatcaccgtggttttcctggttcacaggcttcctgagggctcctcagaaacatgtgttagaaaagaaaagctttccggtctgtccagtctcctccatgaccacagtttctcacccacataccattgtctggcttggaatggatcctggaaggaggactcaagagaaaccatagaaacagacaacaggaaagatgctgtcatttctgagttatctttggagcatttctctccagtgtgtcagggtttcagagaaggctttcctaacattcaggctggctgtcagggtttcctaaaaaaacctccattcttggacatcgtggggaaggggcaatccatctaacagcaagaggaagagggggcctggagctttcattgtttcctgaactgattttcaatgcaacttactgtttttagccacaacttcacccttatttccaaaagtacctggtgccaccaattgctgagcatttgggggattctgaaatgtaaagtttctccttaaaaaaaactcaccaaaattcttacttgcttacatatgcataaagaaactctggaaacacgcataagaaagcataacagtccttatttctggacagggagaaagtggaaactgagctgatgggagacatagatgagggaaacgtttcaggctgtgcctctttgtatttttctggttttaaaaccatgtgaatgtatcactt

SEQ ID NO: 472257 - DNA, 595 bp, Homo sapiens
cctgaatcggttcatggcagattatggctgaggtggtctcagatggagatgaggaacttgttgggaactggagcaaaggttactcttgttatgttttagcaaagagactggcagcatttttcccccaccctagagatttgtggaactttgaacttgagagagatggtttagggtatctggcagaagaaatttctaagcagcaaagcattcaagaggtgacttgggtgctgtttaaggcattcagttttaaaaggaaaatagagcataaaattttggaaaatttgcagcctcacaatatgatagaaaagaaaagctcattttctgaggagaaattcaagcaggctgcaggaatttgcataagtaatgaggagttgaatgttaatcaccaagacaatggggtaaacgtctccagggcatgtcacagaccttggcagcagacccttccatcacaggcccagaggcttgggaggataaaatggttttgtaggcaggccccagggtccccctgttgtgtgcagcctagggacttggtgctctgcatccagctgctctagccatagctaaaagggtccaaggtataaatcgggctgtggct

SEQ ID NO: 472258 - DNA, 1098 bp, Homo sapiens
agatttacaagggggagaaaggatgccttcaaagccatcctgggccgcattccaccctcaggccgcgggttggacaaggttgatctacaccattggctctctgttctcaggtcttcaaactgtaccgctggcattcctccgtcttcagcttgcagaaggcaaatcatggggtatctcagcctccataatcatgtgttatgtgagctagagagtggacacccacagctggatcagcagtgggagaagccacaggagggtccaggagaggatggagcagtagcaggcccggccactacttccaccaatgaagtgtgtgtgagttacaagacggctgttgcttcacttccatcctccaagtctcccaccagaatctctctcatgggccaccttcacgggaaatatacacagaagggaattccaggacaggttgttcagctcagccaagttgacacattacaaggccaccacacctacattgaaccaacagctctggcccctgtgctgtcctattgcccattcagctttgggcagtccctggtgcctcctcatgcagagatgcaactgctttttgcagcttctttttgtgtcttagctctccaagagggaggatttgatgaattccacaccgctggcaaagagcaactgaaatcaccagtgcaacatcctgagaaattgaacttgccacctccttacacctgggggaaaatgtcaaatgtcctctgttacaatatctgaacagcttgtgcaattttatcaatagagaacagtctgcaatcggtttttttctagtttcctttctgttagctatttaagtgaattcattgtgtgatggttcacaataaaacaagaactctaagaacaatgtagtcagttcttcaataaaaactaaattattatacagatgctccttgacgtatgatggggtatacactgatgataaacccatcataagttgaaaatattgggattcgctatagtggtaaatgaaaatgatactgtacagagagtttgctatgtgtaccctgttatctcacccagcattcacaacctgtaaggtatgtatttttacccttgtgtacagcttaggacattgaggct

SEQ ID NO: 472259 - DNA, 556 bp, Homo sapiens
acttatcaaatgcctcaaaatatgtgtatttttgacccaatagttctatttatggagttttatcctaagatcataatttacaatatgccagataacttggatagaagaagggtcaatgtgctgttcttaatacctaaagaatggaaacagatccacatgcccatcaatagggaactgtttagaaatgttacagtaatccacacaaacgaaaactgttggcgacatattgagcagcttctgactcaaaggcaggacaagtcctccaaggaggcgagaatactcatcctgctatgtgactttcatcatggaatgagaatcttgccacatgggtgtcagcactccacagaaatgcctttcctgggttatgcttttatgttttacccttgacttccttctgggtttgaaatgaagagaccttttctaatgggtgcagcacaccaacatggcacatgtatacatatgtaactagcctgcacgttgtgcacatgtaccctaaaacttaaagtataataaaaaaaagacttcaaaaaaaaagaaaaagaaaaacaccttttct

SEQ ID NO: 472260 - DNA, 1250 bp, Homo sapiens
ctctcgtgagggcaacagtgaataatccttaccaatgcaccaccacccccagactggagagtgtgggaagagctgcctgggacgctgtgggtcgaggaacttgctggaatctctgccacggggcccagagctaccccgtgcatgacagagaaggacttaacgagtgaaggaggctggtctcctgcgtgtctttggacctggaaagggagaggaattataaatgactcagggagcacaaagaggggattatggccctggccgtgaaagggagcgagccggctgataatgcactgctgcagcctcggctcattccgctcatgcctttgaagatttccctgcagccagtggcgcaggaacacaaccccgtggacacggaagggcaccaccgcggcccctggcaggcctcacctgtagccgctgcgccctccccgcgggcaccgggctctgcatccaggaggctccaggaggcccaggggcctgtgattccccgcagctcggtccatgttagccgccccaggccctcctcgtgattccaaatagaggggagcgcggtgcccattccttgtttctttctgattgcttaccgcccgggccagttgcacagcatgcggccgaactgcggggtggttaaggagggacagcttatgaaaaagtatgagggcactgaaaaccaggaggttaaaggatttgcccaaggtcacacagctggaaaagcagaagagctagactgggaagggagggaaggagggagggagatagaagaaaggaatgaagagagggagggacagagagagggatggagggagaaggattttactccagatacaacagttggatgcttttggctgcaaaatggcttcccccatggtacccagatgactaccaacagcaatgggggaatgtactcctctgtttacatccagatggagagagtgagagaaagcatggatcaggggtcctgtccttcaggccgattggtcaactcggttcatactcgtgtgcctgtccctaggctaacacagttggtgaagcacacggcacggagcccgtatgtatcccccacacgagaagccagtaggcagtatctcccaggtgaagcacacggcacagaggccatatgcagcagatggtaaatgaccagcccttggggccattcttattatttgttaagccctgctgacatgtgggactaactataccttttaaactttacctgtgttggagagggaggggatgaagtgggaagggga

SEQ ID NO: 472261 - DNA, 625 bp, Homo sapiens
aagttcccttgtttctgactatttagggagagcgctgacaagtgaaatgatctggcctgttgtcatggcaatagcagcccttccgcagacatcgacggagagcccgtatgctgtgctagagactgtgaaaaaacgaagaggcaagccaaggcagacacgaagctcttatcggcacaaccccagattccggtcaagaaaagctcagcaagatcagagaggagttgtaatctctgataaacagatggggagacacggagggctgttgatggtggggcctgggaagagcctaagggattggatttggagaatggaattttctaggccaggtcaggctgcctcacagtgtgttagtccaagaagagcttttatgcgagaccagggatggatcctggcctgggggccaaagtttatagaacgtgtgtctatgtatgtctgtctacacatgtatgaagaactttacacgataagaaatgcaacattgctgagcaccctcccagagcctcagaagaatcctcaagtgagggtccctgaatcttaaacctcatttgctccatgctacctctagctgtgtaccagacacctcatccaaggccaaatgacttcactttgcttggcatggaaaaaa

SEQ ID NO: 472262 - DNA, 614 bp, Homo sapiens
tctgctgatcatacggttcaagcagcagggctgcctgcatcacaacctagacctgacgcagagccctttcttgctctgggccccactcaaagctgacagccttctatgtcacttggaaaatgtatcaaagtcatatttccaaggaggaaaatgctaccttcagaacccaaagaggcttaccaggtgatatgctgtcctcttatgttgggacagcagccgtgggccactgtgtccggccagagttttcctacttaaccttcactactacagtagttatcactccacaaactcacaaaccaagaaatcaatgtggggttctgccaaagaccaagtatatccattccgatgattcactgagactaagaaaattaccatttggtattaatgtgaacacagaccttgcatccaacaatcctgaacatgtccgagtatccctcttccccaaccagatgattacctcagacccaggttatccttcagttaatggattccaggtctgaaaactggcgcacatgtagaaactaataagggatcatgatgttttaatgggatggccgcccttggcctcttgatcactcattcttaatttcttttgaggtacagattgagcaata

SEQ ID NO: 472263 - DNA, 2202 bp, Homo sapiens
acagcttcgacacgtgcagggttatccaggagcagtgaggtttgggtccacatggtggaacagggctgccaactgcttctgcatttacatgccttcattttcagacacccagagagagactgacttcttttgtcagttgcagttcccaaatcctggggggagggctatgattggcccgtttggatcaggtgcccacctcttgaccaatggtcggtgccaaggcgccttgaaagggaacctgaagggcttgctgagtttactgccggctgcgatgtgttcgttcactggtttattcctgcatctatgcatccactccctcaacaaacacttcgagtgggcgaggcattgtctcgcaccgcgaacactgagctgaacggaaatgtggttctcacctcatgaagtttactaattctaccaggcaacccgccctctctgagctcatgaattttctggttgcactgatttaatggcttcactctctggctttgacacccccacagaagcgtgaagtccctcagattccacggcggtggggctgggagagcccaggtccggtgcgggccagagatccctgcgcgtcggcacgtgagcagcccctctgcggtctcccgtcctcacggagaggctattacagcagaagctccctcggccccctccccaccccctcgtagttgaggaggaagtgagaaagggcttggcttggtgcctggcacacagcaaccctccgtaaaaatgccagctattactattgctattgttgctattattctcacgacttctccatcttctgcaccacccacaggctgctttgctgtgaacacggggatgtggagaagagtgaatgagctagtgggatgggagcgactgagtgtgaaggttagggagggaaataaaacagcccacagccctgctgcactcagcaccttctccctgcctgcaaagtccttcctggcatctctggaaatcctgactgccccacgagtctcccacctcctcccctgtttctgcaccgccactgggattggtacttgcaacttgaatggctcttctcgtgtgctgccttctccagggcccactcatgcctgtggcttaactgcttgtccggcaggagtaagtgcttcagaaatactgagctcagtgaacctgctaaacacaggcaccccggtgagactctgccggatgatgacaaatcgtgttcacattaaccttgtgccctgaaggttgcctttggtgggaagaggcagagaagacactctatatcccaccaatttccttgaagtatcatcattccccaaacacatgagtgtgttcctagaccacagggtagcctgtaccaagtggtgatgggaaaatagttcttggatcatttcatctggcccctttggtttcatctgactttggttgtgtggtcttcctaagaaaggcaagtctagtttccaagacactagacctctttattatttctaggacatcaaggccatacatattccttgttactctaccagtcttgaaaaaaaatgaccctcctggaaattccagaaagccaagaaaccagaatattcctgttctgatgtaacttctaaacaattcataatatcaaattaagaaagacagctttttttgttcctttcttcctttcttttttttagtggaaaaagccccaacaaaatatccaagaatgtgggtttagagccatgtgatcttatccagagcacttgactacttggagtctccatttcctcttgtgtaaaacgaagataataattctgtcttggcttccttatggggacgctttcaagatgaataggataatgcatgtatctcccatagccctgcagccttatgcttcatcctgtcagtgcaatctttttaggcagggcccttggtagacacaaaagacatgtattgataaacattggcaaagggtcacaaaagggaaatactaggaaaatatggaataacagctctccctgggggcagatcagttggtagctgttacgaggtggatttcattctaagactggcaatggggaccatttggcaggaagaatgggaatgtaaagcacagaggggagaattccggggcctacacccgtccactcctccttcctcctcttacagagatgcctggtcccaggaacccaccctctcctgtcttattgtgtcataggaccctgcactatgcttgctacctctgtattc

SEQ ID NO: 472264 - DNA, 567 bp, Homo sapiens
aattactgccatcactacagggatatgaagtcagaggaggaagctaccagtggaggggctgcagttgttttattagcaacagctggtggcagtcccctgcctgaaccacccccccttctttttaaaaatgctatgcttgtcagatccagcttcttgagactggatggcaaaggatcatcaggaagtttgttgcgaagaaagcgcagacccctgctgttggctgccatgaaaaaagcagaatctggaacagtgccttcaacagaatacattaaactgaatgctcctaaacctattcaattcagccaagctggtggagatgcagacttgataccttaccatgaactcatcattaatccatccgctggctccctattgctaatcccttataggcaagactttgagactgtcccttcaagattcagagggtcatttctggccctctcctccactttttctacacactgatactctttcctattattcataaagcgatagatcataaacatgctcttaagcaagagtgctaatcaaccaagcagcactgccggtgagttggttcatattttg

SEQ ID NO: 472265 - DNA, 660 bp, Homo sapiens
tgctgtgaagatggaacccacgttatggtttaaaggacaatctatgtgcttaaaacattccagaaatgccataattaagctgttaaaaggatatcatatggagaatgacttatatgtgagaatgtataacatgggcttcatgggcagaagacatcaaaaaggtggggcttttgaatgggtggatggatggggtaagtggacaatgatggaggatggatgggtggataaatggatggatggatggattgatggctggatgcatggatggcagcagaatgctttgggaagaggtcgtgagcggcgtggaggaggaagtcgatctgaaatgcttgaggaggtggagaagaaaagccagagagagcggagagaccttgggaagagacggctggagaagccagacgtgagaatccagcgccccgctgccacctcggccacacggaggcatttcgcggagcctcggttccctcattagaaaaaccgaggggttgaactgcttcgtttttgaagttccttccagctctaaaatgtcttagttgtatgcaagccaaaataaacaaaaaatggtatcactttatgcatatgctcttctaaatatcccagtgggaaagcacgaagcctgtgtttccagctcgctgcttcagagatgccagttcacaagtc

SEQ ID NO: 472266 - DNA, 588 bp, Homo sapiens
gacaagtgggctgtggacgggacaaatggccacaggctatgagcgtaggcagtggaggagaccgtggcacagatgtcactggccattgggatcccacctgtatccagcctctgacctcagacaaaccgcctgctgacctcagcctttttttccccaaaatcatttatgtcagtgcctgtttgcaccagagcccaaaggagaaatcccctttctttaccccaaacctcttgagcttctggaaggcaagagcgcagcttactccatgcaaagccagtgccatgctcacgcgggcattgattaatgccgccaacactgtctgttctgttgtgatttctcttcctcaccaatctgccattcatgctcatattcatctgctttccctctttgaatttcagggcttagaggaaatctggaataaggtggttcttgggtcctgggaagtcaaactctgtgctgtctcatcctatcctccctggcttggagggcaggttcagtgtggaattgcctggaggccaaagatggactgggaccgtgcttctcaagcactaacggccacttccaccactcagggagcttagaagctcagac

SEQ ID NO: 472267 - DNA, 549 bp, Homo sapiens
aaggacaccagtcattggattaagaccacccgaattcagtatggcctcatcacaacttgattacatctgcacagaccttatttccaaacaagaaggtttcatctctcccaaatcttttcacaaaccttgcttataccccaatccaacccctgtcttcaacttgccccagcgtgaggtattggatcccagggcaacgtgcttccagagacccctcagtcagtgttacacccgatttaagccagaaagcatgagcactggagacaccgtctccaaatgcaatggatgcttttacaaagaggatcctcagaatggagaacactccatagagctaccagtggaagacacgcattcccctttctcatctagatctgggttcgtgtctcacaaccaggaaaaattagacacacagacatcaaagaagcaccttgctgtatccatcaaaacctggtggcagattaactgagtgtgaatgatctatctcagatagaatttgagcttcaaactagaagcaaaagcaagaaataaattgctaaactgtggaaagcattc

SEQ ID NO: 472268 - DNA, 582 bp, Homo sapiens
aataggctctggcaccatctacctcttcaactggctttaatcctcctctttcaatcatcacttcctggaggaagctttccctgagaacaggatgcaaacaactgctgctctctttctagactacagctccagactgcacactggaagcactaacataataattccagagcctggtagagtgacccagtgctctcttacacttcgatgctgccaaacatccacaaagcaggacctaactctacacaacaaagggataagtacagaagggaagtggatagagccctcctatggaagtggtgtagctctggcagaaagtgacaggttccccggatgtactaagacaaatacaatccagagagtggaagataaaccctataaagattcagagacctcccacattcatgagtttttggggatccagtggtctggggcatgccaggatattttctcttccaagataaagaatgagtactacatcttgcacctcctaccactaagaaagaagtacaattcttgggaagctttttcggatagtcaagtagcatatacccaacttgagaatactactccagctcactgatt

SEQ ID NO: 472269 - DNA, 659 bp, Homo sapiens
gaggcaaggctccagatgtgtcctgattggaggctcttgacatggggaagctgcaggagggcttagcagaagctgaatattctattttcctgctgaaacatggtgacaccaagaaagctgaagcccccaaactgacagagggtcccagtactggagtgactgtgtcagcagcctatgggtggagccacaccccagtgttgctggaagtgggcactgcatttgcctttggaaagaacaagatgcagaaggtggggcttggtcgtcagacagatgcagttcctagccctgcgcagaagatcatctggggccggtccctgatctttggtgaactgggcagaggggactcacaagcccacatctcccactgtggcccaagacacgaagacgctgcatggtgtcttctcagagcaggctgccatgggttactcccgctccttggtgatgaaaatccgtaagtggctgtcttagtccatttggcggctatcacaaaatatcataaactggaaagtttatagagaacagatatttatttctcacccttctggaggtggggaagtccaaaatcaaattgctggcagattgggtgtctgatttaagtttttggattaagtttcaaaaaacacagaaaagtacaaataataatataatgaatactgtgt

SEQ ID NO: 472270 - DNA, 537 bp, Homo sapiens
agtcccagtgcatggtagccccatgcagtgttcccagctgcctcccgcttcagcccagcttctgtgtcttccccgtgcccccagttcattctcagtgccttccctctgaaggtcttttaggagtgcgccagtcaacccagtcccttggtggcagctcttccacctggctgtgtctagttggccatcttgccctctctccctacttatttgtttgttctttcaacaaacacttattgaacaatgtcaggcagtgtaattataccctaccctccaaagctcttgcaaaggctcaggaatcaccaagatcaggtgcctctggaaatgaggtcgaggtgaaggttgaagcattggttgatggaggtgcacagtcagagaacaaaagccacaccctcattcttcacagcagcaagtcaatagataatgccaaaaactgactagtcatgatttattcagagatacagaggtataggatgagccccaaacatgtaaaatatgatgaagcgtgtgtacttgacaagtgtattggttataaacaac

SEQ ID NO: 472271 - DNA, 559 bp, Homo sapiens
agaaacttgctcacatattgtgatgatctctaagattttggtgcgcccatcacctgagcagtgtacactgtatccaacgtgtaatcttttatctctcacccccaccctttcctctgagtcctcaaagttcatcatatcattcttatgcctttacatcctcacagctaagctcccacttatgaatctagccacccagcagagctattggtttccgggctggtactggcggctgtctgcacagttctgtgatgtcaaccatcttcattcaggtctctcagccatggatagcagcagctgctccagtagaggtggcaggggagtgaaatggactcttgtttctggcaaacctccccaaggacctctgcaagacaaagtcagaaatggcttccctaaggacagagagagcccacagggctcttcctgctgcttcctctacccctgaattttgcttggctctcaaaatttgtctcaggtccagatgacagctttggaaaccaaaacagaaaaccaacacaacaaaacaacaatgacattctaaaggcactacctagtgacaatg

SEQ ID NO: 472272 - DNA, 597 bp, Homo sapiens
acgacaacaggaatttaaaggagtgtttatgccacattctgcatgtgtctgagatactcatctccactcctggcaagctgccttcctcctcccatcttctccctgaccccagtgcacaaagaccaaagctcaaaccaaatatccgactccattaaacttagtcaacatatgtgctctaagtctgacaatcagtgtactcacagggatggcctttggtccaacaaacaacttaaaacaccagatccacttcccgttgaccacggagatattgagaatatcttggaagtcatcgagccacatgcagtcagagacatgcagatcaaattgatggtatccatccttcaatcacagcccatgggtgataagaacaatacagcctggaatttatggagcagtcttggaatgaacaaggcctttaaacaagaaagttacatagaaaaagtttgataaatttgactacgtaaagaaatcttaaaaaaaaattatgactttaattatgtcgaaagccaaactacaaacttaggagaaaatatttgttgccaatgtgacagccaacaaatattcttttttctaaaaaaaaaaaaaaaaaaaaaaaaa

SEQ ID NO: 472273 - DNA, 1729 bp, Homo sapiens
gaccagcgctggaggaaatgcgaaggcagattcgttcttctacaacttccatgactttggtgaccaagtctctcaaatgtctgcgtccacactatggcaaactgaaggaaatgtatgagaacatggcccctggggagaatgagcattttgctgctgacatcatctctgttttggccatgaccatgagtggggagtgcgagtgcctcaagtatcggctagtaggctcccagaaggaattggcatcatggagtcatgagtatatcaggcacctggcaggagaagtggctaaggagtggcaggagctggatgatgcaaagaaggtccagcaggagccactgctcactctggtgaaggaaatcgtcccctacaacatggtccacgacgcagagcatgaggcctgtgaccttatggaaattgagcaggtggacatgctggagaaggacattgatgagaatgcatacacaaaggtctgcctttatctcaccagttgtgtgaattatgtgtctgagcctgagaactcagtcctactgcgttgtgccctggctctgagattggcactgatgcgcaatgacatggagctggtagaagacatcttcacatcctgcgaggatgtggtagtacagaaacagatggcattcatgctaggctggcatggggtgttcctggagctgagtgaagatgtcaaggagtatgagcacctgacagagatcatgtccaatgtacagctcaacagcaacttcttggccttagctcgggagctggacatcatggagcccaaggtgcctgatgacatctacaaaacccacctagagaacaacaggtttgggggcagtggctctcaggtggactctgcccgcatgaacctggcctcctcttttgcaggctctgggaatgtgctgaaggtgcagcagctgctccacgtttgcagcgaacactttgactccaaagagaaggaggaagacaaaggcaagaaggaaaagaaggacaaggacaaaaaggaaacccctgctgacatgggagcacatcagggagtggctgttctggggattgcccttattgctgtgggggagattgaagtttcctataactccatttttgccatgggcatggtgggcagtggtaccaataatgcccgtctggctgcaatgttgcgccagttagctcaatatcatgccaaggaccccaacgacctcttcatggtgcacttggcacagggcctgacacatttagggaagggtacacttaccctctgcccctaccacagtgactggcagcttatgagtccagtggccatggctgggctgctcaccgtgcctctctctttcctggatgttcgaaacattattctaggcaaatcacactatgtattgtatgggctggtggctgccatgcggccccgaatgctggttacgtttgatgaggagctgaggccattgccagtgtctgtccatgtaggccaggcagtggatgtggtgggccaggctggcaagcctaagaccatcacagggttccagacacatacaaccccagtgtcgttggcccacggggaacgggcagaattggccactgaggagtttcttcctgttacccccattctggaaagttttgttatccttcggaagaaccccaattatgatctctaagtgaccaccaggggctctgaactgcagctgatgtatcagtgggccatgcatcctgctgccaagggtggacacagctgcagacttcc

SEQ ID NO: 472274 - DNA, 993 bp, Homo sapiens
gccagaccaattcttgtgctccatcggcttgcttctgttctcccccgcacacattcctgccgtctggaaggacccgaagcaaacgctgccctgcacgcacttccgaaagcgacatatctccctgcaggatcagtgacagggagacagctggccggcctcagaacgagctccgccccataaggactgcacggctgtcctgttagaaaagcaacggtgaggggctcctccccagctggtgcctttgtggggactttctcatcaagagtcattacaccgccagcgtggtggagtgacatatccatggggatttggggagaaataaaggagatccgtggcatggtttggatagaggaaataagagaaatgggacccaaaagccctttggtacccacgatgggactgaatggtggcactggaaaggagatgggaaaggcactgggaggagatgggaagagcagcattggcgagagggtcaagatggagtgggcaaagctcctggaactgcttcttggtgctggcggccttggtgaccttgagcacatcgaagcgcaccgtcttgctcaggggctggcactcgcccactgtgacgatgtcactgatctggacgtccctgaagcagggggacagttgtacggacatgttcttgtggcccttcttgaagcggttgtacttgcagatgtagtgcagtctcggcagatgacaatgatcctctgcatcttcgtcttggtcaccacgccagagaggacccaccctcgaatggagacattcccagtgaaggggcatttcttgtcaatgtgggcgccctcaatagcctcttgaagcccagactgatgttcttgtagtacaacggggacttctcctgccagtgtctcccagcaggaccctcttcttgttttgaaaggtgtctctttttattattatgaaataattctggcatataaaaagtatggagaacagtacaattagtaagcatgttcccataacctacattac

SEQ ID NO: 472275 - DNA, 651 bp, Homo sapiens
ctcggaggcggccatgacaggtcacgacaacgacacttgccaagagtcctacgatgctactcagcaatttctctccctgcttaccagaaaggaagaaagaaattccagaaaacaaattaagaaagaaaatgtgggtggaggacggatgacttactggtatctcctccacccatcctgtctcctgtccctactccgatcaccagtgagacgcctgaggtgtgggaggggctgtcaacaaaagcccagagaaagttctctgcttttcacggtccatttgcgtagatcaggcccaccggaaaaccttcctctcttaagaaccacagcaaagtctcttgcccctgtttacccctcgctccctctgtgtcccgacagaccccagtccttccccatgtggccctgtctggcctgctgtagcccctgtttccagggatctgtaagtacaaataacatcttccctcatgacagtcgtttccatgtctgcgtgccttaccatacctgattcagacacatttcaggtatccctgaaacacctttaatgaagtacctaatttatgcatatggctttgaaaatcactgggcagtaggaaggattgagaacaccagtataaataagactcaagcttggctgtcaactttttcagcattctggtc

SEQ ID NO: 472276 - DNA, 551 bp, Homo sapiens
ggccatttctgctcatacgagttattcaaagaatgaacaagagtgaatcatgcagggagaacagaggtgtctggtcatatttcaaaatggcccctcttcttgccctgccagaactaggagaggacttcttttcagatcatcaccgcaagaacctggcagagctcctggagataaacctcacagaagtaattttggcactctactcaagtttgtggtcctttcactctgaatcacaagcatgtgggggtgattccctgattgaggacaggggcatcttagctactttttgtgtatgttcattagggataagggactcacaagtgactaaagagacttacattgtgatatcatcttatatttctcatgaatccaatagaatctacgatacagataaggaaaccaaggttctgagaggttgtaagggccataacctggacttagagacttaaggctatttctatcaagtttgcattgatcaaatattcgtgctacaaatatcagctgtggtattggtattctgagggcagttatgagggaaaacgtttacactt

SEQ ID NO: 472277 - DNA, 599 bp, Homo sapiens
cagttgatactctgtaggatggatggaatcagctggaactgtcaacagattgctgcctcttcagcctggtgttctccacgtagccagacatcatccgtggtggctggtgttccccagcaagcatctcaagagaaccaggaggaaactgcaaggctttttctggcctggcactaaaggtcacacaaccttggaagctgcttctcagtgttttcctattgatgaggaggaggaggaggaagaagaagaggaggagaaggacaatgaatcacctagtttggcttcccttataaaatacaaagtagcagattccctgagagctgattccccaagggcttggagaatgagtgcttcagttgtgaaggtggatctgggcagtgccccacagtgtccactagagcagaagctgaaaacagagttcttccctaaagaccagaaaacgtatggccctgcttagccttggatttcagacttctatgttccagaactgtgcaagaataagtttctgtgggcttaaaccaccatatttgcagtcatttgttatggcagacttcggaaatgaataataagaagacaaagtggtatttattgaaatctccatc

SEQ ID NO: 472278 - DNA, 660 bp, Homo sapiens
gaaactgtggatagtgttgagccctatatatatatattctgttttctcctacacatatgtacctgaacagcaccaagggggaaggtgttaaaccattcaggagaaactgcccccatgattggataatcatcttccaccaggccctacctccaacgttggagattacaattcgacatgagatttgggcagggacacagatccaaaacatatcagacctaaaagcagtcatggagaccactaacaagcgcaaagcccctgagatgtgcgttcagggtgttcacaaaagagcaaagaggccgatgtggctggaagataaagcacagagtccatttgggaatctacggcaacaatatgtgcaagggaagatggtgaccaggaccaagatggtgaccaggaccgtgtggaagggcagggtgtggaggtcagaatcaggacttgagtttggagcacattatgcttttcatgtttattacacatcaaagtggagatttctagttggaaattagagagatagcctgtctttgggggtctttttcaatctctctatgtgcaatttacatagaatagcactaactgttctttgtagcgttttgatgaagacttttattttaacagtttctaaagctcattagtaaattaaaatgttaattctaataaaat

SEQ ID NO: 472279 - DNA, 1109 bp, Homo sapiens
gccattggagcgcactccttgacctcctcttccacttcaccaggctcgattatagtaggggtgtctgacacagacaggggatctgggagctctgggagacaacatagagacacttgccaatgagaggtgacagcgtgctggcagtccgcacagccctcgctcgctctcggcgcctcctctgcctgggctcccactttggcggcacttgaggggcccttcagcccaccgctgctctgtgggagcccctttctgggctggccaaggccggagccggctccctcagcttacagggaggtgtggagggagaggcgcgagcgggaaccggggctgcgcgcggcgcttgcgggccagctggagttccgggtgggcgtgggcttggcggccccgcactcagagcagctggccggccctgtcggccccaggcaatgagggcttagcacccgggccggcggctgcggaggatgtactgggtcccccagcagtgccggcccaccggcgctgtgctctatttctcgccgggccttagctgccttcccgcggggcagggctcgggacctgcagcccgccatgcctcagccttccccgacctccgtgggctcctgtgcagcccaagcctccccgaggagcgccgccccctgctccacggcgcccagtcccatcaccacccaagggctgaggagtgcggacgcacgccgcgggactggcaggcagctccacctgcagccccggtgcgggatccactgggtgaagccagctgggctcctgagtctgctgtaacactcactgtgaaggtccgcagcttccctcctgagccagcgagaccaggaacccaccagaaggaagaaactcagaacacatcccaacatcagaaggaacaaactccagacgcgccaccttaagagctgtaacactcaccgcgaggtgaatcttctgctgtggctattaaagtttactatgaaaaagaagcagaaagacatgctcctgtgcctgaacactgaagaggattgcaaaggccaaaggcaggaagaagttcaggggataggatggagaatgagcatagcaagttgctcctgaacttagtcctgtaataagtctgcagggcagaaggt

SEQ ID NO: 472280 - DNA, 994 bp, Homo sapiens
cccagggatgatcagctaaacatgatcaatgaggaacaaaaacataaagaaaccaacaacagcaatgctccgaaccccagtaaagaagggagtgaagggccagatgaggacattttacctctaacccttgaaaagaaggaaaacaaaggatacctaaaatctctgtttgaaatcttgattctgatgggaaagcaaaacatacctcttgatggacaggaggctgatgaaatcccagaaggtctctttactccagataacctaacctctgagagttactataaagaaatcctaagtgtcccaacagtggagcacattattcaggaacttaaagatataatcgcagaacagcacctccaagctcgtaaatgcttatctctggtaccctcagtcatgggacaactcaaattcaatacatcggaggaacaccatgctgacatgtatagaaatgacttacccaatcccgacatgctctcagccgagcttcattgttggagaatcaaatggaaatggggaaagacacagagcttctgtccaccatttatgaagccctccatctgcctgacatcaagttttttcctaatgtgtatgctaaatgacctattgccaaaggtcctgtgtatttctcctgtgatgaaggttgagaatgagcagtatgaaaatggacgaaagcatcttaaagcatacttgaggaacactttgacagaccaaaggtcaagtaacttggcttagattaacataaattttgatataaaacatgacctggatttattggtggacacatatattaaactctgtaacagaccttaatcatttcacatttattgggaaataaagctgagcatgtttgatatattttaaagatgaatatcatcttcctccagtattggttgaaaggatgaagataatgtaaatcatcaagcacagtgcttgatacataatggataaagcaatgtttatcttacctgcttcctttctttttctccaaaaggtcatc

SEQ ID NO: 472281 - DNA, 617 bp, Homo sapiens
taaaaataaatctatccataaaaataaccactagatgtgggaaaatggagttggcccccctggggcaagaaggaggacactgcctctggcatcagaagttcatagtctgcctgttctgctcagctctgagcaaaaacaaggcttggtccctgctgtgactactgtgaagagatactctggaagtatcagaggtcaagtatcttatactctggaagtatcaggggtcaagttccctgccccatggaagaagcctgcaataaaaaagaatacagctcgcatgcaagagaggcagacgagaaagctaaggaaagcctctaatctggttgtggagatatataaagcagataacaacagaataaagtatatgctgaagtctaaaactttgttccaggtgaaaaacccagtgaaagtttagcgaaggaaagctgaagatgggctggaagctttgcagaaggcttcttagagttgtgactagaacatcaaaggcatctgtgcatactgttaaatgaaggagtgcagaatttgacatgagaaaacccgaaacgggagggtataacaaattaatgccatttaaaaatagtttttggttaatggttgggctcaatagagctgaggaa

SEQ ID NO: 472282 - DNA, 1025 bp, Homo sapiens
tgtaaacatcccctccaccaagggaaaaacagcatggctgacagtggggaatctcatcagtgcagcaaggggatggaagcagcctcttgtacacattggtctccctgttccgtgtttcttctaaggctgagcagaaacatcttgaaagggcagttgctactgatccatgcttcatccgatgcctaccccactgtggagagcatcagggatgaggcctttcatggcgaattctactccaagcagaacgtagatcatgccttcctcatgagctttgccacaaagttctctgattacttcctgttaatagaggacaatgtcttttttgcccccaactttgtcacccacattcattcaagggtgaccaccatgaagtccaactcgtgggtgctaatggagttctccaatatgggcttccttggcaaactcttccacagcagggacctcccactcctggcccatttcctccttctcttctacaaggagaaaccccttgacagcctgatttctcatttccatacgctcctggtccaggaaagcccaatcctctgcagacctttcctattctactgcagggtctcctacactgcctttgatcacaagcagaaggccacagcacttcagaaaaagaatgccgatggtcccaacaacccgcctggagctgtcttcactgatatgcaggtttccgatgtgcatttcccctgggaggcctacactctggatgagtcattcttttggacacacaacattagtataggaaaccacctgacagtgattctgaaccatccagcaaacctgagcagggtgcaagtgatgacgggctccattgtggaatgggagctttagaagtcagtttggtgttttgggaagatcaaagttaggtactaggatgaacattcttttcctagctctgctattactgtctgtgtgatttttggctaattaacctttctgagtctcaatttctccatctgaaaaatggtaacactaataccactcatttcacagggctgatgttctatgatttg

SEQ ID NO: 472283 - DNA, 1021 bp, Homo sapiens
tttccttgcctccccagagatccttgaataaaaatggtgctctagacccatcatgcttctctggggttttatgaacttctagctgtcccaacttgagttgcacagttttaggctattcttcttggctgggaaatatacagaaagattctcccgggcttctcacagctgctgccaatccctcaccatccatgcttctcttgttgccaaggatccctcctcaccaatggcggaaagaggtggcccctgaggcgctcagcatttgccctgagacctgcattacaacccatacttgtctgaaagagtcagctctccccacctgggaatgcgagttgaaaaagagctctcccagaaagcctcaactccaacagatctgctcctggggtctccatgtgacatccagcttcccgctggatcgtgccattgagtttggtacagccgtcagctgccaggagcttctcatgaagcctcagtacctcccaggcctgggaaaaatgcaaggagacacgaaggagccatcgtctaaggcccatggcatccgggaattgagtgggcttggccaccaggtcgagggaaccttgagtgctgctggcagggcctctggcagttcgtgtggtaactgcagcgccaacccagggcaaaagagcccagtggcatgcactcacttcctctttcagctttgcaattcaaaggggtcacctggttcaatttatctaggttcattagggtctgtgacctcagaatcaacaaggcagctgatccagagaaatgctctgaccttaaaaggaatattggaggcaggaggaaacagaggaagcaagaagaatttcctggaaggtaattattgtaatataagcatacttcggagatattgcaggttccgttccagaccactgcaacagtgaatatctcaatcaagacccacagcttttttctaaccaaaagaataaatcgctgctgtgattgttttatgtaagagtgcaatttccatcttgccagtagactctctcccttgctgcctttg

SEQ ID NO: 472284 - DNA, 959 bp, Homo sapiens
aaggttactaaaggcttgctgtgtgccaggcactgtgctaatgctaacagcatgtgcaagtcagccatttttagatcctccatcagctcggccaacaaggaagggctggcactgaaggtggtcctgtccatgccaagggcagccttctgctgctgggcctcttcccgctgcttctccagctggagccagagctttgggcacaaccccaggccctctagatgccctggatctccaagtgccaatgcagggcctcgcttgcctgtgggtacagtcactctcaatgaatcattttgctgtctccataaagtcacaggtgaacaaaggcctttagatagtgtagggagagacaccagatccaaccggacacaactaaatgacatgcaacatttcattaccctgagtgggcagtccatgctaaaaccccagagtacaccagcaggaagtggaaatgggcagtcctgctgtttccaggttctggtgggcacctttccacatcctaaaccaaaatatgtgacatggactgtctggatttgttctgaagaggtgcttgatggagatacctcttactggtatcttacccctctgaatccacttcaccagatgcatgacatagcctgctatcttgttgtggagcttctcgctggggataatggcgatctcctcgcacacgcgcttatccgtgtggaagtcattgcccaggcgcgtgtagtacttttctgtgacgacctgggccgccttcttcacgaataatcttccattacatgaatataccatattttgtttatccactgggcttgtagaatttaaaacagcatcacttttagtacctaaagcatagtcaatttctgtcacgtaattaagataattatgtctttttaaaaataataataatttaggtatcttagcaaatgaagagaaaaaggaagagaagatatttaggaaaaacataggaaatttct

SEQ ID NO: 472285 - DNA, 660 bp, Homo sapiens
tctccaggatttaggagaggcaggaggaaagtctctgccagccatggttttcccttctcattgtgaagaactttcagtgtctctgattttgcctgtgtcccacctctcctctcctcaccctctcccaccaaacaatacaaatctccctcaaaacttaggagtacaaaaccttgcttgccttttggaaaaaaggagagaaaatactgagagcacaatacagatggctcttttttttttcttttggataattccacagcagagtctgctgcatggcaggggctgtagcaagccctttaccgatgaggaagtttggtctcttcagccccttcccttggagtatctgacccttaatccgcatctcactgtggggtcacaaccatcaacaagcctgggcacagtcaggatcagaatccaggtctttggactcaacccatggactgatgtttacaccacaatccctccttcaaatgcatgacgtgattttaaaaaaaaaggcaatggcagtaagaacagaaagtggttagggttggcaaacgcaaattattctttgcaggactatttcatgtactgcaagatgtctggtatcctgggccgcacccaataaatgcctggggtgtcctctaatcattgtgacaaacccaaaatgcctttcaaaatgtc

SEQ ID NO: 472286 - DNA, 646 bp, Homo sapiens
tttttctaaaagtttctgtaaaagtttcagcttctcttcattcagtatgatgttagctgtgggtttgtcatatatggcctttattgtattgagaggccagctgcctctatgctgccctattcgacttccaatcagccagctgcctctacactgccctattcgacttccaatcagccagctgcgtctacactgccctattcgacttccaatcagccagctgcctctacactgccctattcgtcttccaatcagccagctgcgtctacactgccctattcgacttccaatcagccagctgcctctacactgccctattcgacttccaatcagccagctgcgtctacactgccctattcgacttccaatcagccagctgcctctacactgccctattcgacttccaatcagccagctgcgtctacactgccctattcgacttccaatcagccagctgcgtctacactgccctgttcaacttccatttctagcaccatagtagttgccaaaaaatgtttgttgaacacataaattttttataataactcattaataaccgactggttagttggttgttctcagcactgaatcttgaccaacttgaatagtagatggttgaatatggtggctctaacatccttttcccaat

SEQ ID NO: 472287 - DNA, 681 bp, Homo sapiens
actgaaataaaactggcgtctgggaaacccggaggccagagcaactggtcaggcccaggggagaatatcgtattgggggaggagcgcaggaaaagtcacccaaaagccatgggaaaggttgtggaaatggggagtgctggtcccacccctttcagccaagcgcgtgacccagaactctgcacaatcacccacgcccacggcaaagcagatgaggctctagagcttgcaagtctttatctagggaactgcgtcatcctcctcggtcggacaccaggtggcagcaaagctccaactcatcagtcaccccaccctccgtccaggccgtcttctgacgcagaacttaaaaaagatactgcagattttccttctaaggaaggagctacccatacaaaactagcagctttagagagagccatagctaaaactgaaactcgaagaaggtttcctgaagaaggaggggtgtcaggcaattttttaaataccagaaagctgagcctaagatgcacttatgaggaatgggtgagtggaaaaggctccatcatcttgggagcttggcagacctaatttgaaacattgtctctgcatatctgagctgagatacttgacaaaatttttaaagcttattgagccttaactacctcatgtgtaggatgaggccccataatccttagtttgcagtgc

SEQ ID NO: 472288 - DNA, 1490 bp, Homo sapiens
agccggaatctcagaaagactgactgactgactctgacaggatccggggctgaaggaaggaggcggtgaccatggagttaggtgagctgctctacaacaagtctgagtatatcaagacggcatctgggaacaaagtcagtctccagtcagtgttgtgtggaagccagaacatacttctcaatcgcaagaccatgccaccattcaagaaattcagcaaaggtgttgaattctttcctttacatattggggaccatgtctttattgaggaagagtgtgtggtcaacgcagctcagattggttcttgcattcatgttggcaagaactgcgtgattgggtgccggtgtttgttgaaagactgctgcaaaattcttgacaacacagcattacctccagaaactgtggtcccaccattcactgtcttctcaggctgcccaggatgcttctcaggagagctcgtggagtgcactcaggagctgacgattgatgtcaccaagagctattatcagaagtttttgcccctgacacaaaatttactaacagatggaccatctggaggagttgtcttcaaatgctgtgcttacaccttatctgtgaccagtcactttgtaccattatccgtggaacacagaatcatctgttcccaacgctccagccccttggtcttgtgcatggctggatcccaccggaaacgggcctgcacagcagcagcaccctcctggtgtggaggttatgtagctggtgagctgctcacagccatacactgcccatgccgagcacctcccacacaggaacagtccgtcaccacaaattacttttataaccctagagaagaaagtctccttgtcctcagaatacttcctgaagaacaaccagatgggaaggaccttgattgggactctttccagtgggcttggggcagagggaatttaatggctcacatagctgaaaaggcagggctagattgggctttgggctgcatcccagaactccaaacagggatctgtctcttcggctctcagctctgctttcctttgagttggctttattctcgggctccatggtgtggccccacagcaccagttattggtaaaaagagctcccatttgctgacagaactgctggatttagttctcattggtccacacgaggaaggtatccagcctcaagtcatcactgtggccaaaagatggaatacactgagtggacaggcctggcatgtgtatccacagagactgagagttggtgctgatggtatggtggtggatgagattaccagaagaagggacaaatgggtgctgggcaggaaaaagcatcagctgcccagtttaggcctctcctctttccctggcgtcttcacttttcctccctatccctgctgttccttaccctctgcccagtctctcagtactcctggtcttgggaaggtgccttctgaggatgctcctggcacgggtacctgagcctggattagagggcagggggaggatgtc

SEQ ID NO: 472289 - DNA, 731 bp, Homo sapiens
acactatagaactctctggcactatgggcacttgcacatcccttaccttatttgatcctcctaagagccttgtaagggaaaacagcagggaagtaggggatgaaaggatggtatcacgtcatatagcccacagtcttccatcaagtcactcttggtcccttttttctctcttagcacccctccttttcaaagcaaaatgcattgtactctttatctcacccttacaattagaagagcaagtgttattgcttgcacatgccctggaatctcacaattcaactcaagcaatttatcaaagtatttcttccaaacaaataaatatagcatcttctccaaaaggaatcagtctgaatatttttcttcacctcattgtacccatatttgggattgatactgggacagagtctaagtgcacattggaagagttctcagtggagagtgatgaactcaatcacgtgcactcagcctcatgtaaatttgctttacttccatctacttccccttttcaggtattagcatgaaagagaggaccaaaaaaagggaaatttttccatgtcatttcgtatggtaagttaggaagtagaatattttgtgacagaacatgtttcttttaggcaaatatgctggacttgagcaacgtggttttcagccctcctgaacatgaagcgaggaggcatcctgcatcattcatccagcccccttaaattaaagccctccccatagaaagtctt

SEQ ID NO: 472290 - DNA, 681 bp, Homo sapiens
gcaactgggggtgtggcatcaaagcacaactggggctgacttggttttgttagtataaacaaccacgtccggagagccatgtgtctagggaaggctggtccccgggccagcccagggatggaggttgagggagttgacaatgatgttccaagccaatcaaagtggatgcagaaggaattaagagaaaccctgtccttcctgcccatgggaaagacttccctccctgaagcccaggcaagtgaagaaggctgtccaaggattgtaaagattggggatttgggcatgaagggaaactattggcatttcattcttcagctagtttctgcttttgaagctgactctatgacctgtgcttgtaccacacgaataaggaaaacagcattggaaaaaagatggtatgtgggacagtctgcccaagaaggatgccaagatgggctcttcaagttctcagttctagggaagcatggagagatgtactacacatgctcatactcctggccatcactgtggcagacagatgagattgggcaacctaaatatgttgataggctttggggtgtgtattagtccattttcatgctgcttataaagacatacccaagactgtgaagaaaaataagtttaatgaacttacagttccatatggctggggaggcctcacaatcaaggtggaaagcaaaa

SEQ ID NO: 472291 - DNA, 1040 bp, Homo sapiens
ttggattgttgctgtgtctgtgtggaaagagaatcccagcccgagttatgtttcaacaatgtgaagcaacgcaagaactggagaacagagaaaaaatagaaactattaagttttctgcagcagcaataggcagttgtatgcattgtgtggacttgcataactgtagatgtgacactgtccagaagcttccaggtatccttctgccaccaatcataccccttggtgttgtagcagctaagaaggatgaagctgcctccaaaaggctgcccaagagcaaagagcccctgctgtatcacagatgcacatcatgcatatcatgtacatgttctccagtgacgagaattcccactcactatggacaaaacctgagagatggcccacaatacaaaatactgcgctgggaagaaggaagtgctgccttgagattcagtagcttcttggggctacttggcactcctgttgcaaatcaggctccttgggaagactcttaactttttcgggccacagtgaacttacatagagaggcttttgtccatattatcctttcagccaaggaagaccactatgcttagcacacttggctctttcttgtacctgtagaatatgcgtaagtatgtttaatcagcagtgtcaaataattcatgtaaaacttcctacacaagtggcctaaaatagtgtaggttctgtctccaagagtctaatttacacctagaccttgaggagaatttgaattatatttcttaattttctgttatctaacccattctaatctcagagtgcccccgcgatattgaatggctcagaaataagtcagctgaattcaggcatagtaaaaaaatttttttttatttgataagcatttattgagggcttccatattccagaaacagctttgtattagtgataacacagtattcagtgtgcaaatctagggaatggttggtgagggtagtgagggctgtgaagagggtgctaccgtcagaaatcagcatttaaggggggtcaatcagtgcacaattttgtgggtaaacctttgtgtt

SEQ ID NO: 472292 - DNA, 706 bp, Homo sapiens
tcaggaagatttcagggagatttctcagatggagaataggaggatagtttggaagggatactcttggagttgttggttagggatcagatttggaatccttctgtctgtctcatctttgtgtgtttttgtatatgtgaaggggacctctgaagaaattgcttatggaagtccagcagacttaactcagaacccccccttatttatctggtcacatttggtgatccctaaagaaagctcaacaggcctgtctcagggtggctattcgctcttcaccttgaccagagatcccaatgtgaattaccatctggaggtgatcccttcccatctggagtggatcaaagacaacagggaccaacaggagaaatggcttgaccctcacagctatggcacagcaagcagggtcatcaaaaactgctccattcttatggaagctgcagagaaagggaacctgaaaacctagtatgccggcagaaaggggtttgattaatatatttaaaaaaaaaaggatttgtgaggctagtcttaggctgtagcaaatctggtacactttgtgctaaaaatttgtctttatataatggagagagggatatcacaggatagaacatgggtttaggacacctacaagcctgcttttcaagccagcctggcaggctggtgaggtacaaactttgctgcaggactcccacaatgcagactgtggtccatt

SEQ ID NO: 472293 - DNA, 1157 bp, Homo sapiens
tgcctgctagtgagctgttagttacaaatgtatacatgtgccatgctggcgcgctgcacccactaactcgtcatctagcattaggaccctcagctgcaggtctgttggagtttgccggaggtccactccagaccctgtttgcctgggtatcagcaacagtggctgcagaacagcaaatattggtgaacagcaaatgttgctgcctgatcgttcctctggaagttttgtctcagaggagtacccggccgtgtgaggtatctctagctgtgtgctgggagaaccactgctctcttcaaagctgtcagacagggacatttaagtctgcagaggttactgctgtctttttgtttgtctatgccctgccgccagaggtggagcctacagaggcaggcaggcctcctggagctgtgggccgattccagctcattggggatccccactaccagaactgctccttggtgatcagagatgtgcagatggaggatacggcagtgtacttctttcgggtgaagagaggaagctttgtgagatacaatttcatgaatacattctttctggaactgacagccctgactcagaagcctgatgtctacatccccaaggccctagagcatgggaagccagtgacagtcatctatgtgtttaactgggcttttgaggaattgctcaacctcatacttagaccccaggaccatgacacctaccacacttgctgcatagacttctccagaacgggtgtgagtgcatggtggaccatccaactcttcgtggcttatacctctaggtaccttgttatcagcatttcctatgacaatgcaccaactgaattggcctcatcccatatttcctccaagaaatcagggcccatggaggcggtggttctggtggccgtcagggagggggctgtgaagatcctgcttctctgcatctgcttcaccttcctcagtgtcagtttttacaggaggaaggtgatgagggcagcagtgggtgtggaggctgcaaacactgtcacaggctaatccctcaggcctccagactgtgtttccagatgcctacttgtccagttcctccacaatctgaatggccatgtttcctctccattactggaggatgaggggcaaatgccacagactggactgaaggccttgcagggtcgg

SEQ ID NO: 472294 - DNA, 1476 bp, Homo sapiens
actaggcttaacgtctgagtgatgaaatcatctgtgcaacaaactccccacattcttcagaattttcctctgaaatggtgcacaggaggcacactggcttcccagctgttccgtgaacatgtgcgatatgttaccacctttgacacttggcactggctgctcctcggtcagaaggctcctcacccagacatctggaagacgaacaccttcacttcttttaaatcccgctggcagaagaccgacgatgaactctgtagacatagcatgtcttttatccttcacaaagccattcgcaatgacttctttcagagctatctctacctgctggaaaaaattcccctggtgaaattgtacgctttaacaagccaagtcatcaatggtgagatgcagttctatgccagagctaaacttttctaccaagaagtaccagccacagaagagggtatgatgggaaatttcattgaactgtccagcccagacatccaggcctctcagaaatttcttaggaaatttgttggggatgggtctctgtacttgaaatatcaaggtgcctttctgcaggggcctgggagagctggaacagactgcgccttggactgcggctccgggataggaagggtcagcaaacacgtcttattgcctgttttcaacagtgtggagctggtggatatgatggaatcctttctccttgaagcccagaactacctgcaggtcaaaggtgacaaagtagaaagctaccactgctacagcctgcaggaattcacaccccccttcaggagatatgatgtcatctggattcagtgggtctctgggcacctgactgataaggaccttcttgcatttctttcccggtgccgagatggcctgaaagaaaatggcatcatcatattgaaggacaatgtggcccgggagggctgtatccttgatctctctgacagcagtgtgactcgggacatggacatcctccggagcctaataaggaagagtgggctggtggtgctgggccaggagaagcaggatggcttcccagagcagtgcatccccgtgtggatgcatcaaacgggaattagagaaagcagcaggaaaaacgaaggcctttttaagttccatgagaactacggtttgcaagactggtcaaaacagtacaatgcaagcggcaagaatcaggaagtgcacagaaacaagaagctcggtgcacactgggatcaggcaagcatctgggagaagactgtagcaagactggatcctgaggagacaatccgaggatatgagcaatctgaagtccacagtttcattagaatgatggtcttcatgttctgagtttttttcctgcacttggtctattctgctattaatacttgtgattgcattgtgaagttcttgtagtgtgtttttcagctctaacatgctggttatgttcttctttaaactgcctgttttggctgtcagctcctgtgttgttttatcatgattctt

SEQ ID NO: 472295 - DNA, 573 bp, Homo sapiens
cgtcgcacagtcactcaccactccctttggacccttggctaatgaaagatgagcaccctgaacataggccctggtctggggcttggtgtgcaatgttcagatcatgctcttaccttagacttggagggctcagaagacaggaagatgtggaaaagtttggaacatcctagagacttgttgaatggcttcgacaaaaatgctgatagtgatatggacaatgaagtccaggctgaggtggtctcacatggagatgatgaacttgctgggaactacaatcccccacacagagtccccactggggcactacctagtggagctgtgagaagaaggccaccatcctccagaccccaaaatgatggatccactgacagcttgcaccatgcatctggaaaagctgcaggtgctcaatgccagcccatgaaagcagccaggctgagaattttgagcaggaaagtagaggagaatgactgaaaattaaagaacaagacaagctttatttttttgagaggaggagatatggacaagtgagggataggcatgtaaataagtaaacatgtcactgaagatggatgg

SEQ ID NO: 472296 - DNA, 869 bp, Homo sapiens
gagttaatgggtgcagcacaccaacatggcacatgtatacatatctgcccttttcacctcctttgtttgtttgccttcccagcagggcagctactcgactccgtccatccttatttacctccgtcctttactgtccccaacttggctcaatgatctctttctggcttcaaccctcatctctatggaggtggttccccaatctgtatctcagctcctgatccctttcctgagtagcttcctaaagcttgttgagcgttttaacccagatatagtcctaggatttcaaattcagcatatcaaaaacaaactcatgagatttccctcttacttggcttctagtcccaatcttccaaattctactaatgacacccttctctgcttaaaatgtgtcatccctgagctccccctttctctcatctcaccccatgcaagcaatccaaatgtctgtcacttccatgtactcttttccattcccacaaatgtcttatttcctctcatatacgcctactgaacactttctatttcacctatattttcaaattgattggtgtaattgctcatagcattctctcagtatgtcagtttctgctttatctgtagttatgtcccttttgtcattcccagtattgcttctttgtgccttgtctcttatgttctaattagtcgtgccagaagccacaagagcacagagcttcacggttcagatcttccaggtgtccctggttgaagactcccacctttcttatggctaatctgctctcttctccccacagtccctttctcttttaactcatcccttttctgatgtctttaacctctcttctattttccagaatgtgccacttcttcatcaaaaatcaagttctctc

SEQ ID NO: 472297 - DNA, 1564 bp, Homo sapiens
ataacttttcagtatttattgtaaacacagagactttatcaaaaacatgattacagccacatctcaagctggctgtgctgtccttattgttactgctcacatatacatcacagtagatgaatttgaagctggaatctccaagaatgggcagagccatgagcatgtccttctggcttccacactgagtgtgaaagaactaattgttgtcaatgttacaactgaaataaagtctgttgaaatgcaccatgaagctttgagtgaagctcttcctggggacagcatgggcttcaatatcaagaatgtgtctgtcaaagatgttcgttgtggcaatgttgttggtgacagcaaaaatgacccaccaatggaagcagctggcttcactgctcaagtgattatcctgaaccatccaggccaaatccctgttggcagtgcccctgtactggattgtcacacagctcaccttacttgcaagtttgctgaactgaaggaaaagattgattgccattctggtaagaagctggaaaatggccctaaattcttgaaatctggtgatgctgccatttgttgatgaggttcctggcaagccacgcatgttgaggactcctctgactatcctcctctgcgtcctttggctgttcgtaatgcgagatagacagctgccgtggtgtcatccaagtagcggacaagaaggctgctaggagctggcaagttcaccaagtctccccagaaagctcagaaggctaaatgaatattatccctaatacctgccaacccagtcttaacagttgtggaagaagagcctcaaaactctttgtttcaactggccatttaaaagactggctaatgataataatgcatcataaaacctttaaaaggaaaggagaatgttttgtgggccattttttgtttttttgttttttgcagttgcatgtggcagttttaacttattagttttttaaaaacaacttgaccaaaaatctgtcacagaatttgagacccattaaaacaaagtttaatgagaaaataactaaaaaagaaggtttgtaaataaaaataaaatacttcatcaaacctaagccataaaaatacatatttttccctgagtctttgggtcttcacttctgaaaacctccatatcatgtaaaacttctgttaaacaaatttgttatgcttttctcttgttaatctttcttgtatatgggtgagagaaagctattactttttctcttctgtaagttcaaaatatttattttatattgagacatagcagcaaatatttgtggatcagcacaagtctctggaaccaagtcttttggaaagagtggttgattaaagtatttttatttggccagtgccaaaaaataactataaaataactaattttcaaatatgtgctataaattagttctaaataaatataaatattgaaaataatttaggtttctaattagtctttccagactgcatcaacctagagaaggtatataagtcaccataagggaaacaagctgtttttactggttcggctctcatcttcagaattgttatccgtaatgacacttct

SEQ ID NO: 472298 - DNA, 586 bp, Homo sapiens
gagaaacaggaaaattctttgcaagtggttttggaaaaaggactgaatttggagtccggatgtgtaatttaaatcctagtgttatgaaaacaggtcgcaatccagaccccaagagagggttcttggacctcgcacaagaaagaatctggggcaaatggaaaaagacagaccaagggagccttgcccccacagctccccagcttgtgaatcaggattcacgtgtggctggttcatccagtgattcactaaacaaattaacaaaaatgaccaatgagcatagaattcagattttaatggatttagcaccaagcattgttcctttatatgtgcacacagaacacacactctgtgtctcagcattctcagctctcggaacactatgcaagtgtctgggagaagaaatcttgcacagcaatggcgataaagtctctcttcagccagtctttttctttggcgtatgtgtgtgtgtgtgtgtgtgtgtgtgtgtgtgtttccatccacttgtgcatgcatttactcatgtgtgtatacacatacaagtacacgcatatatacacttgatggataatttttgagcacttaccaa

SEQ ID NO: 472299 - DNA, 655 bp, Homo sapiens
cagatagcgactgcggaaacttccgttgaaggagccgtggctccagcagtgattgggtcagtgatcctgcttcccttgtctttccaacactgatgagatgtctgaggccaggaaccaaattctccttgtgtgtttggccttgctcaccatcttcttccctcaaactccaactttcacagggtgtggccctccaagggacagaacaaaacacctgtgtaatttatttccttctcctgctgttgactgtgacttacaccatcagagctctgattctcagaactacaccaccagctttcctgggtctccagcttgcagacagcagattgtggaagttagcctccataattgtttgactttcgaaccagctctcacttctaatacaaatgagggccttgcagctcaacagaggatgctctgcggaaaccaaacagccgttcaggacttgagggaaagcaggtctttaaacattgagcaccggttttttaatgggctgtcggcatatccccaatcggttctcagacctggagagatccctgacttgggataccctactccctagatgtgatggttacttttatgtgtcaactgggctgggctaagagatacccagacagctagtaaaatgttatttctgcatgtatctgtatattaatcc

SEQ ID NO: 472300 - DNA, 477 bp, Homo sapiens
caaagttcaaaatgatacgagaacaaaaaatgttaataaattttattgccaatttatttcaggaagtaagaagctctacagaggagtcagatcatatcacaaaaaagactgcctcactagaggttttccaaggcaaaccctttccctcaaattctgaatgcatgaatctagaggaagataactgtagaaaaggggcacatgctggcgagtatcagtgtcttcctgcactcatggtatggaacctcctcaagctgtggagtctcacccacagcataaccttgacctgcgatagcacccaccgtccaccaccaccctatagcaagggagataatgtgtttctggtcataattagtaagccaaagagggatgttccagatgtaagttttactgaggtttattgcatggtagaaggaaaagagccatgctttgacatcatgcatacctaggtttgatgcctgatgcctgatactgttcctt

SEQ ID NO: 472301 - DNA, 630 bp, Homo sapiens
tctcacaaccctatgggacagaaccgagtgtccatttcatctctggcagctctgggatgtgctgcttttagccaagctcttcccagggatgatagtcaaggaagagaaagtgaatctcagccctcatgtgaacggacagcagctcaagtcaaatcagttctgtcccacagggaatggcagctgagctcagtagccatgactgcactttccctgtggtcaccattgctggcagtactgtggccagttcctgcccaatccatcgaacattggcctccaaattgggcacagggtcctgttcttgaaacttcagagggtgaaggggaagctttcccttggcctatacagctttggtgccatgagcaggataccaaagcttctctgctagaagccacagtgaagggaaccagcaaagagtggtccacagaacgttggaccaactacggcatgaaagctctccatcagagggcaggactcctgataagctaaatttcacctttatattagtgtgttattaatgttaaacttaagtttaataaaaccttatagacatatttatccaatttttaatgtctgaccataagatttttatagactctttttaaccttttataatttttgttaatgagcagg

SEQ ID NO: 472302 - DNA, 534 bp, Homo sapiens
gggcagacaagatgacgttagaacaggaccagatcatattgggccttgtcagctccaggctacaaatgcacatgtactgtggacgtgggctgtcagtccacaacgctgtgtctagagagacttggaaaattcaagcctggttcgagagagcacggtcatgcagagcagaacgtggctgtggacatccaggagggaagagggcagccaggtcagccccagctggtgggttgagtttcgggcaacacagggaaagatccctggaggagggggcccgctggactgggcagggttggtgggaggggatctgtggctgcgccctgcatgaagtctggagagagactctaagaagaatacttggaaagcttgaactggccagttccaactactgtgctctaggtgagacattattgtccctgagctctgagcttttgcaagcaagaaagaaaggtttagaaaacaaaggggctatattgggtcctgtgactgaaaaggaagccagctgaacatcttccaggtctgtccgctccgatccat

SEQ ID NO: 472303 - DNA, 654 bp, Homo sapiens
aagtttctaagtttggccctgccatcttcccctttcccatgacccactctgctgtggctcagcagctgctgctcagacaaagaggtgccttctctgctggctccgtctgcaagctgaggaaacgagaagcctcaaaaccaggaagccaacagtgtggtctgcagttagtggtgaaggcctacgaacctcggcaagccacaggtgcagtcccagagtctaaaggccgaagaacctggagtctagatgtccacgggcaggaggagagcaagcaagcgtccagctcgggaagacagcaatccagaagatgcagcaagcaggttgatcccccttcttccccggctttgaaggactacctgatcccatgtaacaacctagaggaagagaagaaatctggccccaggccccttttgcatttgtcccttccaaaattcacttctttgttttccacttcatattgccatgtcgtgcctatgtgtgtatttggggcgagaggtggggatggcaagaggaggtcagaggatgccaggactagagcctaaatgcattgagggcagaggtttgtccactctgcctgtgtaactcgagcaatttgcctggccatagcaagagcttcgcaaatgtttgcgaaataaatcaagtattaagcacataaat

SEQ ID NO: 472304 - DNA, 619 bp, Homo sapiens
ctcccctgagcactcgagtttcagacccttgccatagaaatgggaaaattggcagcttcctttccgggtttctttgcagagtgttatgagatcttgtatatcaaagtatgcctgctacctgcagtctttgtgcctgcactgaggatgtatggattcccctgccaagtggaatctccaggttttttttatgttgcatcctcatctgggaagacaccagcacctggaaaagccagggtgctggggcactatctggtcaacacagacagctaccaggcctactctccagtgccctttcatctgagggccccacacaccgcacagcagccccacagacatcggattccacggcgcacatcagtgcataacgcattgcgtatttgccactccttaagccaacacctaagagaggggtttttggcatcagaacaccaccagttccctcctctgcctccttctgtcactctccctgcccttccattcccttcccaggctaagtttccatggtaccttttcagcctctgctgttaacaccatcctttcaaaatctaaaggaaatgagggctctttccctttaagtcctttttacaaacccctttctctcgattcacctggaaaattc

SEQ ID NO: 472305 - DNA, 1535 bp, Homo sapiens
ccgaggagccaagatggccgaataggaacatctccagtctacagctcccagtgtgagcgacgcagaagacgggtgatttctgcatttccatctgaggtaccgggttcatctcactagggagtgccagacagtgggcacaggtcagtgggtgcagtgcaccgtgcgccagccgaagcaaggcgaggcgttgcctcactcgggaagcgcaaggggtcagggagttccctttcctagtcaaagaaaggggtgacagacggcacctggaaaattgggtcactcccacccgaatactgcgcttttccgacgggcttaaaaaacggcgcaccacgagattatatcccgcacctggctcagagggtcctacgcccacggagtctcgctgattgctagcacagcagtctgagatcaaactgcaaggcggcagcgaggctgggggaggggtgcccgccactgcccaggattgcttaggtaaacaaagcagccgggaagctcgaactgggtggagcccaccacagctcatggaggcctgcctgcctctgtaggctccacctctgggggcagcgcacaggcaaacaaaaagacagcagtaacctctgcagacttaaatgtccctgtctgacagctttgaagagagcagtggttctcccagcatgcagctggagatctgagaaggggcagactgcctcctcaagtgagtccctgacccctgacccccaagcagcctaactgggaggcaccccctagcaggggcagactgacacctcacacgtccgggtactccaacagacctgcagctgagggtcctgtctgttagaaggaaaactaactaacaaacagaaaggacatccacaccaaaaacccatctgtacatcaccatcagcaaagaccaaaagtagataaaaccacaaagatagggaaaaaacagagcagaaaaactggaaactaaaaagcagagcacctctcctcctctaaaggaacgcactgttgggtacacctcccagacggggtggcggccgggcagaggggctcctcacttcccagacgggccggccgggcagaggcgccccccacctcccggacggggcggctggtcagatggggcggctgccaggcggaggggctcctcatttctcagatggggcagccagtcagagacgctcctcacctcccagacggggtggtggcggggcagagacactcctcagttccaagacggggtcgcggccggacagaggcgctcttcacatctcagacggggcggcggggcagaggcgctccccacatcccagacgatgggcggccgggcagagatgctcctcacttcctagacgggatgacggccaggaagagacgctcctcacttcccagactgggcggccgggcagaagggctcctcacatcccagacgatgggcggccaggcagagatgctcctcacttcctagacagagtggcacctgggcagaggctgcaatctcggcactttgggaagccaaggcaggcggctgggaggtggaggttgtagcgagccaagaa

SEQ ID NO: 472306 - DNA, 1027 bp, Homo sapiens
ctgtcaccatggctgcaggggcagttctagaactaggagctgtgaaatcaaccaggaatgaggcatgaccgtcaggaacccacttgaggaggcagtctgtcccttagcagagctcaagcgtggtgctgggagatccgctgctctcttcggagccaccagtcagggacgtttaagtctgctgaagctgtgcccgcagccgcccccgcccctcactccccaccccaccaccgcccccacccctccgccgccaggtgctctgtcccagggagatgggaattttatctataagcccctgactagagctgctgcctttctttcagagatgccctgcccagtgaggaggaatctagagaggcagtctggacacagccactttgccgtgctgcagtcagttcccccaaacttcccagcagcttccttaacacttgaggtgacgccccaccctgcttctgctcaccctctgtgggctgcacccaccgtctaaccagtcctacctttgtgctccttatgtcatcatttgttgtaatgtcagatctatgtttctcagctgatatcattttccttctgcctgaaagacatcctttagcatttcttgcagtaaagttctgctggtgatgaattctttcagattttttttctccccatctctttcaatatctttcagcctttttatgtctgctaaagcactttttttcctttcatttttgaaagggactccagttagatgtctattagactgcctgactgttcccctgtggctgtttttttaattctccttcttttgtctcattttagattgtttctattattatcttcaagttcactaagtttttcttctgtaacatcatatatgctgttacttctctccagtataagtatatttttatctcacatattattgtttcatctctaaaattagatttgggtctctattttgctttttgatggtatggaatacaactatcacaatcattttaatgtctttgctcattctaactctatatcagttatgattcagtttcagctg

SEQ ID NO: 472307 - DNA, 1258 bp, Homo sapiens
gcagtgccagaatgcatagttggcatagatgtacttagcagctggctccctgactgggagggtgagggctattatggtgggaaaggccaaatggaagccattagagctgcctctacctagaaaaatagtaaatcaaaaacaatatcgcatgattggagggattgcggagattagtgccaccattaaggacttgaaagacgcaggagtggtgattcccaccaaatccctcttcaattctcccatttggcctgtgcagaagacaaatggatcttggagaatgacagtggattatcataagcttaaccaagtggtgactccaattgcagctgctggaccagatgaggtttcattgcttgaacaaattaacacatctcctggtacctggtatgcagccattgatttggcaaatggctttttctccattcccgtccatgaggcctaccagaggcaatttgtcttcagctggcaaggccagccatatacctttactgtcctacctcagaggtatatcaatgctcaggctttgtgtcataatcttattcagaaagaccttgtttgctttttgcttccgcgagatatcatactagtccattacattaatgacattatgctgattggatccaaagagcaagaagtagcaaacacactggacttattggtgaaatatttgtgtaccagaagatgggaaataaatccgactaaaattcagggatcttctacttcagtaaaatttctaggggtccagtggtgtggggcctgtcaagatattccttgtaaggctgtaccaatgtcctcatggggagttccctatgatcagttgacagaggaagagaagactagggcctggttcacagatgtttctgcacaatatgtaggcaccatcttaaagtgaacagcttacagtactacagcgcctttctaggacttccctgaaggacagcagtgaagccaaatcttcccagtgggcaaaatttagagcagtgcacctggttgtgcactttgcatgaaagtagaaatggccagatgtgtgattatatactgattcatgggctgtagccaatgttttggctgtatggtcagggacttcaaagaagcatgattggaaaattggtgacaaagaaatttggggaagaggcatgtggatggacctctctgagtggtcaaaaactgtgaagatatttgtatcccatgtgagtgctcaccaatgggtgacctcagcagaggaagattttaataatcaagtggataggatgaccca

SEQ ID NO: 472308 - DNA, 622 bp, Homo sapiens
tgacaagggtgtcaagggttaaggatggagttcttgggtgataacattgctatgcaaggagagtttgctgcaacattttataactcaagagctgctggcccaaggctatgctgttgcaaaatatttggatccatctcacattgtggtgatgagaacacaatgagcctgcaccgcgctggttgcccatggggtggctgtgaggacgaacggtcggcgaggctccacagtccaggcggaagaccgtcgtccaagcaggaggaagaggaggaggtggcccaattgttggccgacttccccctagctgccggcgcggcgcccgcctcgcccaggttggccattaggcagcctgtccgctcgccaccgcctggccgtgtgccgccgctgccttccccagccgcagccatgaagctgacccaccgcatgctgcttcgaagcttctgtatcgccaacgtgttctgcgaaaactcgggacaagattaactgcttcgatttcagccctaaaagcgaggtgatcaccttgagcagcaacgacgactccatcgtgctctctgactgccaggagggcaaaccaaaaccctgttcagtaagaaatacggtgtggcctcatcagataaactcctgc

SEQ ID NO: 472309 - DNA, 894 bp, Homo sapiens
tctcctcactttggaaacttcttgctggcatttcctgtgtcttaaagaccatgggcactcattgtccagaggagggaggtaacagaaacatttcaaggctttacaaagctgccctcccatacaggagttatgcagggctttgcgttactacaactctgagggtcgagagggtccaaatcaaggtgtcttttaaacctcagctctcgtcagaccccattctgagttacaatcaccaaatggtacactcggaaaataatctcccatggatggagctaagatgcattaatctggccctggagactctggcgtgtttgacaatacatttcaaactgggtctcagaggtcctgcatttggagatgaggccagagatggccataagaagatgtcagagtttactgctggctgccaggttctttctccaccatgcttcgttggacggcaaatatttgagctgctttatgaggatctgggacattgcagagtcttcaaattcacagcaagctgcccccacgtgagagttaattactcataccaggccctgtttgcagcgctggctgtggaaatggttcccaatcctcagtcacgtctaagctgtgaggaattccctttcctctacagttctgcaagtgaaatttggaaggcaaagttgaggcagcagccatttttgtgttcggaaggtgggtataggtaccaggtgtgctctagagacatagtacagtgggatggactgcggagcagccgccacaactccagccgattagaagaaactgctgactcatgcaaaagtctgaggcaagtttctgcagtaaaggaagaggcgcactggagatattagaaggcaggcaacattgacttctctatccagtgctgacgcccccttcacatttcccgag

SEQ ID NO: 472310 - DNA, 871 bp, Homo sapiens
ctttttttttttttttttttttagaaaggccacccatcgtctgggatgtgaggagcgcctctgcctggccgccccgtctgggaagtgaggagcacctctgcccggctgccctgtctgggaagtgaggagcgcctctgcccggcagccccgtctgggaggtgaggagcgcctctgcccggccgcccatcgtctgggatgtgaggagcgcctctgcccggccgccccatctgggaagtgaggagcgcctctgcctggccgccccgtctgggaagtgaggagcgcctctgcctggccactgtgcaaccttccaagtgtgaagtgacagcctttctgcaggtgtacctaacagctccaaagagacagcgaccatcgagaacgggccatgatgacgatggcggtcatgctaggagaagactcagatcatcaaggagtaagaactcagcaagaaatccagacccctttaatgcaaagatctctgactctttcatttccaactcctgagcaccggcataaaggaagggggacctggtcctctatgcccttactcactgaatatcctcagagtgtaactggacagctttgcagaggtctctgtggctatctgggcactgtaaaagcctatgttttccatctccaggttgctgagctgcggggagtaggactgggtgaagctcagtcgcttttgccatttcggatgagtcacgaaactccaggggaagagttactgactcccccagaaccccattcaccatcaatggggttgagctgctttgtgaaactagattccctgtgaacacagaaggaaaaggctacaaaatgtccctgacaattgtccctccccacaagtctcccagtcagtcatagctcccct

SEQ ID NO: 472311 - DNA, 1376 bp, Homo sapiens
aatctagaaaggggtgtcttcagcttatcttccaacatctctggacctccaatctcttcctccgccctgagtgcttttcccgacattatgttctctcgtgccaccagcctgccagacattgcaaagacagcagtacccactgaggcatccagcccagctcaggccctgccaccccagtaccaaagcatcattgtcaggcaagggatacagaacacagtgctctcaccagcatccttggctccactgctccctgccagagactcagacctggtcctttcctttgcagactgcagcttgggggacacccagcacggagagaagctgaggcggaactgcactatctaccggccctggttctccccctacagctacttcgtgtgtgcagacaaagagagccagctggaggcctatgacttcccagaggtgcagcaggatgagggcaagtgggacaactgcctttctgaggacatggctgagaacatctgttcgtcctcttcctccccagagaacacttgccctcgagaagccaccaagaaatccaggcatggcctggactccatcacatcccaggacatcctaatggcttccaggtggcacccagcacagcagaatggctacaagtgcgtggcctgctgccgcatgtaccccaccctggacttcctcaagagccacatcaagaggggcttcagggagggcttcagctgcaaggtgtactaccgcaagctcaaagccctctggagcaaggagcagaaggcccggctgggagacaggctctcctccggcagctgccaggccttcaatagtcctgctgaacaccttaggcaaattggcggtgaagcctacttatgtctctagagagatgccaataaagttagtcacagccttctgtccagtctgaggtcaccccgcacagcctgctgtccttcccagaacccggctctcatcacctttggctaatggttgcctagcaacaccaggcacacaccctcccctttctctcttttaaaaataaagacaatacttgaagtttgggaaaatcatctaagatagaggttctcaaaggtgcccagctggcagtaccagcaacccctgggaactctcaggccctcctcagacctactgaatcagaaactatgggtctggggctggcggtctatgtcctaaccagccctccaggtgactctgatgcagctcagctgtgagaagcactgctctaggattctggcctctgcttggtccctatgtggtcagtccttgccccaccctgggaagaaggggctggatgccctttcctatttgcatggagaagaatctctgcagttttaaaggcttctttgacggtagatcttctgaggggggaatgtggaggaaaatac

SEQ ID NO: 472312 - DNA, 626 bp, Homo sapiens
tgctaacaccaagataacagagatgttagaattatctgagaaagattttgagagagccatcacaacaatgcttccacgagcagctacaaaaacttttaaaacaaatgaaaaagcagagtgtcagcaaagaaaaagaaataaccaaatagagatattagaactgaaaaatataatagctaaaataaactcagtagatggactccacaccttcataaacattgctaactgcgttaaattaaaagtgcagaaaaaggaatggacgtgggatgagagcaagatgctggtgatgcaggaccccatctacagcagtcggaccaagggaagccctttcattctgcagtgttgcccctccattctgcagaggaatcttaccatcgtgctgctgtacaggagatgtgcttaaaggaattccgtccattaccacagagcttgtattgaaagactctggaaggggtcaaaggcacaaagggtcataaaaaaaatcagggaatgaggtataccccgttctttgcttatgatatatacatgtctcttttgctctctgtgtggtttataagtgatggggtgacatctgcaccttctgtactgtttctgtaaggttgagtgttttctcttccttcagcctc

SEQ ID NO: 472313 - DNA, 643 bp, Homo sapiens
agcagcttcagaaaggagatgagagctgggagtgcagcagaggcagggacctttacgttatgcctatttctgggggccctgtcctttcctgcggccttgcctgcgctagctaataggaagtttgcagattttttctcccatcctgtggattgtctcttcactttgttgattgtttcctttgctgtgcagaaactttttcaacttgatgtgatcccatttgtctatttttgctttggttgcctgtgctcatggggtattactcaagaaatctttgcccggtccaatgtcctggagatgtttgcttctcccccacagtacgtaggaagcctggacgtgccaaggcccaacagcagggtggagatcgtggctgccatgcgccggatacgggtgagtggccagaggtggactgtgtggagcggggagtcaagtgccttagctgctggcccttctagtgctattgttgaatctgggatgaagcatggaaaaacattttataaaccataaagtgctatttatattcattggtatcatttttatgccttcctttgggtttcaaagcatttcataaatgcagataaataccctgagagatactgagctgcctcatctagccccttttaatagctagcgcctttttttcagg

SEQ ID NO: 472314 - DNA, 1025 bp, Homo sapiens
acctcaccacctttcctttctgctcacacctttcaagtttaggttctggagaggttctcaggggagtaggcacatggcctgggcctacgggcttcttggttctcacagggcgccgagtgggagagtcttggctgtgagggtagtaaaggcaattctgattcaggcacaactcttaggagtggaagtctttggcccccgagcagagagaacttggttgcaggaggacaagtcctttgttgggaccctcatcattttctggcccaaggatacgaaaccacgggacagaggtctgagctcagacaggtcttggcaagcctggctcatttcacttctaatcctctgtggccaggcccctggagattacagaggctgccttcggccagtgaatggcacagcacggctgctcagagaggtggaaaatcctgaggcccctccagcactgtttcaagaaaaacgctctgagtggtgtggagaggggccagctggtgatgtcaagagatttataaaagagattacaggaccttttaagggagtgaggcagttgttaatgatggaaaactgctaaagctggatctggatgagacctgaacacttaatttgctagttgtcctgaaatgcctgtaatttttagaaaacatattgtgcctctccctttgtgtggagttcaaaagacaatattagagcatggtgagaacctgttatgctaatcaaagtctggggtaactgaaattgagctctcaggacacataaaactcaaagtgggagatcttgaacctgggagggaaaattaaggtccaaacacacctggttgcactgtgcatctgtacttttcttttcttctctcctttcctctcctcttcttgcttgctttttaaaagcacactagtggagggtccagagcaagctttatgtttttaagcaactacaaaactacctaaaagtttttcaccaacaaagagagatctgaaaataacattaatttatattgcatttataaggttttccgtagtctttttacagccctc

SEQ ID NO: 472315 - DNA, 619 bp, Homo sapiens
cagccgaaggcgctaaccgatcgcgctacagaaacgggcggcgcggctcacagccctgagcgaggcaggtcttttttccgcgctagcacttgcctagatctggagcaggactcagcttccagcagaagaggctgagaaagggagagcagaagaggatgcaggaacgaagggtcttcggggaatccaaaatggatgctctctgtgatttcgggggttccgttgattttgtgttgaccggtctgagaaatgaagagaaagagtacaaagagaaaaattttactgctgggccgccaggggtgacatcacatattggcaggttccatgatgcccacctgagccacaaaaccagcaagtttttattagggattctaaaaggggagggggtgtacaaacagggagtccctgtccctatatgtctcccaagacagggcagcctgaacactgatccacttagcgattgcgcagtgtcaatctggccccacacagctgtggctagccactaccagtcagtactaccctttggttcttcttgcccgtgggcactgcagcctctgtgggaccttagtactaagagtcagagaatatcagggagagcaggtgggcagtaacaggttacatt

SEQ ID NO: 472316 - DNA, 638 bp, Homo sapiens
caggatgattaacacatgatctgtgctgctgccatagttggtatttttctgtcatgtaaaaggtctgccaatctagatattctggacaggctgcctggtacggtccatggtgggcttgctgctgaggtccttgagaaggctggcctggtacctgagggactaagtggtattcattgtggaggacctgtgactggttccatgagggtggccctggtgccttggtctgtgaaggctgacttggaacctggatctatgggggcaaatctaaagtctgagaccacaagcactaacttggcactggctctgaaggctggaaaatccaagatcaagatgctggcaggttcagtgtctggcgagggctctcttgttgggtccttacatggcagaagtggggaggacaaaaaaggacctaagctatttaactccagtattttaataagggatgagtgggtaatggataaggagaaatctcagatgacttcttgatttctgtattaactaatggtccaccaagacacagaatataggaggacttgaaagtcagtgtggaatggaaaaaaatgtttagttttgaattgttatgtttctccatacaacagacttcttaaaatgtggcttattttggtcaatagtacatt

SEQ ID NO: 472317 - DNA, 544 bp, Homo sapiens
tcagttgcttctctgcttaccgttcagccacttgtatccttgatgctcagctgcttgtattgctccgccagctggagtcgtttatgggcacagggtaggggtagagcaggccaaaaaggcaacacttgggtggaaaagcgggaggcttcatatgattcacatgaagacactggatctaagacactggggttcttagctccagaaaaatttcccatcttcaaaataaggcatggaaggaacaccaatgctgaattcaatatgacgcatacagggtgggtcaatggatatctgaatggtaatcaatttggcctaacgactgaaggtcctttgcctaatatgctcttctgggttgagcatcccaaatctaaaaagctccaaaacccaaaatttttggacactgactggaccctcaaaggaaatggtcattgaagcatttcagatttcagattcatagatttggaatgctcaactaatcttgtaggcatactttattcttttttattcttttttcttttatctcttctgactgtgtattttcaaataa

SEQ ID NO: 472318 - DNA, 1205 bp, Homo sapiens
gctggcagccggcgccgcgatggaggaagagctgaagtgtcccgtgtgcggctctctgtttcgggagcctatcatcctgccctgttcccacaatgtctgcctgccttgcgctcgcaccatcgcggtgcagaccccggacggtgagcagcacctgccccagccgctcctgctttcccggggatcggggctgcaggcgggcgccgccgccgctgcctctctggagcacgacgctgcggctggcccggcctgcggcggtgcaggcgggagtgcagctggcggcctcggcggcggtgcgggaggtggcggagaccacgcggacaagctcagcttgtacagcgagacagacagcggctacgggtcctacaccccgagcctcaagtcccccaacggggttcgcgtgctgcccatggtgcccgcaccacccggctcctcggctgcggcggctcggggtgccgcctgctcctcgctgtcctcgtcttcgagctccatcacgtgcccgcagtgccaccgcagcgcatccctggaccaccgcggcctgcgcggcttccagcgcaaccggctgctcgaggccatcgtgcagcggtaccagcagggccgcggggccgtgccggggacgtctgcagccgcggcggtggccatctgccagctgtgcgaccgcaccccgccagagccagcagccacgctctgcgagcagtgcgacgtcctctactgctctgcctgccagctcaagtgccatccatcccggggacccttcgccaagcatcgcctggtgcagccgccgccgccgccgccgccgcccgccgaggcagcctccgggcccactggcaccgcccagggcgcccccagcggaggcggcggctgcaagagcccgggaggcgcgggggcgggggcgactgggggcagcacggcccgcaagttccccacgtgtcccgagcatgaaatggagaactacagcatgtactgcgtgagctgtcgaaccccggtgtgttatctgtgcctggaggagggccggcacgccaagcacgaggtgaagccgctgggggccatgtggaagcagcacaagcaacttatggctggcaatgtgtccttgtatctgatactgcgagaaagagaggagccatcaaaatctgatgaggaaacttgagaagaaggggtttgctaaacttgtacagcaagttgtgaaatgattttgcaaaaaaacaagt

SEQ ID NO: 472319 - DNA, 582 bp, Homo sapiens
gttttagttctggaggagtttgtttttttgtctctcggccttgcttagtgcctccaaacatctttaaatcgaaatgatggtaatggacatttttgtcttttcactgcagcaatttgccaaaatcatcatggacatgtttctaagagttgatgccctcattggcttctgctccagaattattccagggcttatgtggcagggtggtgacttcacatgccataatgacactggtggcgagcccatctgtggagagaaatttcatgacgagaacttcatcctgaagcctacaggtcctggcatctttttcacggcaaatgctggacccaacacaaacggttcccagtttttcatctgcactgccaagactgagtggctggatggcaagcatgtggtctctggcaaggtgaaagaagaaactgaatattgtggaggccatggagcgctttgggtccaggaaaggcaagaccagcaaggaggtcactattgctgactgtggacaacgctaataagtttgacttgtgttttatcttaaccaccagaccattccttctgtagctcaggagagcaccccccaccccattt

SEQ ID NO: 472320 - DNA, 718 bp, Homo sapiens
ggggatcctggagaggagctgaaagcggacttcctctcttcactgattgaggttgtgaacaaaaggatcatgaagactcctgcagcaggattgaataaaaccagtgtcagctttgttcttcctcattttatccttttaaaacttatttttaattgcaagataagccagggctattgcagaaaaatcagcaaaactcagcataaagaagaagaagaaaaaattctcttcttttccctgccacctggcaataatcagtataaacattttgatgtccattggagggtcacagaaagaatcaagttgcataggtacacctcagtgcagacacaaggaagaactgaatcgaccaacaccttcttgtatttccatgaatttttccttaggtccaacaacaccagacaaaaatccaacatcactgacattttaggaagggacttaccttattcacattccagccagattaccagcaccctaacccctgctttgtcccactttcccactgattctgctcctaccaaagtcattgatgacctatgtttagctgagaaacctggacccccaccacatgaaagatgtggcctgctggcacagagacttcagatgatggaaaactgggttcttcttgaggggcctggaggaggctacacccagaagccagacctaacgcatcttcttactgaccccaaatttttaagcaaagcttttcttccttaaccaa

SEQ ID NO: 472321 - DNA, 487 bp, Homo sapiens
tactacttcaggcaacccccaacaaaatggtgaatggtgtgaaagttagaggagaggactttaagggacgcttcagggcaaatgacatctcagagcttgtcctgcctcaaggcaagggagctgggcttttgtaccacccacaaaacatctactggctgccctgggggaggaaggaagacataaagggcatgcgggggaaggctgctctagcacccaatgtggactctctaaagttacaggtacggctcgtggtagcaaagctggtagaagcagggctttgggggctgcagccacagacaggacctaaggggacctggacagagcacaagggtgatattgtaagaattagtgcatctgtgtcacatagtgaaaaaaagaatgatctaaatggctgcctttggtatcctctttggggaaaagcatctttgaaagcattcacagaaaagcccacaagatgggtaagaccctgagaatggctatgtcagca

SEQ ID NO: 472322 - DNA, 470 bp, Homo sapiens
ttccttcaaagacactgttaggagaaactgcagaggttctccatgaggaacctgctcctgcagcaagcttctgcctggtcatccaggtgtttccatacatcttctgaactctatgaaaaggttaccaaaccccagttcttgacttgtgtgtactcacaggctcaacaccacatggaagctgccatggtttggggcttgcaccctctgaagccacagccagagctctatgttggacccttcagccatagctggagcagcttagatgcaggacaccaagtctgctggagtttgctggaggtccactccagaccctgtttcacttggtatcaccagcagaggctgcaaaacagcaaagattgctgccttctccttcctctggaagcttcatcccagagggtcacccaccagatgccagccagtgctcctctgtatgaagtgtttgtcaacccctgctgagagtcatctcccag

SEQ ID NO: 472323 - DNA, 678 bp, Homo sapiens
ccacccccacaccaccaccactcagttcctggtactttgttatggcagccctagcaaatgactacactgatcctcacctgacactaccttctgttaattgttctttggcttcaagcactgaagccaaaggcaggatgccgctaccctatggaaacacagcagaaaaacaacacacgctccttacccttcacttttcaggagaagtaaactggatagccaccccggagcactactcttctgctataagctactacatcattgccaaaagaatttctgaactaaattttatatgtatttcggagataggtagttttggtgctttaaatgcagagctgggtaccaggttcatgaaagacaaagtgataaaggcaagaaaagaatgtcaggaaagaatgacaactgtaattgtaatgacaaatgtaactggtcctatatacactcataccttttacactgagttcctcacatacacattatctcaaagcatcactttgaggcaggaaagaaaaaaaagtctctgaaattttgtgaaattactgtggagaaaaacttgaaataaggcagatccgggtgtctttaacaagataaaaacaagaaaaattagggtaaaatatatacctaacctaacaggtataaagggacaaaagaagttgtaaccagtttggatgtttacctgtg

SEQ ID NO: 472324 - DNA, 1430 bp, Homo sapiens
ctctctcacatgtctctgtactctgttccctttctcatcttccttgtctttgtatctctggggttggcagaggctgaagagtccagtctcattggcttagaggtcatgtctctcccagaaggaacctgtcagcccttcatgcagcatgagaagctagagctgagactgggtcccattgggatatgttgtgggacagaggctggagagcccagtctcactggcttagagggtgtgcatctcccaggaggaacataccagcccttcatgcagcatgagggtctagagctgaaactgggcccctttgggatctactgtgggaaagaatatgaggttcccaacttgcaatttaaaataatgtgggtagccaaggctacaccaagagagtggcatttaagaaacctagaggaagtgagggtgagtgctacacatatagctggtggaaaggtatttcacgtacagaaaacagcaggtattaaggctctgatatcagagcatacttgaacttctcaaagatggtcatgaagaccattgttgttggacataaagggtgaggtattgtcttagtctgttctcatgctgctgataaagacatacccaaaactgggaaatttacaaaagaaagaggtttaatggatttacagttccacatggctggggaggcctcataatcatggtagaaggcaaagaggagcaagtcacgtcttacatggatagcagcaggcaaagagagagagcttgtgcaggggaactcctctttataaaaccatcacatctcgtaatacttattcactatcacaagaacagcatgggaaagacttgcccccatgattcaattaccttccactgggtccctcccacaacacatgagaattcaagatgagatttgggtggggacacagcaaaagcatatcaagtattaagagaggaagtgaaaggagaacctcatagtcaattatatgtacttcactcttatgggtaagaagtgaaattattgaggacttcaggtggaggaaatatgtaatcttacatataattctgttgctgtcttgaaaataatctaaaactgacctaatgcagaagtacatagactggttatgaaatgattctaataattcaggcaagaggtgatggtgatggaccagagtagaagcagtgcaggtaggcacaatggtcagattctaactttattttgaaagtagaactttagctaaataaatctagtaaatcactgtcttcgtcgtaccaaagattttttaaaagcctactccaatagttttcatgtggttaactgtatgggtcctactgatgggacaagtcctagaattaaaaaaaaaaaaaaaaaaaaaaaagaaaaaaagaaaaagggagaaatgccttttttaagactatgagaacagaattactttatgctatttagagaagcttggaag

SEQ ID NO: 472325 - DNA, 529 bp, Homo sapiens
ttgttttgtgatatccgttatgactgatgaaaacatgatggtggcacataaagttaacagcctattggatgcatactcaggcctgttaagtaatgaatccatgatcctggctgtgaactccagctttgtggatcccttactgcagtttgaatctcagttgaagataatagagtcatcctttggaatgctagttgtcatgccaagtcttgacaaagtaaaagaaatggggagcagttatgagtacattgaggacatggagaatgtgactcagcaggtgataatctttagggtcctcctcttcactctttttagttataacagtcagggcactaatctataccactggactccttgtgctaaagaaaatgctgagcattctatcttcatgggtactactgtacctaaagaaggcctaacaacaattcaaaaccctatttttcacaactgagacctcacttcattttttaatgtcccaaccagagacagaagactgcactgcatgtcttgtggtcttcaactttgcattcct

SEQ ID NO: 472326 - DNA, 857 bp, Homo sapiens
acccccaggcctgcagccgtctccaggtgggtggaaagcctcagcatgcacataacacccatgctggcccatggggaagtggacccaggcactgaggagattagtggtgggaaggatttgaatcaaggtctggctgaccctcctatcccacctcccacagatcctgacttgagtctgagtggcatcctggctcagagcttttctctaagattgggaagttctccagatgatatcccgaagtgtgttttccaacttgtttccattctcactgtcactttcagtcaggcccctcttcaaaaggtctgctggagtttgttggaggtgcactccagacccagtttgcctggttatcaccagcagaggctgcagaacagcaaagattgctgcctgctctttcctctggaagattcattccagagcggcacctgccagatgccagtcggagctctcctgtatgatgtgtctcttgacccctgctgggagcagagctcgatcactgttctcttcagagctggcaggcaggaacatttaaatctgctgaagctgtgcacacagctgcctcttcccccaggtgctctgtcacagggagatgagagttttatctacaagcccctgactggggtttctgcctttctttcagaaatgccctgcccagagaggaggaatctagagaggcagtctggctacagtggctttgcagagctgtgattttctagtttatttgcatagagttatttatagtattctctgatagtagtttgtatttctgcaggatcagtggtgatatcccctttatcattttttattgcgtctatttgattcttctctcatttcttctttattagtcttgctagcag

SEQ ID NO: 472327 - DNA, 702 bp, Homo sapiens
gagcagccgggcaccgaagaagagctcttgtaaagcaggcctaatggtgagaaaatttctcagcatttgcttgtctgcccctctgctgcaggtctgctggagtttgctggaggtccactgcagaccctgtttgcctgggtatcaccagcagaggctgcagaagagcaaagattgctgcctgttcttttgcctggaagcttcattccagaggggcacccaccagacgccagccagagctctcctgtatgaagtgtctgttgacccctactgggagatgtctcccagtcaggaggcacggggagctggcagacaggaatgtttaagtctgctgaagctttgcccacctccacttcttcccccaggtgctctgtcccagggagataggagttttatctataagcccctgactgctgcctttttttcagagatgccctgcccagagaggaggaatctagagaggcggtctgggtactcgtggctttgcagagctgtggtgggctctgcccagtttgaacttcctggtggcttttacactgtgaggggaaaaccgcctactcaagcctcagtaatggtggacatccctcccccgaccgagttcaagtgtcccaggtcaacttcagactgctgtgctggcagtgagaatttcaagccagtggatattagcttgctgggctctgagggatggcatccactgggctagac

SEQ ID NO: 472328 - DNA, 3138 bp, Homo sapiens
gcctgtcttttggataaaagccattttaattgggcacagtgtcattagtggctccatgaccctactggatttcacaagagcaaccatcttaaaaggttatccactagagcatattcctaatgaagcgaagaaggagaaggagaaggagagagaaggagaaggagaaaggagaagaagagggaagaggaggaaaaaagaagaaggagaaagaggagaaggaaaagcagaagaaggagaagaagaagaagaaaggaagaagaagaagaagatgattagcatttttcatatgaaaggatgtccttctgtacctgcaatttccttgtgttatgtaaatcaccagaaaaccctggctgttcctgggcttatggataaacaggcatataaagaacttgaaatatgttctgagaataatgaaaatgataaggtggtgaaaaatattcataacagtatttgggtcaatagcctctgtggagctcccagtcaacagccatcttcaacccccagaactgtgaaagaagccctcaaaggatccgagcacacagccgtagagtaaaaagttaagttgttttttggagatccttctcttttaatgtaggcatttgtcactgtaaaatttccttgtagtactgcttttgctgtatcccataagttattgtatattgtatgcttattttcatttgtctcaaggtattttctgatttccctttgatttcttctttgacatattggttattttaaaaactgttgtttcatttccacatttttgtgatttttttttcaatttttcttcagctattgatttctagtttcatttcattgtggttggaaaatatactttgtgtgacttgaagtttcttaaatttgttaagacttgttttatgacctagcttgatctatcttggagaattttctgtgtgcactttagaaaaatgtatattctacattgttgggttaaatggtccataaatatctattaggtccacttttgtctactgtgttgttcaatcattgttcctttgttgcttttctgtctgcttgttctatttattattgaaagtggggtattaaagtctcttaatatcattgtattgctgtctattttacccttcaggtctgtcagtgtttgctttatctatttaggtgctctgattttgtagcatatatatttataattgttatacctttccggtggattaattcttttattactacataatattctctttttctcttgtgacagttttttacttaaagtctgtcttttcttaaataagtaagaccatccctgttcttttttggttatcattcacattggaataactttttccatccctttactttcagtgtatgtgtgtccttaaatctaaagtgagtctcttatagacaacacatagttgattttgttttttgttaatctatttagccactctctgtcttttggttggggagtttaatccatctacatctaaagcaattattgatatggttagttttatgattgctgttttgcttattattttctatttgtcttgtagttcttttgcctctcttttcttcttgccatttttctttgtgttttattgatgtttttgtattgatatactttgattctgttatcatttacttttctgtaacttctacagatattttctttgtggttactatggggcttacctaaaatatcttataatagtctatttgaagtttataacatgtaaacttcaattacatacaaacacttgacacttttactccgtctctatgctttatgttactgatgcagtcatttatagctacttatattgtgtatctattcacatatttttaagttatagtatagtatatattatatagtatatataatagtatatattatatagtatacataatagtatatattatatagtatacataatagtatatattataatatacataattgtatatatcatatagtatacattatagtatatatcatatagtatacattatagtatatatcatatagtatacattatatagtatatatcatatagtatacattatagtatatatcatatagtatacattatagtatatatcatatagtatacgtaatagtatatatcatatagtatacgtaatagtatatatcatatagtatacgtaatagtatatatcatatagtatacgtaatagtatatatcatatagtatacgtaatagtatatatcatatagtatacgtaatagtatatatcatatagtatacgtaatagtatatatcatatagtatacgtaatagtatatatcatatagtatacgtaatagtatatatcatatagtatatattatatagtatatatcatatagtatatattatatagtatatatcatatagtatatattatatagtatatatcatatagtatatattatatagtatatatcatatagtatatataatagtatatatcatatagtatatataatagtatatatcatatagtatatatactatactatattatatatagtatacataatatagttatatattatataatatagtatatatttttcttttaaattatattttagaattaaaagtgatttatccaccaccattacagtaatatagtattttatttgtctatgtatttgcgtttaccaatgagttttacactttcttatgttattgtgtttctgtttagcattctttcaagtcaaagaactccatctagcatttcttataaggcaaatctagtaataacaaattccctcaacctttgtttatctgagaaagtctttacctagtcttcatttttgaaggatagttttgccattatagtattttttgataggaattttaatctttcagcatttttaatgtcatttcatgcccttctgacctgcaaggtttctgctgcaaaaatttactgatagtcttgtaagggttcccttgtgtgcgacaaatcacttttctcctgctgctttcaaaattctttcttagtctttgatttatgtcaatttgaataccttagtgtggatggttttttcttcttaatttttccttatgtgtaatcaaaatgtatcagtgtggatttctttgggttccttgatctggatattcatttccttcctcagatttggaatgtttt

SEQ ID NO: 472329 - DNA, 888 bp, Homo sapiens
aggacagtggctgccagaaactatcaaccccctctgctgcaggtctgctggagtttgatgcaggtctattccagaccctgtttacctggttaccactagtggaggctgcagatcagcaaagattgctgcctgatccttcctctggaagcttcatcccagagcagcacctgccagatgccagcaggagctctcctgtattcggtgtctgttgatccctcctgggaggtgtctcctggagaggagagtaggcattctgcctttagcagagctcgagcactgtgctggaagatttgctgctctcttcagagctggcaggcaggaatgtttaagtctgctgaagctgcacccacagctgccccttcccccaggtgctctgacccagggagatgggagttttatctaaaagcccctgacttgggctgctgcctttctttcagagatgccctgcccagtgaggaggaatctagagaggcagtctggctacagcagctttgcagcactgtggtgggtcttacccagtccgaacttcctggtggctttgtttacactgtgaggggaaaaccacctactcgagcctcagtaatggtggacgcccctccccacaccaagctcgagcatcccaggttgacttcagactgctgtgctggcagtgagaatttcaagccagtagatcttagcttgttgggctctgtgagggtgggatctgctgagcaaatccatttggctccctggcttcagccctttttccaggggagtgaagagttctatcttactggggtaccaggtgccactggggcatgaaaaaaactcctgcagctagctcagtgtctggccaaatggccgcccggttttgtgcttgaaacccagggtcctggtggtgtaggcacc

SEQ ID NO: 472330 - DNA, 746 bp, Homo sapiens
ggataggaaaaataactaagaggccaattagtcctacaatggcctcaatgttttccaataagtctctcaatgtaaataaaaagctagaagtgatgattaaccattgtgaggaaggtatgttgaaagccaaggagctaatgtacttggtgactttaagtggaagccaattctcatttatcattatgaaaatcctagagcccttaggaatctactctgcctgtgctctagaaatgaggcacaacaaagccttgatgacagtatatctgtttacagcatggtttactgaatattttaaacccactgttgagagctactgctcagaagaaaagatacctttcaaaacattactgctcattgccaaagcaccgggtcacccaagaattcttatgaaacagtgtaagctgattaatatgtttatacccattaacaaagcatccattcttcagcccatggatgaaggagtaattttactttcaactcttattatttaagaaatacacttcataaggctatagctgtcacaggcaatgattcctctgatggacttgtgcaaagtaaactgaaaccttctcaaaaagattcaccattctagatgtcactaggaacatttgtgattcatggaaggacgtcaaaatatcaatattaactgaagtttgaaagaagttaatgccaattgtcatggattattttgagagcattcaagatatcattggagggagtaactgcagaccaagagagacagaatt

SEQ ID NO: 472331 - DNA, 3896 bp, Homo sapiens
cctgtctgaggcactgtgcttaggtgtagtttgtgactatgcaaaaagaagcaaatttaccaattatcctgactaatgtgcaggaaatcatgaatctcctcagagatttctgcacatttgaatacttcctcttgcccttgaaatcaaaaagaaatggcagctctagaacaccaataaatcacagcttctcaagaagtagaaatattttggagggctcagaagtagacaggaagatatgggaaagtttagaacttcctagagacttattaaatggttttgaccaaaatgctgatagtgataagaacactgaagtccaggttgaggtgttctcagatggagataaggaacttactgggaacaggaatttcagtgggtctatggaaataaatggatgttcaggcagaagtctgctacatgggtggagccctcatggaggacctctgctagggcaatgcagaggggaaatgcagcttgcacatgtgcttggaaatgttgcaggaactcaacaccagcctgtgaaagcagctgcaggggctgtacactgcagacccacagtggtagagctacccaaggccatgggagcccactacttccatcagtgtgccctgaatgtgagagatgaattctgtccaggaaacttcacatttgaccaaaattgttacaaagttcagctggaagtttccttctttctttgttctttcctcaattccactcgcagccctccccaaggaccctgcgagacaaagttcaaaatggcttccctgtggactgagagcactcacagggcttttcctcctgcttcctctacccctatattttgctcgcatctctaaattcatttgcgcttcagggagagatgtatggaaaaatttgatgctaatgtgaaaaacagtttatcaatgtggaaacagttgtaaattagaaatcagatgacctgaaatcatgtcacctatcggctaaatcaacaagattgtctaaaattttgatattttatggttttttagatataaatatttaatgacaaaacaaaatctcaaccaaaatttctgtagaatatcgctgttatatatagttaactaaatacatttgcactatttgacacatattatctattggacatttgttattttattttttgtcatgaaaactaaaaatacatgagaaaatatagatatttcaatgattaataaactcagagggattttggtgtcttcactcatgatcaaaaagtaacatctatgcatatggacaagattaaaaattcttgaacctgatgtaggttaaatccagaatagcttcaaagaagatttattagtttttaatatgttcataaaatcaaagtattcattatgattttatgcttttaaagacaagcatctttataatttaaatatattatttgattaatgtctatcttttttagtggaattaaagcttcatgacaacagattttatgcctccttcaaaaatcattatcttaggcctatgatgatgtacataataaaatacattaattaaactgataaagtaaaatcacagagaacaatttagttatagaaggccttatattttacagactctaatttactaaaactttactacattaaaatattgcattatgattttatattaccttaatctttctaggaaataaatacacatattttattatgtcatttgataacaacctaggaacttaagactaaatatcatttttcattttaaagttactaaacctgaatttatagatggtaatttttattttccccaggttcatatttggttagtggcaaagtgttgactaacctagaatccttgaatcttttgcactattctaaagtttgcacttgagttaatatggctaaatcaagtgagagaacgaatagaataagaactcagtttgagccgtatattgggaattcccacattgaaaactgacaattagattacttactcaaaatatatataaatttataaaacattcatgatggttattaagtgttatgtggaatttatatagatttacttgattacatgatgaaacccccgtctattactagtttgttaagcattcttatatgaatagctattgattgtaacaaattgctgcttcttcatcttgtgaaatgattatcaaaattctattaatgggatgaataacactatttactttttatataataaaccagactttattccctggaatacatcgaatttagtcatatgttaacatttttatatattgcagaattcatttagttaacattgtatagaattttatgtctatattaatgaataaatttgaccaataaatttctttctttaatatctttaccatgtttatgcgtgttatattcacaaaatattgttttgcaatactaatagcaaataaaatacacttacagataaaagtcattactgggggtaaaagattatctcacaaatgttattgctaattaacaggaaaaatactgtatttctataaatctaaatatataacctgaaaatacattaagcatagtgacagaacaaaaggaaaaagaagcaaattcacaaaataggagatgaaatattgttctcttaataactaacagaaacaggctaaaatttattaactatataaaagagttgaaatatataaaaattgtaaaacatgaaaataaaaatagatgaaaatacaaattatatttatattcatagaacttcactgagctgttatcaggaattttattttctgtatactttacattcataagacattattattgcattatagaagccgtttagatttgtctatacatttatttcttcattactcttcattgttttctgaatatctgtgccattttctgtctcaagactgccatttgttacattgttcagcacagttattttggtgaaaatatctcggattttttcacaaaatttatgcttttaattttcattttcagaaggggagcatgtttgccacaaatagattctacattagcagttattttctgttgatatctacagatgcaattccatagtcttgtggctctgaatttttttctggagaaccgatccagctgtgaatcttatttttgcttactctaataacatatgtgtatcctaccctcatctggttgctcttaaaatttacccattaatgtccagtgtttctgatttgccctaatatgcgttgatttacattcatggtgattttgatttatggaattttttaaacctgtggctttaggcctttttgcaaacattgcttctactgtcttttccttctgtctgtattctcatttttggattcaattataatatgttagatctttttaccatgtttcctacatattttatgttatttttaaatttcccaatcattttttttctctgtgtgtaaaaatattttaaacttttagattaaaaatctacattccaatgtttatactaaatattaaaccagttttgtacatttgtgtttgaacataagtgaagctaaaataggcacagtattcatgcacatgaaagtatgcaagaagcaatgtatttcagtatctgtctaaataaaatattcaataataatttttcaataggttttgtacagcaataaagaactctcaggattctaaaagtcttacagtgaatacctaaaaactagtgtgttgcctgttttatattagtctaaggaatcaaaaaaagtatatttttcaagaagcttgtgaaacgatacaagccagatcaaaactaagtacatattatagagaattcaaatacacaagataggttcataaagccctccaaattggtagtacattggatacaataaatttagtaagctattaacatattaatcatcaaaataaactgaggttaatggggaaatcaaaattttaatacaagagttc

SEQ ID NO: 472332 - DNA, 1053 bp, Homo sapiens
aaccacactaggtcagctgctctcgccatggctgaaaagggccaacatagagcttgggccatggcttcagagggtgcaagcctcaagccttggcagcttccacttggcgttgagcctggcagtgtggaagggaaacatggggtcggagccccacacagagtccctacgggggcactgcctactgaagctgtgagaagaggaccatcatccaccagcgcccagaatggtagatccaccagtagcttgcactgtgcacctggaaaagccacagacactcaatgccagtccatgagagcagtcgggaggagggctgtgccctgcaaagccacaggggtggagctgcccaagaccatgggaacctacctcttgcatcagtatgacctggatgaagtaactaacctgcttttgactttacagactctccggggcatgtcagccccacccatcataggcccagaggcctaagagaaaaaagtgcataaggaagggatatggctgaaatctccaactgtgccatctgtgtttacttcattgattaggttccttatttttaaacatttgtgtgtgtgtgtagcaaggattgtgtgtgtgttatttttattattattatttttgccttcttggtggattggcccttgaacatttatatctgaaaatacagttagtactgaaatctacttttccttatattaatataagccattgcagcttgcttttgattatatgtttgacattgtttcctttttatgtatttttatatttgaagtggattttgtgtagatagtatttatgttttcctcgttttttgtttattttctgtctttctaaatagaatgcaggctcaataaaagcaggaaggttttttcggttttccactagaacagtactttacaatcggtgagcgataaaatacttgctgaataaatataattcaatagcttcttcataaattaaactaattaatattttaaagcatttagaacactgcttggaacataagaagtatttaataatataagcactacaatttaatgtaatggtatctgaaaataa

SEQ ID NO: 472333 - DNA, 655 bp, Homo sapiens
ctcctcaagcgccgccaaattgggagcccaggcagaggaggcacccagagcgagtgagggctcactttgaatatagcatgccactctctcggccagcatggtttgtactcagaaattcactgaaagctgtactgtgactgtgttgaatgtgatatgtgcctttcctcttgttactttgagcattattcatggtgctctctctgacactgtggcaccagcagggctctttaacatggtgtcctcatggttcagagcactgagtatccaccaagatccatacaccattggctgtgatcagtgcccctctctttgttctcaatttatcccagatgtttcagctcttctggtactcccaatgattcccatgggacagaaccagagtgggcttccagtgaagattcccaagccacttcggaaatcaaatgtcaaccactatttccctcatctcattttggcaactgtgggtcctgggaacttttctgtaagtggtataatgccaccttggggaagggatcacgcagtctgaaatgaacatttcccttactggccatggcttcttttaattctgtgggccacgggccccctggaattctggtatattcagactggtattcttgtctctgaattgtttctagttgtattcttgtaaagggag

SEQ ID NO: 472334 - DNA, 760 bp, Homo sapiens
aaaaacaaaaggaaaactttaccatcttgaagggaggtgtggagggagaggcgcgagcgggaaccggggctgcgtgcggcgcttgcgggccagctggagttccgggtggccgtgggcttggtgggccccgcactcggagcagccagccagccctgctggccccgggcaatgaggggcttagcacccaggccagtggctgcggagggtgtactgggtcccccagcagtgccagcccaccagcgctgcgctcaatttctctccgggccttagctgccttcccgcggggcagggctcaggacctgcagcccgctatgcctgagcctcccacccactccatgggctcctgtgaggaccgagcctccccgatgagcaccaccccctgctccgcggtgtccactcccatcgaccacccaagggctgaggaatgcgagcgtacggcgcaggactggcaggcagttccacctgcagcgctggtgcgggatccactaggtgaagccagctgggctcctgagtctggtggggacctcagggattgtaaacgcaccaatcagtgccctgacaaaacaggccactcggctctaccagtcagcaggatgtgggtggggccagataagagaataaaagcaggctgccgagccagcattggcaacctgctcgggtccccttccacactgtggaagctttgttctttcactctttgcaataaatcttgctactgctcactctttgggtccacgctgcttttatgagctgtaacact

SEQ ID NO: 472335 - DNA, 1560 bp, Homo sapiens
gtacatgacgttagcactaaatccttgcctgtgctctagaagggaagctatacatctgtaagctgcaggagtgatgtggcaggatgaagatgtcctcagtgggctgaatgtactgattcagatactggaccctttttccaatccccagtcctctcatattaagcaacaatgtgttgtccgctttcatgctgctgataaagacatatccgagactgggaaatttacaaaagaaagaagtttaactgggcttacagtgccacagggctggggaaacatcacaatcatggcagaaggcaaggaggagcaagtcccatcttatgtgaatggcagcaggcaaaaagacctgcccctgtctacccctcatgagagggagcatgtgagccaacaagtgcaggaactggagcgagtgcttttgggcactggcaggaaaaaaactccatttacttggctcactgttctcaaccccttgtgggaggggacgtataggctatgggtatgggatccaactgaccgcttttgggcgcaggtgggagcaaactccatgcgggcctgcagcagtgtccagtgaatctaagcaacagaggtatagcatatactataacagcagaatgagaataatgtcccaacatccaaactagttcacaggataaaaataagaaagagtgttcaaaaaattaatacacttaaaatgtaagaaataaaagatttttaacaagtataatttggatacatattttagcaaacctaaatgatatgtatgctatgtaaacaaaaaggacaaataaagattgaaaaatgatcaaaacaagaccaggaaagtattaacaagaaacattttttcaaagtctattgtgctttgttaatattagactaaatacattttgaaacaaaaaaaaccttatacactatggtagattgaaaatatctccatgatactttataactcttcacaattggtaacagtttattctcctatccctggaccaaggtcctaacaaaggaggtgacaaaaagtggttggattttgtgctaaatataaagttagagccaatgggaactcattacagattatatgttgtgtgtgaaagaaggatatgagccaaagatgactcaaagatttatgactagaacaattagaaaaatgaaatcgccaataaaggaaaaccaatctaagattagaagtgctaaggaaggaaaaaacaattttagaatatttaaaatgttatctaatataaattatctttaaatattctaatttgcaaataactacagagccaaaaagtaagcataatttataaagcataatagaaaaaaggaaaggaatcatgaaatatatcaattattacctattagaatcaataccaaaagttatttatttaaataaatatgaattacttaaattccctttataaaagatgaagtttctcaaataagcttaaaatatatactatgtacaagaaaaactgacgataaaaatgcacagggagactgaaaatgcataaagtatgtcaaaataaagtaaacaaaaagcagaatattaatattaaagtgagaatccag

SEQ ID NO: 472336 - DNA, 764 bp, Homo sapiens
gacatacaatttacccacgaccagctacccatgtagcatgatctatttattgagggtggtggagctggtaccaaatatatggggaaattattgttctcattcattgattcacaccaaagtcatctcctttaaaaacattcgaagtgaagctgcaaacgctgatgcaggagatatagcaagttatccagaagatttggctaaggttgttgatgaatgtggctacactgaacaacagattttcagtgtagatgaaacagcagtgttttgggagaaattcaagcagaataaaaagacagatggtctagaagaagttagaggcccatttttaaaagtactggctgacaagcaaggatatgacttaagagaccgaaaggcatggttggaagatgcagtgcttatgcttgcttgggacaaagcaatatcatcccaacaagacaagtattggaggaaagcatttccaaaagacatactctatctcagaaaaagatttaatgatgtcaccaattaaagtgtgaatgcccaataagactacacttattgctcttttcccatggtaaatttggatatttaaaaggaatttaaaaagtactctccaatggtcttagtctattctgtgctgctataacagaatacctgtgattgggtaatttataagtaacagaaatttatttctcacagttctggaggctgggaagtccaagatcaagaggatgcatctggtgagcgccttcttgctgcttcagaacattgcagaaaatatcaca

SEQ ID NO: 472337 - DNA, 759 bp, Homo sapiens
agtgcagccttcggtctgtggttgaagacctgagggcccttggcaaaccactggtgcttaccaggaagcatgactaggaggcctcaggaaacttacaatcatgacagaagaagctcagaaactaaaccccaactactttagcaaccagtccaataagccaaaccacaaccttttcagcaacaagtctagggacccaaaccacaactgtggcaataaatggcccagcagtgtgaggacttggtcagcgactgctaacttctctctttttgctccaacttccaacttaggacctgccagccttcaggctgggtccggagtctacatcatcggtcctctggctctcaggcctttgaactacaccacaggcttttctggcctgctggaaaaaactgcagctggcgaggtcacagagcagccaaggcacttcatgatttggggtcaggacatagaaagaaagggtgagggagaagacctcgggctgctgaataaaggagagcaggttgggagacaggcaagtgagagacaggagtttgagagcagtgaattagcagaagacttggaactgaaagaaagggaaagtgaaagtgctggaaataaagttatgtgtgggattttaaccaatcaacatattacaacaaactgaatatagaagcagatataacgaataaactgtttatgattaagctggaagaacttgctttctaggtttgctgcccagctgtcattctggaattgcacagaattcttaatgggaggatg

SEQ ID NO: 472338 - DNA, 743 bp, Homo sapiens
atcaacccatcaaacgaaaaaaacaacaacagcctaaaagacaaggttgatgtggaggagaaaaaaaaggaactatgtacctgtggttcatggtattgatggttctttatagggctccacagttttcagggaggttggtgacagaagtggaagaagaggaggaggtaggaaaagaggcaggggaggcaggcctccttgttgtgcaactaaaagactggcagctggtgttcatcttttctcttccaggtttgagagttagcagctttatagattatggcagtcctaatcataaactccacagtatttgcacaaaaatcttggagaacatcacagacataccgatatgtgatgttactcccggaggcccagctgtaaaattcctctttgaactctttctctttatttctcagaccagccaacacttagggaaaatagaaagaacctacgttgaaatattggggaatggttcccctgataactttgtgtactcccatggtgttaatcagggcttatggtattgcactaagcaggatgaaaaattttatttagagtatgctgcccacgagtcccacgttatagactggctcactgaaagactcaaacacttccttcagtcaaatattcccaactgttatttctaacaattccttgttccttggtagctttattatgttgggcttttgttttcaaattctgcatattgatttataactagctgttatttctagctgtgtgatcttaaa

SEQ ID NO: 472339 - DNA, 833 bp, Homo sapiens
tggcccgccgctgccataaagatgtactgcattttaaatatgtcattccactctctcctggcctggaaggtttccactgagaagtctgctgccagatgtatttcagctcctttaaagagtctcactccatggccactactgctacaggtttatggcacttactactcgactaccactgatgtccacttaaggcctaagggctcttcagacattctggtgaatgctgccaggcctgagtctcccccttcagggaagtggactcccatctggcccagggtaggtccagaaatgccatccaggacccaagcctggaattgggaatcccaggagcctggctggtgctctataccccgtggctgtgctggtgcccaagctgcagagcaaagtcccctttactcttccctctcctttcctcaaacagaatgcatctctccctttggctatcatagctgataatgatgcactggatcatacctgaatccagcattatcctgagtctcacccaaggcctgtggtgataactgcctgggtaccactgatatttactcatggtccaagggctctttagtcagcaggtgatgaatcctgccaggacttggtccttcttttcaaggcagtgggttcccttctgacccaggtcaaataaagatattcaaaacatgctcatctttttaatattaatagctatcatttatcaaattaaagggcattttatggttcaggcactatctaagtaccttaaatgcaataactcatcataacagtcttacaaagcacatcattagccctattttataaataaaagacccaaaggattatgttctgattgtttt

SEQ ID NO: 472340 - DNA, 901 bp, Homo sapiens
ccctcaaacatccaagctgtttgaacaactggaaaaggtcccatggagcccacattcatctgcttaactctaaagtcccagctctcttctctacctggagctctttgctgcctctatggtagctgaacaggagaaacacccaggaagatggtcaccacgctgccccagagcccaggggaccagggggctgctgacggccataatcagggtattcttcctgaaacagtgaagaacaagcttctgccagcaggagttcctgggatgatgccgggcttcccctgcaaccccagtatggaagcagtcactctggaccctagtaaaggagctggtgtagttaagagtttagagggtccttgcaaggtcacagccctgggtggccacccagtgtccctgctggacagcaggactccccgctgcccctcacagctgcatcatcatgtctgcaattcgcagatgttcacaatgatctttggaagaaactgccttcctcagagccaagttctaaccacaccagggatttactctccttatttagaactcctaactcacttttttgggaaccgtccaaatggcattagctacttcagttgataaactttgccttttgactgtttccaaaatatgaccccctcctttaaaagatgaatggccttccctggggatttcttagacaagaggttctgaaggcatttctaagagatactttaagccagtggttctccactttggctgactgaatcactgggaccagaaatttatgtatttggtgctgcactcagatggtattaggtacttccctgcacattaggaaaatctgtaagagcttcattgtatagatgaagaaatggaggctgatagtgaacaggtgccttgcccgagaccttagggtgagaagtgccaa

SEQ ID NO: 472341 - DNA, 1286 bp, Homo sapiens
cttctgccgaatatggattcccaggtcctaaagaaggccctaacccaagccccagtgttaagcttgctaatggggcaagacttttctttatatgtcacaggaaaaacagaaatagctctaggagtccttacacaggtccgagggacgagcttgcaacccatggcatacctgagtaaggaaactgatgtagtggcaaaggaggtctccttgactgatcccaacctcaacttgtatactgatggaagttccttcgtagaaaaaggacttcgaaaagcagggtatgcagtggtcagtgataatggaatacttgaaagtaatctcctcactccaggaactagtgctcagctggcagaactaatagccctcactcgggcactagaattaggagaaggaaaaagggtaaatatatatacagacttgccccctatgaccatctacactgagcaagatttatacaattatgttgtacctaagccccgaaacaaaagagtacccattcttccttttgttatcggagcaggagtgctaggcggactaggtactcgcattggcggtatcacaacccctactcagttctacaaactatttcaagaactaaatggtgacatggaatgggtcactgacttcctggtcaccttgcaagaccaacttaactccctagcaacagtagtccttcaaaatcgaagagctttagactttaggctaatcgccaaaagagggggaacctgtttatttttaggggaagaatgctgttattatgttaatcaatccagaatcgtcaccgagaaagttaaagaaattcgagattgcatacaacatagagcagaggagcttcaaaacactggaccctggggcctcctcagccaatggatgccctggattctccccttcttaggacctctagcagctataatattgttactcctctttggaccctgtatctttaacctccttgttaagcttgtctcttccagaatcgaagctgtgaagctacaaatcattcttcaaatggagccccagaggcagtccataactaaaatctaccgtggatccctggaccagcctgctagcccatgctctgatgttgatgacattgaaggcacccctcctgaggaaatctcaactgcatgacccctactatgccccagttcagcaggaagcagttagagcggtcatcggccaacctctcaacagggttttcctgttgagagagggtactgagagacaggactacctggatttcctaggctgactaagaatccctaagcctagctaggaaggtgacc

SEQ ID NO: 472342 - DNA, 711 bp, Homo sapiens
ggtcagcagcctcaaagactgaaggtggataagcttacaaagatgagaaagaagcaaaacaaaattgctgaaaactcaaaaagccagagtgcctcttctccaaatgactgcaatacctctccagctgagatggatgaactgacagaagtaggcttcagaagcaagacaggccaacattcaaattcaggaaatccagagaactccagtaaaatactccatgagaagatcaaccccaagacacattatcgtcagattctccaaggtcgaaataaaggaaaaaatgttaaaggcagccagagagaaaagccaggtcacctacaagggaagcccatcagactaacagtggacctctcagcagaaaccctacatgccagaagagattgggggccaatattcaacattcttaaagaaaagaatttccaacccagaatttcgtatctttccaaactaggcttcctaagtgaaggtgaaataaaatctttttcagacaagcaaatactgagggaatttgtcaccagcaggcctgccttgccaaagctcctgaaggaaccactaaaaatgaaaaggaaaaaccattaccagccactaaaaaaacgggatacactgaagtacacagaccaatgacactacgaagcaactccattaacaagtctgcaaaataaccagatagcatcatgatgacgggatcaaattcacatataacaatattaa

SEQ ID NO: 472343 - DNA, 691 bp, Homo sapiens
acaaccactgaatggtcttggaagcagatcctacctcaatcaaatcttgagatgactgcggctctagcaggtatcttgggtaaggccttcatctgccttggccaggcctgtggatgtgaagatgtcaagaaccagaatgcttggtttggaacacggaatgcttacttcacacccattttctcttcacttaattcctatttatcctttgaagctcatctgttacatgctacctcttcaaggaagctttccatgactcttaaagtagatcaggcccagttggctcctaatggttcctggaccctggaagaccacattctaggtgagccagctgcaatggcagccccacatggcaaggaccatgacatggatcttgttactgggtacagtgggagtatagcagaggggaggtggaaagacgtcatagatgaaatgatcaaggcaccagcagatttggtgtctggtgagggctgctctctgcctccaagatggcaacatgttgctgcgtcctctggagggcaggaacaccgtgtcctcacatggtagaagggacaggaagggtaacttgccccctcaagcccttttacaaggcactaattcatccatgacagcagagctgtcatggtctatcaccaccaaaaggtcctacctcttaatactgttatattgggggttaagttgcaacatgaatttt

SEQ ID NO: 472344 - DNA, 565 bp, Homo sapiens
gattccacttctgagtatatacctcagagaaactctcacactatgatgtcagctgtgggtttttcacgtatggcctttattatgttgagagccaaaccacatcaagggctgattctgtctgtctttggggccccaggtggcaaatgtgggcagcagtgtcagtgggtccaggtaggtcaatccttggacctccagatgccagcagtgacagcagtgggccaggaaggtgggcagatgtttgggcccctgggcaacatatatggtgtgggcgatgagagtacccagaaggtggcccagtggtggacctaccttcggactcccaggcagcacacactggtggtggtggctgcagcaggctggctattccaggacccaggcccccaggtggcacatccaggaagtttgctaggctctgataaaaacctcagcaggttaggctctggtaaaattgtttctctgaaggacaggtcttattaagaagaacatgtatacatatacaccataaaatataaacatatatcagaagataggaacatataaaataggaacaaatatatcacaaaat

SEQ ID NO: 472345 - DNA, 864 bp, Homo sapiens
gccaactcagagaggtgaagtgatttgcccaaggtcaaagccagcgagcgaggctggcaagaggacaggaacccacatctgccccaggcgtgcctgctcttctggagggcgtgctgtctcttccatagcacttcccagctgccctgaccaccctctggtcaccctaccccagaggcaggcctgagctggcctcatgatccctgatctataccggctcctgcccccaggcatccccccgcctgctgccctaaagcttttacaccagaagttgctccaagaacagcagcttagcctgcatgttccctgcaggtcccataggctagcaaaatacttgaggcaatgggaagaattcagagtttggagtcagaagaagctagaattctgtttggttgccaagaccagttgcttttcctgccattctatgcttccaatccaccccctgcccttctggggcactgccaggggtggaacacagacctctcctggacccatgcagcagccatcgctagacagtccacttttaacgccaaccgcccccgctttgccatttatgcttcctgctgccaggcctttgcctcgcggctctcccctcgatgggtccaaatcttcccattgatcaagacctgttgcaaatgccaccttgtcagcctttgggtgtgggaggttgtcttggtggccaatgcccaaagcaggctgggggatgcgggagaaggctgcagctgctgtcccactgagggggagcagatggtgaacggagtttcttcaccgcctcttcctggtgaggccacagggccctgagatgacatcgctgagcaaacagccaggcacgccccctgcccactccccagctgccccctggagcat

SEQ ID NO: 472346 - DNA, 885 bp, Homo sapiens
gagccacatgtggctgatgaccaccattctgggcagtgccactctagattgtgaggttcttgagggccttatccaatcgtgcattatcctagcacccaggataatacctggcatgtaccagatactcagcagtggagttctgggaagacctcttggaggaggcgaccacaggatgagtaaagtggcccagagaagtgatgccacccaacaagccggtagtagcactgactccaaagcccaggttcattccattgtccgcctgcgtctctccggtggagactcgatagggcagaactatggagctgcaaatccatctgttgtcggcagccatacttatttcaatacacaaagatttgacctcacttcttacaaccttgctcctcactctctggctggctcctgcttggcaaccagagaggccttctctcgccaccccatctacagcagctgcccttgcctgcacatgacccttcacctattcctttcttcacagaacaatgtggacgcaggaaagggcacaggaccaacctctggtcccaaagcctgactccttcataactcatacctcgtctcccagccaggtttctgaatctcattcaccatgctgcccagggaccaaggaagaagtacccagagacacagactgaaaaccaggaagttggatgggacttagagcccttgatcaacccagaacgccatgaccgcaggctgaatcacttcagggtctgcagtgacatcactctgtacaaggctaaaacgtggggcttaggagatgatcaccacaagtagcatcccagcggatgagcccatctgtggatctaatgccttaagtgtgcacagcccagagaaataaaatactactttaaaacgaagtttcacttttct

SEQ ID NO: 472347 - DNA, 1876 bp, Homo sapiens
tggtgcaaaatgagggcttgagaaatgtttgtcttaagaacagaaaaagagaagcaggatgtttatcaccatgagcacatagaagacctcctagacaagcaaagccgggaactgcaggacatggaatgttgcaacaaccaaaagttgcttctagaatatgagaagtaccaggagctgcagctcaagtcccagaggatgcaggaagagtatgaaaaacagctccgggataacgatgagaccaagagccaggccctggaggagctgactgagttttacgaggcaaaactgcaggagaaaaccacccttctggaagaggaagacgtcaggcagcagctgcgggagtttgaagagaccaagaagcagattgaggaagatgaagaccgagaaatccaagatatcaaaaccaagtatgagaaaaagcttcgggatgaaaaggaatcaaacctgcggctcaagggagaaacaggcatcatgaggaagaagttcagcagcctacagaaggagattgaagaacgaaccaatgacatcgagaccctaaaaggagagcagatgaagctgcaaggagtcattaagtctctggagaaggacatccaaggcctcaagcgagagatccaggaaagagacgagactattcaagacaaggagaagcgaatttatgatctgaaaaagaaaaatcaagaactagggaaattcaagtttgtgcttgactacaaaataaaggagctgaagaagcaaatagaacctcgagagaatgagatcagggtgatgaaggaacagattcaggagatggaagctgaactggagaatttccataagcagaacactcaactggagctgaacatcacagaattgtggcagaaactgagagccaccgatcaggagatgcgcagagagagacagaaggagcgagacttggaagcgctggtcaaaaggtttaaaacagacctccacaactgcgtagcctatattcaggaaccgcggctgctgaaggagaaggttcgaggtctctttgagaagtacgtgcagcgagcagacatggtggagatcgcagggctgaacacagacctgcagcaggagtacacccggcagcgggagcacctggagaggaacctggccactctcaagaagaaggtggtcaaggagggcgagctgcaccgcacagactacgtccgcatcatgcaggaaaatgtctctctgatcaaggaaattaatgagctccgcagggagctgaagttcactcggtcccaagtctatgaccttgaagcagctctgaaactgaccaagaaagtccgaccacaagaagtttcagagacaggtcccatctacacatggccttctgggatcctgtccggggcacacacctgctctttgaggaatccatgagggccttcccacactccgacacacacaggtccacagtcccctggctgacatccttgaggttagctaccgttcagaatgcagactcttttagattttagaaagcgaatactttatataacattcccagaggggtctggggcagtgccctaaaatcaaacactttagtatttctgtagtgacatatgaatattcacactaagcttcctgaatttaaaaaagcactctgtttttagatcttcttgcattttagaatagtgaataagggattgtgaacctgtacaattaaaatgaagacaaaaagcaagatgaggagctatttaaaggaagaggggaaataattacataaatattaaatgagtcagttactgcaattatatcctaaagttcctctgaatttctgacggccaaggcaaaaagagaaacaaagaaatatgatcgtttatatcatgctcattgtatggcaaaagggagctttttttctggagaaacaaac

SEQ ID NO: 472348 - DNA, 598 bp, Homo sapiens
cattttgacatatggaggtggggttgagactctgggtggcaagaagacatggactcagcctgcctgcacccaggtgaaataaacagccatgttgctcacacaaagcctctttggtggtctcttcacacagacgcgcatgaaatttggtgccgtgactcggatcgggggacctcccttaggagatcaatcccctgtcctcctgttctttgctctgtgagaaagatccacctacaacctcaggtcctcagaccaaccagcccaagaaacatctcaccaatttcaaatccgagacaaaggagacacgttttatccgtggacccaaaactccagcgccggtcgcggactgggaaggcagccttcccctggtgtttaatcattgcagggacacctctctgattattcatccatgcttcagaggtgtcagaccacgcagggatgcctgccttggtccttcacccttagtggcaagtcccacttttctgggggaggggcaagtaccccaaccccttctgtgtctctaccccttctcggcctttctgggaggcaagaaacccccaaccccttctcctttacccttagtggcaagtcccacttttct

SEQ ID NO: 472349 - DNA, 784 bp, Homo sapiens
taaaccttgcaaacattcaaagcctgtcatatctgcaaagatatgagggatctaggagtcagggtcatgctggcatatccgaccaaaagcaaaagacaaacagctgctgtttgcttctgccaccataaagaaggaagcccaatgccacttaggcctctttgggttctggaggcacacattccacacctagagacaccactgcagtccttccattgggtgacatgcaaagctcccagctctgagtgggacctggagcaggaaagggctctgcagcagatccggactgcacggcaaacagccctgacacttgggccatacactccggcagaacttggtgttggaaatgtcagtgtggaaacagatgggtacagcaaccccaaggacgcgattgccaggaatgagggtttgggttacatcgttcgacctgccaagagaggtccactgggagcccgaggagtacatgctgtggtgccagtggactgcgggagccacgagatacactactcggacctcccttcagtgaagaacttgccactcagctgtggaggtccctggagaaagatggagcttcttgttctgtgagtttcactcatagctccagctctggagttacagggacttgggtttgaatcctcattctgttactttctgtctgtagtggttttgagaatccactccaatgtgttttaaaatgtgcccttaaaatgtgtttgtctttataaaatatgcatttggttaacaatcagttgcacaagtgcttcttgtttatacctcaccatgatgt

SEQ ID NO: 472350 - DNA, 599 bp, Homo sapiens
tcctcacaggattcctgacttattcctgcagtcgttctggagctaaaactcaccatgcaagcctccacatgctgctctgtccatcagaagcgagagatgaccttatcacagacctactaaatgaagcaaaacagagactcagcaaggtggtaaaagatacaaccaggtaccaagtgctgctagatggactggttctccagggtttgtaccagttgctggagcaccgaatgattgttcgttgcaggaaacaagaccttcctctggtaaaggctgcggtgcaaaaggcaatccctatgtacaaaattgccaccaaaaacaatgttgatgtccaaatcgaccaggagtcctacctgcctgaggacatagctggtggagttgagatctataatggtaatcataaaataaaggtttccaaaaccccagaaagccagctggatctcatagcccagcagatgatgctagaagtccagggagccttctttggtgcaaaagccaacaggaaatttttggactaagccttcaggaggtagagcacgttctcagctctcctgctatgatgtggaagattctgatatttgaagaaacgcgaatgtttctgt

SEQ ID NO: 472351 - DNA, 569 bp, Homo sapiens
tccaggtctagaagtaaagcattcatgagcatctcaaaggcctaccttgcatgcttttccaatcacaaactgcccctcctccttaaagatgaagaaaccaaaggcacagaagagttaagcaacttgcataagcaaacaggtctccttaaagtcggggagtaccaggagatcatcaggatggggctgatggagacatcagaaaacagtgaagcaaggccagtagacctggagattgcagcaacagttcccaagagctggggcttcctcacagctgtgtgtgtttgcatcttctggtcccaagagcagccactgctcaggtgttcctggaagacgttagcatcagaatatacgtatgcaaaattaagaagatcagccctcaccaatgagggcttagatgccatctttctctggaaggaaagatgtggaggagggcctggtttagatgaaatgacctgggaaagcatcttaaacaaagcaattcccataacagaatttctcttctccatcaccccataacctattttgccaggatggtacataagtttctgaatcccgttggggtggggaga

SEQ ID NO: 472352 - DNA, 918 bp, Homo sapiens
gcttgcctctttttttgaaaaacccagctggacaatgggcatattcaatggccaaggcctcctctaattgctggcttgggaagaactggagataactcagcaatggagagacaaggagggctcctagggaacaacttggagaccgaggaatcttgctgaatgccagcagaaaatctggaagcagagccagtataattcagcattactgagcccactgagctctccagggaagtataaattgagcacagaagctctgaaatggattctgttgggtacaccccccagacggggtggcggccgggcagaggggctcctcacttcccagacggggcggccgggcagaggcgcccccccacctcccagatggggcggcggctgggcaggggctgccccccacctcccggatggggtggctggccgggcaggtctttttttttttttgagacagtctctctgtcaccccgcctggagtgcagccagtagaggggtggcatgttcactgtatgactctggaagcctgctgtgaggaggagggatggacaggaacagaaaggaatacctcagtgccctttctttctgccttcccatcaagacagtacaacgcctatggaaaaagaaaacaacaacaaaacctcaaccagtatctaggacagagctatgaggacttagattatgggggcagggaggtaggtggcagcagccttagtcaaggaaattcaggggtcaccatttcagccagaagtcaatttaactttgaatatccaagtttggatgcttcctacaaacgggtaaccggaaaggaagctctggaacttcagagagagtttaggcctgcagatatagaatcgagcatctggccagagtttgggaaagtaatagaagccatggatatggccatatttcacaggaaatgaacat

SEQ ID NO: 472353 - DNA, 607 bp, Homo sapiens
agaagcccctgctcaggatgagaatgagggagggagagagccagctaaacttgttgaatggctttgcccaaaatgctgatagcaatatggacaataaagtccaagctgaggtggtctcagatggagatgaggaacttgttgtgaatggctttgcccaaaatgctgatagcgatatgaacaataaagtacaggctgaggtggtctcagatggacatgaggaacttgggaactggagcaaaggtgactcctgttatgttttagtaaagagactggtggcatttttcccttgccctagagatttgtggaactttgaacttgagagaaatgatttaggctatctggcggaagaggtttccaggcagaaaagcattcaagaggcgacctgggtgctgtttaaggcattcagttttatgagagaagcagagcacaaagagcataaagcagagtggaaaatttgcagcctgacaatgtgacagaaaagcaaagcccattttctgaggagaaattcaagctggctgtagaaatttgcataagtaacagggagccgaatgttcatccccaagacaatggggaaaatgtctccaaggcatgtcagaggttttcatgt

SEQ ID NO: 472354 - DNA, 721 bp, Homo sapiens
agaacgagtttttcattggtcctaatatggcttcagaaccggccaatcaagtcaagagtcggtgttgttacgtacgcattgctgaaaacgcaaggtccgcacacggaccaatggaaatgaacgactttcggagccctaatttgcataagaaagccgtcaccaaagcccagaaaaaagacggcaagaagcgcaagcgcagccgcaaagagagctactccatctacgtgtacaaggtgctgaagcaggtccaccccgacaccggcatctcgtccaaggccatgggcatcatgaactccttcgtcaacgacatcttcgagcgcatcgcgggagaggcttcccgcctggcgcactacaacaagcgctccaccatcacatcccgcgagatccagacggccgtgcgcctgctgctgcccggcgagctggccaagcacgccgtgtccgagggcaccaaggcggtcaccaagtacaccagctccaagtgagtccctgccgggacctggcgctcgctcgctcgagtcgccggctgcttgactccaaaggctcttttcagagccacccacctaatcactagaaaagagcttgttcacttattcccttagtttcttttcataaagtaagttattttagtgtgaaggtcatgggaaatggcatacgtagctttttaactatttggaactcgaggtccccagtgcgtcattggatttgcttttgaatctagagc

SEQ ID NO: 472355 - DNA, 3095 bp, Homo sapiens
taagtgattgctttttaatgaccttgtcacctgagctaggaaggcctggggatctgggtggaccccaaagtcaaagctcctctctttccttttccttcctaggcactcattggctaggacctgtttgctcttttttttgtgcccagagatactggaacacgcttcatctaagtaactgtggggaggggtctttttgactctacaagtccttgagcaaaaagctgaaaaagaagcaggaggtggagaagacccagtgaagtgccccaagccccatcatggaagagggcttccgagaccgggcagctttcatccgtggggccaaagacattgctaaggaagtcaaaaagcatgcggccaagaaggtggtgaagggcctggacagagtccaggacgaatattcccgaagatcgtactcccgctttgaggaggaggatgatgatgatgacttccctgctcccagtgatggttattaccgaggagaagggacccatgatgaggaggaaggtggtgcatccagtgatgctactgagggccatgacgaggatgatgagatctatgaaggggaatatcagggcattccccgggcagagtctgggggcaaaggcgagcggatggcagatggggcgcccctggctggagtaagggggggcttgagtgatggggagggtccccctgggggccggggggaggcacaacgacggaaagaacgagaagaactggcccaacagtatgaagccatcctacgggagtgtggccacggccgcttccagtggacactgtattttgtgcttggtctggcgctgatggctgacggtgtggaggtctttgtggtgggcttcgtgctgcccagcgctgagaaagacatgtgcctgtccgactccaacaaaggcatgctaggcctcatcgtctacctgggcatgatggtgggagccttcctctggggaggtctggctgaccggctgggtcggaggcagtgtctgctcatctcgctctcagtcaacagcgtcttcgccttcttctcatcttttgtccagggttacggcactttcctcttctgccgcctactttctggggttgggattggagggtccatccccattgtcttctcctatttctccgagtttctggcccaggagaaacgaggggagcatttgagctggctctgcatgttttggatgattggtggcgtgtacgcagctgctatggcctgggccatcatcccccactatgggtggagttttcagatgggttctgcctaccagttccacagctggagggtcttcgtcctcgtctgcgcctttccttctgtgtttgccattggggctctgaccacgcagcctgagagcccccgtttcttcctagagaatggaaagcatgatgaggcctggatggtgctgaagcaggtccatgataccaacatgcgagccaaaggacatcctgagcgagtgttctcagtaacccacattaagacgattcatcaggaggatgaattgattgagatccagtcggacacagggacctggtaccagcgctggggggtccgggccttgagcctaggggggcaggtttgggggaattttctctcctgttttggtcccgaatatcggcgcatcactctgatgatgatgggtgtgtggttcaccatgtcattcagctactatggcctgaccgtctggtttcctgacatgatccgccatctccaggcagtggactacgcatcccgcaccaaagtgttccccggggagcgcgtagagcatgtaacttttaacttcacgttggagaatcagatccaccgaggcgggcagtacttcaatgacaagttcattgggctgcggctcaagtcagtgtcctttgaggattccctgtttgaagagtgttattttgaggatgtcacatccagcaacacgtttttccgcaactgcacattcatcaacactgtgttctataacactgacctgttcgagtacaagtttgtgaacagccgtctgataaacagtacattcctgcacaacaaggagggctgcccgctagacgtgacagggacgggcgaaggtgcctacatggtatactttgtgagcttcctggggacactggcagtgcttcctgggaatatcgtgtctgccctgctcatggacaagatcggcaggctcagaatgcttgctggctccagcgtgatgtcctgtgtctcctgcttcttcctgtcttttgggaacagtgagtcggccatgatcgctctgctctgcctttttggcggggtcagcattgcatcctggaatgcgctggacgtgttgactgttgaactctacccctcagacaagaggaccacagcttttggcttcctgaatgccctgtgtaagctggcagctgtgctggggatcagcatcttcacatccttcgtgggaatcaccaaggctgcacccatcctctttgcctcagctgcccttgcccttggcagctctctggccctgaagctgcctgagacccgggggcaggtgctgcagtgaaggggtctctagggctttgggattggcaggcacactgtgagaccaacaactccttccttcccctccctgccctgccatcctgacctccagagccctcactccccactccccgtgtttggtgtcttagctgtgtgtgcgtgtgcgtgtgcatgtgtgtaaaccccgtgggcagggactacagggaaggctccttcatcccagttttgagatgaagctgtactccccatttcccactgcccttgactttgcacaagagaaggctgagccccatccttctccccctgttagagaggggcccttgcttccctgttccaggggttccagaataggcttcctgccttccccatcattccctctgcctaggccctggtgaaaccacagatgacttgtaagtcagggttctaccctcactctggattgatctctgttcctccagtctcccatgccaactcacttacacatcactgccagatccatctgcccccagatgctctctggcatgtctgtactcaaaatttgtcaatgactccctactgcccaaccacatgcaccttaaattctttagctagaaatggtcaagatatatgttaa

SEQ ID NO: 472356 - DNA, 1893 bp, Homo sapiens
gcagatactatgaggaactgctaaactacagccgagatcatctcatgctgtacccttaccgtctattggatattatggtgaagagcttgagcataacaccattttcatattacactgggattatggagaatattatgaacagtgggcacaattttactgctgctgactgtctaaggcttcttggcataggaagaaaccagtatattgatcttatgattcagtgtagatcatcaaaaaaattcttcagaaggaaaacagccggtgatcttctaccaataaagccagtggaaattgccatagaggcatggtgggtggtgcaggctggatatatcacagaagatgacatcaagatatgcacttggcctgagaaatgtgctactgataagaccaagatgctcttgtcatggggtggaggggaaagtaggaggcctgtacaagaagcttcatcggcaactgacactgatacaaatagtcaagaagatccagctgacacagccagtgtaagaagcctgagtctgtctgcaggacacacgaagcacatcgcattcctgtttgactccactcttactgccttcttaaagatgggaaatctttcaccagttcagagcactggtgaaagagaagcacagagatattttgatcatgcgcttactctgagaaacacaatactgtttctgcgtcataacaaagatctagttgtgcaaactgcacagccagaccaacccaattatggttttcctctggatctcttacgctgtgaaagccttcttggtctggaccctgcaactggcagcagagttctaaacaaaaattacacactgcttgtttccatggctcccctcaccaatgaaatccggcctgtcagcagctgcacccctcagcatattggaccagctatcccagaagtcagctctgtctggtttaaacagtacatttacgtttatcatatcactggacaaggaccaccatcccttttattatccaaaggtacaagacctcgaaaactgccagatatatttcagagttatgatcgattgctaataacatcttggtgtcatgatcctggagtagttcctacctcaaatgtgctcacgatgttgaatgatgctttaacacattctgcagttttaattcagaggcatggtctgcatgggataggagaaactgtccatgtcccatttccatttgatgaaacagaactacaaggagagttcactcgtgtcaatatgggtgttcataaagcattgcagatactaaggaacagagtggacttacaacatctctgtggatatgtcaccatgttgaatgcttccagccaacttgcaaatagaaaactcagtgatgcttctgatgagagaggaaaacctgatttggcttctggctcagatgttaaatgggagtacagagtcatttgaaatggtcattgaagaagcaactatagattcagcaacaaagcaaacctctggtgccacaacagaagcagattgggttcctctcgagctgtgctttggaattccactgttcagttccgaattaaaccggaaagtttataggaaaattgctacacatggcctttgcagaaaagagagccttcaaaacctcttacattccagtagaaaactctctctgcaagtccttaactttgttcactcattccaggaaggtgcttcaacattggatattcacacagagcccagtttttcaagtttgctttcacagtcatcgtatgctgacatgggtgttccacttcctgcaaaaaatttaatatttaaagatggtgtcttatcagaacggagtggatggtcaccttcctcacttattgctaatctccatttgcaataatttggttacaccatttgctgctcacactttctgccttttttctttcttaac

SEQ ID NO: 472357 - DNA, 622 bp, Homo sapiens
cctatactcagggctgacagacagctggtattcaccatggcaggggctactgtgactgggtctgctcggattggttggtgctgtgctgtgagatggaaaccaattcttcaggtattacccagaggagttggaatgttagatgtgtggtccaactctttctctccccagagagaatatgggaactggaggttttttgcctacttactctgtgctgggctaggggtagagcctgtggtaagtgcttatatgctagttgaaaccaccttttttatactcaatggccctaggcatttacaatgtgccagtgcacaaaaccaggcaagacaaaaaccagtccctggggaaatacctagaaaagatggcacaccacaagctcctgtgggtcagttacacaagctgacccattatttgaagaaagactgcaaagattcggagcaattttccttgggaaaaatgtcatcagagtgatattcagtaagtgtatttcaaagtaaaaattatatttgtaatgcatacttaaacttttatgacacatgtgaaggattgtttggaccattctgaaacttttgtgagtccatgtaaattttaagattattttttctatttgtgaagaaggtcactg

SEQ ID NO: 472358 - DNA, 656 bp, Homo sapiens
tcacccatcttctgcatcagtcatgctgggagctgcagacaggagctgttcctatttggccatcttggaatggagtgtgttgctaggaactcgattgaggaccagaggtccagtcacaagtaccaaccaagccgctagccagctgcttcaggaaaaccaccctcttgctcctgtggtgtccaatgaggatgatcagaatggtcctgggggtgatgctggctcgcagttttctcacgtgccaactgaagggtattttgccatggctcaacagcttttgaggcacgtcttcatggctgagtacttcctcttgtacgtggcctttctagaatacatagcagatcaggaatatgtgccaattcttctgacaagggcaggatttcagctgcaacggggcttccccttcttgggctttttagccctgaggttacccctttccactttgccaccagcattagcctttttggcttcgggcttcttctctttggttcttcttttgccttggaatatcggggaaagtcccaagagtgttctgcatccttgctccttgatctcatctttacgtgaagaagactgtacagcagaagcagcagcagattcagggtggggctgagggtggggaaagtgggtgctgttcttgtttgtgtgatttgaaaaaa

SEQ ID NO: 472359 - DNA, 594 bp, Homo sapiens
ccgtccaaggaggaaaactagtctgggaagtccatgatcaaggtgtcggtaggttccatgtatgctcattggaccgagagcctcagctcccctttgactgttcgctgccctcagttcattgctatattgtcctctccagcatggcagcttgcttcatccagcccagtgagaaagaggaaacgtaaaatcaagatggaaatgaattgtgtgttggactttccaattgaactttcaacccaacagttcctggaaatttctcttaccaaattacttatgatgttgtcaaaatcaataatcaattattttcctattgcatttgatgcgtcagcagcatccaatagtgggatcttactccttggaggccgtgtgggccatgaggttcaccactttgttgctataaccaaattcattgtcataccagaaaatgagcttgagaaagtggtcactgagggcaatgacagccccaggatcaaaggtggaagagtgggtgtcaatggttaagctgaagtagacaacctagtgctcagtgtagcacaggatgcccttgaggggatcctctgatgtctgcttcaccaccttcttgatgttatattt

SEQ ID NO: 472360 - DNA, 616 bp, Homo sapiens
tttcagtccatcctacgacatgctgccaaggggtggccccgggtgatcctgtgtgtgcccatcatgtctttccaggtgtatcttccatttctccctggcgtggtgctctctggtctggtctcattgttccctaaaagtaccctgcagagccacccaggtggagaaaaaggacccaaaagtaccttccaggttaggcttccttgtttttccctccaagcctttccgcccccgtatggtgcatccttgagatggctgactgatcaggcctcctcgcctctttcgctgatcacccctcactgcctgttggagatatgtcctcttccttcctttgcctgtgaaaactgccctggtggtttctcagacccctcagctgcaggtctgttggagtttgctggatatccactccagaccctgtttggctgggtatcaatagtggaggctgcagagcagcaagtattgccacctgatccttcttctggaagctttgtcccagaggggcacccacctgtttaaggtgtctgtcagcccctactgggaggtgttttccagtcaggctacatgggggtcatggacctgctagaagaggcagtctgtctgttctcggatctggaatgcc

SEQ ID NO: 472361 - DNA, 590 bp, Homo sapiens
catcatgagatgaaggacatttcatttacaagaaccgtggaagaaccagggaagccagaaggccaggcagggctgacccccaagagagaagcagttacagtagaagactgcaacttccagggagctgtacagagcagagatgcgcacacgtttaaagcaggacccctgagcatgaggggtgcagtggggatgcagctaacagctgacagcagaagcatccctgattggcctgaccaccaaggaggcactgtgggaagagaaggactgacacagccatggaaccagacccagatcaagaagcagaacctggacagcaccccagaagctgcctttgtgcccatttccactcttgatccttccccccgaggaggcaaccactatcctgactcagcacaaccaaagaaaccattcatgaataagtcagcaccctgaattagtaaagatttagagatctccaatagaaatattggactgtcagtatttagagacaaaaatagcttgattggttacagctggcatttgccttacaggaacatgttttggcaatttgcagcctgcgattgactgaaagcatggctgctatgattggt

SEQ ID NO: 472362 - DNA, 477 bp, Homo sapiens
acaccgagcacaatcctcatcttacccactcctccagtgggggatgctgagatttctcccaggatgcagcaaatccctttccttagactggcccttgccttacaccattcatgccccaggatccctctctgtgggacattggaggaaaatgagtctgttctgaagaagtcctcttatggttcccccttccccactgctcagctcgcgctgctccttgagagtttggatgatgacaggcaggcattgcccatttcccctgaggcttctatcccaacttgtccttattccccccttctttggttttcatttaccaatggcttgtcctttgtgagttgttctcatcccctaaacctgctgactttctttctttcatctgttccctcagttctgggcttccagtgtgtggactcagctcaggctcctgcaggagacacacagagtcaggtctcagctgcaggtcctgggtggcattaaaaa
